United States Patent Application Publication US 2025/0018062 A1 - sequence listing, part 11

SEQ ID NO: 18125 - DNA, 3705 bp, synthetic construct
  misc_feature 1..3705: note = source = /note="Description of Artificial Sequence: Synthetic coding sequence"
  source 1..3705: mol_type = other DNA
atgcggtcccgcagtaacagtggcgtcagactagacggatacgctaggttggtccagcagaccatactctgctatcagaaccccgttaccggccttttgtcagccagtcacgagcaaaaggacgcctgggtaagagacaacatatactccattctggctgtttggggacttggcatggcgtatcggaagaacgctgaccgcgatgaagacaaagccaaggcctacgagttggaacagaatgtcgtcaaacttatgcgtggtctgttgcagtgtatgatgcgacaggttgcgaaagtggaaaaattcaagcacacccagagcaccaaggatagcttgcatgccaaatacaataccgcgacctgtgggacggtggtaggggatgatcagtggggccaccttcaggtggacgccacttccctttttctcctttttctagcacaaatgaccgcaagcggactgcgtattatatttactctggatgaagtagcttttattcaaaacttggtgttttacatcgaagctgcttataaggttgcggactatggcatgtgggagagaggcgataagacaaatcaggggatccccgagttgaacgctagtagtgttggtatggctaaagcagcgctggaagccattgatgaactggacctgtttggagcccacggaggacgcaagagtgtaatccacgtcctgccagacgaagttgaacactgccagtcaatcctgttttctatgctgccaagggctagcacatcaaaggaaatagatgctggattgctgtcaatcatctcttttcccgctttcgcagtcgaggacgtgaatctcgtgaacgttacgaagaatgaaattatcagcaagctgcaaggccgctacggatgttgtcgcttcctgcgggacgggtacaagacaccgcgggaggatcctaaccgcctacactatgatcctgcggaactgaagctgtttgagaatattgagtgcgagtggcctgtgttctggacatacttcattattgatggtgtgttttctggggatgccgtgcaggtgcaagagtaccgcgaggcactggaagggatcctaatcaggggtaaaaatggcataagactcgtgcctgagctgtatgctgttcccccaaataaggtggacgaagaatataagaacccgcacacagttgaccgagttccaatgggcaaggtcccgcatctgtggggccagtcgttgtacattctgtcatctctactggcggaaggtttcctcgccgccggcgagattgatccactaaaccgccgtttcagcacctctgtaaaacctgatgtggttgtgcaggtgacagtactcgcagagaataatcatatcaaggatctgcttcgtaaacatggtgtcaatgttcagtccattgcggacatacatcccatccaagtgcagccgggcagaatcctgtcacacatttacgctaagcttgggcggaataagaacatgaacctctcaggccgcccctatcggcacatcggcgtgctgggaacctccaaactctacgtcatacgcaatcaaattttcacctttaccccccaatttactgatcagcaccatttctacctcgcactggataacgagatgattgtggagatgctgcgaattgagctcgcttacctgtgcacatgctggagaatgaccggccgaccaacactgacatttcctatttctaggacaatgctgactaatgacggttccgatattcatagcgccgtgttgtccaccattcggaagcttgaagatggctacttcgggggggctcgtgtgaaactgggaaacctgtcagagtttctgaccacatccttttatacttacttgacattcctcgaccctgattgtgacgaaaagctgttcgacaatgcgagcgaaggaacctttagcccagattctgattccgatctggtggggtacctcgaggacacatgtaaccaggagtctcaggacgagctagaccactatattaaccacctgctccagtccacttcgctgcgcagctacctgcctccgttgtgcaagaataccgaggatcggcacgtgttcagtgctattcactcaacccgagacattcttagcgttatggcgaaggctaaagggttagaggttccgttcgtccccatgaccctgcctaccaaggtgctatcggcacaccgaaagtctctgaacctagtggactcaccacagcccctcctggagaaagttcctgaaagcgatttccagtggccccgtgacgatcatggagatgtggattgcgagaaattggtcgagcagctgaaggactgctctaacttgcaggaccaggcagacatcttgtacattttatatgtgataaaaggcccatcctgggacacgaacctttccgggcagcacggagtgaccgtgcagaacctcctcggtgaattgtatgggaaagccggactgaaccaggagtgggggctgattcggtatatctccggtctactgagaaaaaaggtggaagtccttgccgaagcatgcacagatctcctgagccaccagaagcagctgaccgtgggcctgccgcctgagccaagagagaagattatctcggccccgctgccgccagaagaactcactaagctgatatacgaagcatccgggcaagacatatccatcgccgtcttgacacaggagatagtcgtgtacctcgctatgtacgtacgcgctcaaccatccctctttgtagaaatgctgaggctgaggataggcttaatcatccaggtcatggccacagagctggcaagaagcttgaactgctctggagaggaggcgagcgagagcttaatgaacctgtccccatttgacatgaagaacttgctccatcatatattgagcggaaaagagtttggtgtcgaaaggagcgtgaggcctattcatagttccacaagcagccccacaatttctatacacgaggtgggacataccggggtgacaaaaaccgagcggtccggcatcaaccgcctgcgcagcgaaatgaagcagatgactcgcagatttagcgcggatgagcagttctttagcgttgggcaggcagccagctcctccgcccactcctccaagagcgcccgtagcagcactcctagctcccccactggaacgtcatcttctgattctgggggccaccacatcggttggggtgaaagacaaggccagtggctgcgacgcagaaggcttgacggtgccattaatagggtgcccgtgggattttaccaacgggtttggaaaattctccagaagtgccatggcctgagcatcgatggctatgtattgccttcaagtactacacgagaaatgaccccccatgagattaaattcgccgtgcatgtggagtctgtcctgaaccgcgtgccacagccggagtatcgccaacttcttgtagaggccataatggttctgaccttgctatcagatacagaaatgacctctatagggggaatcattcacgtagaccaaatcgtacaaatggcgagccaattattcctgcaagatcaggtctcaattggggcaatggacacgctggaaaaggaccaggccacaggaatctgccacttcttttatgatagtgccccgtcaggggcctacgggactatgacttatcttacccgggctgtagcttcttacctccaggaactactgcccaattcgggctgccaaatgcag

SEQ ID NO: 18126 - DNA, 3705 bp, synthetic construct
  misc_feature 1..3705: note = source = /note="Description of Artificial Sequence: Synthetic coding sequence"
  source 1..3705: mol_type = other DNA
atgcggtcaaggtccaactctggggtcaggttggatgggtacgccagactcgttcagcagaccatattgtgctaccagaaccctgtgactggcctcctgtcggctagccacgagcagaaagacgcatgggtgcgcgacaacatctactcgatcctggcagtgtggggtctgggaatggcataccgcaagaacgccgatcgcgatgaggataaggctaaggcctacgaattggagcaaaacgtggtgaaactgatgcgggggctcctgcagtgcatgatgcggcaggtggccaaggttgaaaagttcaagcatactcagtcgactaaggattccctccatgccaagtacaataccgccacctgcggcaccgttgtgggagacgatcagtggggacacttgcaggtcgacgcgacctcccttttcctgctttttctggcgcagatgactgcttcagggctgcggataatcttcaccctcgacgaagtggcttttatccaaaacctcgtgttctacatcgaagcagcgtacaaagtcgccgactacggcatgtgggagcgcggagataagaccaaccaaggtatcccagaactgaacgcgtcctcagtcggcatggccaaggctgcgctggaagccatcgacgagcttgatctgtttggtgcgcacggaggcagaaagtcagtcatccacgtgcttccggacgaagtggagcattgccagtccatcctgttctcaatgctgccgcgcgcttccacttcaaaggaaattgacgcggggctgctctcgatcatttcatttccagcgttcgcagtggaggacgtgaacctcgtgaacgtgactaaaaacgaaatcatttccaaacttcaaggacggtacggctgctgtcggttcctgcgtgatgggtacaagaccccaagagaagatccaaacagacttcactacgacccagcagagctgaaactgttcgagaacatcgagtgcgaatggcctgtgttctggacttatttcatcatcgacggcgtgttctcaggcgacgccgtgcaggtgcaggagtaccgcgaggcgctggaaggtatcttgatccggggcaagaacggaatccgccttgtccctgagctgtacgcggtgcctccgaataaagtggatgaggagtacaagaatccgcacaccgtggacagagtgccaatggggaaagttccgcacctgtggggccaatctttgtacatcttgagcagcctgctggcagagggattcctggcagcgggagagatcgatccgctcaatcgccggttctcaacctccgtgaagcctgacgtggtcgtgcaggtgaccgtgctcgctgaaaacaatcacatcaaagacctgctccgcaagcacggagtcaatgtgcagagcatcgcagatattcacccaatccaggtgcaaccgggaagaatcctgtcccacatctacgcaaagctggggcgcaacaagaacatgaacctgtctggtagaccgtacagacacatcggcgtcctgggaacctcgaaactgtatgtgatcaggaatcaaatcttcactttcactcctcaattcactgaccagcatcacttctacctcgcattggataacgagatgatcgtcgaaatgctccggattgaacttgcatacctgtgcacctgctggcgtatgaccgggcgcccaacgctcaccttccccatctcgcgcactatgctgactaacgatggatcagacatccactccgcggtgctgtcgactatcagaaagctggaggacggatactttggcggtgccagagtgaagttgggaaacctttctgagttcctcactacctccttctacacctacctgacctttcttgacccggattgcgacgaaaagctgttcgataatgcttcggaaggaaccttctccccggatagcgactccgatttggtgggctacctcgaggatacctgtaaccaggagtcgcaagatgagctggaccactacatcaaccatctgctccagagcacttcgctgcgctcctacctcccaccgttgtgcaagaacactgaggaccggcacgtcttttccgctattcactcaactcgggacatcctgagcgtgatggccaaggcaaaaggactggaagtgccctttgtgccaatgactctcccgaccaaagtgctgtcagctcacagaaagtcactcaacctcgttgattcaccccagcctctgctcgagaaagtgcctgaaagcgacttccaatggccgcgggacgatcacggagacgtcgactgcgaaaagctcgtggaacaactgaaagactgcagcaaccttcaagaccaggcagacatcctgtacattttgtatgttatcaagggcccgtcatgggataccaacttgagcggacaacatggagtgacggtgcagaacctcctcggagagctttacggcaaagctgggctgaaccaagaatggggactgatccgctacatctcaggactcctccgcaagaaggtggaagtcctggcggaagcctgtactgacctgctgagccaccaaaagcagctgaccgtcggactgcctcctgaaccgcgcgaaaagatcatctccgcccctctgccgccagaagagctgactaagctgatatacgaagcgagcggacaggacatcagcatcgccgtcctgacccaagaaatcgtggtctacctggccatgtacgtgcgggcgcaaccatcgttgtttgtggagatgctgcgcctgcgtattggtttgatcatccaggtgatggccaccgaactcgctagatcactcaattgttccggggaagaagcgtccgaaagcctcatgaacctttcgccttttgacatgaagaatctgcttcaccacatcctcagcggcaaagagttcggggtggagagatcagtgaggccgatccactcctcgacttcgtcccccactatctctatccacgaagtggggcataccggagtaactaagactgaacggtccggaatcaaccggctgagatccgaaatgaagcagatgactagacggtttagcgccgacgaacagttcttctccgttggacaggcagcctcatcctcggcacactcgtcaaagagtgctaggagcagcaccccgtcgtccccgactggaacctcgagctccgactcaggcggccatcatatcggttggggtgagagacagggacaatggctcaggagaagaagattggatggagccatcaatcgcgtgcccgtgggattctaccaacgggtgtggaagattttgcagaagtgtcacggactctccatcgatggctacgtgttgccatcgtcaaccacccgcgagatgactccgcacgagattaagtttgccgtgcacgtggagagcgtgctgaaccgggtgccacagcctgagtatagacagctcttggtggaagcaatcatggtgcttactctcctgtcggacactgagatgacttccatcggaggaatcatccacgtcgatcagatcgtccagatggcctcccagctcttcctgcaggaccaggtgagcattggagccatggataccctcgagaaagaccaagccactgggatctgccatttcttctacgattcggcgccctcgggtgcttacggaactatgacctatctcaccagagcggtggcctcatatctccaagaactgctccccaactcgggatgccagatgcaa

SEQ ID NO: 18127 - DNA, 3705 bp, synthetic construct
  misc_feature 1..3705: note = source = /note="Description of Artificial Sequence: Synthetic coding sequence"
  source 1..3705: mol_type = other DNA
atgcgctcccgctcgaattcgggagtgagactcgatggatacgccagactcgtgcagcagactattctctgttaccagaatcctgtgactggccttctttcagcaagccatgagcagaaggatgcatgggtccgggacaacatatactcgatcctcgcagtgtggggacttggtatggcctaccgcaagaacgcagatcgggacgaagataaggcaaaagcctacgagttggaacagaacgtggtcaagctcatgagaggactgctgcaatgcatgatgcgccaagtcgcaaaggtggagaagtttaagcacacccaatccaccaaggactcccttcatgcaaagtacaacactgccacctgtgggactgtggtcggtgacgaccaatggggtcatctgcaggtggacgccaccagcctgttccttctgttcttggcacagatgactgcgtcgggcctgcgaatcatctttactctggatgaagtggcctttatccaaaaccttgtgttttacatcgaagcagcatacaaggtcgcagactacggaatgtgggagaggggcgataagactaaccagggcattcccgagctgaacgcgtcgtccgtcggaatggcaaaggcagcactcgaggcgatagatgaactggatctctttggtgcccacggaggcaggaagagtgtgatccacgtcctcccagatgaagtcgaacactgtcaatcaatccttttttcgatgctgcctcgcgcatcgacttcgaaggaaattgacgcaggactcctttcgattatctcgttcccagcgtttgccgtggaagatgtcaaccttgtgaacgtgaccaagaatgaaatcatatccaagctccagggaagatacggatgttgtcgtttcctgcgcgacgggtataagacccctcgcgaagatccaaacagacttcattacgaccctgccgaattgaagttgtttgaaaacatcgagtgtgaatggccagtgttctggacgtactttatcatcgacggtgtgttttctggcgatgccgtgcaagtgcaagaatacagagaggctcttgaaggcattcttattagaggtaagaatggcattcgccttgtcccagaactttacgcagtgcccccaaacaaggtcgatgaagagtacaagaacccacacaccgttgatcgcgtgccaatgggaaaggtcccacatctttggggacaatcgctttacatcctgtcatccctcttggccgaaggattccttgcggccggagagattgatcctctcaacaggcggttttcaacttcggttaagcccgacgtggttgtgcaagtgaccgtccttgcagaaaacaaccatatcaaggacctcctgcgcaagcacggcgtaaacgttcagtcaattgcggatattcatccgatccaggtgcagccaggtcgcattctgtcccacatatacgctaagctcggacgaaacaagaatatgaacttgagcggccgcccttacaggcatattggtgtgttgggaacctccaaactctacgtgatccgcaaccagattttcacgttcaccccgcaattcaccgatcagcatcacttttatctcgcacttgataacgaaatgatagtggaaatgctcagaattgaacttgcatacctctgcacttgctggcggatgaccggacgtcctaccctgacgtttccaatttcccgtaccatgcttactaacgacggctcagatatccattccgccgtgctttctactataaggaagttggaggacggttacttcgggggagcgagagtgaagttggggaacctgtcagaatttctcaccacttccttttacacctacctgacttttctcgaccctgattgtgatgaaaagttgtttgataacgccagcgagggtactttcagccccgatagcgattccgatctggtgggttacctcgaggatacctgcaaccaggaatcacaagatgagctcgatcattacataaatcatcttctccagagcacttcgctgagaagctacctgccacccctttgtaagaatactgaagatcggcatgtcttttcggctatacattcgaccagagacattctttccgtgatggctaaggcaaagggcctcgaagtccctttcgtgcccatgacccttcctactaaggtgttgtccgcacaccgtaagtccctcaacctcgtggacagccctcaacctcttcttgaaaaggtacccgagagcgatttccagtggcctagagatgatcacggtgatgtggattgtgagaagctggtcgaacaacttaaagattgctccaacctccaagaccaagcagatattctttacatcctttatgtgattaaaggaccatcgtgggataccaatctttcgggccaacatggggtgacggtccagaatctcctgggagaactgtatggaaaggcaggcctcaatcaggagtggggcctcatcagatacatttcgggtctgctgaggaagaaggtggaagtcctcgccgaggcatgcactgaccttctctcacatcaaaaacagctgactgtgggtctgcctcccgaaccacgcgaaaagatcatttccgcacccctgccgcccgaagaactgacgaaactgatctacgaagcatcgggacaggacatttcgatcgccgttctgactcaggagattgtcgtgtacctggccatgtacgtcagagcacagccaagcctgttcgtggaaatgcttagactgcgcatcggactgattatccaagtcatggcaaccgaactggcgcgtagcctcaattgttctggagaggaggcgtccgaatcccttatgaacctttcgccattcgatatgaagaaccttctgcatcatatcctctcaggaaaggaatttggagtggaacgatcagtgcggcctatccactcgtctacctcgtcccctactatttctatacatgaggttggtcacacgggtgtgactaagaccgaacgctcgggtattaaccgactcaggagcgaaatgaagcaaatgacccgcagattctccgcggatgagcagttcttctcagtggggcaagcagcctccagctccgcacactcgtccaaaagcgcaagaagctcgaccccatcaagcccgaccggtacgtccagctcggactcaggaggtcatcacattggctggggagaaagacaaggtcaatggctgcgacggcggagacttgacggcgcaattaaccgcgtcccggtcggattctaccaacgcgtttggaaaattctgcaaaagtgtcatggtctttccatagatggatacgttcttccgtcaagcacgaccagggagatgacgccgcacgaaatcaagtttgcagtgcatgtcgagtcggtcctcaaccgcgtgccacaacctgaatacaggcaactccttgtggaggctatcatggtgctgactcttctgtccgacaccgaaatgacttcgattggaggtatcattcacgtagaccaaattgtgcagatggcatcccagctgttcctgcaagaccaggtgtcgatcggtgccatggataccctcgaaaaggaccaggccacggggatatgtcatttcttctacgatagcgcaccttctggagcttacggaaccatgacctatctgactagggcagtggcatcgtacctgcaagaacttctgcctaactcagggtgccagatgcaa

SEQ ID NO: 18128 - DNA, 3705 bp, synthetic construct
  misc_feature 1..3705: note = source = /note="Description of Artificial Sequence: Synthetic coding sequence"
  source 1..3705: mol_type = other DNA
atgcggtcccgatcaaatagcggggtgagactcgacgggtacgcacgcctggttcaacagactatcctctgctatcagaatccggtgaccggcctgctgtccgcctcacatgaacagaaagacgcatgggtgagggataacatctactcgatcttggccgtttggggactgggaatggcataccgaaagaatgcggaccgcgatgaagataaagctaaagcgtacgagctggaacagaatgttgtgaagttgatgcgcggcttgctccagtgcatgatgcggcaggtggcaaaagtggagaagttcaagcatacgcaatcaaccaaagactcgctgcacgccaagtacaacactgcaacttgtgggaccgtggtgggagacgatcagtggggacatctccaggtggacgccacgtcattgttcctgctgttcctggcacagatgactgcatctggcctgcgtatcatcttcacgctggacgaagtggcctttatccagaacctggtgttctacatcgaagctgcatacaaagtcgcggactacgggatgtgggaaaggggagataaaacgaatcaaggcatccctgagctgaacgcgagctccgtgggaatggcaaaggctgccctcgaagctattgatgagctggatttgtttggcgcgcacggcggcaggaagtcggtgatccacgtcttgccggatgaagtggaacactgtcagtcaattctcttctcaatgctcccgcgcgcctcgaccagtaaggaaatcgacgccgggctcctgtcgatcatcagtttcccggcgtttgccgtcgaggatgtgaacctggtgaatgtgactaagaatgagattatctccaaactccagggcagatacggatgctgcaggttcttgagagacggctacaagacccctcgcgaagatccgaatagactccattatgacccagccgagctgaagctcttcgagaacatcgaatgcgagtggccggtgttttggacttactttatcattgatggtgtcttttcaggcgatgcggtccaagtgcaggaatacagagaagcgctggagggaatccttatccgaggaaagaacggcatcagactggtccccgagctgtacgccgtgccgccgaacaaggtcgacgaggaatacaagaacccccataccgtcgaccgagtgccgatggggaaggtgccgcatctttggggacagtccctctacatcctgtcgtccctgctggcagaaggattccttgccgccggagaaatcgaccctttgaaccgccggttctctacttcagtgaagcctgacgtggtggtccaggtgaccgtactggcagaaaacaaccacatcaaggacctgctgcgcaagcatggcgtgaacgtgcagtccatcgccgacatccacccaatccaagtgcaacctgggagaatcctctctcacatttacgccaagctgggaagaaacaagaacatgaacctgtccggtcgcccataccggcatatcggagttctgggaactagcaagctgtacgttattagaaatcagattttcacttttacccctcagttcactgatcagcaccacttctacctggctcttgacaatgaaatgatcgttgagatgttgcgtatcgagctggcgtacctgtgcacctgctggcggatgaccggacggccgaccctcaccttcccgattagccgcactatgctgaccaacgacgggtcggacatccatagcgcggtcctctcgaccatcagaaaattggaagatggatacttcggaggggcccgcgtgaagctggggaatctctcggaattcttgaccacgtcattttacacttacctcactttcctggacccagactgcgacgagaagctgttcgataacgctagcgaaggaaccttcagccccgactcagactcggatctggtcggatacttggaggacacttgcaaccaagaaagccaagatgaattggaccactacataaaccatctcctccaaagcacttcgttgcggagctacctcccccctctctgcaagaacacggaggaccgccacgtgttctccgccatccattccacgcgcgatatcctctcggtgatggccaaagccaaaggcctcgaagtaccattcgttcccatgaccctcccgaccaaagtcctgtcggcccacagaaaaagccttaatctggtcgacagcccccagccgcttcttgagaaggtgccagagtcagacttccaatggccgcgcgatgatcatggagacgtggactgcgaaaaacttgtggaacagctgaaggactgctcaaacctccaagaccaagctgatattctgtatatcctctacgtgatcaagggcccgtcctgggacactaacctgagcggacagcacggggtgaccgtgcagaacctcctgggtgaattgtacggaaaggcaggcctcaatcaagaatggggactcatacggtatatcagcggattgctgcggaagaaggtggaagtgctggccgaggcctgtactgatctcctgtcgcatcagaaacaactgactgtgggattgccgccagagccgagagaaaagatcatctccgcgccgctgccacccgaggaactgacgaagctcatctacgaagccagcggtcaggacataagtatcgccgtgctgacccaagagatcgtggtgtacttggctatgtacgtccgcgcgcagccgtcgctgttcgtggagatgctcagactgcgcatcggcttgatcatccaggtcatggctactgaactggcgcgctccctcaattgctcgggggaagaagcatctgaatcactgatgaatctgtcgccttttgacatgaagaatctcctgcaccacatcctttcgggaaaagaatttggtgtcgagcggtccgtgcgtccgattcactcgtcaacttcctcaccaaccatctccattcacgaagtgggtcatacgggggtcactaaaaccgagaggagcggtattaaccgcctgcggtcggaaatgaagcagatgacccgccgcttcagcgcggatgaacaattcttcagcgtgggtcaggcagcttcctcgtcagcacactcgtccaaatcggcacgcagttcgaccccgtcctcccctactggaacttcctcctctgattcaggaggacaccatatcggatggggagagcggcaaggacagtggcttaggcgcaggcgtctggatggcgctatcaacagagtcccagttggcttctaccagcgggtgtggaagatcctgcaaaagtgtcacggacttagcattgacggttacgtcctcccttcatcgaccaccagagagatgactccacatgagatcaagtttgccgtccacgtggagtcggtgttgaaccgcgtaccgcaaccagagtacaggcaactgctggtggaggcaatcatggttctcaccttgctctccgacaccgaaatgacttcgatcggcggcatcattcacgtggatcagatcgtacagatggcctcacagctcttcctgcaggatcaggtttcaatcggagctatggacacccttgagaaggaccaggctaccggaatctgtcactttttctacgactcggcgccctccggtgcctacggtaccatgacttatctgaccagagcagtggcgagttacttgcaagagctccttcctaactccggatgccaaatgcaa

SEQ ID NO: 18129 - DNA, 3705 bp, synthetic construct
  misc_feature 1..3705: note = source = /note="Description of Artificial Sequence: Synthetic coding sequence"
  source 1..3705: mol_type = other DNA
atgcggtcccgaagtaattctggtgtgaggttggacggctatgctaggctggtgcaacagacgattctgtgttatcagaatccagtgaccggactgctctccgcctctcatgaacagaaagacgcttgggtgcgcgacaacatctactccatactggccgtctggggattggggatggcttacagaaagaatgcggaccgagatgaagataaggcaaaggcttacgagttggagcagaatgttgttaaattgatgcgcggtctgttgcagtgcatgatgcgccaagtggcaaaagttgagaagttcaaacacacccagagcaccaaggacagcttacacgccaagtacaataccgctacgtgcggaacagtggtcggcgacgatcagtggggacatcttcaggtggatgctacatcactattcctactgttcctggctcaaatgactgcctccgggctgagaataatattcaccctagacgaggttgccttcatccagaacttagtcttctacattgaggctgcgtataaggtggctgactacggaatgtgggagcgcggtgacaaaaccaaccaggggattcctgagttgaacgcctcttccgtgggtatggccaaggccgctctagaggcaatcgacgagcttgacttgttcggcgcacatggcggacgcaaaagtgttatacacgtgctgccagatgaggtggagcactgtcaaagcatattattttctatgttaccaagggcatcaaccagcaaagagatagacgcagggcttctctcaattatatccttccccgcctttgccgtagaggacgtgaatctggtcaatgtgaccaagaacgaaattattagcaagctacaggggagatacgggtgctgccggttcctgagagatggatacaagacccctcgggaggatcctaaccggcttcactacgacccggcggaactcaagttgtttgagaatatcgaatgtgagtggccggtgttctggacttacttcattatagatggggtctttagcggagacgccgtccaggtccaggagtatcgcgaagctttggaaggtatcctaatcagagggaagaacggaatccgcctggtccctgaactgtacgcggtccctcctaataaggtggatgaagagtataagaacccccatacagtggacagagtgccgatgggcaaggtgcctcatctgtgggggcagtccctctacatcctgtcctccctgttggctgagggatttctggcggcaggagagatagatccactgaatagacggttttcaacttccgtgaaacctgatgtcgtggtgcaagttacagtgttggccgagaacaatcacatcaaagatcttctccgaaaacatggcgttaacgtacaatctatcgccgatattcatccaattcaagtgcagccaggtcggatactgtcccacatatatgctaagctcgggcgaaacaagaatatgaatctgagcggcagaccctatagacacatcggcgtcctggggaccagcaagctatatgtgattcgaaaccagattttcacgtttactccacaattcactgatcaacaccacttttacctggcattagacaatgaaatgatagtagaaatgctgcgtattgagctcgcgtatttatgtacatgctggagaatgactggaaggccgaccttaactttcccaatctccaggactatgttgacaaacgatggttctgacatacactcggccgtcttgtctaccatccggaaattagaggatgggtatttcggcggggcacgtgtgaagctcgggaaccttagcgagttcttgacaacgtcattttacacctatctgaccttccttgaccctgactgcgacgaaaaactatttgacaacgcctccgaaggcaccttcagcccagacagcgatagtgacctggtggggtatctggaggacacctgcaaccaggaatcccaggatgagctcgatcactacataaatcacctgctgcagtccacctcactcaggtcatacctaccgcccttgtgcaagaatacagaggaccgacatgtgttctctgcgatccattccaccagggacattctctccgtgatggctaaggccaaggggctcgaggtgcccttcgtgccaatgacgctgcctacaaaagtgctctctgcacatagaaaaagtcttaatttggtcgattccccccagccattgcttgagaaagttcccgaaagtgacttccaatggcccagggacgatcatggtgacgttgactgtgagaagctggtggagcagttgaaagattgctcaaacctgcaggaccaggcggatatcctgtacatcctctatgtcatcaagggaccttcttgggataccaatttatctgggcagcacggtgtaaccgtgcagaatctgttaggggagctttacgggaaggctggcctgaatcaggaatgggggttgatccgttacatatccggactattgagaaagaaagtagaagtgttggccgaagcctgcaccgacctgcttagccaccagaagcagctgacagttggactccccccggagccccgagaaaagataatttccgctcctctgcctcccgaggagcttactaagttgatttatgaggcctcaggacaagatatttcaatcgccgttttgacccaggaaatagtggtgtatctcgccatgtatgtgcgcgcccagcctagcctgtttgtcgagatgctaaggctaaggataggcctcatcatccaggtgatggcaactgaactggccaggagcctcaactgtagcggcgaggaggctagtgaatcactcatgaatctaagccccttcgacatgaaaaaccttctgcaccatattctgagtggcaaagagtttggagtcgagcgcagcgtaaggccgatccatagttcaacctcttctcctacaataagcatccatgaagttggacacaccggcgtcactaaaaccgaaagatccggtatcaatcgtctgagaagcgagatgaaacagatgacccgccgcttctcagcggacgagcaattcttcagtgtggggcaggccgcatcatctagtgcgcactcatccaagtccgctcgcagctcaacccccagctcgccgaccgggaccagctcctccgatagtggagggcaccatatcggctggggagagaggcagggacagtggctgcggcgcaggaggctggacggggccatcaacagggttccagtcggcttttaccagagggtatggaaaatattgcagaagtgccatggtctttcaatagatgggtacgtgctgccatcctcaaccacccgggaaatgaccccacatgaaataaagttcgcggtgcacgtggagagcgttctgaatcgcgtcccgcagccagagtatagacagttgctggtagaggccattatggtcctgactctcctaagcgatacagaaatgacgtcaatcggcggtatcatccacgtcgaccagatcgtccaaatggcgagccagctgttcctgcaggaccaggtttcaataggcgctatggacacgctagaaaaggatcaggcgactggcatttgtcacttcttctacgattctgctccatctggcgcatacggcaccatgacttacttgacccgtgcagtagccagctacctacaggagctgctgcctaactcaggatgtcagatgcag

SEQ ID NO: 18130 - DNA, 3705 bp, synthetic construct
  misc_feature 1..3705: note = source = /note="Description of Artificial Sequence: Synthetic coding sequence"
  source 1..3705: mol_type = other DNA
atgagatcccgctcgaattcaggggtgcgcctggacgggtacgcacgccttgtgcagcaaacgatcctgtgctaccaaaatcctgtgactgggcttttgtctgcgtcccatgagcagaaggatgcatgggttcgcgataacatatacagcatcctggccgtgtggggactcggcatggcatatcgcaagaacgcagatcgggatgaagataaagccaaggcatacgagctcgaacaaaacgtggtgaaactgatgagaggccttctccagtgcatgatgcgccaggtcgcaaaagtggaaaagttcaagcatacccagtcgaccaaggacagcctccatgcaaagtataacactgcaacttgtgggactgtggtgggcgacgatcagtggggacacctccaggtggatgccacctcgttgtttctcctttttctcgctcaaatgactgcctcgggtctgagaatcattttcactctggacgaagtcgctttcatccaaaatctggtcttttacatcgaggccgcctacaaggtcgcagattacggtatgtgggagcggggagacaagaccaaccaggggatccctgaactcaacgcctcctcggtgggcatggcaaaggcagcgctcgaggctatcgacgaactcgacctctttggcgcacacggagggcgcaagtccgtgatccacgttctgcctgatgaggtggagcactgccagtccatcctcttttcaatgctgccacgcgcttcgacctcgaaagaaattgacgccggactgctgagcattatctcgttcccagccttcgccgtcgaagatgtcaatctcgtgaatgtcactaaaaacgagatcatctccaagctccagggacgctacggttgctgccgctttctgcgggatggatataagaccccaagggaggatccaaacaggctgcactacgacccggccgaattgaaattgttcgagaacattgagtgcgagtggcctgtgttttggacctacttcatcatcgatggggtgtttagcggtgacgcagtgcaagttcaggaatatcgggaagccctggaaggaatcctgataagaggcaaaaacggcatcagactggtcccagagctgtacgcggtgcctcccaataaggtggacgaagagtacaagaacccgcataccgtggaccgcgtcccgatgggaaaagtgccgcatctgtggggtcagtcgttgtacatcttgtcgtccttgctcgccgaagggttcctcgccgccggggaaatcgatccactgaaccgcagatttagcacttctgtcaagcccgacgtggtggtccaggtgaccgtgctggccgagaataatcacatcaaggacctgctgaggaaacacggtgtgaatgtgcagtcgatcgccgacattcacccaatccaagtgcaaccgggaagaatcctgagccacatctacgccaagctgggcaggaacaaaaacatgaatttgtcgggcagaccctaccggcacattggtgtcctcggcacttcgaagctctacgtgataagaaatcagatcttcacgttcaccccacagttcaccgatcagcaccacttctatttggcgctggataacgagatgatcgtggaaatgctgcgcatcgaattggcatacctgtgcacttgctggaggatgaccggtcggcctactctgaccttcccgatcagcagaactatgcttactaatgacggaagcgatatccactcagcggtgctgtcaacgatccgtaaactggaagatggctacttcggcggcgccagggtcaaactgggaaacctttcagaattcctgactacctcgttctacacctacctgactttcctggatcctgattgcgacgaaaaacttttcgacaatgcctcagaaggaactttctcgccagactccgattccgacctcgtgggatacctggaggacacttgtaaccaagagtcccaggatgagcttgatcactacattaaccacttgctgcaaagcacctcgctgcgcagctacttgccaccgctctgcaagaacactgaggaccgccatgtcttttcggccatccactcgactcgcgacatcctgagcgtgatggccaaagctaagggtttggaagtgccatttgtgcccatgactctgccgacgaaggtcctgtccgcacaccgcaagtcactcaatttggtcgactccccgcagccgctgctcgaaaaggtgcccgaatccgacttccagtggccgagggatgatcacggagacgtggattgtgagaaattggtcgagcagctgaaggactgctccaatctgcaagatcaggcggacatcttgtacatcctgtacgtgatcaagggaccctcatgggataccaatctgagcggacagcacggagtgacggtccagaatcttttgggtgagctgtacggaaaagcgggactgaaccaggagtggggactcatcaggtacatctcaggactgctgcgcaaaaaggtggaagtgcttgcagaagcatgcaccgacctgctttcgcaccagaagcaactcacggtgggattgccgccggaaccgcgggaaaagatcattagcgcgcctctgccgccggaagaactgacgaagctgatctacgaagctagcggccaagacatctcgatcgctgtgctgacccaagaaattgtggtgtacttggcaatgtacgtgcgggcgcagccatcgctgttcgtggaaatgttgagactgcggatcggcctgatcattcaggtcatggcgactgagctggcgcggtccctgaattgctcaggagaagaggcttccgaatcgctgatgaacctgtcaccgttcgacatgaagaaccttctgcaccatatcctgtcaggaaaggaattcggggtggagcggtcggtccgcccaattcattcgtccacttccagcccgaccatctcaatccacgaggtggggcacactggagtgacgaaaactgaaagatccggaattaaccgcttgcggtctgagatgaagcagatgacccgtagattctcagccgatgagcagttcttctcggtgggacaggcggccagctcctcggcgcattcttcgaagagcgccagatcatccactccatcctctcccacgggcacctcctcgtcagacagcggaggccatcacattggatggggcgaacgtcagggtcagtggctgcggcggagacggttggacggagcgatcaatcgggtcccagtggggttctaccagcgggtttggaagatcctccagaagtgtcatgggctgtctatcgacggatacgtgctgccgtcgtcgaccacgagagaaatgacgccgcacgagatcaagtttgccgtccacgtggaatccgtcctgaaccgcgttccgcagccagaatacagacagctgctggtggaggcgatcatggtcctgactctgttgagcgatactgagatgacctcaatcggcggcatcattcatgtggaccagattgtccagatggcgagccaactctttctgcaagaccaggtgtccatcggagccatggacactctggaaaaggaccaggccaccggcatctgccatttcttctatgacagcgcgccgtccggtgcctacggtaccatgacttatctgactcgggccgtcgcatcatacttgcaggaacttctcccgaattccggctgccaaatgcaa

SEQ ID NO: 18131 - DNA, 3705 bp, synthetic construct
  misc_feature 1..3705: note = source = /note="Description of Artificial Sequence: Synthetic coding sequence"
  source 1..3705: mol_type = other DNA
atgcgtagccggtcgaactcaggggtgcggctcgatggatacgcccgactggtccagcaaaccattctttgctaccagaaccctgtgacgggactgctcagtgcctcgcatgaacagaaggatgcatgggtccgtgacaatatctacagtatccttgcagtgtgggggctcggaatggcatacagaaagaacgccgatcgtgacgaggacaaggccaaggcgtacgaattggaacaaaatgtggtgaaacttatgaggggccttctgcagtgtatgatgaggcaagtagccaaagtagagaagtttaagcacacccaaagcaccaaggattccctccacgcaaaatacaacactgcaacttgtggaactgtcgtgggagacgaccagtggggtcatcttcaagttgacgctacttctcttttcctcctttttcttgcgcagatgactgcctcaggtctgcggatcattttcaccctcgacgaagtggctttcatccagaaccttgtgttttacatcgaggcagcctacaaggtggcagattacggtatgtgggaaagaggagataagaccaatcaaggcatacctgagctcaatgcgagctcagtcggtatggcaaaggcagcacttgaagcaatagatgaactggacctttttggcgcacatggagggcgcaagtccgtgattcatgtgttgcctgatgaagttgagcactgccaaagcattcttttctcgatgcttcctcgcgcatcgacttcaaaggaaatcgatgcaggactgctgtcgatcattagttttcccgcattcgcagtggaagatgtcaacttggtgaacgtgacgaagaacgaaatcatttcgaagctccagggtcgctacggatgctgtcggtttctgcgcgacggatacaagactccgcgagaagatcctaaccggctccactatgatcctgcggaattgaaattgtttgagaacattgagtgtgaatggccggtgttctggacctatttcattattgacggtgttttcagtggggatgcagtgcaagtgcaggagtaccgagaagcccttgaaggcatcctgataagaggtaagaacggcattcggctggtgcccgagctgtacgccgtgccaccgaacaaggtggacgaagaatacaaaaatcctcataccgttgaccgagtcccaatggggaaggtcccacatctttggggacagtcgctttacatactttcgtcccttcttgcagagggctttctcgcggcaggagaaatcgacccgcttaaccgccgattttcgacttcggtgaaaccagatgtggtggtgcaagtgaccgtgctcgcagaaaacaaccatatcaaggacctgctcaggaagcatggtgtcaacgtgcaatcgatagcggatatccacccgattcaagtgcaacctggtcggatcctgtcacacatatacgcgaaactcggacgaaataagaatatgaacctgtcaggacgcccatacagacacattggagtgctcgggacctctaagctgtacgtcattcgtaatcaaatcttcacctttacccctcagtttactgaccaacaccacttctacctggcattggacaacgaaatgatagtggaaatgctgcggatcgaactcgcctacctgtgtacctgttggcgcatgaccggaaggccaacgctcactttcccaatttcccggactatgcttacgaacgatgggtccgatatccattcggcagtcctttccacgattaggaaactggaggatggatacttcggcggcgccagagtgaaactgggtaacttgtccgaatttcttaccacctcattctatacctaccttactttcctggatccagattgcgatgagaaactgtttgataatgcgtctgaaggtaccttttcgcccgactccgattccgatctggtaggttatcttgaggacacctgcaatcaggaatcgcaggacgagctcgatcattacataaatcatcttctccagagcacgagcctgaggtcgtaccttcctccactgtgtaagaacactgaagatcgccatgtcttttccgccattcactcaacccgcgatatcctcagtgtcatggctaaggctaaagggcttgaagtgccttttgttcctatgacccttcctactaaagtcttgagcgctcatcggaaaagcctgaatcttgttgatagcccccaacctctgctcgaaaaagtgcctgaatccgactttcaatggccaagggatgatcacggtgacgtggattgtgaaaagctggtggaacaactgaaggactgctccaacctccaggatcaagcagatattctttacatactctacgtcattaagggaccatcttgggataccaatctgtctggacaacatggagtgactgtccaaaaccttctcggggagctctacggtaaagccggacttaaccaggaatgggggctgattagatatatctcgggcctgcttcgtaagaaggtggaagtcctggcggaagcctgtaccgaccttctttcacatcaaaagcagctgaccgtgggactcccaccagagcccagagaaaagatcatttcagcaccacttccacctgaggagctcactaagctcatttacgaagcatcggggcaggacatttctatagcagtcctgactcaagaaatcgtggtgtaccttgcaatgtacgtccgggcacagccatcgttgtttgtcgagatgctgagactccggattggactgattattcaagtgatggctaccgaacttgcaaggtccctgaattgctcgggcgaggaggctagtgagtcgcttatgaatctcagccctttcgatatgaagaacctgctgcaccatatcctctccggtaaggaatttggagtggagagaagcgtcagaccgattcattcgtccacttcgtcgccaactattagcatccatgaggtgggacataccggagtgacgaaaactgagagatccggaatcaacagactccgatccgaaatgaaacagatgacccgacgcttttctgcagacgaacaattcttttcagtgggtcaagccgcatcgagctcggcacactcgagcaagtcggcacgctccagcaccccttccagcccaactgggactagcagctcggactccggaggacatcatattggctggggagaacgacagggtcaatggttgagacgccgtcggcttgacggcgcaatcaatagagtccctgttggtttttaccagcgggtgtggaagattctgcagaagtgtcatggtctttcaattgatggttacgtgctcccttcgtcgaccactagagaaatgactccccacgaaatcaagttcgcggtgcacgtggagagcgtgttgaacagagtaccccagcctgagtacaggcagttgcttgtggaagcaattatggtgctcacgctgctctccgacacggagatgacgtccattgggggtatcatccatgtggatcaaattgtccaaatggcctcacaactgtttctgcaagatcaagtgtcaataggtgcgatggatactcttgaaaaggatcaagccaccggaatctgtcatttcttctacgattccgcaccctcaggcgcatacggaaccatgacctacctgactcgagcagtggcctcctaccttcaagaactcctccccaactccggctgtcagatgcag

SEQ ID NO: 18132 - DNA, 3705 bp, synthetic construct
  misc_feature 1..3705: note = source = /note="Description of Artificial Sequence: Synthetic coding sequence"
  source 1..3705: mol_type = other DNA
atgaggtcccgctctaattctggtgttcggctcgacggatacgcgcgtttagtccagcaaacaatcctttgctaccaaaacccagttacaggactcctgagtgcgagccacgagcagaaggacgcttgggtgagggacaatatctatagcattctagcggtctggggccttggcatggcttatcgtaagaacgccgatagagacgaagacaaagcgaaagcgtacgaactcgaacaaaacgtggtaaaacttatgagggggctgctgcagtgtatgatgcgtcaggtcgcaaaggtggagaagtttaagcatacccagtcaaccaaggattcccttcacgccaaatacaacacagcaacttgcggaactgtcgtcggtgatgatcagtgggggcacctgcaggtcgatgccacttcccttttcttacttttcttggcccagatgactgcctcaggtcttcgtattatttttactctagacgaagtcgcattcatccagaacttggtattctacattgaggcggcttacaaggtcgcagattacggaatgtgggaaaggggagataagacgaatcaaggcatccctgaacttaatgcttcctcggtggggatggccaaagccgcgctggaagccatcgacgagctagacttgtttggggcgcatgggggacgcaagagcgtaatccatgttttgcctgacgaggttgaacactgccaatctatcctgttcagcatgttaccacgcgcttcgacctccaaggaaattgatgcgggacttctaagcatcatctcatttcccgcgtttgcggttgaagatgtcaatctggttaatgtgaccaagaatgagataatctcgaagttgcaggggagatatgggtgctgccggtttctacgcgacggctacaagactccgcgagaagacccaaaccgtttgcactatgatcctgctgagctcaaactgttcgagaatatcgaatgcgaatggcccgtattctggacatactttatcatagatggagtgttctcaggagatgctgtgcaggtgcaagaataccgagaagctctagaaggtattctcattcgaggaaaaaacgggatcaggctcgttccggagctgtacgccgtgccgccgaacaaagtggatgaggagtacaaaaacccacatacggtagatcgcgttcctatgggcaaggtaccccacttatggggccagtccctatatatactgtcaagccttcttgctgagggtttcctcgctgccggggagattgatcctcttaaccggagattttcgacaagtgtcaagcccgacgtcgtcgtccaggtcacggtgttggcggaaaataatcatatcaaggatctgctccgaaagcacggggtcaacgttcagtctatcgcggacatccatcccatccaggttcaacctggtcgaatcctcagccatatttacgcgaaactgggaaggaataaaaatatgaacctctctggtcgcccctaccgccatataggtgtccttggaacatccaagctctatgttatccgcaaccaaatctttacattcaccccgcagttcacggatcagcatcatttctacctggctcttgataatgagatgatcgtggaaatgttgcgtatcgaattggcgtacctgtgtacttgctggaggatgacaggccggccgacccttacgttcccgatctcgcgcactatgctcaccaatgacgggagtgatatccattcggcagtattgtcgacgattcggaagctagaggatggttatttcgggggcgcccgggtgaaacttggcaacttaagcgagttcctaacgaccagcttctatacgtatctaaccttcctggatcccgattgtgacgaaaagcttttcgataacgcgtcagaaggcacgttttctccagacagtgacagtgatctagttggctatttagaagatacctgtaatcaagaatcccaggacgagcttgaccactatattaatcacctgttgcagagtacgtcgctcagatcgtatttgccaccgttatgcaaaaacactgaagacaggcatgtgttttcggcaatccactcgacgcgggatattttgagcgttatggcaaaggccaagggtctcgaagtcccattcgttccgatgacgttgccaacgaaggtgctctctgcccacagaaagagcctcaaccttgtcgattccccacagcccttgctcgaaaaagtgcctgagtcggactttcaatggcctcgtgatgaccatggcgacgtggattgcgagaaattggtcgagcagcttaaggattgttctaacctgcaggatcaagcggacattctctatatcctttacgtgatcaagggcccgagttgggatacaaacctttcaggccagcatggggttactgtacagaacttgctgggtgagctctatgggaaggctggacttaaccaggagtggggtctcatccggtatatcagtggtcttctaaggaagaaggtggaagtgctcgccgaggcatgtacagacttgctatcccatcagaaacaactgaccgtcgggctgccgcctgagccgcgagaaaagatcatcagcgcacccttgccgccagaggagctgacgaagttgatttatgaagcaagcgggcaggatatctccatcgctgtcctcacacaagaaattgtggtgtacttggctatgtacgtccgcgctcaaccaagccttttcgtcgagatgctgaggctaaggattgggctgatcatccaagtcatggccactgagctagctcggtccttaaactgttccggtgaagaggcctctgaatccctcatgaacctttcaccgttcgacatgaagaacctcctacaccacatcctcagcggtaaggagtttggagtagagcgttcagttcgcccaatacatagttcaacatcttcccctacgatttccattcatgaagtaggtcacacgggggttacaaagaccgagcggtctggcataaaccggttaagatccgagatgaagcagatgactcggagattttcggcggacgagcagttcttcagcgttggtcaagctgcttcttcgtcagctcattcttcgaaatcggctcgatcgtcgactccctcatccccaactggtacctcaagtagtgatagcggcggccaccatattggctggggcgagagacagggtcagtggttgcgcagacgacgattggatggtgcgatcaatcgcgtgcctgttggtttctatcagcgggtgtggaaaattttgcagaagtgccatggcctgtccatcgacggctacgtcctaccatcctcaacgacacgtgagatgaccccccacgaaattaagttcgccgtacatgttgagtcggtgcttaacagagttccacaaccggaataccgccagttgctcgtggaggctatcatggtgctaacgctattgtccgatactgagatgactagtattggcggtatcatccacgtcgaccagatagtgcaaatggcatcccagctgtttttgcaggaccaagtctctattggtgctatggacactcttgagaaggaccaggcaactggcatctgccacttcttctatgattccgctccttctggagcctacggaacaatgacctatttaacgcgggcggtcgcgtcatatctacaggagttattgcccaactcgggctgtcagatgcag

SEQ ID NO: 18133 - DNA, 3279 bp, synthetic construct
  misc_feature 1..3279: note = source = /note="Description of Artificial Sequence: Synthetic coding sequence"
  source 1..3279: mol_type = other DNA
atggcaggagcagctggactcactgccgaagtgagctggaaagtgctggaacggcgtgcaagaactaaaaggtcgggttcagtgtacgaacctctcaaatcgataaacttgcctcgacctgacaatgaaaccctttgggataagctcgatcactactacaggattgttaaaagcacgcttctcctttaccaatccccaactactggtcttttccctaccaagacctgcggtggtgaccaaaaggcaaagatccaagactccttgtactgcgcagcaggggcgtgggcacttgcacttgcctaccggagaatcgatgatgataaaggaaggactcatgagcttgagcacagcgccatcaagtgtatgagaggtattctgtactgttacatgcgtcaggcagataaggtccagcagtttaaacaagatcctcgacccaccacttgtctccactccgtctttaacgtgcatacgggcgacgaactgttgtcgtacgaagaatatggacaccttcagatcaatgccgtcagcctgtacctcctgtacctggtggaaatgatctcctccggtctgcagatcatctataacaccgacgaagtgagcttcattcagaacctggtcttttgtgtggagagagtgtacagagtgcctgattttggagtctgggaacgaggttcaaagtacaacaacggttccaccgagctgcattcttcatcagtggggctggcaaaggcagcactcgaggcgatcaatggatttaacctctttggcaatcagggatgttcgtggtcagtgatttttgtggatctggatgctcacaaccggaacagacaaaccctgtgctctcttcttccacgcgaatcaaggtcccataacactgatgcagcactgctgccatgtatttcgtacccagctttcgctctggatgacgaggtgctttttagccagacccttgataaggtcgtgcgaaagctgaaggggaagtacgggtttaagcgctttctgcgcgacggatacaggactagccttgaggatccaaatcgttgctactacaagcccgccgaaatcaagctgtttgacggaatcgaatgtgaatttccaatattctttctgtacatgatgatagacggtgtgtttagaggaaatccgaaacaggtgcaggagtaccaagatctcctgactcctgtgctgcaccatacgaccgagggatacccggtggtgcccaagtactactacgtccctgcagattttgtcgaatacgaaaagaacaacccaggttcgcaaaagagatttccctcgaactgcggcagagatggaaagctctttttgtgggggcaagcattgtacataattgcaaagctgcttgcggacgaacttatttcccctaaggatatcgatcctgtccagagatacgtccctctgaaagaccaacgcaacgtgagcatgaggttctcaaatcaagggcctcttgaaaatgatctggtggttcatgtcgccctgattgcggaatcacagagactgcaagttttccttaacacgtacggaattcagactcagacgcctcagcaggtggagcctattcaaatttggccacaacaggagttggtgaaggcataccttcagctggggattaatgaaaaacttggtctgagcggcagacccgatcgacctatcggctgtctcggcacctctaagatttaccgtatcctcggcaaaaccgtggtgtgctaccctatcatttttgacctctccgatttctacatgtcgcaggatgtctttttgctgatcgatgacatcaaaaacgcactgcagttcataaagcaatactggaagatgcatggacggccgctgtttctggtgcttattagagaagataacattagaggatcaagatttaacccgattctcgatatgcttgcagccctcaagaaaggtatcataggaggagtgaaggtccatgtcgatagacttcagacccttatttcaggagccgtggtggaacagctcgactttcttagaatttcggatacggaggagcttcctgagtttaagagctttgaagaactggaaccccctaagcattccaaagtgaagcgccagtccagcactccatcggcacctgagctcggacagcaacccgatgtgaacatttcagaatggaaggacaaaccaacccacgagatactgcaaaaacttaacgattgctcgtgccttgcatcccaggccatcctgctgggtatacttctcaaaagggagggtccgaactttatcactaaggagggtactgtgtctgatcatatcgaacgcgtgtaccggagagcaggttcccagaaattgtggctcgcagtgcgatacggtgccgcatttacccagaagttttcctcctcgatcgcaccacacatcacgacctttcttgtgcatggtaagcaggtgacgctgggtgcattcggacacgaagaagaagtgatctccaaccccctcagcccccgagttatacagaacatcatatactacaagtgtaacactcatgatgaacgcgaagctgtgatacagcaagaacttgtcattcacatcggatggatcatctcaaacaatcctgagctttttagcggtatgttgaaaattcggattggatggattatacacgctatggagtacgaactgcaaattcgcggtggtgacaaacctgcattggacctttaccaattgagcccgtcagaggtgaaacaactgctcctggacattctgcagccacagcaaaatggacgatgttggctgaaccgtaggcaaattgatggaagcctgaatcgcactcctaccggtttctacgatcgcgtgtggcaaatcctcgaaagaactcctaatggcatcattgtcgcaggaaagcaccttccacaacaacctactctgagcgacatgactatgtacgaaatgaactttagccttctcgtggaagataccctgggtaacatcgaccaacctcagtaccggcagattgtcgtcgaactcctgatggtggtgtcaatcgtgctcgagagaaatcctgaattggagtttcaagataaagtggacctggaccggctggtgaaagaggcatttaacgagtttcagaaagaccagtcacgcctgaaggaaatcgagaagcaagatgacatgacgtccttctacaatactcccccacttggaaagaggggaacttgttcctaccttactaaggcagttatgaacctgcttcttgaaggagaagtgaagccaaataacgatgacccttgtctgatttcc

SEQ ID NO: 18134 - DNA, 3279 bp, synthetic construct
  misc_feature 1..3279: note = source = /note="Description of Artificial Sequence: Synthetic coding sequence"
  source 1..3279: mol_type = other DNA
atggccggtgctgccggactgactgcggaggtgtcgtggaaagtgctggagcggcgcgcacgcactaaaagatcgggctcagtctacgagccgcttaagtccatcaacctgccccgcccagacaacgaaaccctctgggataagctggatcattactaccggatcgtgaagtctacgttgttgctttaccagtcgcccaccactgggctgtttccgaccaaaacgtgcggaggggatcagaaggccaaaatccaagattcactgtattgtgcagcgggagcctgggccctcgcattggcctataggagaatagacgacgacaagggaagaactcacgagctcgagcattcagcgatcaaatgtatgcggggtatcctgtactgctacatgcgccaagcagacaaggtgcaacagtttaagcaggatccgcgcccgaccacttgcctgcatagcgtgtttaatgtgcataccggagacgaattgctgtcctacgaggagtacggtcacctgcagatcaacgcagtctctctgtatcttctctatcttgtggaaatgatttcgtccggactgcaaatcatctacaatactgacgaagtgtcatttatccaaaaccttgtgttctgtgtcgagcgggtgtacagagtgccggatttcggcgtctgggagcgaggatccaaatacaacaacggatccactgagctgcactcctcatcggtcggactggcgaaggccgctctcgaggcgatcaacggctttaatctgttcggaaatcaaggttgcagctggtcagtcatctttgtggatctggacgctcacaaccggaaccggcagacgctctgttccctgcttccgcgagagtcgcgtagccataataccgacgctgcgctgctcccatgcatcagctaccctgcgtttgcactggacgatgaggtgctgttctcgcagacgctcgacaaagtggtgaggaaactgaagggaaagtatggattcaagcggttcctccgggatggataccgcacgtcgctcgaagatccgaaccgctgctactacaagcctgcggaaatcaagttgtttgacggcatcgagtgcgagttcccgatctttttcctgtacatgatgatagacggtgtgttcaggggcaatcctaagcaggtccaggaataccaggacctcctgactccagtgctgcatcacactaccgaagggtatccggtggtgccaaagtactactacgtcccggctgactttgtggaatacgaaaagaacaacccaggaagccaaaagaggttcccctctaattgcggaagagacggcaagctcttcctgtggggtcaggcattgtacatcattgcgaagctgctggcagatgaactgattagcccgaaagacattgaccccgtgcaaagatacgtgcccctcaaggaccagcggaacgtgagcatgcggttctcgaaccaaggacctcttgaaaacgatctggtggtacacgtcgcacttatagctgagtcacagcggcttcaagtgttcttgaatacctacggaatccagacccaaactccgcaacaggtcgaaccaatccagatctggcctcagcaggagcttgtcaaggcctatcttcagctcggcattaatgagaagctggggcttagcggacgcccggacagacctatcggctgcctgggaacttctaagatctacagaatcttgggaaagaccgtggtctgctacccgattatcttcgatctgagcgacttctacatgtcacaggatgtgttcctcctgattgacgacatcaagaacgccctgcagtttatcaaacagtactggaagatgcacggacgacccctgtttctcgtgttgatccgagaggacaacatccgcgggtccaggttcaaccccatcctggacatgctggccgctctgaagaaaggaatcatcggaggtgtgaaggtgcacgtggaccgcctgcagactttgatcagcggagccgtcgtggagcagctggattttctgcgcatctccgacactgaagaactccctgagttcaagtcattcgaggagcttgagccaccgaaacacagtaaggtgaagcgccaatcctcaaccccaagcgcgcccgagctgggtcaacaaccagacgttaacattagcgagtggaaggacaaaccaactcacgaaatcctgcaaaagctgaacgattgctcgtgtctggcctcccaagccattcttctgggaatcctcttgaagcgggagggaccgaacttcatcactaaagaaggaactgtttcggaccatatcgagcgagtgtacagacgggctggcagccagaaactctggctggccgtgcgatacggcgcagcctttacccagaagtttagttcttcgatcgccccgcatatcaccacttttctggtgcatggaaagcaagttaccctgggagcgtttggacacgaagaggaagtcatcagcaatcctctctctccgcgggtcatccaaaacattatctattacaagtgcaatacgcacgacgagcgagaagcggtcatccaacaagaactggtcatccacatcggatggatcatctccaacaacccggagctgttcagcggcatgcttaagatccggatcggatggattattcacgccatggaatacgaactccaaatcagaggaggggataaacccgctctcgatctctaccaattgtcaccttccgaagtgaagcagctcctgctcgatatccttcagccgcaacaaaatggacgttgttggttgaaccggcgccagatcgatgggtccctgaatcgcactccgaccggcttttatgatagggtctggcagattctcgaacggacgccaaacggcatcatcgtggcgggcaagcacctcccacagcagccaactctgagcgatatgaccatgtacgagatgaacttctcactgctcgtcgaagatactctggggaacattgaccagccgcaatacagacagatcgtcgtcgaattgctcatggtggtgtccatcgtcctggaacgcaacccagagctggagttccaggacaaggtggacttggaccgcctggtgaaggaggccttcaatgaattccagaaggatcagtcccgactgaaggaaatcgaaaagcaggatgatatgacgagcttctacaataccccaccgctgggaaaaagaggaacctgctcatacctgaccaaagccgtcatgaatctcctgctggagggagaggtgaaaccaaataacgacgacccgtgcctgattagc

SEQ ID NO: 18135 - DNA, 3279 bp, synthetic construct
  misc_feature 1..3279: note = source = /note="Description of Artificial Sequence: Synthetic coding sequence"
  source 1..3279: mol_type = other DNA
atggccggcgcggcaggcctcaccgccgaggtctcctggaaggttctcgagaggcgcgctagaacaaagaggagtggtagcgtgtatgagccattgaagtcgattaatctgcctaggcctgataatgagactctctgggataaattggaccattactatagaatagttaaatccaccttgctgctgtatcagtctcccacaacaggcctgtttccaaccaagacctgcgggggggatcagaaagccaagattcaggattctttatactgcgccgccggcgcctgggctctggcgctggcctacagaaggatagacgacgataaggggaggactcacgagcttgagcatagcgccatcaagtgcatgcgagggatattgtactgctacatgaggcaagcggacaaagttcagcagtttaagcaggacccacggcctacaacgtgcctgcacagcgtgttcaacgtacatactggtgacgaattattatcatatgaggagtacggacatctacaaatcaacgccgtgtctctgtacctcctgtatctcgtggagatgatatccagcggactgcagattatctataacactgatgaggtttctttcattcagaacctggtcttctgcgtggaaagggtgtatcgcgtcccagacttcggcgtctgggaaagagggagtaagtataataacggttcaacagagctgcacagttcaagcgttgggctggcaaaggctgccctggaggcgataaatgggttcaacctctttggaaaccaaggctgcagttggtcagtgattttcgtggatctggacgcccacaaccgaaaccggcagaccctctgttcacttctgcccagggagtctcgcagtcacaatacggacgctgcactcctgccgtgtatcagctaccccgcatttgcactggacgatgaggtgctgttctctcaaacactcgacaaggtggttcgaaagttgaaggggaagtacgggttcaagagatttcttagagatggctatagaacatctctggaggacccgaacaggtgttattacaagcctgccgaaattaaactttttgatgggattgagtgtgagttccccatatttttcttgtacatgatgattgatggggtcttccgcggaaaccctaagcaggtccaggaatatcaggatcttttgactccggtgctccaccatacaaccgagggctatcctgtggtgcccaagtactattacgtgcccgctgacttcgtggaatatgaaaaaaacaatccagggtcccagaaacgctttccaagcaattgtggaagggacggaaagttatttctgtggggccaagccctgtacatcattgcaaagctgttggcagatgaacttatctccccaaaagatatcgacccagtccagcggtacgtgcccctcaaagaccagagaaatgtctccatgcgatttagtaaccaggggccactggaaaacgatctcgtcgtacacgttgcacttattgctgagtcacagagacttcaggtgttcctcaatacctatggaattcagacccagacaccacagcaggtcgaaccaatccagatatggccgcagcaagagctcgttaaagcctatctgcagctggggatcaatgagaaactaggtcttagtgggaggcccgatagacctattggctgtctaggaacctccaaaatctatcgtatcttgggaaagaccgtcgtttgttatccgataatcttcgacctgagtgacttttacatgagtcaagacgttttcctcttgatcgacgacattaagaacgccctgcagttcatcaaacagtattggaaaatgcatggtagaccgttgtttctggttctgataagagaggacaatattcgtggatctcgtttcaatcccattctcgacatgctagcagctctcaaaaaggggattatcggtggggtcaaggtccatgtcgaccgcctgcagacgcttatttcaggggccgtggttgagcagttagatttcctccgtatttcagataccgaggagcttcctgagtttaagagcttcgaggagctggagcctccgaagcactccaaggtaaagagacagtcctcaactccgtccgctccggagcttgggcagcagccggacgtgaacattagcgaatggaaagacaagccaacgcacgaaatactgcagaaactcaacgattgctcatgtctggcgagtcaggccatcttgcttggtatactactgaaaagagaaggacccaacttcatcaccaaagagggaaccgtgtctgatcatattgaacgagtctaccgcagggcgggatctcagaagttatggctggctgtgcggtatggtgcagccttcactcagaaattttcctcaagtatagcgcctcacatcactacattcctcgtgcacgggaagcaggtcaccctcggagcctttggtcatgaagaggaggttatctcgaatcctctgtcaccacgagtgattcaaaacataatttactacaaatgtaacacacatgatgaacgggaggccgtcatccagcaggaactcgtgatccatatcggctggattattagtaacaatccagaacttttttctggaatgctgaaaattcgcatcggctggattatccacgcgatggagtatgaactgcagattagaggaggtgacaagcccgctcttgatctgtaccagctgtcaccatctgaagtgaaacaactgctcctcgatattttacaaccacagcagaacggccgctgctggttgaaccgcaggcaaattgatggctccctcaaccggacccccacaggtttttacgacagagtttggcagattctcgagagaacacctaacggcataatcgtggcgggaaagcaccttcctcagcagcccaccctgtcggacatgacgatgtacgagatgaatttttcactcctggtagaagacaccctgggaaatatagaccagcctcagtataggcagatcgtcgtagaattgttgatggtcgtgtctatcgtgcttgagaggaatcctgagctcgagttccaggataaagtggatctcgacagactggtgaaggaggcctttaacgaattccaaaaggatcaaagcaggctgaaggagattgagaaacaggatgacatgaccagtttctataatacccctcccctcggcaagcgaggtacctgttcgtatctcactaaggccgtaatgaacttgttactcgaaggcgaagtaaagccaaataatgatgacccctgtctcatatct

SEQ ID NO: 18136 - DNA, 3279 bp, synthetic construct
  misc_feature 1..3279: note = source = /note="Description of Artificial Sequence: Synthetic coding sequence"
  source 1..3279: mol_type = other DNA
atggcaggagctgccggactgactgcagaggtgtcttggaaggtcctcgaacgcagggctcggaccaagcggagcggatcagtgtacgagcccctcaagtcaattaaccttccacggcccgataacgagacgctttgggataaactggatcactactaccgaattgtgaagagcaccctgcttctgtatcaatctccaacgactggtctgtttcctactaaaacctgcggaggagatcaaaaagctaagattcaggattcgctttactgtgcagccggtgcatgggcgttggcgctggcttacaggagaattgatgacgacaagggtcggacccacgagctcgaacattcagccatcaaatgcatgcgaggaatcctttactgttacatgcgccaagcagataaggtgcaacaattcaaacaagacccgaggccgactacgtgtctccattcggtctttaatgtccatactggggacgaacttctttcctacgaggaatacggacacctgcagattaatgccgtcagtctttacctgctttacctggtcgagatgatttcatctggtctgcagattatctacaataccgacgaagtgtcgtttattcagaaccttgtattctgtgtggaacgagtgtaccgagtgcctgactttggtgtttgggaacgggggagcaaatacaacaatggatcaacggaactccacagctcctctgtcggtctggccaaggccgcacttgaagcgataaacggttttaacctctttgggaatcaagggtgctcatggtcggtgatctttgtagaccttgatgcacacaaccgtaatagacagaccctttgttcgctgcttccacgggagtcgcggtcgcataacactgatgcagcacttctcccatgtattagctaccctgcttttgcccttgatgacgaagtcctctttagccaaacgcttgataaggtggtcagaaagctgaagggcaagtacggttttaagcggtttctccgcgatggatacaggacttcccttgaagatcccaatcgctgttactataagcctgctgagattaagctgttcgacggcattgaatgcgaatttcctattttctttctgtacatgatgatagatggcgtgttcagaggaaaccctaagcaagtgcaggagtaccaggatctgcttactccagtcctccatcacacgactgaaggttaccccgtcgtcccaaagtactactacgtcccggcagatttcgtcgaatatgagaagaacaaccctggaagccagaagagattcccatcgaactgcgggcgagatggaaaactcttcctttgggggcaggccctctacatcattgccaagctgctggccgatgagctcatttcgcctaaggacattgatccagtgcagcgttacgtgcctctgaaggatcagcgtaacgtgtccatgcggtttagcaatcaggggccgctggaaaatgacctggtggtgcatgtggcattgatcgcggagtcacagagactgcaggtgttcttgaacacttatggtatccaaacccagactccacagcaagtcgaacccattcagatctggcctcagcaagaactggtgaaggcttatcttcagctggggattaatgaaaagctcggcctgtccggacggcctgataggccaattggatgcctcggaacttccaaaatctaccgcattctgggtaaaacggtggtctgttaccctatcatcttcgatctcagcgatttctacatgtcccaggatgtgtttctcctcattgatgacatcaaaaatgcccttcaattcattaaacaatactggaagatgcatggtcggcccttgttccttgttcttattcgggaagataacattcgggggagcagatttaacccgatacttgacatgcttgcagcacttaagaaagggattattggcggagtcaaggttcatgtggataggctccaaaccctgatatccggtgcagtcgtcgaacaacttgattttcttagaatctcggacaccgaagaattgcccgagttcaagagctttgaagaactggaaccacccaagcactccaaagtgaagaggcagagttcaactccctcagcaccagaattgggccaacaacctgatgttaacatatccgaatggaaggacaaacctacccacgaaattctgcagaaacttaatgattgttcgtgtctggcgagccaggcaatcctgcttggaatcttgctcaaaagggaaggtccgaactttatcactaaggaggggactgtctccgaccatattgaaagggtgtatcgccgcgcaggaagccaaaagctctggctggccgtgcgctacggagccgcattcactcaaaagttttcatcatctatcgccccccatataacgactttccttgtgcatggaaaacaggtgacgctgggcgcctttgggcatgaagaagaggtgatttccaaccctcttagcccgcgcgtgattcaaaacataatctattacaagtgtaacacccacgatgagagagaagctgtcatccagcaggagctggtgatacatatcggctggatcataagtaacaatccagagcttttttccggaatgcttaagatcaggattgggtggattattcatgctatggaatacgagctgcaaatcaggggcggtgataaacctgcacttgacttgtaccagttgtccccatcggaggtgaagcagttgcttctggacattcttcaaccccagcagaacggcagatgctggctcaatcgacgtcaaatcgatgggtcacttaatcgcaccccaaccggtttctacgatcgcgtctggcaaatcctcgagcggaccccaaatgggatcatagtggcaggtaagcatctgcctcaacaacctaccttgtccgacatgactatgtacgaaatgaacttttccctgctcgtggaggataccctcggtaacatagaccaaccccaataccggcaaatagtggtcgaactccttatggtggtgagcattgtgctggagagaaacccagaacttgaatttcaagacaaagtggacctggatcgtctggtgaaagaggcctttaacgaatttcagaaggaccaatccagacttaaggaaattgaaaagcaggatgacatgacgagcttttacaacacgcctccacttggcaagcggggtacctgtagctacctgaccaaggccgtgatgaacctgctcctggaaggagaggtgaaaccaaacaatgacgatccttgtctgatatca

SEQ ID NO: 18137 - DNA, 3279 bp, synthetic construct
  misc_feature 1..3279: note = source = /note="Description of Artificial Sequence: Synthetic coding sequence"
  source 1..3279: mol_type = other DNA
atggcaggagcagcaggtttgaccgcagaagtgtcctggaaagtgcttgaaaggcgagcaagaactaagcgcagcggaagcgtgtacgagcctctgaagtcgatcaacctgccgcgccctgataacgagacgctgtgggataaacttgaccattactacagaatagtaaaatcgactttgctgctgtaccaatcgcctactactgggcttttcccaactaagacctgcggtggggaccagaaggcgaaaattcaagattcactctactgtgcagcaggagcctgggcacttgctctggcctaccgacggatcgacgacgataagggaaggactcacgagcttgaacattcggctattaagtgcatgcgtggaattctgtactgttacatgcgacaagcggataaggtgcagcagtttaagcaagacccaagaccaaccacctgccttcattcagtgttcaacgtacataccggagatgaattgctgagctacgaggaatacggacacctgcagattaatgccgtgtcgctttaccttctttaccttgtcgaaatgatctcgtctggtctgcagataatctacaacacggatgaagtgagctttattcagaatcttgtgttctgcgtggaacgggtctaccgggttcctgactttggcgtctgggagagaggctcgaagtacaataacggctccaccgaattgcactcatcatccgtgggacttgctaaagcggcacttgaagcgatcaacggattcaatctgtttgggaaccaaggctgttcgtggagcgtgatctttgtggatcttgatgcgcacaaccgaaaccggcaaaccctctgtagcctcttgccacgcgaatccaggtcccataacaccgatgcggcgctccttccctgcatatcatacccggcttttgctctcgatgacgaggtgcttttttcccaaactctcgacaaagtggtcagaaaacttaagggaaagtacggttttaagcggttcctcagggacggttaccgtaccagcttggaagatcccaatcgctgttattacaagcccgccgaaatcaaacttttcgatggtatagagtgtgaatttccgatcttttttctctacatgatgattgatggtgtgtttcgtggtaatcctaaacaagtgcaagagtaccaagacctcctgactcccgtcctgcaccacactactgaaggatacccagtcgtgccaaagtattactacgtgcccgcagatttcgtcgaatacgaaaagaataaccccggctcccaaaagcggttcccatcgaattgtggacgtgatggtaagctgtttctctgggggcaagcgctctacatcattgcaaaactcttggctgacgaattgatctctccaaaggacattgatcctgtccaacgttacgtgcccctgaaagatcaaagaaacgtgtccatgagattttccaatcaggggccactcgagaatgaccttgtcgttcatgtcgcccttattgcagaatctcagcgattgcaggtctttttgaatacctacggcattcaaacccaaactcctcagcaggttgagcccatacaaatctggcctcagcaggaactggtgaaagcatatctccaactgggtatcaatgagaagctcggattgagcggtcgccctgatcggcctatcggttgcctgggaacgtcgaagatataccgaattcttggaaagaccgtggtctgttatcctatcatttttgatcttagcgacttttacatgtcccaggatgtctttctcctgatcgatgatatcaagaacgccctgcagttcattaaacagtactggaagatgcacggcagacctctcttccttgtgttgatcagggaagataacataagaggttcgcggttcaatccaattctggatatgcttgctgccctgaaaaaaggtatcattggtggagtgaaggtgcatgtcgataggctccagaccctgattagcggtgctgtggtggaacagctcgactttcttcgcatttcggatacggaagaactgcctgaattcaagtcgtttgaggaacttgagcctcccaagcatagtaaagtgaaacggcaaagctcgaccccatctgcacctgaactgggacagcagcctgatgtgaacatctctgagtggaaggacaagcctacccatgaaattctccagaaactgaacgattgctcgtgtcttgcttcccaagcaattcttcttggcattttgctgaagcgtgaagggcccaacttcataaccaaggagggtactgtgagcgaccatattgagcgtgtgtacagaagagcaggaagccagaagctgtggcttgcagtcagatatggggcagcattcactcagaagttcagctcgtcgatagctccgcatatcactacgtttcttgtgcacgggaaacaggtgactctcggagcctttggacacgaagaagaagtgatctcgaatcctctcagccctcgcgttatacagaatatcatctattacaagtgtaatacccacgatgaaagagaagcagtcatccagcaagaattggttattcatattggctggatcatttctaacaacccagaacttttctcggggatgctgaagattcggattggttggattattcatgcgatggaatacgaactccagattaggggtggtgataagccggcacttgacctttaccagctgagcccaagcgaggtgaaacaactcctgctggacatcctgcagccgcagcaaaacggccgctgttggctgaaccggcgccagatagatggatcccttaaccggactccgaccggtttttacgatcgcgtgtggcagattctggagaggaccccaaatggaatcatcgtcgctggaaagcatctgccgcaacagcctacgctttcggatatgaccatgtatgaaatgaacttctccctgctggtggaggacacgctgggtaacatcgatcaacctcaatacaggcaaattgtcgtcgagctgctgatggtggtgtccatagtccttgagagaaaccccgaactggagttccaagataaagttgatcttgaccgacttgtgaaggaagcctttaacgaatttcagaaggatcaatcccggctgaaagagatagagaagcaagacgacatgacttcgttttacaacactccaccactggggaagcgaggtacgtgctcctaccttactaaagctgtcatgaatcttcttctcgaaggagaggtgaagcccaacaacgacgatccatgtcttatatca

SEQ ID NO: 18138 - DNA, 3279 bp, synthetic construct
  misc_feature 1..3279: note = source = /note="Description of Artificial Sequence: Synthetic coding sequence"
  source 1..3279: mol_type = other DNA
atggcaggagccgccggacttactgcggaagtcagctggaaggtgctcgagcgccgggccagaaccaagcgctcaggatccgtgtatgaacctctgaagtcgattaatctccccagaccagacaatgaaaccctgtgggacaagctggatcactactaccggatcgtgaagtctaccctcctgctttaccagtcgccaaccaccggactgtttccgaccaagacttgtggaggcgatcagaaagccaaaatccaggacagcttgtactgtgctgcaggggcgtgggctttggctttggcataccgccggatcgatgatgacaagggtaggactcatgaactcgaacatagtgcaatcaagtgtatgcgcgggatactgtattgctacatgcggcaggcggataaagtgcagcagttcaagcaggacccgcgcccaaccacctgcctgcactcagtgtttaacgtgcatacgggagacgagttgctctcgtacgaagagtacggtcatctgcagatcaacgcggtcagcctgtacctgctgtacctggtggagatgatcagcagcggactgcagatcatatacaacactgacgaggtcagttttatccagaacttggtgttctgtgtggagcgcgtctaccgcgtccctgatttcggggtctgggagaggggctcgaagtacaataatggatcgactgagttgcactccagctcagtgggtctggccaaggcggccctcgaggcgatcaatggattcaacctgttcggaaatcaaggctgctcgtggagcgtcattttcgtggacctggacgcgcacaaccgaaacagacagacgctgtgctcgcttctgccgcgggaatcaagatcacataacactgatgccgccctcctgccttgcataagctatcccgctttcgcgctggatgacgaggtccttttcagccagaccctggacaaggtcgtgcgcaaactgaagggcaagtatggattcaagcgctttttgcgcgacggctacaggacttcactggaggaccccaatagatgctactacaagcctgccgagatcaagctgttcgacgggatcgaatgtgaatttccgatcttttttctttacatgatgattgacggggtattccgcggaaatccaaagcaagtgcaggagtaccaagatctgctgaccccagtcctccaccacactaccgagggctacccggtggttccgaagtactactacgtgccagcggacttcgtcgagtacgaaaagaacaatccggggagccaaaaaagattcccgtccaactgcggccgggatggaaagctgttcctgtggggccaagcgttgtacatcatcgctaagctgttggccgacgaactgatctcgccaaaggatatcgatccggtccagcggtacgtcccgctgaaggatcagcgcaacgtttcgatgagattctctaatcaggggcccttggagaacgacctcgtggtccacgtggctctcatcgccgaaagccagagactccaggtgttccttaatacgtacggcatccagacccaaacgccgcaacaggtggaaccgatccaaatctggccccagcaagagctggtgaaggcctacctgcagctcggaatcaatgaaaaactcgggctctcgggacgcccggaccggccgatcgggtgcctcggaacttcaaagatctaccgcatcctcggcaagaccgtcgtgtgctaccctatcatattcgacctgtcggatttctacatgagccaagatgtgttcctgctgatcgacgatatcaaaaacgcgctgcaattcatcaagcaatattggaagatgcacggacggccactgttcctggtgctgatccgggaagataacatccgaggatcgcggttcaacccgatcttggacatgctcgccgctttgaagaagggcattattggaggagtgaaggtccatgtagaccggctgcagactctgatctctggcgcggttgtggaacagctcgacttcctccggatctccgacactgaagaacttcctgagttcaagtcattcgaggagctcgaaccgccgaagcattcgaaagttaagcggcagtcgtccacgccgtcggccccagagctcggacagcagccagatgtcaatatctccgaatggaaggacaagccaacccatgagatcttgcagaagctcaatgactgcagctgcctggcaagccaggcaatcctgctcggtatcttgctgaagcgggaaggaccgaatttcattactaaggagggcactgtgtcggaccacatcgaacgcgtgtacagacgagcgggctcacagaagctgtggctggcggtgcggtacggggcagccttcacccaaaagttttcctcctcaatcgcgcctcatatcacgaccttcttggttcatggtaagcaggtgacccttggagccttcggacacgaagaagaggtgatctcgaacccactgtcacctcgcgtcatccaaaacatcatttactacaagtgtaacacccatgacgagcgcgaagcggtgatccagcaggagctggtgatccacatcgggtggatcatcagcaacaatccggagctgttcagcggaatgctcaagatccggatcggctggattatccacgcaatggaatacgaattgcagatcagaggcggagacaagcctgccctggatctctatcagctgtcgccgtcggaggtgaagcaactgctgctggatatccttcagccgcagcagaatggaaggtgctggctgaatcgaaggcagatcgacggctccctcaacagaacccctaccggattctacgacagagtgtggcaaatcctcgagcggactccgaatggcatcatcgtggccggcaagcacctcccgcagcagccaaccctgagcgatatgactatgtacgaaatgaacttcagcctcctggtggaagatacccttggaaacattgatcaacctcaatacagacagatcgtggtggagctgctgatggttgtctcaatcgtcctggaacggaatccggaactggagttccaagacaaggtggatcttgaccggcttgtcaaagaggcctttaacgaatttcagaaggatcaatcccgccttaaggagattgaaaagcaagacgacatgacctccttctacaacaccccgccgctgggcaagcgcggaacctgcagctacctgactaaggccgtgatgaacctgctgctggagggagaagtcaaacctaacaacgacgatccttgtctcattagc

SEQ ID NO: 18139 - DNA, 3279 bp, synthetic construct
  misc_feature 1..3279: note = source = /note="Description of Artificial Sequence: Synthetic coding sequence"
  source 1..3279: mol_type = other DNA
atggccggcgccgccggcttaacagcagaagtttcttggaaagtcctagagagaagagcccgaactaagcgctccggcagcgtgtatgagcccctgaagtccattaatctgccaagacctgacaacgagacgttatgggacaagctcgatcactattataggattgtcaagtctacactcctgctgtaccaatcgcccactacaggtttgtttcccacaaagacatgtggcggagaccaaaaagcaaaaatccaggatagtctttactgcgctgcaggagcttgggcccttgcgctggcatatcggcgtattgatgatgataaggggagaactcatgagctggagcattctgctattaagtgcatgcggggcattttgtactgctacatgagacaagccgacaaagtgcaacagtttaagcaggatccccggcccacaacttgcctccatagcgtctttaatgttcatacaggggatgagctcttgagctacgaggaatatggccacctgcagataaatgcggtgtctttatacctgctctatctcgtggaaatgatcagctccggcctgcagatcatctataatacggacgaagtttcgttcattcagaatctggttttttgtgtggagcgcgtctatagggtgcctgacttcggtgtgtgggagcgcgggtccaaatataacaatgggtctacagagttacattctagcagtgtcggcttagccaaggctgcgctcgaagccattaatggctttaacctgttcggcaatcaagggtgttcctggagcgtaatcttcgtggatcttgacgcccacaatcgcaatagacaaacattgtgctcgctgctgccaagagagtccaggtcgcacaacacagacgccgccctgctgccatgtatctcttacccagcctttgccctcgacgatgaagtcctgttttcccagaccctggataaagtggtaagaaaattaaaagggaaatacggatttaaacggtttttacgggacgggtaccggacaagcctggaggacccaaacagatgttactacaaacctgcggagataaagctgtttgatgggattgagtgtgaattccccatcttcttcctgtacatgatgattgacggggtgttcagggggaaccctaagcaggtgcaggagtaccaggacctgctaactcctgtactacaccacacaacagagggatatcctgtcgttccaaagtattactatgttcctgccgatttcgtagagtatgagaaaaataaccccggatctcagaagcgattcccatccaactgtgggcgcgatggcaagctgttcctatggggccaggctctgtatattatcgcgaagctacttgccgatgaactcatttcacccaaggatattgatcccgttcagaggtacgtgcctcttaaagaccagaggaacgtgtcaatgagattttcaaaccaaggccctttagaaaatgacctggtggtgcatgtggctcttatagccgagagtcagaggctgcaggtgtttctgaacacttatggaattcagacccagacccctcaacaggtcgaacccattcagatatggcctcagcaggaactagtgaaggcttatctgcagctgggtatcaatgagaagctggggctgagcgggcggccagaccgaccgatcggctgcctgggtacaagtaagatctaccgcatcttggggaaaaccgtggtgtgttacccaatcatcttcgatctttcagacttttacatgtctcaggatgtatttctcctgattgacgatatcaagaatgcactgcagttcattaagcagtactggaagatgcatggaagaccactgttcttggtcctcatccgagaagataacattagaggctccagattcaatcctattcttgatatgctggcggccctcaagaaaggcatcatcggcggtgttaaagtacatgtcgacaggcttcagaccttaattagcggcgccgtcgtggaacagttggatttcctcaggatctctgatactgaggagcttccggagtttaaatcatttgaggaattggaaccgccgaaacactccaaagtcaagagacagagtagcacccccagtgcccctgagttggggcaacagccggacgtaaacatttctgaatggaaggacaagcccacccatgagatcctccagaaactgaacgactgctcctgtcttgccagtcaagcaatcttactcgggatactgcttaagcgggagggacccaactttatcacaaaagagggcacagtgagcgaccatatcgagcgtgtgtacaggagggccggaagtcagaaattatggctggccgtcagatacggtgctgcttttacccagaagttttcatcatcaatcgctcctcacataactaccttcctggtccatgggaagcaggtgaccctcggtgccttcggccatgaggaggaagttatcagcaaccctctctcccctcgggtgatccagaatataatctattataaatgtaatactcatgacgagagggaggccgtcattcaacaggagttagtgatccatatcggatggatcatcagtaacaatcctgagctgttttccggaatgctaaaaatcagaataggctggatcatacacgccatggagtacgaattgcaaattcgaggcggagacaagccagccctggatctttaccaactgtcgcctagcgaggttaagcagctgctgttggatatcttgcaaccgcagcagaacggtcgttgttggctaaatcggcgccagatcgacggatccctgaataggaccccgactgggttttacgacagagtttggcagatcctagagagaacccccaacgggattatagtggcagggaaacatttgccacagcagcccaccttgagcgatatgacaatgtatgagatgaatttttcactgctggtggaggacactctagggaatatcgatcagcctcagtaccgccaaattgtggtggagcttttaatggttgtatctatagtcctggaacgcaatcctgagctggaattccaagacaaagtagatctcgatcgactggtgaaggaggcatttaacgagtttcagaaagaccagagccggctgaaggagatcgaaaaacaagacgacatgacgagtttttacaacacgcctcccctcggcaagcgtggaacatgttcatacctcacgaaggctgtaatgaatctgctcttggaaggcgaggtgaagccgaacaatgatgatccgtgcctcatttca

SEQ ID NO: 18140 - DNA, 3279 bp, synthetic construct
  misc_feature 1..3279: note = source = /note="Description of Artificial Sequence: Synthetic coding sequence"
  source 1..3279: mol_type = other DNA
atggcgggtgcggcgggtttaacggcggaagtttcgtggaaagtattagaacgacgtgcgcgaacgaaacgttcgggttcggtatatgaaccgttaaaatcgataaatttaccgcgaccggataatgaaacgttatgggataaactagatcattattatcgaatagttaaatcgacgctactattatatcaatcgccgacgacgggtttatttccgacgaaaacgtgtggtggtgatcaaaaagcgaaaatacaagattcgctatattgtgcggcgggtgcgtgggcgttagcgttagcgtatcgacgaatagatgatgataaaggtcgaacgcatgaattagaacattcggcgataaaatgtatgcgtggtatattatattgttatatgcgtcaagcggataaagtacaacaatttaaacaagatccgcgtccgacgacgtgtttacattcggtttttaatgtacatacgggtgatgaattattatcgtatgaagaatatggtcatttacaaataaatgcggtatcgttatatttattatatttagtagaaatgatatcgtcgggtctacaaataatatataatacggatgaagtatcgtttatacaaaatttagtattttgtgtagaacgtgtatatcgtgtaccggattttggtgtatgggaacgtggttcgaaatataataatggttcgacggaattacattcgtcgtcggttggtttagcgaaagcggcgttagaagcgataaatggttttaatctatttggtaatcaaggttgttcgtggtcggtaatatttgtagatctagatgcgcataatcgtaatcgtcaaacgttatgttcgttactaccgcgtgaatcgcgatcgcataatacggatgcggcgctattaccgtgtatatcgtatccggcgtttgcgctagatgatgaagtactattttcgcaaacgctagataaagttgttcgaaaattaaaaggtaaatatggttttaaacgatttctacgtgatggttatcgaacgtcgttagaagatccgaatcgttgttattataaaccggcggaaataaaactatttgatggtatagaatgtgaatttccgatattttttctatatatgatgatagatggtgtatttcgaggtaatccgaaacaagtacaagaatatcaagatttattaacgccggtattacatcatacgacggaaggttatccggtagttccgaaatattattatgttccggcggattttgtagaatatgaaaaaaataatccgggttcgcaaaaacgatttccgtcgaattgtggtcgtgatggtaaattatttctatggggtcaagcgctatatataatagcgaaattattagcggatgaactaatatcgccgaaagatatagatccggtacaacgttatgttccgttaaaagatcaacgaaatgtttcgatgcgtttttcgaatcaaggtccgctagaaaatgatctagtagttcatgtagcgttaatagcggaatcgcaacgtttacaagtttttctaaatacgtatggtatacaaacgcaaacgccgcaacaagtagaaccgatacaaatatggccgcaacaagaactagtaaaagcgtatttacaattaggtataaatgaaaaattaggtctatcgggtcgtccggatcgtccgataggttgtctaggtacgtcgaaaatatatcgtatattaggtaaaacggttgtatgttatccgataatatttgatttatcggatttttatatgtcgcaagatgtttttctattaatagatgatataaaaaatgcgctacaatttataaaacaatattggaaaatgcatggtcgtccgttatttttagttttaatacgtgaagataatatacgtggttcgcgatttaatccgatactagatatgttagcggcgttaaaaaaaggtataataggtggtgttaaagtacatgttgatcgtttacaaacgctaatatcgggtgcggtagtagaacaactagattttttacgtatatcggatacggaagaattaccggaatttaaatcgtttgaagaactagaaccgccgaaacattcgaaagtaaaacgacaatcgtcgacgccgtcggcgccggaactaggtcaacaaccggatgtaaatatatcggaatggaaagataaaccgacgcatgaaatattacaaaaactaaatgattgttcgtgtttagcgtcgcaagcgatattactaggtatactactaaaacgagaaggtccgaattttataacgaaagaaggtacggtatcggatcatatagaacgtgtttatcgtcgagcgggttcgcaaaaactatggttagcggtacgttatggtgcggcgtttacgcaaaaattttcgtcgtcgatagcgccgcatataacgacgtttttagttcatggtaaacaagtaacgttaggtgcgtttggtcatgaagaagaagttatatcgaatccgctatcgccgcgagttatacaaaatataatatattataaatgtaatacgcatgatgaacgtgaagcggtaatacaacaagaattagtaatacatataggttggataatatcgaataatccggaactattttcgggtatgctaaaaatacgaataggttggataatacatgcgatggaatatgaattacaaatacgtggtggtgataaaccggcgctagatttatatcaactatcgccgtcggaagtaaaacaactattattagatatattacaaccgcaacaaaatggtcgttgttggttaaatcgtcgacaaatagatggttcgctaaatcgtacgccgacgggtttttatgatcgtgtttggcaaatattagaacgtacgccgaatggtataatagtagcgggtaaacatttaccgcaacaaccgacgctatcggatatgacgatgtatgaaatgaatttttcgctactagtagaagatacgctaggtaatatagatcaaccgcaatatcgtcaaatagttgtagaattattaatggttgtttcgatagtactagaacgtaatccggaactagaatttcaagataaagtagatttagatcgattagtaaaagaagcgtttaatgaatttcaaaaagatcaatcgcgactaaaagaaatagaaaaacaagatgatatgacgtcgttttataatacgccgccgttaggtaaacgaggtacgtgttcgtatttaacgaaagcggttatgaatctattattagaaggtgaagtaaaaccgaataatgatgatccgtgtttaatatcg

SEQ ID NO: 18141 - DNA, 3279 bp, synthetic construct
  misc_feature 1..3279: note = source = /note="Description of Artificial Sequence: Synthetic coding sequence"
  source 1..3279: mol_type = other DNA
atggctggagctgcaggactgaccgctgaggtatcttggaaggtgctggaacgccgggcgcgtactaaacggtctgggagcgtgtacgagcctctgaagtcaataaatctgcctagacctgataacgaaactctttgggacaagctggatcactattaccgaattgtgaagagtactcttctactttatcagagccccacaaccggtctattccccactaagacatgtgggggggatcagaaagcaaaaatccaggattctctgtattgcgctgcaggcgcttgggctctggcactggcctacagaaggattgatgacgacaaaggccgcacacacgaactggaacattccgccataaagtgcatgagggggatcttgtactgttatatgaggcaggccgacaaagttcagcagttcaagcaggacccacgtcctactacttgtctacatagcgtgttcaatgtgcacactggtgacgaactgttgagctacgaggagtacgggcacctgcagattaacgccgtgtccctctacttgctctacctcgtggagatgatctccagtggattacagattatttacaatacagatgaggtttcttttattcagaatctggttttttgcgtcgagagggtgtacagggtgcccgacttcggcgtgtgggagaggggtagcaaatataacaatggatcaaccgaactacattcctctagcgtgggcttggccaaggccgccctggaagcaattaatgggtttaacttgttcggtaaccagggctgcagttggagtgtgatcttcgtcgatctggacgctcacaatcgaaatcgccagaccctctgttccctattgcctcgagaaagcagaagccacaacacagacgcagctctcctgccatgcatatcataccctgcttttgccctggatgacgaagttcttttttctcagactctggacaaagtggttcggaagctgaaagggaagtatggtttcaaacgattcctgcgggacggttaccgaacatctttggaggaccccaaccgctgctactataagccagcagaaattaagctgtttgacgggatcgagtgtgagttcccaatcttctttctgtatatgatgatcgacggtgttttccggggtaatccgaaacaagtccaggaataccaggacctgctgactccggtgctgcaccatacgacagagggttatcccgtggtgcctaaatactactacgtccccgccgattttgtcgagtacgaaaagaataaccccggtagtcagaagcgcttcccctccaactgcgggagagacggcaagctgttcttgtggggtcaggccctatacattattgccaagctcctggccgacgagttaattagtccaaaagatatcgatcctgtccaacggtacgtgccgttgaaagatcaacgaaatgtctccatgaggttcagcaaccaaggtcccctggagaacgatctggtagtccatgtcgccctgattgcagagtcacagagattacaggtgttcctgaacacatatggtattcagacccaaaccccccagcaggtggaaccaatacagatctggccacaacaggaactggttaaggcctacctgcaactgggcattaatgaaaaattggggttgtctggacggcccgatagacccatcggatgtctgggcaccagcaagatctaccgcattctgggcaagaccgtcgtgtgttatcccatcatattcgatctgtcagatttctatatgtctcaggatgtctttttactgatcgatgatatcaaaaatgcacttcagttcataaaacaatactggaagatgcatggccgcccgttgttcctggtgctaatcagagaggataatatcagggggtcccgtttcaaccctatcttggacatgttggccgctctaaagaaggggataataggtggagttaaggtccacgttgacaggctgcaaaccctaatctcaggtgcagtggtggaacagttggactttcttaggatttctgataccgaagaattgcccgaattcaaatccttcgaggagttggagccaccaaagcattccaaggtgaagcggcaatccagtacaccgtcagcacctgaactaggccagcagcccgacgtcaacatcagcgagtggaaagataagccgactcatgagatcctccagaaactgaacgattgctcttgtcttgcttctcaggccattcttctaggaatactgctcaagagggagggaccgaattttatcaccaaagaaggcacggtgagtgatcatatagagcgcgtctaccggcgggccggcagccagaaactgtggctagctgtgcgatatggcgcggccttcactcagaaattctcaagctctatcgctccacacattacgacttttttggtccatggcaaacaggtgaccctgggagcttttgggcacgaagaggaggtcataagtaatccgctttcaccccgggtaattcagaatattatctactataaatgcaacacccacgacgaacgcgaggcggttatccagcaagaactcgtgatccatatcgggtggatcatctcgaataatccggagctgttcagcggcatgttgaagatcagaattgggtggatcattcatgcaatggagtatgagctgcaaattcgaggcggagataagccggccctagatctgtatcaactaagcccatctgaggtgaaacagctgctcttagatatattgcaaccacaacagaacggacgatgctggcttaacaggagacagatcgacggcagcctgaatcgcacccctaccggattctatgatcgcgtttggcagattcttgagcgcactcccaacggcataatagttgcagggaagcacctcccacagcagcccactctgagtgatatgacaatgtatgagatgaatttttctcttctcgtggaggatactttaggaaatatcgaccagccacagtaccgacagattgtagtcgaattgttaatggttgtttcaatagtgctggagaggaatcccgagctcgagtttcaagataaagttgacttggaccgacttgtgaaagaagcatttaacgagttccaaaaggatcaaagcagactgaaggaaattgaaaagcaggacgacatgactagtttctataatactcctcccttaggcaagcgtgggacttgtagctacctcacaaaagctgtcatgaacttgctgctagagggtgaggtgaaaccaaataatgatgacccatgcttaatctca

SEQ ID NO: 18142 - DNA, 3279 bp, synthetic construct
  misc_feature 1..3279: note = source = /note="Description of Artificial Sequence: Synthetic coding sequence"
  source 1..3279: mol_type = other DNA
atggccggagcagccggcttgaccgctgaggtctcgtggaaggtcctggagcgacgcgcccgtaccaagagatcgggttctgtttacgagcctctcaagtccatcaacttgcctcgccccgataacgagacactgtgggataagctcgatcactactataggatcgtcaagagcacgctgctcttgtaccaatcgcctacgacaggactgttccccaccaagacatgcggaggcgaccagaaggccaagattcaggactcgctctattgtgcggccggtgcttgggctctggccctcgcctaccgccggattgatgatgataagggccgcacccacgagctagagcatagcgctatcaagtgcatgcgcggtatcctttactgctatatgcgtcaggccgataaggtccagcagttcaagcaggatccgcgccctaccacctgcctgcatagcgtcttcaacgtgcatactggcgatgagctcttgtcctacgaagagtacggacacctgcagatcaacgctgtcagtttgtatctattgtacctggtggagatgatatcctccggcctgcagataatctacaacactgatgaggtgtcgttcatccagaacctagttttctgtgttgagagagtctacagggttcccgacttcggagtgtgggagagaggctctaagtataacaacggcagtacggagctgcacagctcctctgtaggtcttgcgaaggccgctctggaagcgattaacggtttcaacttgttcggtaaccagggttgtagttggtctgttatcttcgttgatctagatgctcacaatcgcaacagacaaaccctttgcagcctcctcccgcgtgagtcccgaagtcacaatactgatgcggccctgctcccctgtatttcttacccggcttttgcccttgatgatgaggtcctattttctcagaccctggataaggtggtccggaagcttaaaggcaagtatggtttcaagcgtttcctgcgcgacggctaccgcactagcctggaagaccccaaccggtgctactacaagcctgcagaaatcaagctgtttgacggaattgagtgtgaatttccaatcttcttcctctacatgatgattgatggcgttttccgtggaaacccaaagcaggtccaggagtatcaggacctccttacccctgtgttgcatcatactacagagggataccctgtggtgccaaagtactattacgtcccagcggatttcgtggagtatgagaaaaacaaccccggctctcaaaagcgtttcccctctaactgtggtcgcgacggaaagttatttttgtggggacaggctctgtacatcattgctaagctgctggccgacgaactcatctctccaaaggatatcgatcctgtgcagcgttacgtcccccttaaggatcagcgcaacgtcagcatgcgcttcagcaaccagggtcccttggagaacgatctggttgttcatgtcgccctcatcgccgagagccagaggcttcaggtattccttaatacctacggtatccagacacagactccccagcaggtggagcccattcaaatttggccccagcaggaactggtcaaggcgtacctccagttgggcatcaacgagaaacttggtctgagcggccgccctgatcgtccgatcgggtgtctgggaacatctaaaatctatcgtattctgggtaagacagtcgtctgctatcccattatttttgacctgagtgatttctacatgagccaggacgttttcttgctgatcgatgatatcaagaatgccctgcagtttatcaaacagtattggaagatgcacggcaggccgttgtttctggtcttgatcagggaggacaacattcggggctcccgtttcaacccgatcctcgacatgctcgcggcgctcaagaaggggattattggcggtgtaaaggtgcatgtggatagactacagacccttatctccggtgctgtcgttgaacagctcgatttcctgagaatctccgataccgaggagcttccagagtttaagtccttcgaggagttggagcctcctaagcactctaaggtcaagcgccagtcgagcacgccgtcggcccctgagcttggtcagcaacccgacgttaatatctcggaatggaaggacaagccgacccacgagattctgcaaaagctcaacgattgctcgtgcctcgcaagtcaggcgattctactgggaattctactgaaacgcgagggtccaaactttatcaccaaggaaggcaccgtctctgatcacatcgagagggtatacaggcgggccggttctcagaagctctggctcgctgtccgctacggtgccgctttcacccagaagttctcttcgagtatcgccccgcacatcactactttcctggtccacggaaagcaggtgactctgggtgcctttggtcacgaagaagaggtcatctcgaacccactctcaccccgtgtgatccaaaacatcatttactacaagtgcaacacgcacgatgaacgggaggccgtcatccagcaagaactcgtgatccacatcgggtggataatttcaaataaccccgaactcttcagcggcatgcttaagattcgtatcggctggattatccacgcaatggaatacgaacttcagatccgcggaggcgacaagcccgctctcgatctgtatcagctttccccctcggaggtcaagcagctccttcttgacatcctacagccccagcagaacggtcgatgctggttgaaccgccgccagatcgacggctcgcttaaccgtacgcccacgggcttctacgatcgcgtgtggcagatactcgagcgcactcctaacggcatcatcgtcgctggcaagcatctcccccaacagccgactctgtcggatatgacaatgtacgagatgaacttctcattactggtcgaagacactctcggcaatatcgatcagcctcagtaccgccagatcgtcgtggagctgctcatggtggtcagtatcgtgcttgaacgtaacccggagctagaattccaggataaagtcgatctggatcggcttgtgaaggaggcgtttaacgagtttcaaaaggatcagtcgcggttgaaggaaattgagaagcaagacgatatgaccagcttctataacaccccccccctaggcaagcgtgggacatgtagctacctgaccaaggctgttatgaacctgctgctggaaggtgaggtcaagcctaacaacgacgatccctgcctcatctct

SEQ ID NO: 18143 - DNA, 3279 bp, synthetic construct
  misc_feature 1..3279: note = source = /note="Description of Artificial Sequence: Synthetic coding sequence"
  source 1..3279: mol_type = other DNA
atggctggagcagctgggcttacggccgaggttagttggaaggtactcgaacgccgagcccggactaagcgctccggaagcgtgtatgagccacttaagagtattaacctgccgcggccagacaacgaaaccctgtgggacaagctggatcactactataggattgtgaaatctacactgctgctgtaccagtctccgaccactgggctgttcccgacaaagacctgcgggggtgaccagaaggcgaagatccaggatagcctgtactgcgcagcaggagcctgggccctcgcgctggcctaccggcgtatcgacgatgacaagggcaggacccatgagctcgagcactccgcaattaaatgcatgcgaggtatcctgtattgttacatgcgccaggccgacaaagttcaacagttcaagcaggacccgcgccctacaacttgcctccattctgtgttcaacgtgcacaccggggacgagttgttgagctacgaggaatatgggcacctgcagatcaatgcggtgtccctttacctgctgtatctcgtcgaaatgataagcagcgggctgcagataatctataacaccgatgaagtgtcatttatccagaatctcgttttttgcgtggaaagggtgtatagagttccggactttggtgtgtgggaacggggctccaagtacaataacgggtcaacggagctacacagttcctctgtaggtctggccaaagcagccctcgaagccatcaacgggttcaacctctttggtaatcagggctgctcgtggtccgtaatttttgtggacctggatgctcacaaccgcaatcgccagacattgtgctcattgctgccccgggaatctagatcccataacaccgacgctgccctcctgccctgtatttcgtaccctgcatttgcattggatgatgaagtgttgttctcacagacactggacaaagttgtccgaaaactcaagggcaaatatgggttcaaacgctttttgcgagatgggtaccgcacaagcctcgaagaccctaaccggtgctactacaaacctgctgagattaagttgtttgatggaatcgagtgcgagttccccattttttttctttatatgatgatcgatggcgtattcagggggaatccaaagcaggtgcaggagtatcaggacttgctgaccccggtacttcatcatactacagaaggatatccagttgtgcctaaatactattatgttcctgccgatttcgtcgaatacgagaagaacaacccggggagccaaaagagattccctagtaactgcgggcgcgacggaaagcttttcttgtggggacaagcactttacattatcgcgaagctcctggccgatgaactcatcagcccgaaagatatagatccggtccagaggtatgttccactgaaggatcagcggaacgtgtccatgaggttcagtaaccaggggccgttggaaaatgacctcgtagtccacgtcgcgctcatcgccgaatctcaacgactccaagtgtttctcaatacgtacggtatccagacacagacgccgcaacaggtggagcctattcaaatctggccccagcaggaactggtcaaagcatatctacagctggggatcaatgaaaaactaggcctaagtgggcggccagacagaccaatcgggtgcctcgggacatccaaaatctatcgcatactcggcaagacggtggtctgttatcctatcatcttcgacctttccgacttttatatgtcccaggatgtattccttctgatcgatgacatcaagaacgcattgcaattcatcaaacagtattggaagatgcatggtcggcctctgttcctggtgctgatacgcgaagacaatatacggggttctaggttcaatcccattttagatatgttggccgcactgaagaagggcattatcggcggagtcaaggtgcacgtggatcggcttcaaactttgataagcggggccgtcgtcgagcagctggacttccttaggattagcgacacagaggaattaccagaatttaaaagcttcgaggaactggaaccgcctaaacatagcaaggtgaaacgacaaagttctaccccatccgcgccggagctcggccagcagcccgacgtaaatatctccgagtggaaggataaacctactcacgaaatcctgcagaagttgaatgactgcagttgtcttgcgagtcaagctattctcttgggaatcctgttgaaaagggaaggacccaacttcatcactaaggagggcaccgtcagcgaccacattgaacgagtatatcgcagagccggcagccagaaactttggctagccgtccgttacggcgcagcctttacacagaaattctcaagttcaatagccccacacataactaccttcctggttcacggtaaacaggtcaccctcggagcttttggacatgaggaggaggtgatctccaacccgctgagcccgcgcgtgattcaaaacattatatattacaagtgcaatactcatgacgaacgcgaggccgtgatccagcaggaactcgtgatccacattggctggataatttccaacaatcccgaactgttcagcggcatgttgaagattagaatcgggtggataattcacgccatggaatacgagctccaaataaggggtggcgacaagccagcactggatctataccagttatcgccctcggaggtcaagcaattgctactggatatcctccagccgcagcagaatgggcgttgttggttaaaccgccggcagattgatgggagcctgaaccggacccccacagggttctatgatagggtatggcagattctcgaacggacccccaatgggatcatcgtggcagggaagcatcttcctcagcagcctactctcagcgacatgacgatgtacgagatgaatttttcactgttggtggaggataccctaggcaatatcgatcagcctcagtataggcagattgttgtggaactactaatggttgtgtccattgtgctggagcggaacccagaacttgagtttcaggacaaagtggatttggacagactggtcaaagaagctttcaacgagttccagaaggatcagagtaggcttaaagagattgaaaagcaagacgatatgacatccttttacaacacacctcccctcggtaaaaggggcacctgcagttacctgacaaaagccgtgatgaacctcctcctggagggggaggtgaaacccaacaatgacgacccttgtttgatctct

SEQ ID NO: 18144 - DNA, 3279 bp, synthetic construct
  misc_feature 1..3279: note = source = /note="Description of Artificial Sequence: Synthetic coding sequence"
  source 1..3279: mol_type = other DNA
atggctggcgccgcagggctcaccgccgaggtgagctggaaagtcctagagcggagagctagaactaagcgcagtggctccgtctacgagcccctcaagtcaatcaatttgccacggcctgacaatgagaccctctgggacaagctggatcactactaccgtatcgttaaatctacgctactgctgtaccagagccccacaacaggactctttccgaccaagacttgtggaggtgatcaaaaggcaaagattcaggatagcttatactgtgcagccggggcgtgggctcttgccctggcataccgtcgtatcgatgatgacaaaggccggactcacgagttggagcactccgccatcaaatgcatgcgcgggattctgtattgctacatgcgccaagctgacaaggttcaacagttcaagcaagatcctcggccaacgacatgcctgcactccgtctttaatgtgcatactggtgacgaattattgagttacgaggagtacggccaccttcagattaatgccgtttccctgtatttgctctacctggtagagatgatttcatcaggcctccagattatctataacacggatgaggtcagcttcattcagaatcttgtgttttgtgttgagagagtgtatagagtgcccgatttcggcgtttgggaaagaggcagcaaatacaataacggatcgacggagttgcattcaagcagcgttggtctcgctaaggccgcccttgaagccattaacgggtttaacctatttgggaatcaggggtgttcgtggtctgtcatatttgtcgatctcgatgcccacaatcggaaccggcaaacgctttgcagcctgctaccaagggagtcccggtcacacaacaccgacgcggcattgttaccctgtatcagttaccctgcttttgccctggacgatgaggttctcttcagccagacactcgataaggtggttcgcaaactcaaaggcaagtacggatttaagagatttctgagggacggttataggacttcgcttgaagaccctaatcgctgctattataagccggctgagataaagctgttcgatgggatcgaatgcgagttcccaatcttcttcctgtatatgatgattgatggcgttttcagagggaaccctaaacaggtgcaggagtaccaggatctgcttacgcccgtgctccaccataccaccgagggttatcccgtggttccaaagtactactacgttcccgccgacttcgttgaatacgagaaaaataacccagggagccaaaagaggttcccctccaattgcggccgcgatggcaagctgtttctgtggggtcaggctctgtatatcatagccaagttgctggctgatgagttgattagtcctaaggacattgaccccgttcaacgctacgtcccactgaaggaccagcggaacgtatccatgcgctttagtaatcagggccctctggaaaacgacttagtggtacacgtcgctcttattgccgaatcccaacggctccaagtttttctgaatacatatggcatccagactcagacgcctcaacaagtcgagcctattcaaatttggccgcagcaggaacttgtgaaagcatatctgcagctggggattaatgagaagctgggactgagcggaaggcctgatcgtcccatcgggtgtctggggactagcaagatctaccgcatcctgggcaagacagtggtttgctatccaatcattttcgatctttccgacttctatatgtcccaggatgtttttctgctaatcgatgatattaaaaacgcactgcagttcattaaacagtactggaagatgcacggacgccccctgttcttggtgctcatccgggaggacaacattaggggcagtcgattcaatccaatcttagatatgttagccgctcttaagaaaggcattattgggggcgtgaaggtgcacgtcgatcgactgcagacactcatcagcggagctgtagtggagcagctcgattttcttagaatcagcgacaccgaggagctgccagagttcaagagtttcgaagaactggagccgcccaagcattctaaagtgaaaaggcagagttcaaccccatccgccccggaactgggtcagcagccggacgtaaatatttctgaatggaaggataaacccacacatgagatcctccagaaactcaacgactgcagttgtctggcctcccaagcaatcctccttggcatcctgctgaagagagaaggacctaattttataacaaaagagggaacagtcagcgatcacattgaaagggtttacaggcgagccggctctcagaagttgtggctcgctgttcgttatggggccgcctttacacagaagttctcttcgtctattgcgcctcatattacgaccttcttggtgcacggaaaacaggtgaccttgggggcctttggtcacgaagaggaggtcatctccaacccattgagtccccgagtcatacagaacatcatctactacaagtgcaacacacacgacgaacgcgaggcagtgattcagcaagagcttgtcatacacatcggatggataatatccaataacccagagctgttctctggaatgctgaagataaggattgggtggattatccatgctatggaatacgaactgcagatccggggaggcgataagcccgcgttggatttgtaccagttgtctccctccgaggtcaagcagcttttgctagatatcctgcaaccgcaacagaatgggcgttgttggctgaaccgcaggcaaatagacggctccttgaatcggacacccacgggattctacgaccgcgtctggcagattctggaaagaacccccaatggaattattgttgcgggaaagcatctgcctcagcagcccacactatcagatatgaccatgtacgagatgaacttttccctcctggtggaagataccctcgggaacattgaccaaccccagtaccgccagatagtggttgagctcctgatggtggtgtcaatcgtgctcgaacgaaatccggaactcgagttccaggataaagtggacctggaccgattggtgaaggaggcttttaacgaatttcagaaagaccaatctaggctgaaggaaattgaaaagcaagacgacatgacatcattctataataccccacccctggggaaacggggcacttgctcatacttgacgaaagccgtaatgaaccttctcctggagggggaggtgaagccaaacaatgacgacccttgtctgatctca

SEQ ID NO: 18145 - DNA, 3279 bp, synthetic construct
  misc_feature 1..3279: note = source = /note="Description of Artificial Sequence: Synthetic coding sequence"
  source 1..3279: mol_type = other DNA
atggccggcgctgccggacttactgccgaggtcagctggaaagttctcgaacgccgggcccggacaaagagatccgggagcgtgtacgaacctctcaaaagcatcaacctacctcgccccgataatgaaacactgtgggacaagttggaccattactataggattgtgaagagcactctcctcctataccaatctcccaccaccgggctgtttcccaccaagacctgcggaggggaccagaaagccaaaattcaggattcactgtattgtgccgccggagcatgggccctggctttggcttacaggcgaatcgacgatgataagggtaggacacatgagctcgagcattcggccataaagtgtatgcggggcattctgtactgttatatgcgacaggcggacaaagtgcaacaatttaaacaggaccccagacctaccacctgtcttcactcagtgttcaatgtgcataccggggatgagctgctgtcatatgaagagtacgggcatctgcaaattaatgctgtcagcctgtacctcctctacctggtcgagatgatatccagtggacttcaaatcatctacaatactgatgaagtgtcttttatacagaatctggtgttttgcgttgagagagtgtatcgcgtaccggacttcggggtgtgggagcggggaagcaagtataacaacggctcaactgaactccacagctcctcagtcggcctggccaaggctgccctcgaggccatcaacggtttcaatctgtttggaaatcaaggctgttcatggtcggtcatcttcgtggatttggacgcacacaacaggaataggcagaccctgtgcagtcttctcccacgggagagccgatcccataacacggacgccgcactgcttccgtgcatttcatatcctgcattcgccctcgacgatgaagttctcttcagccagaccctggacaaagtcgtgcgcaagctcaaaggaaagtacggcttcaaacgctttctgcgggacggatataggacgtcattggaggacccaaatcggtgttactacaaaccagccgaaatcaaattatttgatggaatcgagtgcgaatttccaatattttttctgtacatgatgatcgatggcgtctttagaggcaaccccaaacaggtacaggaatatcaagatcttctcaccccagtactccatcacactacagagggataccctgtggtacctaaatattactatgtaccagccgatttcgttgagtacgagaagaacaatccaggctcccagaagcgatttcctagtaactgtggccgggacggaaagctgtttctgtggggacaggcactctacatcatagccaagctgctagccgatgaattgattagtcccaaggatatcgaccccgtccagagatatgtcccgctgaaagaccaaagaaatgtgtcaatgcggtttagtaaccagggcccgctggagaatgatttggtcgtgcacgtcgcactgattgcagaatctcagcgactgcaggtcttcctaaacacttacggaattcagacacagaccccacaacaggtcgagcccattcagatttggccacagcaggagctggttaaggcttaccttcagttgggaatcaatgagaagttgggcttatctggcaggcctgatcgccccatcggctgcctcgggacatctaagatttataggatattggggaaaacagttgtgtgctacccaattatttttgatctgagtgacttttatatgagccaagatgtgttcctgctgatcgacgatatcaagaatgccctgcagttcatcaaacagtactggaaaatgcatggaaggcctttattcttggtgttgatacgcgaagacaatatccgcggcagccggtttaaccccatactcgacatgctggctgccctcaagaaaggaatcatcggtggagtgaaggtccatgtggatagactgcaaacactgatttctggcgccgtagtcgagcagctcgatttcctgagaatctcggacacagaggagctgccagaattcaaaagcttcgaagagcttgaaccccctaaacactcaaaggtcaagcgccagtcatctaccccatccgccccggagttagggcagcagcctgacgtgaacatttcagaatggaaggataagcctacccacgagattctacagaagctcaacgactgttcatgcctcgcatcccaggctatactgctgggcatcctgctcaagcgagaggggccaaacttcattactaaggagggcactgtgagcgaccatattgaaagagtatacaggagagccggctctcagaagctttggctcgcagttaggtacggtgctgccttcacacagaagttttcgagcagcattgctccacacatcaccaccttcctagtccacggaaagcaagtgaccctgggcgccttcggccacgaggaggaagttatatctaatcccctttctcctcgcgtcatccagaatatcatctactacaagtgcaatacccacgacgagcgagaagcagtaatccagcaggaacttgtgattcacattggatggatcatcagcaataaccccgaattgttcagcgggatgctgaagatccgcatcggatggatcatccatgccatggagtatgagctccagatccgcggcggcgataagcctgccctggatttatatcagctgtccccctccgaagtgaagcaactgttgctggacatcctccagccccaacagaacggacggtgttggctgaaccgccgccagatagatgggagtctgaaccggacaccaactgggttttatgaccgggtttggcagattctcgagcgaacccccaatggcattattgtggccggcaaacacctgccccagcagcccactctttctgatatgaccatgtatgaaatgaacttctccctgctggtggaggacacactcggcaatattgaccagccccagtatcgccagatcgtcgtggaattgctcatggtggtttctatcgtgctggaacggaacccagagctagagttccaagacaaggttgatctcgatcggctggtgaaagaagcattcaacgagtttcagaaggaccaatccagactgaaggagatagagaaacaggacgatatgacgtctttttataacacccccccgctgggtaaaaggggcacatgttcctacctgactaaggctgtaatgaaccttcttctcgagggggaagttaaacctaataacgatgatccttgccttataagt

SEQ ID NO: 18146 - DNA, 3279 bp, synthetic construct
  misc_feature 1..3279: note = source = /note="Description of Artificial Sequence: Synthetic coding sequence"
  source 1..3279: mol_type = other DNA
atggccggagccgctggcctcaccgcggaggtgtcatggaaggtgctcgagagaagagcccgaacaaaaagaagcggctccgtctatgaacccctgaagagcattaaccttcctagacctgataatgaaactctgtgggacaagttggaccattactaccggattgtgaagtccacccttctgctctaccaaagccccactacagggctgtttcccaccaagacatgcggcggggatcagaaggctaaaattcaagattctctgtactgcgcggcgggggcttgggctctcgctctggcctacaggaggatcgacgacgacaagggaagaacccatgaactcgaacacagcgccataaagtgcatgcgtggcatcttgtactgctatatgagacaagcagataaagtgcagcaatttaagcaagatccacggcccacaacatgcctccactccgtcttcaacgtgcataccggcgatgagctcctgtcgtatgaagaatatgggcacctccagatcaacgccgtgagcctgtacctgctgtacttggttgaaatgatctcgtcaggccttcaaatcatttataataccgacgaagtctctttcattcagaacttagtcttctgcgtcgagagggtttacagggttcccgacttcggagtctgggagagaggaagcaaatacaataacggtagcactgagttgcatagttccagcgtaggcctcgcaaaggccgcactggaagccattaatggctttaacttgttcggaaatcagggatgctcatggtccgttatctttgtggacctggacgcccacaaccgcaaccgacagaccctgtgctcacttctcccccgcgaaagccgctctcataacacagatgctgctctgctgccatgcatctcttacccggcctttgcccttgatgacgaggttctcttctctcagacccttgacaaagtggtgaggaaactcaagggcaaatacggttttaaacgtttcctccgcgatggctacaggactagcctcgaagaccctaaccggtgttactacaagcctgcagagattaaactgttcgatgggatcgagtgcgagttccccatcttttttctgtatatgatgatcgatggggtgtttagaggaaatccaaagcaggtgcaagaatatcaggacctgctcacgcctgtgctgcatcacacaactgagggatacccagttgtgcctaagtactactacgtgcccgccgacttcgtcgaatacgagaagaataacccaggtagccaaaaaagattcccaagtaactgcggaagagatggcaagttgtttctctggggccaggccctctatattatagctaagctcctggccgatgagctcatttcacctaaggatatcgacccagttcaacggtatgtgccattgaaggatcaaaggaatgtttctatgaggttcagcaatcaaggccctcttgagaatgatctggtggtgcacgtcgcacttattgcagagtctcagcggctccaggtgttcctgaatacatatggaatacagacccagaccccacagcaagtggagccaatacaaatatggcctcagcaggagctcgtgaaagcttatctgcaattggggattaacgaaaagctgggcctgagcggacgacctgatcgccctattggttgcctcggcacaagtaaaatataccggatattaggcaaaacggtggtgtgttatcctatcatctttgatctgagcgacttttacatgagccaggacgtgttcctcttgatcgatgacatcaaaaatgccctgcaattcattaaacagtactggaagatgcacggaaggcccctgttcctcgtgctcataagggaggacaacatccgcggctctcgctttaacccgatccttgatatgctggctgctctgaaaaagggaatcatcggcggagtcaaggtgcacgttgaccggctgcagacccttatttcaggcgctgttgttgagcaattggattttttacggatcagtgacaccgaggagcttcctgaatttaaaagctttgaggagttggaacccccaaagcattctaaggtcaagagacaaagtagcacaccctccgcccccgaactcggccaacagcctgatgtgaacatttccgaatggaaggataagccaacccatgagatcttgcagaagcttaacgattgcagctgcctggcatcacaggcaatccttttaggaattttgctgaaaagagaagggcccaacttcattacaaaagagggaacggtcagtgaccatattgagagagtgtacaggcgtgccggtagccagaaactgtggcttgctgtgcgttacggcgcggcttttactcagaagttttccagttctattgcacctcacataaccacatttctcgtgcatgggaaacaggtgacgctcggagctttcggccatgaagaggaagtgataagtaacccgctgagccccagagtaattcaaaacattatctactataaatgcaatacacatgatgaacgcgaggcagtgattcagcaggaactggtcattcatattgggtggattatctctaacaaccctgaactgttttcaggcatgctgaaaatcaggatcggatggattatccatgcgatggaatacgagctgcagatccggggcggagataagccggcgctggacttataccagctgagtccttctgaggtgaaacagctcttgttggacatcctgcaaccccagcaaaacggcagatgttggctgaacagaaggcaaattgacggatcactcaacagaaccccgactggcttctacgatagagtgtggcaaatcttagagaggaccccaaacggtatcattgtcgccggcaaacatctccctcaacagccgacgttgagcgatatgaccatgtatgaaatgaattttagcctgctggtagaggacactcttggaaacatcgatcaacctcagtaccggcagatcgtggtggaattgctgatggtggtgagcatcgtccttgagcggaatccagagctggaattccaggataaagttgatctggaccgcctcgtgaaagaggcctttaatgagtttcagaaagaccagtctcgcctgaaagaaatcgaaaagcaggatgatatgacaagcttttataacactcctccattgggcaagagaggcacctgcagttacctcactaaagctgtgatgaaccttcttcttgaaggagaagtgaaaccgaataatgatgacccgtgtctcatcagt

SEQ ID NO: 18147 - DNA, 3279 bp, synthetic construct
  misc_feature 1..3279: note = source = /note="Description of Artificial Sequence: Synthetic coding sequence"
  source 1..3279: mol_type = other DNA
atggctggtgcagcggggctgaccgcggaggtatcgtggaaggttctggaacgccgagcaaggacaaagcggagcggctctgtgtacgagcccctgaagtctattaatctgccccggcctgataatgagaccctctgggacaagctggaccattactataggatcgtcaaaagcacacttctgctctaccaatctccaacgaccggactgttccccacaaaaacctgcggcggagatcagaaggccaagatccaggacagtttgtactgtgcagctggagcatgggctttagcactcgcgtatcggaggatcgatgatgacaagggtcggactcacgaactggaacactctgcaattaaatgcatgcgcggaatcctttactgctatatgcgacaagcagacaaagtccagcagtttaaacaagaccctagacccactacatgcctccactccgtgtttaacgtacataccggcgatgagcttttgtcctacgaagagtatggccatctgcagatcaacgccgtttccctctatcttctgtatttagtagagatgatcagctccggtctacaaataatctataacacagacgaagtgagtttcatacagaacctcgtgttttgcgtggagcgcgtttatcgagtacccgattttggggtgtgggagaggggctccaagtacaataacgggtctacagaattgcactcctcctcagtgggcttagctaaagcagccttggaggctattaatggctttaatctttttggaaaccagggctgctcctggagcgttattttcgtggacctggatgcgcataaccggaaccgccagaccctttgttcacttctgccccgagagtcccgttcgcacaacaccgacgcagctctgctcccctgtatcagttaccccgccttcgccctcgacgacgaggtcttgttcagtcagactctggacaaagtggtacgcaagttgaaagggaaatatggtttcaagcgctttctgcgcgacggatatagaaccagcctcgaggaccccaaccggtgctattacaagcctgccgagatcaagctctttgatggtatcgagtgtgaattccctatctttttcctctatatgatgatcgatggcgtttttcgaggtaatccaaagcaagttcaagaataccaggatctgttgacacccgtgctacaccacaccaccgagggatacccagtggtgcccaaatattactacgttccggccgatttcgtcgagtatgaaaaaaataatcctggttcccagaagcgattcccttccaattgcggtcgggatgggaaattgtttctgtggggccaggcattgtacatcattgccaaactgctcgccgacgagctgatttcaccaaaagatatcgatccagtgcagcgatatgtaccactgaaagaccaacgaaatgtgtccatgcgcttctcaaatcaagggccactggagaatgacttagtggtgcatgtggccctgatcgcagagtcccagaggctccaggtgttcctgaatacatacggtatacagacccagaccccccagcaggtggagcctatccagatctggccccagcaggagctggttaaggcttacctgcaattgggcattaacgagaaactgggcctatccggacgccctgataggcccatcggctgtcttggcacctctaagatctaccggatcctggggaaaaccgttgtctgttatcccataatatttgacctgtctgacttttacatgagccaagatgtctttttactgatagacgatatcaaaaatgctttacagtttatcaagcagtactggaagatgcatggacggcctttgttcctggtcctgatcagggaggataatatccgcggctctaggtttaatccgatactggacatgcttgccgccctcaaaaagggcattataggaggagttaaagtgcacgtcgaccgccttcagactcttatttcaggagctgtcgtcgagcagcttgattttttgaggatctcggacaccgaagaactccccgagtttaaatcattcgaggagttagagccgcccaaacattctaaggtgaagcgacaatcaagcacgccgtccgcgccggaactcggccaacagccggacgtcaatatctcagagtggaaagacaagcccacacatgagatcctacagaagcttaatgactgctcctgtctcgcaagccaggcaattctgctggggatcctcttaaaacgggaaggccctaatttcatcaccaaagaggggaccgtatcggaccacattgagagagtctaccggagggctgggtcgcagaagctgtggctggccgtcagatatggtgcagcatttacgcagaagtttagctcctctatcgctccccacatcacgacattcctggtgcatggcaagcaggtgactttaggcgccttcggacatgaagaggaagtcatttctaacccattgtcacccagggtcattcagaacataatttattataaatgtaacacccatgatgaacgggaagcagttattcagcaggagctagtgatacacatcggctggattatcagtaataaccccgaactgttctcaggcatgctcaaaattcggataggatggatcattcacgcaatggagtacgagctacagattcggggcggagacaaacccgcgttggacctatatcaactgagcccgagtgaagtaaaacaactcctcttggatattttgcagccacagcagaacgggcggtgctggctgaatagacgacagattgatgggtcactgaatcgaacacctacgggcttttacgatcgggtgtggcaaatactggagagaaccccaaacggaattatcgtcgctgggaagcacctgccccagcagccgaccttgagtgacatgactatgtatgaaatgaatttctccttgctagtagaggacaccttaggcaatatcgatcagccgcagtaccggcagatcgtggtagaactgttgatggtggtttcgatcgtgctcgagaggaatcccgagctggaatttcaggacaaggtagatttggaccgcctggtcaaagaagccttcaatgagtttcagaaggaccaaagccggctgaaggaaatcgagaaacaggacgacatgaccagtttctataatacacctcccttggggaaacggggcacctgttcttatttgacaaaagccgtgatgaacttgcttctggagggcgaagtcaaacccaacaatgatgacccgtgtcttataagc

SEQ ID NO: 18148 - DNA, 3279 bp, synthetic construct
  misc_feature 1..3279: note = source = /note="Description of Artificial Sequence: Synthetic coding sequence"
  source 1..3279: mol_type = other DNA
atggcaggagccgctggactgacagccgaagttagttggaaagtactagagagaagagcacgaacaaagcgctccggctccgtgtacgagccactgaagtcaatcaacctcccgcgaccggataacgagaccctgtgggacaagctggaccattattatcgaattgtgaaaagtactctgctcctgtatcaaagcccaacgacaggtttgtttcctactaaaacctgtgggggggatcaaaaggcaaagattcaggatagcctgtattgcgctgcaggagcatgggctcttgccttggcgtaccgacggatagatgatgataagggtaggacacacgaactggaacatagcgccatcaagtgcatgcggggtatcctatactgttatatgcggcaggcggacaaagtgcaacagtttaaacaggaccctaggcccactacttgtctccattccgtctttaatgttcataccggagatgaactgctaagttatgaagagtacggccacctgcaaataaacgctgtgagcttgtatctgctctatctagtggaaatgatttcatccggattacaaataatctataatacagacgaagtcagttttattcaaaatctagttttttgcgttgagcgagtctatcgcgtgccagatttcggggtttgggagcgggggagtaaatataataacggttcaacagagctccacagttcgtctgtagggttagccaaggcagcgctggaggcgattaacgggtttaatctgttcggcaaccaaggctgcagttggtcagttatcttcgtggatctggatgcccataaccggaatcggcagactctctgcagcttactaccccgcgagtccaggagccacaatactgatgcggccctcctcccctgtattagctatcccgcgttcgctcttgatgatgaggttctgttctctcaaacactcgataaggtggtccgcaaattgaagggtaagtacggcttcaaaaggttcctccgcgatgggtacagaacctccctggaggatcccaatcggtgttactataaacccgcagagattaagctcttcgacggaatagaatgtgagttcccaattttcttcctgtacatgatgatcgacggggtgttccgcggcaacccgaagcaggtccaggagtatcaggatctgcttacccctgtgttgcaccacacaacagagggctacccagtagtcccaaagtattactatgtgcctgctgattttgtcgagtatgaaaaaaacaatcctggcagccaaaaacgatttcctagcaactgcggtagagatggcaaactgttcctctggggccaagcactttatattatagctaagctgctggcggatgagctgattagtcccaaagatatagatcccgtgcagcggtacgtccccctcaaagatcaacggaacgtgtctatgagattctctaatcagggacccctggaaaatgaccttgtcgtccacgtggctctgattgcagagtcccagcgccttcaagtgtttctgaatacatatggtatccagacccagacccctcagcaggtcgaacccattcagatctggccccagcaagaattggtcaaggcctacctgcagcttggcattaacgagaaacttggcctctccgggcgacctgatcgccctattgggtgcttgggcaccagcaaaatctacaggatcctgggaaagacagtagtctgctatcctataatctttgatctcagtgatttttacatgtcacaggacgtattcctgcttattgacgacattaaaaatgccctgcagtttataaagcaatactggaagatgcacgggagacccctcttcctcgtccttattagggaggacaatattcggggatcacgattcaatccaatcctagatatgctggcggccctgaaaaaggggattatcggcggggtgaaagtgcatgttgacaggctccagacattgatcagcggcgcagttgtggagcagcttgattttctacgcattagcgacacagaagagctccctgagtttaagagctttgaggaactggaacccccaaaacattctaaggtcaagagacagtcgagtaccccctctgcacctgaactggggcaacagccagatgtgaacatcagtgaatggaaagacaaaccaacgcacgaaattctgcagaagctcaacgattgcagttgtttggcaagccaggcgattctgcttggtatcctgttgaagcgcgaggggccaaattttatcaccaaggaaggaactgttagtgatcacattgagcgggtctatcgcagagcaggctcccagaagctgtggttagctgtgaggtacggagctgcatttacacagaagtttagctcttcgattgctcctcatatcacgaccttcctagtgcacgggaagcaagttaccctgggcgctttcggacacgaggaggaagtgattagtaatcctctgtcccctagggtgatccagaacataatctattacaagtgtaacacccatgatgagcgggaggccgtaatccagcaggaactggttatccacatcggctggattatttcaaataatccagagctgttcagcggaatgttgaagattcggattggatggatcattcacgcaatggagtacgagcttcagattcggggtggagataaacccgccctagatctgtaccagctgtctccttcagaggtcaaacagttacttctcgacattttgcagccccagcaaaacgggcggtgttggctgaaccgccggcaaattgatggaagcctgaacaggacgcctactggtttctacgacagggtgtggcaaattttggaaagaacaccgaacgggatcatcgtagccggcaagcatctgccccagcaacccacactctcggacatgactatgtatgagatgaattttagtctgctagtggaggatacattggggaatattgatcaaccccagtacaggcagatagtggtggaacttctgatggtggtatctatcgtgctcgaaagaaacccagaactcgagttccaggataaagtcgacctcgacaggttggtcaaggaggccttcaacgaattccagaaagaccagagcagactgaaggaaatagagaagcaggatgacatgacatccttttataatactccacccctggggaagaggggaacgtgctcttacctgacaaaagccgtaatgaatctgctgctggagggtgaggttaagcccaacaatgatgatccgtgtctaattagt

SEQ ID NO: 18149 - DNA, 3279 bp, synthetic construct
  misc_feature 1..3279: note = source = /note="Description of Artificial Sequence: Synthetic coding sequence"
  source 1..3279: mol_type = other DNA
atggcaggtgcagctgggctgaccgcagaggtcagctggaaggttcttgaacgccgcgcaagaaccaagcgcagcggatcggtgtacgagccactgaaatcaattaaccttccaagacccgataacgaaaccctttgggacaaactggaccactattaccgtattgtgaaatcgaccctgctcttgtaccaatccccaactactggactgtttcctacgaaaacttgtggaggcgaccagaaggcaaagattcaggactccttgtactgtgcagcaggagcatgggcccttgccttggcatacaggagaattgatgatgataaggggagaactcatgaacttgagcattccgccatcaagtgtatgcggggaatcctgtactgctacatgcgtcaggcagataaggtgcagcagttcaagcaggaccctaggcctactacttgtctgcattccgtgtttaatgtgcataccggagacgaattgcttagctacgaagagtacgggcatcttcagattaacgcggtgtccctgtacctgctctacctggtggagatgatttcgtcgggtctgcaaatcatttacaatactgatgaagtctcctttatccagaatctggtcttttgtgtggagcgcgtttatcgggtgcctgattttggcgtgtgggagagaggatcgaaatacaataacggatccaccgaactccactcgtcatcagtgggactcgctaaagcagcccttgaagcgattaacggtttcaatctttttggaaaccaaggttgctcgtggtcggtcattttcgtggacttggacgcccataaccgaaatcggcagacgctgtgctctcttttgcctcgggaaagccgctctcacaataccgacgcagcactcctgccatgtatttcatatcccgcttttgccctggacgatgaagtgcttttctcgcaaactcttgataaagtggttcgtaagctgaagggaaagtacggctttaaacgttttcttcgagatggatatcgcacttcccttgaggatcctaatagatgctactacaaaccagctgaaatcaagctgttcgatggtatcgagtgcgaattccccatcttctttctttacatgatgattgatggtgtttttagaggcaaccctaagcaggtgcaggaataccaagatctgttgaccccagtcctgcaccataccaccgagggttacccagtcgtccctaagtactactacgtcccagcagactttgtggagtacgagaagaacaatcctggctcccagaagcgctttccgtcgaactgcggtagagacgggaagctctttctttggggccaggccctgtacattattgcgaagctcttggcggatgaattgatttccccgaaggacatcgaccccgtgcaacgctacgtccccctcaaagatcagcgtaacgtgagcatgcgattttcgaaccaagggcctctggagaatgatcttgtcgtgcatgtggcactgattgcagaaagccagagactgcaggtgtttcttaacacctacggaattcagactcaaacccctcagcaggtggaaccaattcaaatttggccccaacaggaacttgtgaaagcatacctccagttgggtatcaacgaaaagctgggactctccggtcgcccggaccgcccaataggctgtttgggtaccagcaagatatatcgaattctggggaaaactgtcgtgtgctaccctatcatttttgatctttccgacttctacatgtcccaagacgtgtttctgctgatagatgatatcaagaatgcactgcaattcataaagcagtactggaaaatgcacggaaggccacttttcctggtgcttattcgcgaggataacatcaggggatcgagattcaatccgattcttgacatgctggccgcgctgaaaaagggcataataggaggtgtcaaggtgcatgtggacaggctgcaaaccctgatcagcggcgccgtcgtggaacaactggattttctgaggatttccgataccgaagaacttcctgaattcaaatcttttgaggaactggaacctcccaagcattctaaggtgaagcggcagagctcaaccccatcagcgcctgaactgggccagcaacccgatgtgaacatctccgagtggaaggataagccaactcatgaaattctgcagaagctcaacgattgcagctgtttggctagccaggccatactccttggtatcctcttgaagagggaggggcctaatttcatcactaaagaaggtaccgtttccgaccacattgagcgtgtctatagaagggcgggttcccagaaactttggcttgcagtgcgctacggggcggcatttacccaaaagttttcatcatccattgcaccacatataactacgtttctcgtgcacggaaagcaagtgactctgggtgccttcggacatgaagaagaagtgatttctaatcctctctctcctagagtgatccaaaacatcatttactacaagtgtaacactcatgatgagagggaagcagtcattcaacaggagcttgtgatccatatcggttggatcatttcaaacaacccagaattgttttccggaatgctgaaaatccgcatcggctggattatccacgcaatggagtacgaactgcaaattagaggtggcgacaaacctgcactcgatttgtaccaactttctccttcggaggtcaagcagctgctgctcgatatactgcaaccacaacaaaatggaagatgttggttgaatcggcggcaaattgatggttcgctgaaccggaccccaacgggtttttacgaccgggtctggcagatacttgaaaggactccaaacgggatcattgtcgccggaaaacacctccctcaacaaccaactctgtcagacatgaccatgtacgagatgaatttctcccttctcgtcgaagataccctgggtaacatcgatcagccacagtaccgccaaatcgtggtcgaacttctgatggtcgtgtccattgttcttgagagaaaccccgagctcgaatttcaggacaaggtggatcttgaccggcttgtgaaagaagccttcaatgagttccagaaagatcaaagccggctcaaagaaattgagaagcaggatgatatgacttccttttacaatacgccccctctgggtaaacggggtacctgttcgtacctgactaaggccgtgatgaaccttctgcttgaaggagaagtgaagccgaacaatgatgatccttgtctgatatcc

SEQ ID NO: 18150 - DNA, 3279 bp, synthetic construct
  misc_feature 1..3279: note = source = /note="Description of Artificial Sequence: Synthetic coding sequence"
  source 1..3279: mol_type = other DNA
atggcgggtgcagccgggcttacggcggaagtgtcctggaaagtcctcgaacggagagcgaggactaagaggtcaggctcggtctatgagccgctgaagtcaatcaacctgcctcggcctgacaacgaaaccctctgggataagctggatcactactatcggatcgtgaaatcgactctcctgctgtaccagagcccaaccaccgggttgttcccgactaagacttgcggaggagatcagaaagccaagatccaggatagcctgtactgcgcagcaggtgcttgggccctggcgctcgcatacagacgcattgatgatgataaaggaagaacgcatgagcttgaacattcagcgattaagtgtatgcgcggaatcctctattgctacatgcggcaggctgataaggtccagcaattcaagcaagatccaagaccgaccacctgtctgcactccgtgtttaatgtgcataccggggacgaactgttgtcatacgaggagtacggtcacttgcagataaacgccgtgagcctgtacctgctgtacctggtggagatgatttcatcgggacttcaaatcatctacaataccgacgaagtgtccttcatccagaatctcgttttctgtgtggaaagagtgtacagagttcctgatttcggagtctgggagcggggctcgaaatacaataacggctcgaccgaattgcactcatcgagcgtgggattggcaaaggctgccctggaggcgatcaatggattcaatctgttcggcaatcagggttgctcatggtctgtaatcttcgtggacttggatgcgcataaccgcaaccggcagactctctgtagcctgctcccacgggaatccagaagccacaacactgacgcggccctcctcccgtgcatctcgtacccggcgtttgcactcgacgacgaagtgctgttctcgcaaactctcgacaaggtcgtccgcaagctgaagggaaaatacggatttaagcgcttccttcgggacggatacaggacctccctggaggatccgaacaggtgttactacaagccggcagaaatcaagctgtttgacggaatcgaatgcgaattcccgattttcttcctctacatgatgatcgatggagtgttcaggggcaacccaaagcaagtccaggagtaccaagatctgcttacgcctgtgctgcatcacaccacggaaggatacccggtagtgccgaagtactactacgtgccagccgacttcgtggaatacgaaaagaacaacccgggctcccagaaacgattcccatcaaactgcggacgcgacggaaagctgttcctgtggggccaggctctgtatatcatcgcgaagctcctcgctgacgaactgatctcgcctaaggacatcgatccagtccagcgctacgtgccactgaaggatcaacgcaacgtgtcaatgagattctccaatcaaggaccacttgaaaacgacttggtcgttcacgtggccttgatcgcggagtctcaaagactgcaggtgtttctcaacacctacgggatccagacccagaccccccaacaggtggagcccatccagatatggccccagcaggagctcgtcaaggcctacttgcaacttggaatcaacgagaaactgggcctctcgggacgtccggatcgtcctatcggatgcctcggcactagcaagatctaccgcatccttggaaagactgtcgtatgttaccctatcatcttcgacttgtcggacttctacatgtcgcaagatgtgttcctgctgatcgacgacatcaagaatgcactgcagtttatcaagcaatactggaagatgcatggcaggccgttgttcctggtcttgatccgggaagataacatacgcgggtcgcggttcaaccctatcctcgatatgctggccgcgctgaaaaagggtatcatcggcggagtgaaagtgcacgtggaccggctgcaaactctgatcagcggagcagtggtggaacagctcgattttctgagaatctctgacactgaagaattgccggaattcaagtcgttcgaagaactcgagccgccaaaacacagcaaggttaagaggcagtcgtccaccccctcggcccctgaactgggacagcaacctgacgtgaacatcagcgagtggaaggacaagcccactcacgaaatcctgcagaagctgaatgattgctcatgcctggcctcacaagctatcctcctgggcattctcctcaaacgtgaagggccgaatttcatcacgaaagaaggcaccgtgagtgaccatatagagcgggtgtaccggcgcgcaggaagccagaaactgtggctcgctgtgaggtacggagcagcgttcacccagaagttttcctccagcatcgcgcctcacatcactacttttctggttcacggcaagcaggtcactctgggggcattcggtcacgaggaggaagtcatctcgaaccctctgtcgccacgcgttattcagaacatcatctactacaaatgcaatacccacgatgagcgggaagccgtgattcaacaagaattggtcatccatatcggctggattatctccaacaacccggagctgtttagcggaatgttgaaaatccgcatcggatggatcatccacgcgatggagtacgaacttcagattcggggaggagacaagccagcactggacctttaccagctgtcaccaagcgaagtgaaacagctcctcctggatatcctgcaacctcaacaaaatggacggtgctggctgaaccggcgacagatcgacggatcactcaatcgcaccccgactggattctacgaccgcgtgtggcaaatccttgaaaggacgcctaatggaatcatcgtggcgggtaaacatctgcctcaacagccgaccctgtcggatatgaccatgtatgagatgaacttttcactcctggtggaggataccttggggaatatcgaccagccacagtaccggcaaattgtggtggagcttctcatggtcgtgtcgatcgtcttggaacgtaatccagagttggaatttcaggataaggttgacctggaccggctggtgaaagaggccttcaacgaattccagaaggaccaatcccggctcaaggagatcgagaagcaagacgacatgacgtcgttttacaatacgcccccgctcggtaagcgcggcacctgctcttacttgaccaaagccgtcatgaacctccttcttgagggggaagtgaagccgaataatgacgacccgtgcctgatctcc

SEQ ID NO: 18151 - DNA, 3279 bp, synthetic construct
  misc_feature 1..3279: note = source = /note="Description of Artificial Sequence: Synthetic coding sequence"
  source 1..3279: mol_type = other DNA
atggcgggtgcggccggccttacagcagaggtgagctggaaagttttagaaagaagagccagaacaaaaagatcaggctccgtttatgagcctctgaagtctattaatttaccacgtccggacaatgaaactttgtgggacaaattggaccactattaccggattgtcaaaagtacgttgctgttgtatcaatccccgacaaccggcctgtttcctacaaaaacgtgtggcggagatcagaaggctaaaattcaggactctttatactgcgcggcaggggcgtgggcattggcactagcatatcggcgcattgatgacgataaagggagaactcacgaactggaacattcggcgattaaatgtatgagaggaatcttatattgctacatgcgccaggcggataaagttcagcaatttaaacaagatccgcgcccgacgacttgcctccattctgttttcaacgtccatactggagacgaacttctcagctatgaagagtacggacatctgcaaataaatgctgttagtttataccttctgtatttggttgagatgatttcgtccggactccaaattatttataacacagatgaagtgtcttttattcagaacttggtattttgcgtggagagagtctacagggtcccggactttggcgtatgggagcgtgggtcaaagtataacaacggttcaaccgaactgcatagctcaagtgtggggcttgcaaaagcggctttggaggcaataaacggatttaatctgttcggcaaccaaggctgttcatggtcagtaatctttgtcgaccttgatgcacataaccggaatcgtcagaccctttgcagcttattacctcgggagtcacggtcccacaatacggacgctgctctcttaccttgtatttcgtatcctgcatttgcgctggatgacgaggttttgttttcacagacactggacaaggttgtgcggaagctgaaaggcaaatacggctttaaacgattcttgcgggatggatatcgcacaagtttggaggacccaaatcggtgttattataaaccagcggaaatcaaactgtttgatggaattgaatgcgaatttcctatctttttcttatatatgatgatcgacggagtgtttagaggaaaccctaagcaggtccaggaatatcaagatctgctaacacctgtacttcatcacacgacagaagggtacccggtggtgccgaaatactattatgttcctgctgattttgtcgaatatgaaaagaataacccgggaagtcagaaacgatttccgagcaactgcgggcgcgacggaaagctgtttctttggggccaagctttatatattattgcaaaactcttagccgacgaactgatctcaccgaaagacatagacccggtccaaagatatgtacctcttaaagaccaacggaatgtctcgatgagatttagcaatcaaggtcccttggaaaacgatctagtcgtacatgtagcccttatcgcggagtctcagcgcctgcaagtctttttgaatacatatggaattcaaacacaaacgcctcagcaggtggaacctatccagatctggccgcaacaagaattggttaaagcatatcttcagctgggcataaacgagaaactcggattgtcgggtcgaccggatcggcctatcggttgcttgggcacatctaaaatttatcgcatattaggtaaaacggttgtgtgctatccgattatttttgatctttccgatttctatatgtcccaggatgtctttttactaattgatgatatcaagaatgctctgcaatttattaagcaatactggaagatgcacggtaggccgctctttttagtcttgattcgggaggataatatcagagggtcgcgctttaatccgatcctggatatgctcgcagcactgaaaaaaggcattattggcggtgtaaaggttcatgttgataggttgcaaacattaatctccggagcggttgttgaacagttggattttcttcgcatatccgatactgaggaattgccggagttcaaatcgttcgaagaacttgaaccgcctaagcactctaaggtcaaaaggcagtcctccacgccgtctgcccctgagctggggcagcagccggatgtgaatatcagcgaatggaaagacaaacctacacatgagattttgcagaaactcaatgattgttcatgcttagcctctcaggccattttattgggcatcctccttaaacgggaaggtccaaactttatcacaaaagagggaacggtctctgaccacattgaaagagtctaccggcgcgccggaagccagaaattgtggctggcagttcggtatggcgcagcctttacccagaaattctcctcttcaattgcgcctcacattacaacctttctggtgcacggaaaacaagtaacactgggagcctttgggcacgaggaggaagtgatttcaaatccgctttcacctagagtgattcagaatattatctattataaatgcaatacgcatgatgagagagaagccgtgattcaacaggagcttgtcattcatatcggatggatcatctcaaataaccctgagctgttttctggcatgctaaaaattcgtattggctggattatccatgcgatggaatacgaactgcagatccgaggcggcgataaaccagctttagacctgtatcaactttctccgtccgaggtaaaacaacttcttctggatatcctgcagccgcaacagaatgggagatgttggcttaataggcgccaaatcgatggctctttaaatagaacgccaactggcttctatgatcgtgtttggcaaatcctggaacgcacaccaaacggcataattgttgcaggaaaacatctgccacaacagccgactttgtctgatatgacaatgtacgaaatgaatttttcacttctcgtggaagatacattaggaaacatcgaccaaccgcagtacagacaaatcgttgtggagttgcttatggtcgttagcattgtattggagcgaaatcctgaactagaatttcaggacaaagtggatcttgatagacttgttaaagaagcgtttaatgaatttcagaaagaccagtcacggttgaaagagatcgagaagcaagatgatatgacgagtttctataatacgccgcctttggggaaacgtggtacgtgtagttaccttacaaaagcagttatgaacttgttactggaaggcgaagtaaaaccaaacaatgacgatccttgtctgatttct

SEQ ID NO: 18152 - DNA, 3279 bp, synthetic construct
  misc_feature 1..3279: note = source = /note="Description of Artificial Sequence: Synthetic coding sequence"
  source 1..3279: mol_type = other DNA
atggcgggcgcggcaggtctaacggccgaggtgtcctggaaggtgttggagcgccgcgcccgtaccaaacgcagcggctctgtgtacgaacccctgaagtccattaacctgcctcggccagataatgagacactgtgggacaagctagatcattactatagaattgtaaagtctaccctgctcctgtatcagtctccaaccacaggcttatttcccaccaagacctgcggaggcgaccaaaaggcaaaaatccaagactcactgtactgcgccgctggggcttgggccctcgcactggcctaccgtagaattgacgacgacaagggaagaactcacgaactggaacattctgccatcaaatgtatgcgggggatcctgtactgctacatgcgccaggccgataaagtgcaacagttcaagcaggaccccaggccaacgacatgtcttcacagcgtgttcaatgtgcataccggagacgagctgctctcatatgaagaatatgggcatttgcagattaacgcggtttcactgtacctcctgtacctggttgagatgataagctctggccttcagatcatttataacaccgacgaggtgtccttcatccagaacctagtgttctgtgtcgagagggtgtatcgcgttcctgattttggggtgtgggaaagagggtcaaagtacaacaatggctcaactgagctacactcttcgtctgtggggctagccaaggccgcattagaggctattaatggctttaacctgttcgggaaccagggatgctcatggagcgtcatcttcgttgacctcgatgcccacaataggaaccgacagacactgtgctcccttctcccacgggagtcccgctctcacaacacggatgccgcgctgctgccttgtataagttatcctgccttcgccctagacgatgaggtcctcttctcccagacgctcgataaggtggtccggaagttgaagggaaaatacggattcaagagatttctgagggacggctacaggacttcccttgaggacccgaatcgctgttactataagcctgccgaaattaagttgttcgatggcatcgaatgcgagttccctatctttttcctctacatgatgattgacggcgtgtttcgaggaaatcccaagcaagtccaagaataccaggatctgttgacgcctgtgctacatcacacaacggaaggttaccccgtcgttccgaagtactactacgtaccagccgacttcgtggagtatgagaagaacaacccgggaagccagaaacgattcccctctaattgcggacgagatgggaagctctttctgtggggtcaggctctgtatatcattgctaagctgttggctgatgaactcatttcaccgaaggacatagacccagtccagcggtacgtgccgcttaaggaccaacggaacgtgtcaatgcgtttttctaaccaggggcctctggagaatgatctggtagtgcacgtagcgttgatcgcagaatcacagagattgcaggtgttcctgaacacatatggtatacagacccagaccccacagcaagtggaaccgatccagatttggccgcagcaggaattagtcaaagcttacctgcagcttggtataaatgaaaaactcggactaagtggcaggccagaccggcccataggatgcttgggaaccagtaagatctaccggattctaggcaaaaccgtcgtttgctacccgattatcttcgacttgtctgacttctacatgagccaggatgtgttcctcctgattgatgacattaagaacgctctccagttcattaaacagtactggaagatgcatggccgccccctcttcctcgtgctgatccgtgaggacaatataaggggctcaagattcaacccgattctcgatatgctggccgcactcaagaaaggaataatcggcggagtcaaagtgcatgttgaccgattgcagacacttatctccggtgcagtcgttgaacagttagacttcctccgaatcagcgataccgaggaactccctgaatttaagagttttgaagagcttgaaccccccaaacattccaaagtcaagaggcagtcctctacaccaagtgcccccgagctgggccagcagcccgatgtgaatatttcagagtggaaagacaaacctacccatgagattctccagaagctgaacgactgctcttgccttgccagccaggctattctcctgggtattcttctcaagcgcgagggcccaaactttatcacaaaggagggtacagtgagcgatcacatagagagagtgtaccgcagagctggcagccagaagctttggctggcggtgagatatggagccgcatttacccagaaatttagttcaagcatagcaccccacataaccacttttctcgttcatggtaagcaggttacactgggcgcgtttgggcatgaagaggaggttatttctaacccgctcagtccgcgtgtcattcagaatatcatctactacaagtgtaacacccacgacgaaagagaagctgttatacagcaggaacttgtcatacatatcgggtggatcattagtaacaacccagagctgttcagcggaatgctgaagattcgcatagggtggatcatacacgccatggagtacgaattacagatccgtggcggagacaaacccgcactggatctataccagctgtctcccagcgaagtcaaacagctgctgcttgatattctgcagccacagcaaaatggtcgctgctggctcaatcgtaggcagatcgacgggtcacttaaccgaacacccacagggttctatgatagagtatggcagatcttggagcgcacccccaacggcatcatagtagcaggcaagcacttgccgcagcaacccaccctgagtgacatgaccatgtacgaaatgaactttagtctactagtagaggacaccctcggcaacatcgaccaaccccagtaccgacagattgtggtggagctattaatggtggtgtcaattgtcctcgaacggaacccagaacttgaattccaggataaggttgaccttgaccgcctcgtgaaggaagcttttaatgaattccagaaggaccagtcccgcctgaaagaaattgaaaagcaggatgatatgacctccttctataatacccccccactcgggaaacgcggtacctgcagttatctgacaaaagccgttatgaatttgctgctggagggggaagtgaaacctaataatgacgacccttgtcttatcagc

SEQ ID NO: 18153 - DNA, 3279 bp, synthetic construct
  misc_feature 1..3279: note = source = /note="Description of Artificial Sequence: Synthetic coding sequence"
  source 1..3279: mol_type = other DNA
atggcgggagctgcgggccttactgcagaagtgtcgtggaaggtgctcgagcgtcgggccaggacgaaacggtcgggaagcgtctacgaacctcttaagtcgattaaccttcccagaccagataacgaaaccctgtgggacaaacttgatcactactacagaattgtgaagagcactctgctcctgtaccagagccccaccacggggctgtttcctaccaagacctgtggaggcgaccagaaggccaaaatccaagactccctgtactgtgcagcaggggcatgggcgctggcgcttgcgtaccgccggattgatgacgataaaggacgcacccacgaactggagcatagcgcaattaagtgtatgagaggaattctttactgctacatgcggcaagctgataaagtgcagcaattcaaacaggatcctcgtcctactacctgtttgcactcagtctttaacgtgcacactggtgatgagctgctgtcatacgaggagtacggccatcttcagattaacgccgtgtccctgtacttgctgtacctggtcgaaatgatcagcagtggtctgcagatcatttacaacactgatgaggtgagctttatccagaatttggtcttttgtgtcgagcgggtgtaccgagtgcctgattttggagtgtgggaacgggggtctaaatacaacaatggtagcaccgaactgcactcatcctccgtcggtcttgccaaggcggcccttgaagcgattaatggatttaacctctttggtaatcaaggctgtagctggtcagtcatctttgtggacctcgacgcacataataggaaccggcagaccctgtgttcccttcttcctagagaatcccgatcccacaatactgatgcggcgttgctcccgtgtatttcctaccctgcctttgcgctggatgatgaagtccttttctctcagaccctggacaaggtggtccggaagctgaagggaaagtacgggtttaagcggtttcttagggacggttacagaacgagcttggaagatccaaaccggtgttactataaacctgcagagattaaacttttcgacggaattgaatgtgagtttcctatcttttttctctatatgatgatcgacggtgtgttccgcggcaatccaaagcaagtgcaagagtaccaagatcttctcactccagtgcttcatcacaccaccgaaggttaccccgtggtccctaagtactattacgtgcctgctgacttcgtggaatacgaaaagaacaatcctggatcacagaagagatttccatcgaactgtgggagagatggcaaacttttcctgtggggtcaggcactgtacatcatcgccaagttgctggcagacgaactgatatccccaaaggacatcgacccggtccaacgatacgtcccactgaaagatcaaagaaatgtgtctatgagattcagcaaccaaggcccactcgagaatgaccttgtggtgcacgtcgctcttattgcagaatctcaacgcttgcaggtctttctgaacacctatggaatccagacgcagactccccaacaggtggaaccaatccagatctggccccaacaggaacttgtgaaggcctacctgcaactcgggatcaacgaaaaacttggtctgtccggacgcccagatcgcccaatcggatgtcttggaacctccaagatctacagaattctcggaaagactgtggtgtgttatcccatcatattcgacctgtcggacttttacatgagtcaggatgtgtttcttcttatcgatgacattaagaacgcacttcagttcattaagcagtactggaagatgcatggcagacctttgtttttggtgctgatcagagaagataacattcggggttcccgctttaaccctattctggatatgctcgcagcactgaagaaaggtattatcggaggtgtcaaagtccatgtcgatagactgcagacgctgatatcgggcgcagtggtggagcagcttgacttcctgcgaatttccgatactgaggaacttccggaattcaaatccttcgaagaactggagcctccaaagcattcgaaggtgaaaagacaatcctcgactccctcggcaccagaacttggacagcagcctgatgtcaacatatccgagtggaaggacaagccaacccacgagatccttcaaaagctcaacgactgttcctgtcttgctagccaggcaattcttctcggaattcttttgaagcgagaaggtccaaacttcataaccaaagagggaaccgtgagcgatcatatcgagagagtctaccgtcgtgccggctcacaaaagctgtggctggccgtgaggtatggagcggctttcactcaaaagtttagcagctcaattgcacctcatatcaccactttccttgtgcatggtaagcaggtgactcttggtgcattcggtcatgaagaagaggtcatttccaacccactgtcgcccagagtgattcaaaacattatctactacaagtgcaatacccatgatgagagggaagcagtcattcaacaagaacttgtcatccacattggctggattatctcgaacaacccagaacttttttcgggaatgctcaagattaggatcggctggatcattcacgcaatggagtacgagctgcaaatcagaggtggcgataagcctgcactcgatctgtaccagctcagcccttcggaggtgaagcagctcttgctcgacatactgcaaccacaacaaaacgggaggtgctggctgaataggagacaaatcgacgggtccctgaatagaactcctaccggattttacgatagggtgtggcaaatactggaacgaaccccaaatgggattattgtggccggaaaacatctcccgcaacagcctactctttccgacatgaccatgtacgaaatgaacttctcgctgctggtggaggatactcttggaaatatcgaccaacctcaatacagacaaattgtggtggaactcctcatggtggtgagcatcgtgctggaaagaaatcctgagctcgaatttcaggacaaggtcgacctcgaccgactggtgaaggaggcctttaacgaattccagaaagaccaatcccggcttaaagaaatcgaaaagcaagatgatatgacctcgttctacaacaccccgcctctcggcaaacggggtacttgctcataccttacgaaggcagtcatgaatcttctgctcgaaggtgaagtgaagccaaacaatgacgatccttgcctgatttcc

SEQ ID NO: 18154 - DNA, 3279 bp, synthetic construct
  misc_feature 1..3279: note = source = /note="Description of Artificial Sequence: Synthetic coding sequence"
  source 1..3279: mol_type = other DNA
atggcgggcgcggccggcctcaccgccgaggtgagttggaaagtcctggagcgtcgagcaagaaccaagaggtcaggttctgtgtatgagccactgaagagcatcaatcttcccaggcccgacaacgagacactttgggacaaattggaccattattaccggatcgttaagtccacattgctgctgtaccagagccccacgaccggcctgtttccgactaagacgtgtgggggagatcaaaaggctaaaattcaggactccctctactgcgccgccggcgcctgggcattggcactggcttaccgccgaattgatgacgacaaaggacgcacacacgaattggaacattctgcaatcaagtgtatgagaggcattttgtattgctacatgaggcaggccgacaaagtgcagcagtttaagcaggacccccgcccaacaacctgcctacacagcgtgttcaatgtgcacaccggggacgaactgctgtcttacgaggagtatggccacttgcagattaacgctgtgagcctgtacctattgtacctggtggaaatgatctcttccggcctgcaaatcatctataatacggatgaggtaagcttcattcagaacctggtgttttgcgtggagcgggtctaccgtgtgcccgacttcggcgtttgggagcgcggctctaagtataataacggtagtaccgagctgcattctagcagtgtcgggttggctaaggccgccctggaggctatcaatgggtttaacctcttcgggaaccaaggctgctcttggtccgtaattttcgtggatctggacgcacacaatagaaatcgccagacgctgtgttctttgttgcctcgtgaatccagaagccacaatactgacgctgcgctgctgccatgcattagttaccccgcattcgctctggatgatgaagtccttttttcccagacgctcgacaaagtcgtgcgcaaattgaaaggcaaatacgggttcaagcgtttcctacgggacggctacagaactagcctggaggatccaaacaggtgctactacaaacccgctgaaattaagctgttcgatggtatcgaatgtgaattccccatctttttcttgtacatgatgatagacggggtgttccgaggcaaccccaaacaagtgcaggagtaccaggacctcctgacaccagtgttgcatcacacaacagaaggctatccggtggtgccaaagtattactatgtccccgcagatttcgtggagtacgaaaaaaacaaccccggcagccaaaagcggttcccatctaattgcggaagagacgggaaattatttctgtggggacaggccttgtacatcattgcaaaactccttgcggacgaactgatttctcccaaggatatcgatcctgttcaacgctacgtgccattgaaagaccagcggaatgtgagcatgcgcttctcaaaccagggccctctggaaaatgatctggtcgtgcacgtggctcttatagctgaatcccagcgtctccaagtgttcctgaacacttacggaatccagacgcagaccccacagcaggttgagccaattcagatctggccacagcaagagttagtgaaagcctacttacagctcgggatcaacgagaagctggggttgagcggtcgtccagatcgcccaattgggtgcctgggaacgtcaaagatctacaggatcctcggcaaaacagtggtgtgttatcctataattttcgacctgagcgacttctatatgagccaggacgtgtttctgttgatcgatgacatcaaaaatgccttgcagttcattaaacaatactggaaaatgcatggtaggccccttttcctcgtgttgatccgcgaggacaacattcgaggaagccgcttcaacccaatccttgacatgctggctgcactcaagaaaggtattattgggggagtgaaagtgcatgtcgatagacttcagaccctcatctccggcgcggtggtagagcaactggactttctgcggatctctgacaccgaagagctgcccgagtttaagtccttcgaggaactcgaacctccgaagcactctaaggtcaagaggcaaagctcaactccatccgctcccgaactcgggcagcagccagatgtgaatatcagcgagtggaaggacaagccaacccatgagattctgcagaaactgaacgactgttcatgtctggcctcccaggccatcttgctcggaatactgttgaaacgagaggggcccaactttattacaaaagaaggaacggtttccgatcatatcgagcgggtctatcggagagctgggtctcagaagctttggctcgccgtcagatatggtgccgcctttacccaaaaattctcctcttcgattgctccgcatataacgacctttctagtgcatggcaagcaagtcaccctaggagcatttgggcatgaagaagaggtcataagtaatcctctgagcccaagagtaatccaaaacatcatctactacaaatgtaacacccacgacgagcgggaagcagtgattcagcaggagctcgtgattcatatcggctggattatctctaacaatccggaattattttctgggatgttgaagatcagaatcgggtggatcatccatgcaatggagtacgaactccaaattagaggaggagataagccggcccttgacctctatcaactctctccgagtgaggttaagcaactgcttctcgacatactgcaaccccagcagaacgggaggtgttggctgaatcgacggcagatcgacggctccctgaaccgtactcccacagggttttacgaccgcgtgtggcaaatcctggaacggactcccaatgggatcatcgtcgcaggtaaacacttaccacaacagccaaccttgtccgacatgaccatgtacgagatgaatttttcccttttagtggaggataccctcggcaacattgaccagccacagtatagacagatcgtggtggagctgctgatggttgtatctatagtcctggaaaggaacccagaactcgagttccaggataaagttgatctggaccgactagtgaaagaggcattcaatgagttccagaaagatcaatcgcgcttgaaggagattgaaaagcaagatgatatgaccagcttctataacaccccccccttgggaaaaagaggcacctgctcctacctaacaaaggcagtgatgaatcttctgctagagggcgaagtgaaacccaataacgacgatccttgcctgatttcc

SEQ ID NO: 18155 - DNA, 3279 bp, synthetic construct
  misc_feature 1..3279: note = source = /note="Description of Artificial Sequence: Synthetic coding sequence"
  source 1..3279: mol_type = other DNA
atggcaggagcagccggtcttacggcagaagtctcatggaaggtcttggagagacgggcccgcacgaaaaggagtggttccgtgtacgaacccttgaaatcgattaacctgcctagacctgataatgaaacactgtgggacaaactggatcattattatcggattgtgaagtcaactctgttgctctaccaatcacctacgactggtctctttccaacaaagacgtgtggcggggatcagaaggccaagatccaggacagcctgtattgcgcagctggcgcatgggcactggcactggcatataggcggatagacgacgacaagggccgtacacatgagctggagcattctgcaattaaatgcatgagggggattctttattgctacatgcggcaggccgataaggtccagcagtttaagcaagaccctcggccaactacctgcctccattcagtgtttaacgtgcatactggcgatgagctgctgtcctacgaagagtatggacaccttcagatcaatgctgtctccctgtaccttctctatttggtggaaatgattagctcggggctgcagatcatatacaatactgacgaagtgtccttcattcaaaacttggttttttgtgtggaacgcgtttatcgagttcctgatttcggcgtgtgggaacgtggcagtaagtacaataacggtagcaccgaactgcactccagtagcgtgggtctcgccaaggccgccctcgaagccataaacggattcaacctgttcgggaaccaaggctgttcttggtccgtgatcttcgtcgacctggacgctcacaaccggaaccgccagaccctgtgctctctgctcccgagggagagcagatcccacaatacagacgcggccctcttaccatgtatatcataccccgcttttgccctggacgacgaggttctgttttctcagaccctggacaaagtagtacggaagctgaaaggcaagtacggatttaagcggttccttcgagacggatataggacgtcccttgaagatccaaatcggtgctactataagcctgctgaaataaagctgtttgatgggatcgaatgcgagttcccaatatttttcctttacatgatgattgacggagtcttccgggggaatcctaagcaggtccaggaataccaggacttgttgacgcctgtgctccatcatactacggaagggtacccagtcgttcctaagtactattatgtacccgctgacttcgtggaatacgagaaaaacaatccagggtcccagaagaggtttcccagcaactgtgggagggatgggaaactgtttttgtggggacaggcattgtatatcatcgccaagctcttagcggacgagttgatttcccccaaggatatcgatcctgtgcagaggtatgtgccactaaaggaccagcgtaacgtgtctatgcggttctcaaaccagggacctctcgagaacgatctggtggtgcatgtggccctcatcgctgagagtcagagattgcaggtatttctcaatacatacgggattcagacgcagactccccagcaggttgaaccgattcagatttggccccagcaagagctcgtaaaggcatacttgcagctcgggataaacgaaaagttggggctctcagggcgtcctgataggcccattggatgcctggggaccagcaagatttaccgtatcctgggcaagactgtggtttgttatcctatcatttttgatctttccgacttctacatgtcccaggatgtgttccttcttatcgatgatattaaaaacgccttgcagtttatcaagcagtattggaaaatgcacggaaggccactgtttctcgtactcataagagaagacaacatcagaggctccagatttaatcctatcctcgacatgctcgccgccctcaaaaagggcataattggcggcgtgaaggtgcatgtggaccgcctccaaaccttgatctcaggggcggtagtggagcagcttgactttttgcgcatttctgacaccgaggagctgccagagttcaagtcgtttgaagagttggagcccccaaagcattccaaggtcaagaggcagtcttcgactcccagcgcccctgagcttgggcagcagccagacgtaaatattagtgaatggaaagataagccaacacacgagatccttcaaaagctgaatgactgcagttgtcttgcttctcaagccatccttctgggcattctgctgaaacgggagggcccaaacttcataaccaaagaagggacagtctcagaccacatcgagcgggtgtatagacgggccgggtcacaaaaactctggttggccgtccgatatggggccgcatttacccagaaatttagttcctcaattgcgcctcacatcaccacgtttcttgtccatggaaagcaggtcaccctgggcgctttcggccacgaggaggaagtcataagcaaccccctatccccccgagtcattcaaaatatcatatattacaaatgtaatacgcacgacgagagagaagccgtgatccagcaggagcttgtaattcacatcggatggataatttctaataatccggagctattttctggcatgctgaagattagaatcggatggattatccatgcaatggagtacgaactgcagatacggggaggagacaagcccgccctggatctctatcaattgtcaccatccgaagtcaagcagttgctactggatatccttcaacctcagcaaaatgggcggtgttggctgaatcgaaggcaaattgacggcagtctgaatcgtacccctaccggcttttatgaccgggtgtggcaaatccttgaaaggactcccaatggaatcatcgtggccggtaagcacctgccacagcagcccaccctgtctgatatgaccatgtatgagatgaatttttccctgctggtggaggatacgctgggaaatattgatcagccacaatacaggcagattgtagtggaactactgatggttgtttcgattgttctggaacgtaatccggagttagagtttcaggacaaagttgacctggatcggttagtgaaggaagcttttaacgagttccaaaaggaccagtctcgattgaaagagatagagaagcaggacgacatgacctccttttacaatactccaccactggggaaaaggggcacgtgctcctacctgacaaaagctgtgatgaacctgcttctcgagggagaggtaaaacccaacaatgacgatccctgcctaatctca

SEQ ID NO: 18156 - DNA, 3279 bp, synthetic construct
  misc_feature 1..3279: note = source = /note="Description of Artificial Sequence: Synthetic coding sequence"
  source 1..3279: mol_type = other DNA
atggccggcgcggccgggttgaccgctgaagtatcttggaaggttctggagagacgcgctcgcacaaagcgaagtggttcggtgtacgaacctctcaagtccattaatttgcctcgtcctgataacgagaccttgtgggacaaactggatcactattacagaattgtaaaaagcacacttctgctgtaccagtcccccacgactggcctcttcccaactaagacctgtgggggcgatcagaaagccaagatacaagattcactgtactgcgctgccggggcatgggccctggcattggcctatagaagaatcgatgacgataagggcaggacacacgagttggaacactccgctatcaaatgtatgcggggaatattatactgctacatgcgacaggccgataaggtacagcaattcaagcaagatccaagacctacgacctgtctgcactcagtgttcaacgttcacactggtgacgagcttctctcctacgaggagtacggacatctccagatcaacgcagtgtcactgtatctcctgtacctggttgagatgattagctccggactgcagataatctataacacagatgaggtctcgttcatccaaaacctggttttctgcgtggagagggtttaccgcgttcctgattttggagtttgggagcgaggaagtaaatacaataacgggagtaccgaactgcacagttcctctgttggacttgctaaagccgccctggaggcgatcaatggattcaacctcttcgggaatcaggggtgtagctggtctgtgattttcgtggacctggacgctcataatagaaacagacagaccttgtgttcgctgttaccgagggaatctcggtcccacaataccgacgccgcattgctcccctgcatctcataccccgcgtttgctctggacgacgaagtattgttcagtcagacgttggataaggtggtgcgtaagctcaaagggaagtatggttttaagcgatttctcagagacggctacaggaccagtctcgaggaccccaatcgttgctattataaaccagctgagattaagctcttcgacggtatagagtgtgaattccctattttcttcttgtacatgatgatagatggggtatttcgcggaaaccccaaacaagtgcaagaataccaagacttgcttactccggtcctccatcataccaccgaagggtatccagtcgttccaaaatattattacgtcccagcggacttcgttgagtacgagaagaacaacccaggtagccagaagaggttcccttcaaattgtgggcgtgacggcaaactgtttctttggggacaggctctgtatattatcgccaaactgctggctgacgagttaatcagccctaaggatatcgaccccgttcagcggtacgtgcctctgaaggatcagcgcaatgtgtcgatgcgcttcagcaaccaggggcctctagagaatgatctggttgtgcatgtcgccttgattgcagaatcacagcggctccaggttttcttgaatacttatggcatccagacacagactccgcagcaggtggaacccatccagatctggccacagcaggaattggtcaaagcatatctgcagctaggcattaacgagaagctgggcttgagcggacgcccagacaggccaatcggttgtttgggcacatctaaaatctacagaattttgggcaagaccgtagtgtgctatccaattattttcgatctgagcgacttttacatgagtcaagacgtgttcctcctgatcgacgatattaagaacgccctgcaatttatcaagcaatactggaagatgcatgggaggcctctgtttttggtgctgatcagggaagacaacatccgaggctcccgtttcaaccccattctcgacatgctcgcagccctcaagaagggtatcatcggtggagtaaaagtgcacgtcgatcggctgcagaccctaatatccggagcagtcgtggagcagctggactttcttcgtatatctgatactgaggagctccccgaattcaaatcatttgaagaattggagccaccaaaacacagcaaagtcaaaaggcagtctagcactccatcagctccagagctcggccagcaacccgatgtgaacatttctgaatggaaagacaagcctactcacgaaattctccagaagctgaatgactgttcatgtttggcatcccaggctattctccttggaatattgctgaaaagagagggccccaactttattactaaggaaggcacagtttctgatcatattgagcgggtgtaccgtagagcggggtcacagaaactatggctggcggtcaggtacggcgctgcttttacgcagaagttctcctctagtattgccccacacatcaccactttcttggtgcacggcaagcaagtgaccctgggcgctttcggacatgaggaggaggtcatcagtaacccccttagcccccgggtgattcagaatattatctattataagtgtaacactcacgacgagcgtgaggcggttattcagcaggagcttgtcattcacatcgggtggattattagcaacaatccagaacttttttctggaatgcttaaaataagaattggatggattatccacgcgatggagtatgagctgcaaatccgcggcggagacaagcctgccctcgacctgtatcagttgtcaccatctgaagtaaagcagttgttgctcgatattctgcagcctcagcagaacgggcgctgctggctgaaccggcgccagattgacggtagtctgaaccgaactccaactggcttctacgatagagtctggcagattctggagaggacgcctaatggtatcatcgtggccggtaagcacctgccccaacagccgactctctcagacatgactatgtacgagatgaacttcagtctcctcgtcgaagataccctggggaacatagaccagcctcagtacaggcagatagtggttgaacttctaatggtggtttctatcgttctggagcgcaatccagagttagagttccaggacaaggtggacctggatagattggtgaaggaagccttcaacgagtttcaaaaggaccagagtagattgaaagagatcgagaaacaggatgacatgacctccttctacaacaccccacctctaggtaaacgcgggacctgttcatacctgacaaaggctgtcatgaacctcctgctggaaggtgaggtgaaaccaaataacgacgacccatgcctgatctct

SEQ ID NO: 18157 - DNA, 3279 bp, synthetic construct
  misc_feature 1..3279: note = source = /note="Description of Artificial Sequence: Synthetic coding sequence"
  source 1..3279: mol_type = other DNA
atggccggggccgccgggttgacagccgaagtgtcttggaaagtactggagagacgggcgaggactaagagaagtggcagcgtttacgaacccctgaagtccattaacctacctcgcccagataatgagactctctgggacaaactcgatcactactaccgaatagtgaagagcacattgctcctgtaccagagccccacgaccgggctgttccccaccaaaacctgcggcggggaccagaaggcgaaaatccaggacagcctgtattgtgccgccggcgcatgggctctcgccttggcataccggcggattgatgatgacaagggcagaacacacgagttagagcactccgccattaagtgcatgaggggcatactgtattgttatatgaggcaggctgataaagtccagcagtttaagcaggacccgcgccccactacatgtctgcattctgtctttaatgtgcacacgggggacgagctactgtcatatgaagagtatggtcatctgcagatcaacgccgtgtccctgtatctcctctatcttgtggagatgatcagttctggcctgcaaatcatctacaacactgatgaggtctctttcattcagaatctggtgttctgtgtagaacgagtttatagagtgccggactttggcgtgtgggagagaggtagtaagtacaataacgggtctacagagttacacagctcgtccgtggggttggctaaagctgctttggaggctataaatggttttaacctattcggaaaccagggttgctcctggtccgtgattttcgtcgatctcgacgcgcataaccgcaataggcagacactgtgctccctcctgccccgcgagagcagatcccataataccgatgcagcgctactgccttgtatttcttatcctgccttcgccttagatgacgaagttctgttctcccaaacactggataaggtggtgcgtaaacttaagggaaaatacggcttcaaacggttcctccgggacgggtatagaacatctcttgaggatcctaacaggtgctactacaaaccggcggagatcaagctttttgacggcatagagtgtgagtttcccatcttcttcctgtatatgatgattgatggagtgtttcgcgggaacccaaaacaagtgcaggagtaccaggatttgctgacccccgtcctgcaccacactactgagggatacccggtggtgccaaagtactactatgtaccagctgattttgtggagtacgagaaaaacaatcccggctcccagaagcgattcccttctaattgcggccgcgacggaaagctctttctgtggggacaggcactgtatatcatagcaaaactcctcgccgacgagctgatctctcccaaagacatcgaccccgtccagcgttacgtgccgcttaaagatcagcgcaacgtcagcatgcgattttccaatcagggccccctcgaaaatgacctagtcgtgcatgttgcccttatcgctgagagccagcggctgcaggtctttttgaacacatacggcatacagacgcaaacgcctcaacaggtggagcccattcagatctggcctcagcaggaacttgtcaaagcttatctgcaactgggcataaatgagaagctcggcctcagtggccggccggaccggcctattgggtgtctgggcacctccaaaatttatcggattttgggtaaaacggtggtatgctatccaattatctttgatctgagtgacttctacatgagccaggacgtgttcctccttattgatgacataaaaaatgccttgcagtttattaagcagtactggaaaatgcatggccgtccactgtttctcgtgctcattagagaggataatatacggggatcacgatttaatcctatcttggacatgctggccgcattaaagaagggtattattggaggggtcaaagtgcatgtggacaggcttcagactcttataagcggagccgtggtcgagcagcttgattttctaagaatctccgacacagaagagctccccgaattcaagtcttttgaggaattagagccaccaaaacatagtaaagtgaagcggcagtcctctacgccctcagctcccgagttagggcagcagcctgatgtgaacattagcgagtggaaagacaaaccgacgcacgaaatcctgcaaaagctaaacgattgctcttgtcttgcctcccaagctatcttgctgggaatcctcctgaagcgcgagggaccgaatttcatcactaaagaaggtaccgtctctgaccatatcgaaagggtgtataggagagcgggtagtcagaagctgtggctagcagtgagatatggcgccgctttcacgcagaagttctcatcaagtatcgcccctcatataacaacatttctggtgcatggtaaacaagtaacactgggggcatttgggcacgaggaagaagtcatctccaaccccctatctccccgggtcatccaaaatatcatatattataagtgtaacacgcacgatgagagagaggccgttatccagcaagaactcgtgatccacatcggctggatcatctcaaataacccggagctgttcagtgggatgctgaagattagaataggctggatcatccatgccatggagtacgaactacagattcgcgggggcgacaaacccgctcttgacctgtaccagctgagcccaagtgaggtgaagcagctcctgttggacatcctgcagccacagcagaatggccggtgctggctgaatcggcgtcagatcgatggcagtttaaaccgcacgcctacaggtttttacgaccgggtctggcagatactggagcgaactccgaacggtattatcgtggctggaaagcacctgcctcagcagcccactctttccgatatgacaatgtatgaaatgaatttcagcttgctcgtggaggatactttgggaaacattgaccagccgcagtaccggcaaatcgttgtggaactcctcatggtggtttcgatcgtgctcgagcgtaatccagagctggagtttcaggataaggtggacttggaccgcttggtgaaagaggcttttaatgaatttcagaaggatcagagtaggcttaaggagatcgaaaagcaggacgatatgacctccttttataatactccacctctggggaaacgagggacatgtagctaccttactaaggctgtgatgaatttactcttggagggagaagttaaaccaaataatgatgatccttgcctgatcagt

SEQ ID NO: 18158 - DNA, 3279 bp, synthetic construct
  misc_feature 1..3279: note = source = /note="Description of Artificial Sequence: Synthetic coding sequence"
  source 1..3279: mol_type = other DNA
atggcaggcgcagccggactcacagccgaggtgtcgtggaaggtgctcgagcggcgagcacggacgaaacgatccggctcagtatatgaacctctcaagtcaatcaacttaccaaggcctgataacgaaaccctgtgggataagttagatcattactaccgaattgtgaaatcaaccctgttgctgtatcaaagccccacaacaggcctgtttccaactaaaacctgcggaggtgaccagaaggcaaagattcaagattctctctactgcgcagccggcgcctgggccctggcactggcgtatcggcgaattgacgacgacaaaggcagaacgcacgagctcgaacactcagcgattaagtgcatgagaggaatactatattgctatatgcggcaggccgataaagtgcagcaatttaagcaagatcccagaccgacgacgtgcctgcactctgtctttaatgtacacaccggcgacgaactgctgtcatatgaggaatatgggcacctccagataaatgccgtgtctctgtatctgctatatctcgtggagatgattagctccggactccagattatctacaacactgacgaggtgtcctttatccagaatttagtgttctgcgttgaacgggtctacagggttccggactttggggtgtgggagaggggcagcaagtataataatgggagtaccgaactacattcttcctcggtcggattagccaaagccgccctggaggccatcaacggtttcaacttgttcggtaaccagggatgctcttggagtgtgatttttgttgaccttgatgcacacaacaggaataggcagactctctgtagcctgctgccaagggaaagcagaagccacaatacggatgccgcactgctgccctgtatcagttacccagcatttgcactcgacgatgaggtgcttttcagtcagaccttagataaggtggtccgcaaactcaagggcaagtatggctttaaaaggttcctgcgagacggctataggacaagcctcgaggacccaaacaggtgctactacaaacctgcagagattaagttgttcgatggcattgagtgcgagtttcctatatttttcctttacatgatgatcgatggcgtgttccggggaaatcctaagcaggttcaggagtaccaggatctcctgacccctgtgcttcatcacactaccgaggggtacccagttgtgcccaagtactattatgtccctgcggacttcgttgagtacgaaaaaaataatccaggtagccagaaacggttccctagcaactgcggacgggatggcaaactgttcctgtggggacaggccttatatattatcgccaaattactcgctgacgaattgatctctcccaaggacatcgatcccgtgcagaggtatgtgccccttaaggatcaaaggaatgtttccatgcgtttctccaatcaaggccctcttgagaatgaccttgtggtccatgtggcattgatcgcagagtcccagagactgcaggtattcctgaatacatacgggatccaaactcagactccacagcaggttgaacctatccagatatggccccagcaggaactggtgaaggcctacctgcaactgggtataaacgaaaaactggggctgtccgggcggcctgacagaccaattggctgcctaggcactagcaagatctatcgaatcttgggcaagaccgtagtttgctacccgatcatcttcgacttgagcgacttttacatgtctcaagacgttttcctgttgatcgacgacatcaagaacgccttacaattcatcaaacagtattggaaaatgcatggccggccactcttccttgtcttgatcagagaggataatattcggggatctcggtttaacccaattctagatatgctagccgccctgaagaagggaatcattggcggggtgaaggtccatgtcgatcgcctgcagactctgatttcaggcgcagtagtggagcagttggacttcctgcgaatctcagatactgaggagctgccagaatttaaaagttttgaagaactggagccccctaaacatagtaaagtgaagcgccagtcatccacgccctcagctccggagctagggcagcagccagacgtgaatatttcagagtggaaggataaacccactcacgaaatcttacagaaactcaacgattgctcttgtctcgccagccaggccattcttctgggaattctgctcaagcgagagggacctaattttatcactaaggaaggaacagtgtcagaccatatcgaaagagtgtatcggcgcgctgggtcccagaaattatggctcgcagtgaggtacggcgccgcattcacacagaaattttcgagtagtatcgctccacacattactaccttcctggtccacggtaaacaagtgaccctgggtgcattcggccacgaagaagaggtgattagcaaccctctgtctccacgagtgatccagaatataatctactataagtgcaatacgcacgatgaacgtgaggctgtgatccaacaagaactggtcatccacattgggtggatcatctccaacaatccagagttgttttcaggaatgctgaaaattagaatcgggtggatcatacacgctatggaatatgagctgcaaatacgaggcggggacaagcctgcactcgacctgtaccaacttagtcctagcgaagttaagcagttactccttgatatcctgcagcctcagcagaatggccgatgttggctcaatcgtcgccaaatagacggatccctaaatcggaccccaaccgggttctacgacagagtctggcagatattagagagaacacctaacggaatcatcgtagccggaaagcatctaccacagcaacccacgcttagcgatatgactatgtatgagatgaactttagcctgcttgtcgaagataccctgggcaacatcgatcagccccaataccgccagatagtggtcgaactgctgatggtagtgagtattgtgctcgagcggaaccctgaactcgagttccaggacaaggtcgacctcgatcggctcgttaaagaggcgtttaacgagtttcagaaagatcagtctaggctcaaggagattgagaagcaagacgacatgactagcttttataacacacccccactcggcaagcgcgggacatgctcctaccttacaaaagctgtgatgaatctactgctcgagggagaagtaaagcctaacaatgacgatccatgtcttatctca

SEQ ID NO: 18159 - DNA, 3279 bp, synthetic construct
  misc_feature 1..3279: note = source = /note="Description of Artificial Sequence: Synthetic coding sequence"
  source 1..3279: mol_type = other DNA
atggctggtgccgcggggctgactgccgaagtctcgtggaaggtgctggaaaggagggctcggacgaaacggtcaggaagtgtgtacgaaccactcaagtcaatcaatttgccgcggccggacaacgaaaccctgtgggacaaactcgaccactactacagaattgtaaagtctaccctcctgctctaccagtccccaacgaccggattgttcccgactaagacttgcggaggtgaccaaaaggcgaagatccaggatagtctctactgcgccgcaggggcatgggctctggctctggcatacaggcggattgatgacgacaaaggacggactcatgaactcgaacactccgccatcaagtgcatgagagggatcttgtactgctacatgagacaggccgacaaggtccaacagttcaagcaggacccaaggccgaccacttgtctgcacagcgtgtttaacgtccacacgggagatgaactgctgtcgtacgaggaatacggacacctgcaaatcaacgcagtctctctgtatctgctgtacctcgtcgaaatgatctcgagcggactccaaatcatatacaacaccgacgaggtcagcttcatccagaatctggtcttttgtgtggaacgagtctaccgcgtgcctgacttcggggtctgggagagaggctccaagtacaacaacggatccaccgagctgcattcgagcagcgtggggctggcgaaggccgctctggaagctatcaatggattcaatctgttcggcaatcagggatgctcgtggtcagtgatctttgtggacctcgatgcccacaaccgaaaccggcagaccctgtgctcgctgctgccgagagaaagcagaagccataataccgacgccgccctgctgccatgtatttcctacccagccttcgcactggatgatgaagtgcttttctcacagacgctggacaaagtggtgaggaagctgaaggggaaatacgggttcaaacggttcctcagagacggctacagaacttccctggaggacccaaataggtgctactacaagccagcagaaatcaagctcttcgatggaatcgaatgcgagttcccaatcttcttcctctatatgatgatcgatggagtgtttaggggaaaccccaaacaagtgcaggaataccaagacctcctgacccctgtgcttcaccatactaccgagggatacccagtcgtgccgaagtactactacgtgcctgcagatttcgtcgaatatgagaagaacaatccaggatcgcagaagagattcccgtcgaactgtggacgcgatggaaagctctttttgtggggccaagcactttacatcatcgccaagctgctggcagacgagttgatttccccaaaagacatcgacccggtacaacggtacgtgcccctgaaagaccagcggaatgtgtccatgcggttctccaaccaaggacctctggagaatgatctcgtggtgcatgtggcgctgatcgcggaatcccagagactgcaagtgttccttaatacttacggaatccagacccaaaccccacagcaggtggaacccatccagatttggcctcagcaggagcttgttaaggcgtacttgcagcttggaatcaacgagaagctcgggctttccgggcgccccgaccggccaattggctgcctcggaacttcgaagatctacaggatcctgggaaaaaccgtggtctgctacccaatcatcttcgacctgtctgacttctatatgagccaggacgtgttcctgcttatcgatgatatcaaaaacgctctgcagttcatcaagcagtactggaagatgcacggacgcccgctgttccttgtgctgatcagggaagataacatccgagggtcgcggttcaatcctattctggacatgctcgccgccctgaaaaagggaatcatcggcggcgtgaaggtgcacgtggaccgtcttcaaacgctgatctccggtgccgtcgtcgaacaactggacttcctcagaatctccgatacggaggaactgccggaattcaagtcattcgaggaactggaaccgcccaagcatagcaaagtcaagcgccaaagctcgactccttccgccccggagctgggtcagcagccggacgtgaacatatccgaatggaaggataaaccgactcacgagattctgcaaaagctgaacgactgttcgtgcctggcctcgcaagcaatcttgctcggaatcctgctgaagagagaggggccgaatttcatcaccaaagagggtactgtctcggaccacatcgagcgggtctatcgccgcgcggggagccagaagctctggctggccgtgcggtacggggcagcttttacgcagaagttttccagtagcattgcccctcacatcactacctttcttgtgcacggaaaacaggtcacgctcggcgcatttggccatgaagaagaggtgatcagcaaccctttgtcccctcgggtcatccaaaacatcatctactacaagtgcaacactcacgatgaacgcgaagccgtcattcaacaggagctggtcatccacatcggatggatcatctccaacaatcctgaactgttctcgggtatgctgaagatccgcattggatggattatccatgctatggaatacgagctgcagatcagaggcggcgacaaacctgcgttggacttgtaccagctcagcccgtcagaagtgaaacaattgcttctggatatcctgcaaccacaacaaaacgggcggtgctggcttaatcggcgccagattgatggatcactgaatcggaccccaaccgggttttatgatcgcgtgtggcagatcctcgaacgtactccgaacggaatcatcgtggcggggaagcatctgccgcaacagccgactttgagcgatatgaccatgtacgagatgaatttttcgctgctggttgaggacaccctcggaaacattgatcagccccagtaccggcaaattgtggtggagctgttgatggtggtgagcatcgtcctcgagagaaacccggagttggaatttcaagataaggtagatctcgaccggctggtgaaggaagccttcaacgagttccagaaggaccagtcccgcctgaaggagatcgaaaaacaggacgacatgaccagcttctacaacaccccgccgcttggaaagcgcggaacctgctcataccttaccaaggctgtgatgaatttgctcctcgagggggaggtgaagccgaacaacgatgacccgtgcctgatctca

SEQ ID NO: 18160 - DNA, 3279 bp, synthetic construct
  misc_feature 1..3279: note = source = /note="Description of Artificial Sequence: Synthetic coding sequence"
  source 1..3279: mol_type = other DNA
atggcgggagcagccggactgaccgcagaggtgagctggaaggtcctcgagcgccgcgcacgcaccaaacggtccgggagcgtttatgaacctctgaagtccattaacctgcctagacccgataatgaaactctctgggataaacttgatcactactaccggatcgttaagtcgaccctgttgctttaccaatcccctaccactggtcttttcccgaccaaaacttgtggaggcgatcaaaaggctaaaatccaagactcgctttactgtgctgccggggcatgggcactggcgcttgcctaccggagaatagacgacgataagggccggactcatgaattggaacattcggcgattaagtgtatgaggggcattctgtactgctatatgagacaagcagataaggtacaacagtttaagcaagatcccagacccaccacttgccttcactcagtgttcaacgtgcatacgggtgacgagttgctttcgtacgaggaatatgggcatctgcagattaacgccgtgtcgctgtacctgctgtacctcgtggaaatgataagctctggccttcagattatctataacaccgacgaagtgtcattcatacaaaacctggtgttttgcgtggagcgcgtgtacagagtgcctgattttggggtgtgggaaaggggctcaaagtataacaacggttcgactgaacttcatagttcgtcggtcggtctggcaaaagcggcactggaggccattaacggattcaatctgtttggaaatcaggggtgcagctggtcggtgatctttgtggatctcgacgcgcacaatagaaatagacaaaccctgtgtagcttgctccctcgcgaatcccgtagccataataccgacgcagcactcctgccttgtatttcataccctgcatttgcgctcgatgatgaagtcctcttttcccagactctggataaggttgtgagaaagctgaagggaaagtacggatttaagcgatttctcagagacggatacaggacttccctggaggaccctaaccggtgctactacaagccggccgagataaaacttttcgatggcattgagtgtgaatttccaattttctttctgtacatgatgatcgatggagtgtttcgcggtaatcctaagcaagtgcaggaataccaagatctgctcacccctgtcctccatcataccacggaaggatacccagtggtgccgaagtactactatgtcccggcggatttcgtggagtacgaaaagaacaaccccggatcgcaaaagcggttccctagcaattgcggacgggatggcaagctgtttctttggggtcaagcactttacataattgcaaagctgcttgcagatgaacttatttcgccgaaggatatagatcctgttcagaggtacgtgccgctgaaagaccaacggaacgtgtcgatgaggttttcgaaccagggccccttggagaacgaccttgttgtccacgtggcgctgatcgcggaatcacagagactgcaggtgtttctgaacacctacggaattcaaactcaaacgccacaacaagtcgaacctatccaaatctggccgcagcaagagctcgtgaaggcatacctgcagctcggtatcaacgaaaagctcggactgagcggcagacccgaccgtcccataggatgtttgggaaccagcaagatctacaggattctggggaaaaccgtggtttgttaccccatcatttttgatctctcggacttctatatgtcccaagacgtctttctccttatagatgatatcaagaatgccctgcagtttatcaaacagtactggaagatgcatggaaggccactctttctggtccttatcagagaggacaatatccgcggatcgagattcaatcctattctggacatgcttgctgcattgaagaaaggaataatcggtggcgtgaaggtgcatgtggaccgactgcagacccttatctccggggcagtggtggagcagttggattttctgagaatttccgatactgaggaacttccagagttcaaatccttcgaagaactcgaaccacctaaacattccaaagttaagcgccaaagctcgaccccttctgcacccgaactggggcagcagccagatgtcaatatcagcgaatggaaggacaagccaactcacgaaattctccaaaagttgaacgactgttcgtgccttgcatcgcaagcaattctcttgggtatcctgctgaagagagagggtccaaactttatcactaaggaggggaccgtctccgatcacatcgaaagggtgtacaggcgtgctggaagccaaaaactgtggctggcggtgaggtacggagccgcttttacccagaagttctcgtcaagcattgccccacacattactactttcctggtgcatggcaaacaggtgactcttggggcattcgggcatgaggaggaagtgatttcaaaccctctgtcacccagggtaatccaaaacataatctattacaaatgtaacactcatgatgaaagagaggcggtgatccagcaggagcttgtcatccatattggttggatcatttcaaacaatccagagctgttttccggtatgctgaaaattcggattggttggattattcacgcaatggagtacgaacttcagatcaggggcggtgataaacccgcgcttgatctttaccagctttcaccatcggaagtcaagcagctccttcttgatattctgcaaccacaacagaatggaagatgttggctcaataggaggcagatcgacggatctctgaatcgcacgcccaccggattctacgacagagtctggcaaatccttgaacgcacccctaacgggataatagtcgccggtaaacacctgccacaacaaccaactctttccgatatgaccatgtacgagatgaatttctccctgcttgtggaggacacccttggaaacattgatcaaccacaataccgccaaattgtcgtcgaactgcttatggtagtcagtatcgtgctggagcgaaacccggagctcgaatttcaggataaagtggacctcgatagacttgtgaaggaagcatttaacgagtttcagaaggaccaatcaaggcttaaagaaatcgaaaagcaggatgatatgacctcgttttacaatactccaccgcttggaaaacggggtacctgtagctacctgacgaaagcagtcatgaatcttctgctcgaaggagaagtgaagcctaacaacgacgacccttgtcttatctcc

SEQ ID NO: 18161 - DNA, 3279 bp, synthetic construct
  misc_feature 1..3279: note = source = /note="Description of Artificial Sequence: Synthetic coding sequence"
  source 1..3279: mol_type = other DNA
atggcgggagcggcaggactgacggcagaagtgtcttggaaggtcttggaacggcgggcgcgcactaagcgctcaggcagcgtttacgagccgctgaagagcatcaatctccctcggccggacaatgaaaccctctgggacaaactggatcactactacagaatcgtaaaatccacgcttcttttgtaccaaagcccgactactgggctgttcccaactaaaacttgtgggggagatcagaaagccaagatccaggactccctgtattgcgccgccggagcttgggcactcgcactggcttaccgcaggattgacgatgataaggggaggactcacgagctcgagcatagcgccataaagtgcatgcgcggcatcttgtactgttacatgcggcaagctgacaaggtgcagcaattcaagcaggaccctcgcccgactacgtgcctgcactcagtctttaacgtgcataccggagatgagctgctttcctatgaagaatacggacacctccagatcaacgcagtctccctttacctgctgtacctcgtggagatgatctcaagcggtctgcaaatcatttacaataccgacgaggtgagctttatccagaatctggtgttttgcgtcgaacgcgtgtaccgggtcccggattttggagtgtgggaacgcggatctaaatacaataatgggtcaaccgaactgcactcaagctcggtcgggttggccaaggccgccctggaggctatcaacggattcaacttgttcggcaatcagggctgctcatggtcggtgatctttgtggacctggatgcccataacagaaaccggcaaaccctctgttccctcctgccgagggagtcccgctctcacaacactgacgcggcccttctcccctgcatatcctacccagccttcgcgctggacgatgaagtcctgttctcccagaccctggacaaagttgtccgaaaactgaagggcaagtacggattcaaacgctttttgcgggacgggtaccggacttcgctggaggacccgaaccgctgctactacaagccagcagagatcaagctgttcgacgggatcgagtgtgaattccctatcttctttctgtacatgatgatcgacggagtgtttcgtgggaaccctaagcaggtgcaagagtaccaagatctcctcactcctgtcctgcaccataccaccgaggggtacccggtggtgcctaagtactactacgtccccgctgacttcgtggaatatgaaaagaataatccgggctcccaaaagagattcccgtcaaactgtggtagggacggtaaattgttcctgtggggacaggccttgtacattattgccaagctcctcgccgatgagcttatttccccgaaggatatcgatcccgttcaacggtacgtcccactcaaagaccagcggaacgtgtcgatgcgcttttcgaaccaaggccctctcgaaaacgacctggtggtgcacgtggctctcatcgccgagtcacagaggctccaagtattcctgaatacttacggaatccagactcagaccccgcaacaagtcgaacctatccaaatctggccgcagcaggaactggtgaaggcttacctgcagctgggcatcaatgaaaagttgggtctgtcgggacgcccggacagaccgatcggatgcctgggaactagcaagatctacagaattttgggaaaaactgtcgtttgctacccgattatcttcgacctctccgacttctacatgtcgcaggatgtgttcctgcttatcgatgacatcaagaacgctctgcagttcatcaagcagtactggaaaatgcatgggaggcctctgttcctggtgttgatccgggaggacaatatcagaggaagtcggttcaatcctattctcgacatgctggctgccctgaagaagggcatcattggaggtgtcaaagtgcacgtggaccggctgcagactcttatttctggtgcggtcgttgaacaactggacttcctccggatctctgataccgaagagctgccggaattcaaatcattcgaagaactcgaacctccaaagcactccaaggtgaagcgccagagcagcaccccgagcgccccagaactcgggcagcagccagatgtgaatatctcagaatggaaggataaacccactcatgagattctccaaaagctgaacgattgcagctgtctcgcgtctcaggcaatcttgctcggcatcctgcttaagcgggaaggaccaaatttcatcaccaaggaaggcaccgtttcggaccacatcgaaagagtgtatagacgagccggttcccagaaactctggctggcggtccggtacggagccgcatttactcagaagttttcaagctcaatcgccccacacatcactaccttcctggtgcatggaaagcaggtaactctgggcgcatttggacatgaggaagaagttatctcgaacccactgagcccgcgagtcattcagaacatcatctattacaagtgcaacactcacgacgagcgagaagcagtgatacaacaagaactggtgatccatatcggatggataatctccaacaatcctgaactgttttccggaatgcttaagatcaggatagggtggatcatccacgcgatggaatacgagctgcagatacgcggaggagacaagccagcactcgacctgtaccaattgagcccgtcagaagtgaagcaactgctgctggacatcctccagccgcagcagaacggaagatgttggctgaaccgtcgtcagatcgacgggtcgctcaacaggaccccgacgggattctacgaccgcgtgtggcaaatcctggagcggaccccaaatgggatcatcgtggccggcaagcatctcccgcagcaaccgaccctgtccgacatgacgatgtacgagatgaacttctcgctgttggtggaggatactctgggaaacatcgatcaaccacagtatcgccagatcgtggtggagctcctgatggtcgtctcgatcgtccttgaacgcaatcccgagctggagttccaggataaggtggatcttgatcggctcgtgaaggaggccttcaacgagttccagaaagaccagtccaggctgaaggagatcgagaagcaggacgatatgactagcttctacaatacgccaccccttggaaaacgcggcacctgctcgtacctgaccaaagcggtcatgaacctgctgttggaaggtgaggtgaagccgaacaacgatgacccatgcttgatcagc

SEQ ID NO: 18162 - DNA, 3279 bp, synthetic construct
  misc_feature 1..3279: note = source = /note="Description of Artificial Sequence: Synthetic coding sequence"
  source 1..3279: mol_type = other DNA
atggctggcgcagcagggttgaccgctgaagtctcttggaaggtgctcgaacgcagggctcgtactaaacgcagcgggtcggtatatgagccactgaagtcgattaacctcccccgaccggataatgagactctttgggacaagcttgatcattattacagaatcgtcaaatccacccttctgttgtatcaatctcctaccaccggactttttccaacgaaaacctgtggtggtgatcaaaaggccaagattcaagattccctgtattgcgctgccggcgcttgggccctggcgctggcgtaccggcgtatagatgacgacaaagggaggacgcatgaattagaacactctgccatcaagtgtatgcgcggtatcctctattgttatatgcggcaggctgataaggtgcagcagtttaagcaggaccctagaccaacaacctgcctgcacagcgtctttaacgtacatacgggcgacgagttactcagctacgaagagtacggccatcttcagatcaatgccgtgtccctctacttgttatatctcgtggagatgatctcgagcggactgcagatcatctataatacggatgaagtgagcttcatccagaatctggttttttgcgtggaaagggtataccgggtgcccgatttcggcgtttgggaacgtggcagcaagtacaacaacggcagcaccgagctgcactcaagctcagttgggttagccaaagccgccttggaggccataaatgggtttaacctctttggaaatcagggttgttcctggtctgttatcttcgttgacctagacgctcacaaccgaaataggcagactctttgctccctcctaccaagggagtcccggtcccacaacactgatgcagccctgcttccctgcatcagctatcctgccttcgcgttagacgacgaagtgctattctctcaaaccctggacaaggtggtgagaaaactcaagggaaagtacggtttcaaacgctttctgcgggatgggtaccggaccagcctcgaagaccccaatcgctgttactacaagcccgcagaaatcaaactctttgatggcatagagtgcgagtttcccatatttttcctctacatgatgatagatggagtttttcgggggaatcctaaacaggttcaagagtatcaggatctgcttaccccagtgttacatcacactaccgagggatatcctgtggtcccaaagtactattacgtgccggcggactttgtagaatatgagaagaacaatcctggttcacaaaagcggttcccgtccaactgcgggagagacggaaaactgtttctgtggggccaggctctgtatatcatagccaagctgttggcagacgaacttatttctccaaaagacatcgacccagtgcagaggtatgtacctctgaaggatcagcgcaacgtgtccatgcgcttcagtaaccaggggcccctggagaacgatcttgtggtccatgttgctctaatcgcggagagtcagcgattacaagttttcctgaacacctatggtattcagactcagactccccagcaggtggagccgatacagatctggccacagcaggaacttgttaaagcctatctgcagctgggtatcaacgagaagctgggtctgtcggggagaccagacaggcctataggctgtctgggcacatcaaagatctatcggatactcgggaaaacagtggtgtgctacccaatcatcttcgacctgtctgacttctacatgagccaagacgtgtttttgctgattgatgatattaaaaatgcactgcagtttataaagcagtactggaaaatgcacggacgacccctgttcctggttttgatcagggaggacaacatccggggaagtcgatttaatcctattctagatatgctggctgcgcttaagaaggggataataggcggggtgaaggtgcatgtggaccgcttgcagacactgatttctggagcagtggtcgaacagcttgacttcctgcgcattagcgatactgaggaacttcccgagtttaagagctttgaggagttggaaccgcccaagcactctaaggttaaacggcagagctctacaccttcagcccccgagcttggtcagcagcccgatgtcaacatttccgagtggaaggacaaacctacacacgagatacttcagaagctgaatgattgcagctgcctggcctcccaagcaatcttattgggcatattgctcaaacgcgaaggccctaacttcattaccaaggaaggcacggtgtcagaccacatcgagcgagtctacagacgtgctggaagccaaaagctctggctggctgttaggtacggtgctgcatttacccagaagttctcgtcaagcatagccccacatataaccacattcctcgtccatggtaagcaggtgacactgggagcctttggacatgaagaagaagtgatctccaatccgctgtccccacgggtcatccagaatatcatatactataaatgcaacacccacgacgagcgggaggccgttattcagcaagagttggtcattcacattggatggatcatcagtaacaaccccgagctgttctcaggaatgctcaagatccgtatagggtggattatacacgcaatggagtacgaactgcagatacggggcggggataagcccgccctcgatttgtatcagctgtctccatccgaagtgaagcaactgctgctcgacatattgcagccccagcagaatgggaggtgttggctcaatcgcaggcagatcgacggttccctgaatcgtacccctacgggtttctacgaccgtgtttggcagattctggaacggacaccaaatggcatcatcgtggcaggaaaacatctgcctcagcagcccaccctctccgatatgacaatgtacgagatgaatttcagcctgctggtggaagacacgttaggaaacatcgaccagccccagtatcggcagattgtggtcgagttgctcatggttgtttctattgtgctggagagaaatcctgaattggagtttcaagacaaggtggatctggaccgcctggtgaaggaggcctttaacgagtttcagaaggatcagagccgtctcaaggaaatcgagaaacaggacgacatgacctcattttataatacgccccccctggggaaaagagggacctgctcatacttaacaaaggctgtgatgaatctcctgctcgagggtgaggtgaagcctaataatgatgacccgtgcctaatctct

SEQ ID NO: 18163 - DNA, 3279 bp, synthetic construct
  misc_feature 1..3279: note = source = /note="Description of Artificial Sequence: Synthetic coding sequence"
  source 1..3279: mol_type = other DNA
atggctggggccgccggcttgacggcggaagtgtcttggaaagtcctggagagacgggcccgcaccaaaagatctggatccgtgtacgaacccctcaagtcaatcaatctgccgcgccccgacaatgagactctctgggacaaactggatcattactacagaatcgtgaagtcgactctgctgctgtaccagtccccgaccaccggactcttcccgacgaaaacttgcggaggtgaccaaaaagcgaagatccaagattccctgtactgcgccgccggcgcctgggcactggcccttgcctacagaaggatagacgatgacaagggcagaacccatgagcttgagcactcggcgatcaagtgcatgcggggaatcctgtactgctacatgcgccaggctgacaaagtccaacagttcaaacaagacccgcgaccgactacgtgccttcatagcgtgtttaatgtgcataccggcgatgaactgctctcttacgaagagtacgggcacctgcagatcaatgccgtgtccctgtatcttctctatctggtggaaatgatctcatcgggattgcagatcatttacaacactgacgaggtgtcattcatccagaacctcgtgttctgcgtcgaacgggtgtatagagtgcctgactttggagtgtgggagcgggggagcaagtacaacaatggtagcaccgagctgcactcctcctcagtggggctcgcaaaggctgcattggaagccatcaacggattcaatctgttcggaaaccaaggctgttcttggtccgtgatctttgtcgacctggacgctcataaccgcaaccggcagactctgtgttcgctgctgccgcgcgagagcagaagccacaacaccgatgcagcactgctcccgtgcatcagttacccggcctttgcactggacgacgaggttctgttctcccaaaccctcgacaaggttgtccgcaagctgaaaggaaaatacggattcaagcggtttctgcgggacggttatcggacctccctggaggatccaaatagatgctactacaagccggcagaaatcaaattgttcgacggcattgagtgcgagtttcccatcttcttcctgtacatgatgatcgacggggtgtttcggggaaacccgaagcaggtgcaggaataccaggacctgctgactcctgtcctgcaccataccactgagggatacccagtcgtgccaaagtattactacgtgccagcagacttcgtggaatacgaaaagaacaacccgggatcgcaaaagcgcttcccttctaactgcggaagagatggaaagctgttcctgtggggacaggccctgtacataatcgccaaactgcttgccgacgagcttatctcaccgaaggatatcgacccggtgcaaaggtacgtcccactcaaagaccagcgcaatgtgtcgatgcgcttctccaatcagggcccgctcgagaatgacctggtggtccacgtggccttgatcgcagaatcgcagagactgcaagtgttcctcaacacttacggcatccagactcagacgccccagcaggtcgagcctattcaaatctggccgcaacaagaactggtcaaggcgtacctgcaactgggaatcaacgaaaagctgggcctgagcggacgaccggacagaccaatcggatgtctcggcacttcgaagatctacagaattctgggaaagaccgtggtgtgttatcccatcatcttcgacctgtcagatttctacatgtcacaagatgtgttcctgcttatcgacgatatcaagaatgctctccaattcattaagcagtactggaagatgcatggacggcctttgttcctggtccttatccgagaggataacatcaggggatcgcgcttcaatccaatcctggatatgctggccgctcttaagaaggggattatcggaggggtgaaggtgcatgtggatagactccaaaccctgatctctggcgcggtggtggaacagctcgacttcctgaggatctcagataccgaggagctgccagaattcaaatcgttcgaggaattggagccgccgaaacactccaaggtgaagaggcaatcaagcactccctcggcgcctgagctgggacagcagcctgatgtcaatatctccgaatggaaggacaagccaactcacgaaattctccagaagctgaacgattgttcctgcctggcttcacaggcaatcctgctggggatactgttgaaacgggaaggtcctaacttcataactaaggaaggaacggtgtcggaccacatcgagcgcgtgtacagaagagccggttcacaaaagctgtggctggctgtccgctatggagccgcgtttacccagaagtttagctcaagcatcgccccacatatcactacctttcttgtgcacggtaaacaagtgactctgggcgcgtttggacatgaagaagaggtcatctcgaaccccctttcccctagggtgattcagaatatcatctactacaaatgcaacactcatgacgaaagagaagccgttatccagcaggagcttgtgatccacatcggatggattatctccaacaacccagagctgttctccggcatgcttaagatccggatcggttggatcatccacgcaatggaatacgaactgcagatccgcggaggtgacaagccggcgctggacctgtaccagctctccccgtcagaagtgaagcagctcctgttggacatcctgcaaccgcaacagaatggacggtgctggttgaaccggagacagatcgatggctccctgaatagaacccccaccggattctacgacagggtgtggcagatcctcgaacgcacgccgaatggcatcatcgtggctggcaaacacctgccgcagcagcctaccctgtctgatatgacgatgtacgaaatgaatttcagcctcctggtggaggataccctggggaacatcgaccagccgcaataccgccagatcgtggtggagctcctgatggtggtttcaattgtgctggaacggaaccctgagcttgaatttcaagataaggtggacctcgaccgcctggtgaaggaggctttcaacgagtttcaaaaggatcaaagccggctgaaggaaattgaaaagcaggatgacatgacctcgttctacaacacccctccgttggggaagcgcggaacttgcagctacctgactaaagccgtgatgaatctgctcttggagggagaagtgaagccgaacaacgatgacccatgcctgatctct

SEQ ID NO: 18164 - DNA, 3279 bp, synthetic construct
  misc_feature 1..3279: note = source = /note="Description of Artificial Sequence: Synthetic coding sequence"
  source 1..3279: mol_type = other DNA
atggcaggagcagcgggacttaccgcagaggtgtcatggaaagtgcttgaacggcgggcaagaactaagagatcagggtcggtgtacgagcctctcaaatccattaacctcccaagaccagataacgaaaccctttgggataaactggatcactactaccgtatcgtgaagtcgactctcctgctctaccaaagccctaccacgggactctttcctaccaaaacctgcggcggcgaccaaaaagcaaagatacaggattcactttactgtgcagcaggagcgtgggccctcgccctggcgtaccggcggattgacgatgataagggcagaacccacgaacttgaacattccgccatcaaatgtatgagaggcattctctactgttatatgagacaggcggacaaggtgcaacagtttaagcaggatcctaggccaaccacctgtctccattcagtgttcaacgtccataccggcgacgagttgctgtcgtacgaggaatacggtcatctgcagataaacgcggtgtccctttaccttctgtacctggtcgaaatgatatcgtcaggacttcaaatcatttacaacactgatgaagtcagcttcattcagaatcttgtcttttgtgtcgaaagggtgtatcgggtgcctgatttcggcgtctgggagcgggggtcaaagtacaataacggcagcactgagctgcattcttcctcggtgggacttgcaaaggcagcgcttgaggcaattaacgggtttaacctttttggaaatcagggatgttcatggtccgttatctttgtggatcttgatgcacataatcggaataggcaaactctgtgttccctgctccccagagagagccgttcgcacaataccgacgcagccctgctgccatgtatttcgtacccagcctttgcacttgatgacgaggtgcttttctcacaaaccctcgacaaggtggtgagaaaactgaaagggaagtacggattcaagcgattcctgcgggatggatatcggacctcactggaggaccccaaccgttgctactacaagccagctgagattaaactgtttgacggcatcgagtgcgaattcccaatcttctttctctacatgatgattgacggggtctttcgtggaaatccaaaacaagttcaagaataccaggaccttctcaccccagtgctccaccacaccactgaaggatacccagtcgtgcccaagtactactacgtgcccgcggactttgtggaatacgaaaagaacaatcctggatcccagaagcgctttccatctaattgtggacgtgatggaaaactttttctgtggggacaggctctttacatcatcgcaaaactgctcgctgacgaactcatttcccccaaggacattgacccagtgcaaagatacgtcccccttaaggatcagagaaacgtgagcatgcgattttcaaatcagggtcctctggaaaatgatctcgtcgtccacgtggcccttattgccgagtcgcaacgactgcaggtgttcctcaatacttacggcatacaaacgcaaactccacaacaggtcgaaccaatccagatatggccgcagcaggaattggttaaagcatacctccaacttggaattaacgaaaagttggggttgtcgggaaggcctgatcggcctatcggttgccttggtacttctaagatctaccgaatactgggtaagactgtcgtgtgctaccctatcatatttgatctttccgacttctacatgtcacaagatgtctttcttctgattgatgatatcaagaatgccctgcaattcattaagcagtattggaaaatgcacggacggccactttttcttgtgcttatacgggaagataacatcagaggttcgcgctttaatccaatcctcgacatgcttgcagctctcaaaaagggaataatcggcggtgtgaaggtccatgtggatcgccttcaaacgctcatttcgggggcagtggtcgaacaactggattttctcaggatttcagatactgaggaattgccggaattcaagtcgttcgaagaactcgaacctccaaagcatagcaaggtgaaaagacaatctagcactccttcagctcccgaactgggtcagcaaccggacgtaaacatttctgaatggaaggacaagccaacccatgaaattctgcaaaagctgaatgattgttcctgtcttgcgtcgcaagcaattctgcttggtattctcctcaagagggaagggccaaacttcatcacgaaagagggaactgtttccgatcatattgaacgagtgtaccgcagggccggttcgcagaagctgtggcttgcagtgcgatacggagcggcctttactcagaagtttagctcatcgatcgctccacatatcaccacttttcttgtgcatggtaaacaagttactctcggtgctttcggacatgaagaagaggtgatctcgaacccactgtcgcctcgggttattcaaaacatcatttactacaagtgcaatactcatgacgaacgtgaagccgtgattcagcaagagctcgttatccatatcgggtggataatctcgaataaccctgaactcttttctggcatgctgaaaattcggattgggtggataattcacgcaatggaatacgagttgcaaatccgaggtggcgataagccagcactcgatctgtaccaactttctccatccgaagtgaagcagctcctgctggatattcttcagcctcagcaaaacggacgatgttggctgaaccgcagacaaatcgacggttcccttaaccggaccccgactggattctatgaccgcgtgtggcagatccttgagcgaactccaaacggaattatcgtcgcaggtaagcacctcccgcagcagcctaccctgagcgacatgactatgtacgagatgaacttttcgcttctggtagaggataccctggggaacatcgatcaacctcaatacagacagatagtggttgaactgctgatggtcgtatcaatcgtgctcgaacgcaatccagagttggagttccaggataaggtggatctcgatagacttgtcaaagaggcatttaacgagtttcaaaaagatcaatcgaggcttaaggaaatcgaaaagcaagacgacatgacgtcattttacaacacgcccccgctgggcaagcgcgggacttgcagctatctgaccaaggccgtcatgaaccttctgctggagggcgaagtgaagcctaacaacgatgatccatgtcttatttcc

SEQ ID NO: 18165 - DNA, 3279 bp, synthetic construct
  misc_feature 1..3279: note = source = /note="Description of Artificial Sequence: Synthetic coding sequence"
  source 1..3279: mol_type = other DNA
atggccggagcagccggattaacggcagaggtgtcttggaaggtccttgaaagaagggctcgaactaaacggtccggctcagtctacgagccgcttaagtccatcaacctcccccgacctgataacgaaactctgtgggataagctagaccactattacaggattgttaaaagcacactgctcctctaccaaagccctaccacgggcctgtttcccaccaaaacatgcggcggcgatcagaaagctaagatccaggactccctgtactgcgcagccggggcatgggcccttgcactcgcttaccgcagaattgacgatgacaagggtcgtactcatgaacttgaacacagcgccattaaatgcatgaggggaattttatactgttacatgcggcaggctgataaagtgcagcagttcaaacaggacccaaggcctactacgtgtctccactcggtgttcaacgtgcacacgggagatgaactgttgtcatatgaggagtacgggcacctgcagataaacgccgtatctctgtatcttttgtatctcgtggagatgatcagtagtgggctccaaatcatttacaacaccgacgaggtgtctttcatccagaatttggtcttctgtgtagaaagggtgtaccgggtgcccgactttggcgtgtgggaacgcggatcaaaatacaataacggctcaactgaactgcacagttcatccgtagggctggcaaaagccgccttggaagctataaacggcttcaacctgttcggtaaccagggttgttcatggagcgtgatttttgtggacctcgatgcgcataataggaaccgtcagaccctttgctccttgctgcccagagagagccgttcacataatactgacgctgccctcctgccttgcatctcatacccagcctttgccctggacgacgaagttctctttagtcagactttagataaagtagtgagaaaactcaagggcaagtatggcttcaagcgctttctacgcgacggttacagaacctccctcgaggatcctaacaggtgttactacaaacccgcagagataaagttgttcgatggcatagagtgcgagtttcctatcttctttctttatatgatgatagatggggtgttccgtggtaatccaaagcaggtgcaggaatatcaagacctcctgacccccgtcctccaccatacaacagagggctatccggttgttcccaaatattattacgtgcccgcggattttgttgaatatgaaaaaaataacccgggttcacaaaagcgcttcccgtcaaactgcgggcgcgatggcaaactctttctttggggacaggcactctatattatcgcaaaactcctggctgatgaactgatatctcctaaagacatcgatccggtacaacggtacgtgccgctgaaagaccagcgcaacgtttcgatgcgtttctccaatcaggggcctttggaaaacgacctggtggtccacgtagctttaatcgctgagagccagcgattgcaagtgttcttaaatacatatggtatacagacgcagacacctcagcaggtcgaaccgatacagatctggccccagcaggagctggtcaaggcgtatctgcagttgggaattaatgagaaattgggattgtctggccgcccggacagacctatcggctgccttggaacaagcaagatctaccgaattcttggcaaaacagtcgtgtgttaccccataatctttgacctgagcgatttttacatgtcacaggacgtgttccttctgatcgatgacatcaaaaacgctttacagttcatcaagcagtactggaagatgcacgggaggcccctgtttcttgtactgattagagaggacaacatcagaggttcccggttcaatcccattctggatatgctagccgcactaaagaaggggatcatcggtggcgttaaagttcatgttgaccgtcttcagaccctgatcagcggagctgtcgtggaacagctcgatttcctgagaatcagtgacaccgaggagttgccggaatttaaaagttttgaagagcttgagccccctaagcactccaaagtgaagcgccaatcaagcactccctcggcccctgagttgggacagcagccagacgtgaatatatccgaatggaaggacaagccgacccatgaaatcttacagaagctgaacgactgctcttgcctggcatctcaagccatactgctcggtatactgctgaaacgggaagggcccaactttattacaaaagagggtactgtgagcgaccacatcgagagggtctaccgcagagccggaagtcaaaagctgtggctggctgtaagatacggggcggcctttacacagaagttcagcagcagtattgctcctcatattacaactttcttggtgcacggcaagcaggtgaccttgggagccttcggacatgaggaagaggtgatatctaatccgttgagccctcgtgttattcagaacatcatttattataagtgtaatacgcatgatgaacgcgaggccgtcattcagcaggaactcgtcattcacatagggtggattatctcaaataatcctgaattattcagcgggatgctgaagatccggataggctggatcattcatgcgatggaatacgagttgcaaatccggggcggtgataagcctgccttggatctgtaccagcttagccccagcgaggtgaagcaattgttactggacatactgcagccccagcagaatggcaggtgctggctaaaccgtcgacagattgacgggagtctcaacaggacgcccaccggattttatgatagagtgtggcagattctagaaaggactcctaatgggatcattgttgccggaaagcacctcccgcagcagccaaccctgagcgatatgacaatgtatgagatgaacttttcccttttggtggaggacacgcttggcaacatcgatcagcctcagtatcgacagattgtggtcgaactcctcatggtggtctcaattgtcctggaacgcaatcctgaacttgaattccaagataaggtggatttggatcgcctggtgaaagaggctttcaacgaatttcagaaggatcagtcccgcctaaaggaaatcgagaagcaggacgatatgacatccttttacaataccccacctttgggaaaacgaggaacttgttcatatttgactaaggccgtaatgaacttattgctggaaggagaagtgaagcccaacaatgacgatccttgcctgatttct

SEQ ID NO: 18166 - DNA, 3279 bp, synthetic construct
  misc_feature 1..3279: note = source = /note="Description of Artificial Sequence: Synthetic coding sequence"
  source 1..3279: mol_type = other DNA
atggcaggagcagccggactgactgcggaagtgtcgtggaaggtgctggagagaagagctagaaccaagcggtccggatcggtgtacgaacccctcaaatccataaaccttccaagacccgataacgaaaccctttgggataagctggatcattactaccgtattgtgaaatcgaccctcctcctttaccaatcgccaaccaccggtctgttccccaccaaaacgtgtggaggagatcaaaaggctaagattcaagactcactgtactgtgccgcaggtgcatgggcgctggcccttgcctatcggcgaatagatgatgataagggtaggacccatgagcttgaacattctgcaattaagtgtatgagaggtatcctctactgctacatgcgacaggccgacaaggtgcaacagtttaagcaagaccctagacctactacctgccttcattccgtgttcaacgtgcatacgggagacgagctgctgagctacgaagaatacggacaccttcagatcaacgccgtctccctttacttgctgtacctcgtggaaatgatcagctcggggcttcagataatctacaacaccgatgaagtgtcgtttattcaaaatcttgtgttttgcgtggagcgggtctaccgcgtgccagacttcggtgtgtgggagaggggttcgaagtacaacaatggatcgaccgaactccactcaagctctgtcggactggcaaaagcagccctcgaggcgatcaacggatttaaccttttcggaaatcagggctgctcctggtccgtgatttttgtggacttggacgcccataatcggaacagacagactctctgttcccttcttccacgggaatctcgttcgcataatactgacgcagccctcctcccatgcattagctaccctgccttcgcactggatgatgaggtgctgttttcgcaaacccttgacaaggtcgtccggaaacttaagggaaagtacgggttcaagagattcctgcgtgatggataccggacctcattggaggatccaaacagatgttactataagccagcggaaatcaagctgtttgatgggattgaatgtgagtttcccatctttttcctctacatgatgattgacggtgtctttaggggcaaccctaaacaagtgcaggaataccaagacctcttgacccctgtgttgcatcacaccaccgaaggatacccagtggtccccaaatactactacgtgccagcagattttgtggaatacgaaaagaacaaccctggatctcaaaagcgctttccttcgaactgtggccgcgatggcaagctgttcttgtggggacaggctctgtacatcattgcgaagttgcttgcagacgaactgatttcaccaaaggatattgaccctgtgcagcggtacgtgccacttaaagaccaaagaaatgtcagcatgcgcttctccaatcaaggcccactggagaacgatctggtggttcatgtcgctctgatcgcagaatcccaacggcttcaggtgtttctgaatacctacgggatacaaacccagacgccacaacaggtggaaccaatccaaatctggccccagcaagaacttgtgaaggcatatcttcagctgggcattaatgagaagttgggactctccggacgcccagacaggcctatcggatgccttggaacctcaaaaatctaccggatactggggaaaacggtggtctgttatccaatcatttttgacctctcagacttttacatgagccaggacgtatttctcttgattgatgacatcaagaacgcgctgcagtttatcaaacagtactggaagatgcacggtaggcctcttttcctcgtccttattagagaggataacatcagggggtcccgatttaaccctattcttgatatgctggcagcattgaaaaagggtatcatcggaggcgtcaaagtgcacgtggacaggcttcaaactctgatctcaggcgccgtggtcgaacagctggactttcttagaatttccgataccgaagaactgccagaattcaagtccttcgaagaacttgagcctcctaagcactcgaaggtgaaacggcaaagctcgactccatctgcccctgaactcggacaacaacctgatgtgaacatctcagaatggaaggataagcctacccacgaaattcttcagaagctgaacgattgttcctgtctggcatcccaagcaatactccttggtattctgctcaagcgggaaggccctaacttcattactaaggagggcactgtgtcagaccacatcgaacgcgtctacagacgggcggggtcgcagaagctctggctggccgtccgctacggcgcagcattcacgcaaaagtttagttcctcgattgcgccgcatattaccacctttctcgttcatggcaagcaggtgacgttgggagcattcggacatgaggaagaagtgatcagcaatccacttagccctcgcgtgatccagaacatcatttactacaagtgtaatacccatgatgaaagagaggcagtgatccagcaggaactggtcattcacatcggttggattatcagcaacaaccccgaacttttttcaggaatgctgaagattagaatcggatggatcatccatgcgatggagtacgaacttcaaatcagaggaggggacaagccggccctggatttgtaccaactgtcacctagcgaagtgaagcaacttctgctggatattctccaacctcaacaaaacgggcgttgctggctcaatcgtagacaaattgacggttcgcttaatagaaccccaactggcttttacgatcgcgtgtggcagattctggaaaggacgccaaatggtatcattgtggcagggaagcatcttcctcaacagcctacgctttccgatatgaccatgtacgagatgaacttttctcttttggtcgaagatacccttggaaacatcgatcagcctcaatacagacaaatcgtggtggaactcctgatggtcgtcagcattgtcctggagagaaacccagagcttgaattccaagacaaggtcgacctcgatcgcctggtgaaagaagccttcaatgagttccaaaaggatcaatcgcgccttaaggaaattgaaaaacaggatgatatgaccagtttttacaacactccacctctcggcaagaggggtacgtgttcgtacctcaccaaggcagtgatgaacttgttgctcgagggcgaagtcaagccgaacaacgatgatccatgtctgatttcc

SEQ ID NO: 18167 - DNA, 3279 bp, synthetic construct
  misc_feature 1..3279: note = source = /note="Description of Artificial Sequence: Synthetic coding sequence"
  source 1..3279: mol_type = other DNA
atggctggagccgcgggactcactgccgaagtgtcctggaaggtcctggaacggagagcaagaaccaaacgttcaggctccgtgtacgaaccgctgaagtcgatcaacctgccgcgccccgataacgagactctctgggacaagctggaccactactaccgcattgtcaagagcaccctgttgctctaccagtccccgaccaccggtctgtttccgaccaaaacttgcggaggcgaccaaaaggccaagatccaggactcactgtattgtgcagcgggcgcgtgggctctggccctggcttacaggcgcattgatgatgacaagggacgcacccatgagcttgagcattccgccatcaaatgcatgcgaggtatcttgtattgctacatgagacaggcagacaaagtccagcagttcaagcaagacccgcgcccgaccacctgccttcactcggtgttcaatgtgcataccggagatgaactgcttagctacgaagaatacgggcatttgcagatcaatgctgtgtccttgtacctgctctacctggtcgaaatgatttcctctggcttgcagatcatctataacaccgatgaggtttcgttcatccagaacctggttttctgcgtggagcgggtctaccgcgtgccggatttcggagtgtgggagcgcggtagcaagtacaacaatggatcaaccgaactgcactcgagctccgtgggcttggccaaggcggcactcgaagctatcaacggattcaacctgttcggcaatcaaggatgctcgtggtccgtcatctttgtcgaccttgacgcccataaccggaacagacagaccctttgctcgctcctcccgagagaatcgcgcagccacaataccgacgccgccctgctgccttgcatttcgtacccagccttcgctcttgatgatgaagtgctcttttcgcagactctcgacaaggtggttaggaaactcaaggggaagtacggctttaagaggttcttgcgggacggttaccgcacttccctggaggacccaaaccggtgttactacaaaccagccgaaatcaagttgttcgacgggatcgagtgcgagttccccatcttctttctgtacatgatgatcgatggggtgttccggggaaatcctaagcaggtccaggagtatcaggatctgctcaccccagtgcttcaccataccactgaaggctaccccgtggtgccgaagtactactacgtgcccgcggatttcgtggaatacgaaaagaacaatcccggctcccagaagcggttcccgtcgaattgcggccgggatggaaaattgttcctgtggggacaggcactgtacatcatcgccaagctgctggccgacgagcttatttcgccgaaggatatcgatccagtgcagagatacgtgccgctgaaggatcagaggaacgtgtcgatgaggttttcgaatcaggggcctctggaaaatgacctggtggtccatgtggcccttattgcggaatcccagcggctgcaagtgttcttgaacacttacggaatccagacccagaccccgcagcaagtggaaccgattcagatttggccgcagcaggagctcgtgaaggcatacctccagctgggaattaacgaaaaactcgggctttcgggccgcccggatcgccctattgggtgtcttggaacctcgaagatttacagaatcctcggaaagactgtggtctgctatccaattatctttgacctgtccgatttctacatgtcacaggatgtctttctcctcattgatgacatcaagaatgccctgcagttcatcaaacagtactggaaaatgcatggcaggccactgttcctggtcctgatccgcgaggacaacatccgcggatccaggtttaacccgatcctggatatgctggccgcactgaagaaaggcatcatcggaggggtcaaggtgcacgtggaccggttgcagaccctgatctccggagcagtggtggaacaactggacttccttcgcatctccgacacggaagaactcccggaattcaagtcattcgaagaactcgaaccgccgaagcattcgaaggtcaagcgccaatcctcaaccccgagcgctccggaactgggtcagcagccggatgttaacataagcgaatggaaggataaaccgacccacgaaatcctccagaagctcaacgattgctcatgtctggccagccaggcaatcctgctgggaatcctcttgaagcgcgagggaccgaatttcattactaaggaaggcactgtctcggaccatatcgagcgcgtgtaccgcagagcggggtcacagaagctctggttggccgtgagatacggagcagccttcactcagaagttcagctcaagcatcgcaccgcacatcactactttcctggtccacggaaaacaggtgacgctgggggccttcggacatgaagaggaggtcatctccaaccccttgtcaccacgcgtgatccaaaacatcatttactacaagtgcaacacccacgatgaacgggaagcggtgatccaacaggaactcgtgatacatattggctggatcatctccaacaatccggaactgttttcaggaatgttgaagatccgcatcggctggatcattcacgctatggaatacgaactgcagatccggggaggtgataagcctgcgctcgacctgtaccagctgtcgccgagtgaagtgaagcaattgctcctggacatcctccaacctcagcaaaacggccggtgctggctgaatagacgccagattgatggatcgctgaatagaactccaaccggattctacgaccgcgtgtggcaaatcctggaaagaacccctaacggcattatcgtggctggcaagcacctgccgcagcaaccgacgctctccgacatgacgatgtacgagatgaatttctccctcctggtggaagatactttgggaaatatcgatcagcctcagtacaggcagattgtggttgagctccttatggtggtgagcatcgtgctggagaggaaccccgagctggagttccaggacaaggtggacctggaccggcttgtgaaggaggcatttaacgaattccagaaagaccagagccggttgaaggaaatcgaaaagcaggacgatatgaccagcttctacaacactcctccgctgggaaaacgcggtacttgctcatatttgaccaaggcggtcatgaacctgctgctcgaaggagaagtgaaacctaacaatgatgatccgtgcctgatctcc

SEQ ID NO: 18168 - DNA, 3279 bp, synthetic construct
  misc_feature 1..3279: note = source = /note="Description of Artificial Sequence: Synthetic coding sequence"
  source 1..3279: mol_type = other DNA
atggccggggccgccggactgaccgcggaagtgtcgtggaaagtactggaacggagagcgcggaccaaacgatcgggatcggtgtacgagccactcaaatccatcaatcttcctagaccggacaatgagacgctctgggacaagctcgaccattactaccgcatagtgaagtcgactctgctgctgtaccagagcccgaccactggactgtttccaactaagacttgcggtggcgaccagaaagcaaagatccaggactcgttgtactgcgctgcgggcgcatgggccctggccctcgcgtaccggcgcatcgacgacgacaagggcaggacccacgagctggaacacagcgcgatcaagtgcatgcgcggaatcctctactgctacatgcgccaggcggataaagtgcagcaattcaagcaagatccacggccaaccacttgcttgcactctgtgttcaacgttcacaccggagatgaactcctgagctacgaggagtacggacatctccagattaacgccgtctctctgtatctgctctaccttgtggagatgatctcttctggtttgcaaatcatctataacaccgatgaggtgagctttattcagaacctcgtcttttgtgtggaacgggtgtaccgggtgccggacttcggcgtttgggaacggggaagcaagtacaataatggaagcaccgaactgcattcatcgtcggttggacttgccaaggcagccctggaggccatcaacggtttcaacctgttcgggaaccagggttgtagttggtccgtgattttcgtggacctggatgctcataatcgtaaccggcagactttgtgcagcctgctgccgcgggagagccggtcacacaatactgatgccgcgctcctgccatgcatcagctaccctgcattcgcactggacgatgaggtgctgttcagccaaactttggataaggttgtgagaaagctcaaggggaagtacggctttaaacgcttcctcagggatggatatcggacctccttggaggaccccaaccggtgttactacaaacctgcggagatcaagctgttcgacggcatcgagtgcgagtttccaatcttcttcttgtatatgatgatcgacggcgtgttccggggcaacccgaagcaggtgcaggaataccaagatctcctgaccccagtcctgcaccacaccaccgaaggatacccggtagtcccgaagtactactacgtgcccgctgacttcgtggagtacgaaaagaataacccagggtcgcaaaagcggtttccttccaactgcggacgcgatggtaaactgtttctctggggccaggcgctgtacatcattgccaagctgctggcagatgaactcatctccccgaaggacatcgaccctgtgcaacgctacgtcccactgaaggaccagcgcaatgtgtcgatgcgttttagcaatcagggccccctggagaacgatctcgttgtgcacgtggcgcttattgcagagagccaacggcttcaggtatttctgaacacttacggcatccagactcaaacgcctcagcaggtggagcccatccagatctggccacaacaggaactggtcaaggcctacctgcagctcggaatcaacgaaaaactgggcttgtccgggaggccggacagaccaatcggatgcctgggaacgagcaagatttaccgcattttgggaaagacggtggtgtgctacccgattatcttcgacctctcggatttctatatgtcacaggatgtattcctgttgatcgacgacatcaagaatgccctgcagttcattaaacagtactggaaaatgcacgggcggccactctttttggtcctcatcagggaggacaacatccgcggttcccgcttcaatccgatcctggatatgctcgccgcgttgaagaagggtatcattggaggagtgaaagtgcacgtggacagactgcaaaccctgatcagcggcgccgtggtcgaacaacttgactttctgaggatctccgacactgaggagttgcccgagttcaaatcgttcgaagaactcgaaccacctaagcatagcaaggttaaacggcaatcctcgactccttcggccccggagctcggacaacaaccagatgtgaacatttctgaatggaaggataagcctacccatgaaattctgcagaagctcaacgattgttcctgtctggcttcgcaagcgatcttgctggggatcctgctgaaacgggaaggaccgaacttcatcaccaaagagggaactgtgagcgaccacatagagcgggtgtaccgccgagcaggcagtcaaaaactgtggcttgccgtccggtacggtgccgccttcacccagaaattctcttcatcaattgccccccacatcaccaccttcctggtccacggtaagcaggtgactctgggggccttcggacatgaagaggaagtcatctccaacccgctttcccctcgcgtgattcagaatatcatctactacaagtgcaacacgcatgacgaacgggaagccgtcatccagcaagaactggtgatccatatcggctggatcatctccaacaacccagagctcttctccggtatgttgaagatcagaatcggatggattatccacgccatggaatacgagctgcaaatccgcggcggagacaaaccagcccttgacctgtaccagctgtcaccgtcagaggtgaagcagctgctgctggacatcctccagccccagcagaacggacggtgttggctgaataggcgccaaatcgacggatcgctgaaccgcaccccaactggattctacgatcgagtgtggcaaatcctggaaagaactcctaacgggatcatcgtcgcgggaaagcatttgcctcaacagccgaccctgtcagatatgacgatgtacgaaatgaatttctcgctgctcgttgaagataccctcggaaacatcgatcaaccgcagtaccggcagatcgtggtggagctgctgatggtcgtgtcgatcgtgctcgaacgaaatcccgagctggaatttcaggataaggtcgacctcgatcggctggtgaaggaggcattcaatgaattccaaaaggatcaatcacgactcaaagaaatcgaaaagcaggatgacatgaccagcttctataacactccgccgctcggaaagagaggtacttgctcgtacctcaccaaagctgtcatgaatctgctgctggaaggagaagtcaagccgaacaacgacgatccctgcctcatttca

SEQ ID NO: 18169 - DNA, 3279 bp, synthetic construct
  misc_feature 1..3279: note = source = /note="Description of Artificial Sequence: Synthetic coding sequence"
  source 1..3279: mol_type = other DNA
atggcaggggcggcaggacttactgccgaagtctcgtggaaagtgctcgaacgcagagcccgcactaagagatccggcagcgtctacgaacccctcaaatcaattaacctcccccgcccggacaacgaaaccctctgggataaacttgaccattactacagaatcgtgaagtcgactttgctgctgtaccagagcccaactaccggcctgttcccaactaagacttgtggcggggaccagaaagcgaagattcaggactcgctgtactgcgcagctggcgcatgggccctggcgctggcctacagaaggatcgatgacgacaagggacgaacccacgaacttgagcacagcgcaattaagtgcatgcggggcatcctctactgctacatgcgtcaggcagacaaggtgcagcaattcaaacaagaccccaggccaaccacgtgcctgcattcggtgttcaacgtgcacactggcgacgagcttttgtcgtacgaggaatacggacatctgcagattaatgctgtctccctgtacctcctgtaccttgttgaaatgatctcttccggcctccagattatctacaatacggacgaagtctcgttcatccaaaacctggtcttttgcgtcgaacgcgtgtatcgtgtgccggatttcggcgtgtgggagaggggctcgaagtacaacaacggatccactgaactgcactcgtcaagcgtcggactggctaaggcggccttggaggctatcaatgggtttaatcttttcggaaaccagggatgttcctggtccgtgatcttcgtcgacctcgatgcccataaccgtaaccggcagaccctctgctcccttcttccacgcgagagccgatcacataacaccgatgccgcactgctgccttgcatctcctaccctgcctttgccctcgacgacgaagtgctcttcagccaaaccctggataaggtggtgagaaagctcaagggcaagtacggattcaagcggttcctcagagacgggtaccgcacctcactggaggatccgaatagatgctactacaaaccggcggagatcaagctgttcgatgggatcgaatgcgaattccctatcttctttttgtatatgatgatcgacggggtgttccgcggcaatccgaaacaagtccaggaatatcaagacttgctgactccggtcctgcaccacaccacggaaggctacccggtggtgccaaaatactactacgtgccggctgacttcgtggaatatgaaaagaacaacccgggaagccaaaagcggttcccatccaattgtgggcgggatggtaagctgtttttgtggggtcaggccctctatatcatagcgaagctgcttgctgatgaactcatcagcccgaaggacatcgaccctgtccaacgatacgtcccgttgaaagaccagagaaacgtgtcgatgcgcttttcaaatcagggaccactcgaaaacgacctcgtcgtgcacgtggctctgattgccgaatcacagcggttgcaggtctttctgaatacctacggtatccagactcagaccccccaacaagtcgaacccatccagatctggccgcagcaggaactggtgaaagcctacctgcagcttgggattaacgagaagctggggttgagcggtagaccagacaggccaattggctgcttgggcacctccaagatttacagaattctcggaaagaccgtcgtgtgttacccaatcatctttgatctgtctgatttctacatgagccaggacgtctttctgctcatcgacgacatcaagaacgcgctgcagttcatcaagcagtactggaagatgcatggcagacctctgttcctcgtgctcatcagagaggataacatcagaggatcgagattcaatccgatcctggatatgctggccgcccttaagaagggaataatcggaggcgtgaaggtgcatgtggaccggctgcagactctcatctccggagcagtggtcgagcagctggacttcttgcgcatctcagatactgaagagctgccggaattcaagtcatttgaggagctcgaacctcctaagcactcgaaggtgaagcgccagtccagcaccccgtctgcccctgagctgggacagcagcccgacgtcaacatctcagagtggaaagataaaccgactcatgagatcctccagaaactcaacgactgctcatgccttgcatcccaggccatccttctgggaatcctcctgaagcgcgaaggaccaaacttcatcacgaaagaaggaactgtgtcggatcacatcgagcgcgtgtacaggcgggcaggctcgcaaaagctctggctggcagtgcgctacggcgcagcctttactcagaagttttcaagctccattgccccccacatcactacgttcctggtgcatggaaagcaggtgactttgggagctttcggacacgaggaggaggtcatttccaatccactgtcgccgcgcgtgatccagaatatcatatactacaagtgtaacacccatgacgaacgggaggccgtgatccagcaagagctggtcatccacatcggctggatcatcagcaacaatccagaactttttagcgggatgcttaagatccggatcggttggatcattcatgcgatggaatatgagctgcaaatccgcggtggagacaaaccggcacttgacctctaccaactgtccccatccgaggtgaagcaactgctgctcgatatcctgcaacctcaacagaacgggcggtgttggttgaaccggcggcaaatcgatggctccttgaacagaaccccgacgggattttacgatagagtctggcagatcttggagcggaccccgaacggcatcatcgtggcaggtaaacacctcccccagcagccgactctgagcgacatgaccatgtacgagatgaacttctcgctcttggtcgaagatactctgggaaatatcgaccagccgcagtacaggcagattgttgtggagctcctcatggtggtgagcatcgtgctggagcggaatccggaacttgaattccaggataaagtggacctggacagattggtgaaggaggcgtttaatgagtttcagaaagatcaatctcgactgaaagaaatcgagaagcaagacgatatgacttccttttacaatactcccccactgggaaagcgcggtacctgctcgtatctcaccaaagccgtgatgaacctcctgctggagggtgaagtcaaaccgaataatgacgatccgtgcttgatcagc

SEQ ID NO: 18170 - DNA, 3279 bp, synthetic construct
  misc_feature 1..3279: note = source = /note="Description of Artificial Sequence: Synthetic coding sequence"
  source 1..3279: mol_type = other DNA
atggccggggccgccgggctaacagcagaagtcagttggaaagtgctggaaaggcgagctagaacaaaacgttctggatcagtgtacgaaccattaaagtccatcaatcttcctaggcccgataacgaaacattgtgggataagctggatcattactatagaatagtcaaatctacattactcctatatcagagtccaacaactggactttttcctactaaaacttgcgggggagaccagaaggctaagatacaggattcactgtactgcgccgccggggcctgggctttggcccttgcatatcgccggatcgatgatgataaagggagaactcatgaacttgaacattccgctataaaatgtatgcgaggaatactttattgctacatgcgccaggccgataaggtgcagcagtttaaacaagatcctcggccaacgacatgtctgcactctgtgttcaacgtgcacacaggggatgaactgctttcctatgaagaatatgggcacttacagataaacgcggtctctctttatcttctctatctcgtagaaatgataagttctggactccagataatctataacactgacgaggtctctttcatccagaatctggtgttttgcgtcgaaagagtatatcgggtcccagacttcggggtatgggaaagaggatctaaatataacaatgggtcgacagaactccatagttcttccgtagggctcgccaaggctgctctcgaagctataaatggatttaacttgttcggaaatcaggggtgttcctggtcggtgatctttgtcgatctggacgcacacaacagaaaccggcagacactgtgctctctgcttccacgcgaatcccggtcccataatacagatgctgccctgctcccttgtatttcatatccggcctttgcgctagacgatgaagtgctatttagtcagactctggataaagtggtgcgaaagctcaaagggaagtatgggttcaaacggttcctgcgggatggataccggacttctcttgaggatcccaataggtgctattataagcccgcggagatcaagcttttcgatggaatcgagtgtgaattcccaatctttttcctttacatgatgatagacggagtctttaggggaaaccccaaacaggtacaggaatatcaggatttactcacaccagttctgcatcatacaacagaggggtatcccgttgttccaaaatactactatgtccctgccgactttgtagaatatgagaagaataaccctgggtctcagaaacgcttcccatcaaactgcggaagagatgggaagctcttcctttggggacaggcactctatataatcgctaaactcctggcagatgaactaatatcccctaaggatatagatcctgttcagcgatatgtgccactaaaagatcagaggaacgtgagtatgcggttctcaaaccaggggccattggaaaacgatctggtggttcacgtggctctcatcgcagaatcccagcggcttcaggtctttctaaatacttatggaatccagacacaaacgccacagcaggtggaacccatacagatctggccccagcaggaactcgtgaaagcttatctacagcttggaataaatgaaaaacttgggctctccgggagaccagatcgacctataggatgcctgggaacttcaaaaatctaccggatactggggaaaactgtggtttgttatcccatcatttttgacctgtccgatttctacatgtcacaggatgtgtttcttctgatagacgatatcaaaaacgccctacagtttatcaagcagtactggaagatgcatgggcggccattgtttttggtgctaatacgcgaagataatattaggggatcaaggttcaatcctatcctagatatgctggcagcgctaaaaaaagggataataggaggggttaaggtgcatgttgaccggcttcagactctcatatccggggccgtggtggaacagctggattttctcaggatctccgatacagaagagctgcccgagtttaagtcatttgaagaactggaaccccccaaacattccaaagtaaaaagacagtcttctacaccctctgctcctgaactggggcaacaaccagatgtgaacatctccgaatggaaggacaaacccactcacgaaatacttcagaaacttaatgattgctcttgcctcgcaagtcaggcaatcctcttgggaatactcttgaaacgggagggacccaactttatcacaaaagaaggaacagtttcagatcacatagaacgggtatacagacgggctggatctcagaaactctggctggcagtgaggtacggggcagcttttacacagaagttttcttcttccatagccccacacatcactactttcctcgtccatgggaagcaggtcactctcggggccttcggacacgaggaagaggtcatttcaaatcctctaagtcctagagtgatccagaatatcatctactataaatgcaatactcatgatgaacgggaggccgtcatacaacaggagctagttatacatatcggatggataatatcaaataatccagaattattctcaggaatgttaaaaattcggatcggatggataatacacgcaatggaatatgagttacagattagaggaggggacaaaccagctttggacctctaccagctctccccatctgaggtcaaacagctactcctagatatcctgcagccacagcagaatggacgctgctggctaaatcgccgacagatagatggatccctcaacagaactccaacagggttttacgatcgcgtctggcagatattagaaaggactcccaacggaattatagttgccggaaaacatctcccccagcagcccacattatctgacatgacaatgtatgaaatgaacttctcgctacttgtagaagacactctggggaatatcgatcagccacagtacaggcagatcgtggtagagcttctgatggtggtgtctatcgtcctggaaagaaacccagaactagagtttcaggataaagtggacctagataggcttgttaaagaagccttcaacgaattccagaaagatcagtcacggctgaaggaaatagaaaaacaggatgatatgacttctttttataacacaccgcctctggggaaaaggggaacttgtagttatctgacaaaagccgttatgaacttactcctggagggggaagtaaaacccaataacgatgatccatgtttaatctcc

SEQ ID NO: 18171 - DNA, 3279 bp, synthetic construct
  misc_feature 1..3279: note = source = /note="Description of Artificial Sequence: Synthetic coding sequence"
  source 1..3279: mol_type = other DNA
atggctggcgctgccggcctcaccgcagaggtgtcctggaaggtcttagaacgcagggcccgaaccaaacggtccggctccgtttatgagcctctcaagtctatcaatctgccacgaccagacaatgaaacactgtgggacaagctggatcattactatagaattgtgaaatccacactactgctctaccagtccccaaccaccgggttattccctaccaaaacctgcggtggcgatcagaaagctaagatccaggactctctgtattgtgcagccggtgcctgggctctcgctctggcctatcgcagaatcgatgacgacaagggtcgcacccacgaattggaacattccgccataaaatgcatgcggggcatactctattgttatatgaggcaggctgataaggttcagcagttcaagcaagatcctcgtccaaccacatgcttacatagcgtgtttaatgtccatactggggacgagctcctgagctacgaggaatatggacatctgcagataaatgccgtcagtttgtacctgctctatctggtggagatgataagcagcgggctgcagattatatataatacagacgaggtctcatttatccagaatctggttttttgcgtagaacgggtgtaccgggtgcctgattttggcgtttgggagcgcggatctaagtataataatggttcaacagagctgcatagctcctctgtcggcctggcaaaggcagccctggaggcaatcaatgggtttaatctgtttggcaatcagggctgtagttggagtgtgatattcgtcgacctggatgctcataatagaaacagacaaacattatgttccctcctgccccgtgaaagtcgatcccataacaccgatgctgcactgcttccctgtatcagctatcctgccttcgctctggacgacgaggtgttgttctctcagactctggacaaggttgtgcggaagctgaaaggtaaatatggatttaagaggttcttacgtgatgggtatcgaaccagcttggaagaccctaacagatgctattacaaaccagccgaaatcaaactgtttgacggaatagaatgcgaattcccaatcttcttcctgtatatgatgatcgacggggtgttcagggggaaccccaagcaagtgcaagagtatcaggaccttttaacaccagtgcttcaccatactactgaaggctatccagtcgtgccaaagtattactatgtgcccgcagacttcgtggaatacgagaaaaataacccagggtctcagaaaagattcccttctaattgtggaagagatggaaagcttttcctgtggggtcaggctctctacatcatcgccaaacttctggccgatgaacttatttcaccaaaagacattgaccccgtgcagcgatacgtccccctgaaggaccaacgaaacgtttctatgcgattcagcaaccagggcccactggaaaacgacctggttgttcatgtggccctgattgccgaatcccagcggctgcaggtgttcttaaacacttacggaatccagactcagacaccacagcaggtggagccaatacagatctggcctcagcaggaactcgttaaggcttaccttcagctcgggatcaatgaaaaactgggcctctccggacggcctgaccgccccataggctgtctgggcaccagtaaaatctaccgaattctgggcaaaaccgttgtgtgttaccctatcatctttgacctgtctgatttttatatgtctcaggacgtttttctgctgattgacgatatcaaaaacgctctgcagtttattaagcaatattggaagatgcatggcaggcccctgttcctggttttgatacgcgaggacaacatcaggggcagtagatttaatcccattttagatatgctggccgctctgaagaaaggcatcattgggggtgtgaaagtgcacgtcgaccggttgcagacactgattagcggcgccgttgtagagcagctggacttcctgcggattagtgacactgaggaactgccagaattcaagagttttgaggagcttgagcctccaaaacactccaaggtgaaacggcaatccagcactcctagcgcaccagaactaggacagcagcctgacgtgaacataagcgagtggaaggataaacccacccacgagattctccagaaattaaacgattgttcctgtctagcctcccaggctattctgctggggattctgttaaaacgagaaggacctaacttcattaccaaagaggggaccgtttctgatcacatagagagggtgtatcgccgcgctggcagtcaaaaactgtggctagctgtgaggtatggcgccgcctttactcagaagttctcctctagcatagctcctcacattaccacattcctggtgcatggcaagcaggtaaccctgggtgcattcggccatgaagaagaagtcatttccaaccctctgtcccccagagtgatacagaacatcatttactacaaatgtaacacccatgacgaacgagaggctgtgatccagcaggagctagttattcatatcggatggataatatctaacaatcccgagctgttctccgggatgctgaaaatcaggatcggctggattatacatgccatggaatatgagctgcaaatcaggggtggagataaaccagccttagacctgtaccagctgagccctagcgaagttaagcagctacttctggacatcctgcagccccagcaaaatgggcggtgctggctgaacaggagacaaattgatggcagcttaaatcgtacccctactggattttacgaccgagtctggcagatactggaacgaaccccaaacgggattatcgtcgcaggcaaacatttgcctcagcagcccacactgtccgatatgacaatgtacgagatgaatttttccctgctggtcgaagatactctcggcaatatcgaccagcctcagtataggcagattgttgtggaattgctcatggtagtctctatcgttctcgagcgtaacccagagctggaattccaggacaaggttgacctagaccggctggtgaaggaagccttcaatgagttccaaaaagatcagtcccggctaaaggagatagagaagcaagacgacatgaccagcttctacaatacacctccactgggcaagcggggcacatgttcatatttaaccaaggctgtgatgaacttactgctggaaggagaagtgaagcctaacaacgatgatccttgcctgatatct

SEQ ID NO: 18172 - DNA, 3279 bp, synthetic construct
  misc_feature 1..3279: note = source = /note="Description of Artificial Sequence: Synthetic coding sequence"
  source 1..3279: mol_type = other DNA
atggccggtgccgctggcctgactgccgaagtgagctggaaggtcctggagaggagagcacgtaccaagagatcaggctcagtgtatgaacctctgaaatcaatcaatctgccacggcctgacaacgagaccttgtgggataaactggatcactattataggatcgtgaaatctacactgctgctgtatcaatcccccaccaccggattgtttcctactaagacttgcggcggggaccaaaaggcaaaaattcaggactcactttactgtgcggcaggtgcatgggctttggcccttgcctaccgtcgaatcgatgatgacaagggcagaacacatgagctagagcactccgcaattaagtgcatgcgcggaatcctatattgttacatgcgacaagccgataaggtccagcagtttaaacaagatccgcggcccactacctgccttcactctgttttcaatgtgcatactggcgacgaactgctcagctacgaagagtacgggcaccttcaaatcaatgccgtgtctctctacctgctgtatttggtcgagatgatctcttcgggcctgcaaattatttataacaccgacgaagtgagcttcatccaaaatctggtgttttgtgtggagcgcgtctatagagtacccgatttcggagtatgggagcgaggctctaaatataataacggatcgacagaacttcactctagtagtgtcggcttagctaaagctgccctcgaggctatcaatggtttcaaccttttcggtaaccagggatgctcttggagcgtgatcttcgttgacctggacgcccacaacagaaaccgccagaccctctgttcactcttgcctcgggaatcccgcagccataataccgatgcagcgctgctcccctgcatctcataccccgccttcgcactcgacgacgaggtgctgttttcgcagactctcgataaagtcgtccgcaagctgaagggaaagtacgggtttaaaagattccttagagacggttacagaacctcgttagaagacccaaataggtgctattacaagcctgccgagatcaagctgtttgacggcattgagtgcgagtttcccatcttcttcctgtacatgatgatagacggagtcttccgaggaaacccaaagcaggtgcaggagtatcaggatctgcttacacctgtgttacaccacaccactgagggttatccagtggttcccaagtattattacgttcctgccgatttcgtcgagtatgagaagaataatcccggcagccagaagaggttccctagcaactgcgggagggacggaaagctgttcctgtggggacaggcactgtacataattgctaagctgctcgctgatgaactaatcagtcctaaggacattgatcccgtgcagcgatatgtgcccctgaaagatcagcggaatgtgtccatgagatttagcaatcagggccctttggaaaatgatcttgtcgtgcacgtcgctttgatagccgaatcccagcggctgcaggtgtttctgaatacctacggcattcagactcaaaccccccagcaggttgagccgattcagatctggcctcagcaagaattggtcaaagcctatcttcagctaggaatcaatgaaaagctgggactgagtggccgcccagatagacccatcggctgcttgggcacatcaaagatctaccggatcctgggcaagactgtggtgtgctatcccattatctttgacttgtctgacttttatatgtctcaggacgtgtttctcctaattgatgacataaagaatgccttgcagttcatcaaacagtattggaagatgcacggccggcctctctttcttgtgcttattcgggaggataatatcagaggcagtcggtttaaccctatcctggatatgctagccgccttaaaaaaaggcattatcggcggcgtcaaggtccacgtggacagattacaaacactgattagtggcgccgtggtggagcagctggacttcctgcgtatttccgacactgaagagctaccggaatttaagagtttcgaggagcttgagccacctaagcacagcaaagtgaagaggcagtcgagtacccccagtgcgcccgaactgggccagcagcctgatgtaaacattagtgaatggaaggacaagccgacacacgagatactccaaaaactgaatgattgctcatgcctggcctcccaggccatcctgctaggaattctcctgaaacgcgaaggaccaaattttatcacaaaagaaggcacggtctcagatcatatcgagcgcgtctatagacgggctgggtcccagaagctatggctagccgttcggtatggcgctgcctttactcagaagttttcttcatccatcgccccccacatcactacatttctcgtgcacggtaagcaggtgaccctcggcgcgttcggccacgaagaggaggtgattagcaaccctctgagtccccgagtaatacaaaatataatatactataagtgcaatactcacgacgaacgggaggctgtgatacaacaagaactagttatacacattggctggatcatctcgaataacccggagcttttcagtgggatgctgaagattagaatcggctggatcatccacgctatggagtatgagttacagattcgaggcggagataaacctgccctcgacctgtatcaactgtcaccttcagaggtgaagcagctgttactcgatattttacagcctcagcagaatggtagatgctggctaaacaggcggcagattgacggtagcctcaaccgcacacctacaggattttacgatcgggtctggcagatcctcgagcggacacccaatggcattattgtggctggcaaacaccttccacagcaaccaaccctctctgacatgacaatgtacgagatgaacttttctctcttagtcgaggacacactggggaatatcgatcaacctcagtatagacagatcgtagtggaattgttgatggttgtgtctatagttttggagaggaacccggagctcgagttccaggataaggtggatctggatcgattagttaaagaggcttttaacgagtttcagaaagaccagtcgcgactgaaggagatcgagaagcaggacgatatgacctccttctacaacaccccacccctgggaaagagaggaacctgctcttaccttaccaaggcagtgatgaatctgcttctggaaggtgaggtaaaaccaaacaatgatgatccctgtctgatctcg

SEQ ID NO: 18173 - DNA, 3279 bp, synthetic construct
  misc_feature 1..3279: note = source = /note="Description of Artificial Sequence: Synthetic coding sequence"
  source 1..3279: mol_type = other DNA
atggcaggagcggccggccttaccgcagaagtgagctggaaagtgctcgagcgccgcgccagaaccaagcgctccggtagcgtgtacgaaccccttaagtccattaatctccctcggccagacaatgaaactctttgggataagctggatcactactaccggatcgtcaagtccaccctccttctgtaccagtcgcctacgactggactcttccctactaaaacctgcggaggggaccagaaagccaagattcaggattccctctactgcgctgcgggggcttgggccctggccctcgcgtacagaagaatcgatgatgataaagggcgcactcacgaattggaacattctgccatcaaatgcatgagaggtatcctgtactgctacatgagacaggcggataaggtgcagcagttcaagcaggatcccagaccgaccacctgcctgcattccgtctttaacgtgcacaccggggacgaactgctttcctacgaggaatacggacacctccagatcaacgccgtgtccctctacctgctgtacctcgtcgagatgatctcatcggggctgcagatcatctacaatactgacgaagtgtcattcatccagaatttggttttctgtgtggagcgggtctacagagtcccagacttcggagtctgggaacggggcagcaagtacaataatggatccactgaactgcacagcagctccgtgggactggccaaagcggcccttgaagccatcaacggattcaacctgttcggaaaccaggggtgttcctggtctgtgatcttcgtggacctcgacgcccataacaggaatcgccagacgctgtgctcactcctgccaagagagtcaaggtcccataacactgatgcggccctccttccgtgcatctcatacccggccttcgcactggatgacgaagtgctgttttcgcagactttggataaggtggtgaggaaactgaagggtaagtacggattcaagcggttcctgagagacggttaccggacctcactggaggatcctaaccggtgctactacaagccggccgagatcaagctgttcgacggtattgaatgtgaatttcctatcttttttctgtacatgatgatcgacggagtgttccgcggaaacccgaagcaggtccaagaataccaagacctgctgacgccggtgctccaccacaccactgaaggataccctgtcgtgcctaaatactattacgttccggccgacttcgtggaatacgagaagaacaacccgggatcacaaaagcgctttccctccaactgcggaagggacggcaaactctttttgtgggggcaggccctttacatcatcgccaagctccttgcggatgaactcatctcgccgaaggatattgaccctgttcagcgctacgtcccacttaaggaccaaaggaacgtgtcaatgcgcttctccaaccagggcccgctcgaaaatgatcttgtggtgcatgtcgccctcattgccgaaagccaacggctgcaagtgttcctgaatacgtacggtatccagacgcagactccgcagcaagtcgaacctatccagatctggccgcaacaggagctcgtgaaagcgtacctgcaactgggcattaatgagaagctcggactctccggtcgcccagaccgcccgatcggatgtctgggcacctcgaagatctaccggatcctcggcaagaccgtggtgtgctaccccattatcttcgacctgtcggacttctacatgtcccaagatgtgttcctgctgatcgacgacatcaaaaacgccctgcagttcatcaagcagtactggaagatgcatggaaggcctctgttcctcgtcctcatccgagaggataacatcagagggtcccgctttaatccgattttggatatgctggccgcgcttaagaagggaatcatcgggggcgtcaaagtgcatgtcgatcggctgcaaaccctgatatcgggcgcggtggtggaacagctcgactttttgcgcatctcagataccgaggaactccctgaattcaaatccttcgaagaactcgaaccgcccaagcactcgaaagtgaagcggcaatcctccacgccatcagcgccggagctgggtcaacagcctgacgtgaacatcagcgaatggaaggacaagcctacccacgaaatcctccagaagttgaatgattgctcttgcttggcctcgcaagcgattcttctcggaattcttctcaagagggaaggacctaacttcatcacgaaggagggaaccgtgtcggatcacatcgagcgagtctaccgccgcgctggttcgcaaaagttgtggctcgccgtgcgctatggagccgctttcacccaaaagttctcgtcctcgatcgccccgcacatcactaccttcttggtgcacggaaagcaggtgacgctgggggcattcggccatgaagaagaggtgatcagcaatccgctgtctccaagggtgatccaaaacatcatctactataagtgcaatacccacgatgagcgggaagccgtgatccagcaggagcttgtcatccacataggctggattatctcaaacaatccggaactgtttagcggaatgctgaaaattcgtatcggctggatcatccatgcaatggaatacgagctgcagatccggggcggagacaagccggcccttgacctgtaccagctgagcccatcggaggtcaaacagctgctgctggacatcctgcagccacagcaaaatggaagatgttggctcaaccgcagacaaatcgatggatccctcaaccggacgccgactggtttttacgatcgcgtctggcaaatccttgagcgcacgccgaatgggatcatcgtggcaggcaagcacctgcctcagcagccgaccctgtccgatatgacgatgtacgaaatgaacttttcgctgctggtcgaggacaccctggggaacatcgaccagccgcagtaccgccaaattgtcgtggagctgctgatggtggtgtcgatagtgctggagaggaacccggaactggagttccaagacaaggtggacctggaccggcttgtgaaagaagcgtttaacgagttccaaaaagaccaaagccgactcaaagagatcgaaaagcaagatgacatgacttccttttacaacactcccccactgggaaagcgaggaacctgctcatacttgactaaagcggtgatgaacctgctgttggaaggagaggtgaaacccaataacgatgatccctgcctgatttcc

SEQ ID NO: 18174 - DNA, 3279 bp, synthetic construct
  misc_feature 1..3279: note = source = /note="Description of Artificial Sequence: Synthetic coding sequence"
  source 1..3279: mol_type = other DNA
atggctggtgcggcaggccttactgctgaggtgtcatggaaagtgctggaaaggagagcacgcactaaaagatccggctcggtttacgaaccactcaaatcaatcaatttgcccagaccggataacgaaacactttgggataagctcgaccattactaccgaatcgtgaaatctacactgctcctgtaccaatccccaactacagggctcttcccaaccaagacttgcgggggggaccaaaaagccaagattcaggatagtttatattgcgccgccggggcgtgggctctagccctggcctaccgtcggattgacgacgataaaggcaggacacatgagctcgagcacagtgcaatcaagtgcatgagggggatcctgtactgctacatgaggcaggcagataaggtccagcagttcaagcaagaccctcggcccacgacttgcctgcacagcgtcttcaacgtgcacaccggggatgaattgcttagctacgaggaatatggacatttgcagattaatgcagtatccctgtatcttttgtacctggtcgaaatgatctcatcagggctgcaaattatttacaatacggacgaggtcagcttcatccagaacttggtcttctgcgtagagcgagtgtatagagtccccgattttggagtctgggagaggggctcgaaatataacaacggctccaccgaactacatagtagcagtgtgggcctggccaaggctgctctggaggcgataaacggcttcaacctgtttggaaaccagggttgcagctggagcgtgatctttgtagacctagatgcacacaatagaaacaggcaaacactatgcagcttgctgcccagagaatcacgttctcataacacagacgcggcattgcttccctgcatctcgtaccctgcctttgccctcgatgacgaagttcttttcagccagactctggataaggtggtcagaaagctcaagggcaaatacggattcaagcgtttcctgcgggacggatatcggacttctctcgaagatcccaataggtgttactataagcctgccgagatcaaactgtttgacggcattgagtgtgaatttcctatctttttcttgtatatgatgatcgacggtgtcttcagaggtaaccccaagcaggtgcaggaataccaggacctcctgaccccagtcctgcatcacaccaccgaaggctatccagtggtccccaaatattattacgtaccagcagacttcgtcgaatacgaaaagaataacccaggctctcagaagagatttccctcaaactgcggccgcgatgggaagctgtttctctggggtcaggctctgtacattatcgccaagctacttgcggacgaattaatatccccaaaggatatcgatcctgtccagcgatacgtccccctcaaggaccagagaaatgtgtccatgaggttttctaatcaggggcccctggaaaacgacctggtggttcacgttgccctgatcgccgaatctcagagactgcaagtgtttctgaatacatatggaatccagacgcagacgccacagcaggtggagcccatacaaatatggccgcagcaggagctggtcaaggcctacctccagctgggcattaatgagaagttgggactgtcagggagacctgacaggcccatcgggtgcctgggtacttcaaaaatctataggattttaggcaaaacagtggtgtgctaccccatcatattcgacctctctgacttttacatgtcccaagacgtgtttctccttattgacgatatcaagaacgcattacagtttattaaacagtactggaagatgcatggacggccgttgtttctggtattaatccgggaggacaatattcggggatcgagattcaacccaatcttagatatgttggccgccctgaagaagggtattatcggaggtgtgaaagtgcacgtcgacaggctccaaaccctcatatccggcgcagtggtggagcagttggacttcctcaggatcagtgacactgaagagctgcccgagttcaagagttttgaagagctggagccaccaaagcactctaaggtgaagcgtcaaagtagcactccatccgcccctgagttgggtcagcagccagacgtcaacatctctgagtggaaggataagccaacccacgaaattctccagaagcttaatgactgttcctgtctggccagtcaggctattttactgggaatattgctaaagcgagaagggcctaattttatcacaaaagagggtaccgtatcagaccacattgagcgcgtgtaccgcagggccggttcccagaagttgtggctcgcggttagatatggagccgcctttacacaaaagttttcatctagtattgctccacacataaccacgtttcttgtgcacggtaagcaagtaacactgggcgctttcgggcatgaggaggaagtcatctctaatcccctcagtccccgggtgatccaaaacatcatctattataaatgtaacacccacgatgagagagaagccgtgatccagcaggaattggtaatccatatcggctggatcatatccaataacccggagctgttttccggtatgcttaagatccggattggatggatcatccatgcaatggaatacgaacttcagattagagggggcgataaaccagcgttagatctataccagttatctccaagcgaagtgaagcagctgctgttagacatcctgcagccgcagcagaatggccggtgctggttgaaccgcagacagattgacgggtctctcaaccgtacccctaccggtttttatgaccgagtctggcagattctggagcggacccctaatgggattatcgtcgctggtaaacaccttccacagcagcctaccctgagcgacatgactatgtacgaaatgaacttttccctgctcgtcgaggacaccctgggcaatatcgatcagcctcaatatagacagattgtggtcgagctccttatggtggtctcaatagtgctggaacggaatcccgaattagagtttcaagataaagtggatctggacaggctcgtaaaggaggcttttaacgagtttcagaaagaccagagccggctaaaagagattgagaaacaggacgacatgacctctttttacaatacaccacccctggggaagagaggtacatgttcatacctcaccaaggcagtcatgaacctcttgctcgagggtgaagtgaagccaaataacgatgatccctgcctgatatca

SEQ ID NO: 18175 - DNA, 3279 bp, synthetic construct
  misc_feature 1..3279: note = source = /note="Description of Artificial Sequence: Synthetic coding sequence"
  source 1..3279: mol_type = other DNA
atggcaggggctgcagggctaaccgcagaggtgtcctggaaggtcttggaacggcgcgcgaggaccaaaagatctggaagcgtttatgagcccctcaaatccattaatttgccccgtccagataacgaaacgctgtgggacaagctagaccactattaccggattgtgaaatccacgttgctgttgtaccaatccccgacaaccgggctattccctactaaaacctgcgggggagatcaaaaggctaagattcaggactccctgtactgtgccgcaggagcgtgggctttagcccttgcctacaggcgcatagatgacgataaggggagaacccacgagctcgaacactctgccatcaagtgtatgcggggcattctctattgttacatgcgtcaagctgataaggtgcagcagttcaagcaggaccccaggcccacaacctgcctccactctgtttttaatgtgcatacgggagatgaactgttgagctatgaggaatacggtcatctgcagatcaacgctgtttcactttaccttttatacctcgtcgaaatgatatcctctggattgcagatcatctacaatactgatgaggtcagctttatccagaatctggtgttctgtgtcgagcgagtatacagagtcccagatttcggagtgtgggagcgaggttcaaagtacaacaatggatccacagagctccactcttcctctgtaggccttgccaaagccgccctggaggccattaacggattcaacctatttggaaaccagggatgtagttggtcggtgattttcgtggacctggatgcacataaccgcaacagacagacactgtgttccctcctcccaagggaatctcggtctcacaataccgatgcagccctattaccctgcatcagttaccccgctttcgcactggacgacgaggtgctgttttctcagacgctcgacaaggtggtaaggaaactcaaaggcaagtatggattcaagcgtttcttgcgggacggctaccgaacatctcttgaggacccaaatcggtgctactataagccagccgagatcaaactgttcgacggcatcgaatgcgagttcccaatattctttctctacatgatgatcgacggagtattcagggggaaccccaagcaggttcaggagtaccaggacttgctgaccccagtgcttcaccacaccactgagggctaccccgttgtgccgaagtactactacgtccctgccgatttcgtcgagtacgagaagaataatccaggcagtcagaaacggttcccgtctaactgcggccgggacggaaaactgtttctctggggccaagctctctacatcatagcgaagctgctggcggacgaactgatctctccgaaggacatcgatcctgttcagcggtacgtgccattgaaagaccagcgcaatgttagtatgcggtttagtaatcagggcccactagagaatgaccttgtggtacacgtggctctaatcgccgaaagtcagaggctgcaagtgtttttgaacacatatggcatccaaacccaaacgccgcagcaggtggagccaatacagatttggcctcagcaggagctggtgaaggcatatttgcaactaggaattaacgaaaaacttggtctctctggaagacctgaccggccaatcgggtgcctcgggacgtctaaaatctataggatcctagggaaaactgttgtgtgctaccccatcatattcgatctgtctgacttctatatgtctcaggacgtttttcttttgatcgacgatatcaaaaatgctctgcagttcattaaacagtattggaagatgcacggcaggccactgttcctcgtacttatcagggaggataatattcgggggagtcgtttcaatcccattcttgacatgttagcagcattgaaaaaaggtattataggaggagtgaaagtgcatgtcgatcggttgcagacactcatatctggcgcggttgtagaacagcttgactttttaagaatcagcgacacggaggaattacccgaatttaagtctttcgaggagctggagccccccaagcacagcaaggtgaagaggcaaagttctaccccatcagcccccgagctgggccagcagcctgacgtgaacatcagcgagtggaaggataagcccacccatgagattctccagaagctgaatgactgttcctgcctggccagccaggccattttgctgggtattctgctgaagcgggaaggtcccaacttcatcaccaaagagggtacggtgagtgaccatattgagagggtatatcgccgcgcaggcagtcagaaactgtggctggccgttcggtatggcgccgccttcactcaaaagttctcctccagcatcgctcctcatattactacctttctggtgcacggaaagcaggtgaccctcggggccttcggacacgaggaagaagtgatctctaacccacttagtccaagggttatccagaatattatctattacaagtgtaatacccacgacgagagggaggccgtgattcagcaagagcttgtcatacatatcggttggatcatcagcaacaatcccgagcttttttccgggatgctgaagatcagaattggctggatcatacatgccatggagtatgagctccagattagaggtggcgataagccagctctcgatctctaccagcttagtccgtccgaggttaaacaactgcttctcgatatactacagccccagcaaaatggacggtgctggctaaataggagacaaattgatggatcacttaatagaaccccgactgggttctatgatcgggtgtggcagattctcgaaagaacacccaatgggattatcgtggccgggaagcatctcccacaacagcccacattgagtgacatgacgatgtacgaaatgaatttcagcctactggtagaggatacactggggaatatcgatcagccgcagtacaggcagatagtggtggaactactcatggtggtgtcaatcgtgctggaacggaaccccgaactcgagttccaggacaaagtggacctggaccgcttggtgaaggaagcattcaacgaatttcagaaggaccagtcccggctcaaggagatcgagaagcaggacgatatgacgtcgttttataatacccccccacttggaaagcgaggaacctgctcctatctgaccaaagcagtgatgaacttactactcgaaggcgaagtaaagcccaataacgatgacccctgtctcatttca

SEQ ID NO: 18176 - DNA, 3279 bp, synthetic construct
  misc_feature 1..3279: note = source = /note="Description of Artificial Sequence: Synthetic coding sequence"
  source 1..3279: mol_type = other DNA
atggcaggagctgctggcctcactgccgaggtctcctggaaggtcctggagcgtcgtgccagaactaagagatctggcagtgtttacgaaccccttaaaagcataaacctccccaggcctgacaacgagactttgtgggacaagctggaccactattacaggatcgttaaaagtactctgctgctgtaccagtcccctacaactggtctgtttccaaccaaaacatgcggcggcgaccaaaaggctaaaatccaagacagtttgtactgcgctgctggtgcatgggctttggccctggcataccgtaggattgatgacgacaagggccgcacccacgagctggaacactccgctatcaaatgcatgaggggtatcctgtactgttacatgagacaggctgataaggttcagcaattcaagcaggatccccgtccaacaacatgtttgcattcagtgtttaacgttcataccggcgacgaactcctgagctacgaagagtacggacaccttcaaataaacgctgtgtctttgtatctcctgtacctggtggaaatgatctcttctggcctgcagattatttataataccgacgaggttagctttatacagaacctcgtcttttgtgtggaaagagtgtacagggtgccagacttcggcgtttgggaaaggggcagcaaatataataacggttcaacagaactgcacagcagctctgtcggattggccaaggctgctctcgaagctatcaacggcttcaatttgtttggcaaccaaggttgctcctggagcgttatattcgtcgacctggacgcccacaaccgtaacaggcagaccctgtgttccctcctgcccagagagagccgtagccataacaccgacgctgccttgctgccttgcatctcatatccagccttcgcactggacgacgaggttctcttttcacagaccctcgacaaggtcgtgcgtaagctcaaaggaaagtacggtttcaaacgtttcttgcgcgacggttaccgcacctccctggaagaccctaaccgttgctattacaaacccgcagaaatcaagctgtttgatggcattgaatgcgaattcccaatcttcttcctgtatatgatgattgacggcgtctttagaggaaaccccaagcaggtgcaagaataccaggatctgcttacacctgtgctgcaccatactaccgagggatacccagtagtacctaaatattactatgtgccagctgacttcgtcgagtacgagaagaataatccaggctctcaaaaaaggtttccaagcaactgcggcagggacggcaaactcttcttgtggggacaggctctctatatcatcgccaaactcctggccgatgaacttatttccccaaaagacatcgaccctgtacagaggtatgtcccactgaaagaccaacgcaacgtgtccatgcgtttctcaaaccaaggtccacttgaaaacgatctggtcgtccacgttgcccttattgctgaatcccaacgtctgcaagtgttcctgaacacatatggaatccaaacccagactccccagcaggtggaacccatccaaatctggcctcagcaggaactcgttaaggcatatctgcagctgggaatcaatgagaaactgggtctctctggcagaccagatcgtccaatcggttgtctgggaacctctaagatctatcgtatactcggaaagaccgtggtgtgctaccctattatattcgacctgagcgacttctatatgtcccaggacgtcttcctgctcattgatgatatcaagaatgccctccagttcattaagcagtactggaagatgcacggccgtcccctcttcctcgtactcatccgtgaagataacataaggggttccaggttcaatcccatacttgatatgctggcagccttgaagaaaggaatcatcggcggcgtgaaagtgcatgtggaccgcttgcaaactttgatatctggtgccgtcgtagaacagctggacttcctgcgcatctcagacaccgaggagctgccagaattcaagtccttcgaagaactggaacctcccaagcacagcaaagtgaagcgtcagtcctccacaccctcagcccccgaattgggtcagcagcccgatgtgaatatcagtgagtggaaggacaaaccaactcatgagattcttcagaaactgaacgactgtagctgcctggcaagtcaagcaatcctgcttggtatcttgctgaaacgtgagggacctaattttatcaccaaagagggaaccgtctcagaccacatcgagcgtgtgtaccgtcgtgccggctcccagaagctgtggctcgcagtgcgctacggcgcagctttcacccagaagttctcctcctctatcgcaccacacatcaccacctttttggtgcacggtaagcaagtgacactcggtgcttttggtcacgaggaagaagtgatctcaaaccctttgtctcccagggttatccagaacattatctactacaaatgcaacactcacgatgagcgtgaggccgtcatccaacaagagctggttatccacatcggatggatcatttctaataaccctgaactcttctctggaatgctgaagataagaatcggctggatcatacatgctatggagtacgagttgcaaattagaggaggcgacaaacccgcactcgacttgtatcaactgagccccagtgaggtaaaacagctgctcctcgacatcctgcaacctcagcagaacggcaggtgctggcttaacagaagacagatcgacggatccctgaaccgtactcctacaggattttacgatcgcgtctggcaaatcttggaacgtacccctaatggcatcatcgtggctggtaagcacctgcctcagcagccaaccttgtctgacatgaccatgtacgaaatgaacttttctctcctggtggaggataccttgggtaacatcgatcagcctcagtataggcagatcgtagtggagctgttgatggtcgtgtctatagttctggagagaaatcccgaactcgaattccaggacaaggttgatctcgatcgcctcgttaaggaagccttcaacgagttccaaaaggatcagtcccgtttgaaggaaatcgagaagcaggatgacatgacatccttctacaacaccccacctctgggcaagagaggcacatgctcctacctgaccaaggccgttatgaacctccttctggagggtgaggtgaagcctaacaacgatgacccttgtctgatcagt

SEQ ID NO: 18177 - DNA, 3279 bp, synthetic construct
  misc_feature 1..3279: note = source = /note="Description of Artificial Sequence: Synthetic coding sequence"
  source 1..3279: mol_type = other DNA
atggccggagctgctggactcactgcggaggtcagttggaaggttctggaaagaagggccaggactaagagatccggatccgtttacgaaccactgaagtccatcaatctcccacgccccgacaatgaaacattgtgggacaagcttgaccactactacaggatcgtgaagtcaacactgctgctgtaccagagccctaccaccggccttttcccaactaaaacatgcggaggcgaccagaaagcgaaaattcaagacagtctctactgcgctgctggtgcctgggcactcgcgcttgcatataggagaattgatgacgacaagggcaggacgcacgaactggaacactccgcaataaagtgcatgaggggaattctgtactgttacatgcgccaagcggacaaggttcagcagttcaaacaggacccaaggcccacaacctgtcttcactcagtcttcaacgtgcacaccggagatgagcttctttcctacgaggagtacggccacctgcagataaatgccgtgtctctctacctcctgtatctggtggaaatgataagctcaggtctgcagatcatatataacacagatgaggtatccttcatccagaatctcgtattttgcgttgagagggtgtaccgcgtaccagatttcggtgtctgggaaagaggtagcaagtataataatggatcaactgagttgcactcatcttctgtcggtctcgctaaggctgcgcttgaggcgattaacggcttcaacctcttcggtaaccagggatgctcctggtctgtgattttcgtggacttggacgcccacaacagaaataggcagacgctgtgttccttgctcccgcgcgagtccagaagtcataatactgatgcagccttgctgccatgtatctcataccctgcctttgctcttgatgacgaagtgctgttctcccagactttggataaggtagtgagaaagttgaaaggcaaatacggtttcaagaggttcttgagagacggctatagaaccagtctcgaggacccaaatcgctgctactataagcctgcagaaatcaagttgttcgacggcatcgagtgtgagtttcctatcttcttcctttacatgatgatcgacggcgtctttagaggcaacccgaaacaagtgcaggaatatcaggatctgttgaccccagtgttgcaccacacaaccgagggatacccggttgtgcccaaatattattacgtaccagctgatttcgtggagtatgaaaaaaacaaccctggtagtcaaaaaagattcccttcaaactgcggaagggacggcaagctttttctctggggccaagcgctttacattatcgccaagctgctggccgacgaactcatctctcccaaggacatagaccctgttcagcgctacgttccactgaaggatcagagaaacgtgagcatgagattctcaaaccagggtccacttgagaacgacttggtggtgcacgtggccctgatagccgagtctcagcgcctccaagtcttcctgaatacgtacggcatccaaacccaaaccccccaacaggtagaaccaatccagatctggccgcagcaagaactggttaaggcatacctgcagcttggtataaatgaaaagctgggcctgagcggtaggccggacagaccaataggatgtttgggtacgagcaagatatatagaattttgggaaaaacagtcgtatgttaccccatcatcttcgacttgtcagacttctacatgtctcaagacgtgtttttgttgatcgatgacataaagaacgcgctgcaatttatcaagcagtactggaagatgcacggtaggcctcttttcctcgtgcttatcagggaagataacattaggggctcccgcttcaatcccattctggatatgcttgccgcactgaagaagggcatcatcggcggcgtgaaagtgcacgttgatagactgcagacactgattagtggagctgttgtggagcagctcgacttcttgagaattagcgacacagaggagcttcccgagttcaagtcatttgaggaactcgaaccgccgaaacattctaaagttaaaagacaatcctctactccgagcgcgcccgaactgggtcagcagccggacgtgaacatatctgagtggaaggataagcctactcacgaaatcttgcagaaactcaatgactgcagttgccttgcgtcccaggctatcctcctcggcatcctcctcaaaagggaaggtcctaacttcatcactaaagagggtaccgtgtctgaccatattgaaagggtgtatagaagggccggtagtcaaaagttgtggctggctgtcaggtacggcgcagctttcacccagaaatttagctcatccattgctccgcacatcacgactttcctcgtgcacggcaaacaagttaccctgggagctttcggtcacgaggaggaagtcatcagtaatccactgtcaccccgcgtcatacagaacattatttactacaaatgcaacacacacgacgaaagagaggcagttatccagcaggagcttgtcatccacataggttggatcatctccaataacccagaactgttcagtggtatgctgaagatcaggattggctggattatccacgctatggaatacgaactgcaaattcgcggaggagacaagcctgctcttgacctctatcagttgtccccttcagaagttaagcagctcctccttgatatcctgcagccacagcagaacggtaggtgctggctgaaccgcagacaaatcgacggatcactgaacagaacacccacaggattctatgacagggtctggcaaattcttgagcgcacacccaatggtattatcgtcgcgggtaagcacctcccgcagcaacccacccttagcgatatgacaatgtacgagatgaacttcagtctcctggttgaggatacactgggaaacatagatcaaccgcagtataggcaaatcgtggtcgaacttttgatggtcgtgtcaatcgtgctggaaagaaacccggagctcgaatttcaggacaaggtagatctggataggttggtcaaggaggccttcaatgaatttcaaaaagaccagtctaggctcaaagagattgagaagcaagacgacatgacttcattctataataccccaccgcttggaaagcgcggtacctgctcatacctgaccaaggcggtgatgaacttgctgctcgaaggcgaggtcaagcctaacaacgacgatccttgtctgatcagt

SEQ ID NO: 18178 - DNA, 3279 bp, synthetic construct
  misc_feature 1..3279: note = source = /note="Description of Artificial Sequence: Synthetic coding sequence"
  source 1..3279: mol_type = other DNA
atggcgggcgcagctggcttgacagctgaggtgagctggaaggtactggagcgccgggcacgcacaaagcgatctgggagtgtgtatgagccattgaaaagtatcaacctgccgaggcccgacaatgaaactctctgggacaagctcgatcattattatagaattgtaaaatccactcttctgctctaccaaagccctacgacaggactctttcccaccaagacctgcggcggcgaccaaaaggctaaaatacaggattccctctactgcgctgctggtgcttgggcgctggctctcgcatatcgccgcattgacgacgacaaaggaagaacgcacgagcttgagcacagcgcgatcaagtgtatgcggggcatcttgtattgttacatgcgccaggccgacaaggtgcagcagtttaaacaggaccctagacccacaacctgccttcattccgtgttcaacgttcacaccggtgatgaattgctgagctacgaagaatacgggcacctgcagataaacgccgtgtccctctatctgctctatcttgttgagatgatctcctcagggctccaaataatatataataccgatgaggtttcctttattcagaatctcgtcttttgtgtggaacgggtttaccgagtgcctgactttggcgtgtgggaacgaggcagtaagtacaataacggttccaccgaactgcacagtagctctgtaggtctggccaaggccgccctggaggccattaacgggtttaatctgttcgggaaccagggttgctcctggagcgtgattttcgtggatctggacgctcacaatagaaaccgccaaaccctgtgttccttgctcccccgcgaaagtaggtcacacaacacagatgccgcccttttgccatgcataagttacccagcattcgcactggatgatgaggtactttttagtcagactctcgataaggtggtccgcaaactgaagggcaaatacggctttaaaagattcctgcgggatggttatcgaacttctctggaggatccaaacaggtgctactataaaccagctgagataaagctgttcgacgggatcgagtgcgagttcccgattttctttctgtacatgatgatcgatggtgtgttccggggaaaccccaaacaggtccaggagtatcaggacttgctcactccagtgctgcaccacactactgagggataccctgtagtcccgaaatactactacgtcccggccgactttgttgagtacgaaaagaacaaccccggtagccagaagcgctttcctagcaactgtggcagagacggaaaactcttcttgtggggacaggctttgtatatcattgccaagctgctcgctgacgaacttatctcaccgaaggacatcgatcccgtgcagcggtatgtgccgctgaaggaccagagaaacgtgagcatgagattcagtaatcagggacctctcgagaacgacctcgtggttcatgttgctctgatagccgagtcccagcggctgcaagtcttcctcaacacatatgggatacagacccagaccccgcagcaggtagagccaatccagatttggcctcagcaggaattggtgaaagcttacctgcagcttggcatcaacgaaaagctcggcctgagcggtaggcccgatcggcccattggctgtctgggcacttccaaaatctatcgaatcctcgggaagacagttgtgtgttacccgattatttttgacctttccgacttctatatgtcacaagacgtcttcctgttgattgatgacattaagaacgcgcttcaattcatcaagcagtattggaagatgcatgggaggcccttgtttctcgtgctgattcgcgaggacaacattcggggcagcaggttcaatccaatcctggacatgctggccgcattgaagaaggggatcatcggcggagttaaggtacacgtggaccggttgcagactctcatctcaggagcagtagtcgagcagttggacttcttgaggattagtgacacagaagagcttcccgaattcaagtccttcgaggaattggagccccccaagcattctaaggtcaaacgccagtcaagcacgcccagtgctcccgagcttggacagcagcctgatgttaatatcagtgaatggaaggacaagcctactcacgagatcctgcagaaactgaatgactgctcttgcctcgcaagtcaggccattctgctcggcattctgcttaagagagagggacctaactttattacaaaggaaggaacagttagcgatcacatcgagcgagtgtaccggagggcaggttcccagaagctgtggcttgccgtgaggtacggagccgcctttacacagaagttctccagcagcatcgcgcctcacatcaccaccttcctggtgcatggcaagcaggtgactctgggtgcgtttggtcatgaggaagaggttatctctaatcctctcagtccccgagttatccagaacatcatttattataagtgtaacacacacgacgagcgagaagctgtgattcagcaagaattggtcattcacatcggctggattatcagcaataacccagaactcttcagcgggatgctgaagattagaatcggttggattatccatgctatggagtatgagttgcagatcaggggtggggacaaacctgcactggacctgtatcaattgtcccccagtgaagtgaaacagctgctcctggatatcctgcaaccccaacagaatggaagatgttggctgaataggcggcaaatcgacggttccctgaacagaacccccaccgggttctatgatagggtctggcagatcctggaacgcacaccaaatgggatcattgtggcgggcaagcatctgccccaacagcctactctgtctgacatgacaatgtacgaaatgaatttctcactgctggttgaggacactttgggcaatattgaccagccccagtaccgacaaatagtggttgagctgcttatggtggtaagcatcgtgctggaaaggaaccccgagttggaattccaggataaggtggatctggataggcttgttaaggaggcgttcaatgagttccagaaggaccagagcagactgaaagaaatcgaaaaacaagacgatatgactagcttttacaacacgccccctctcggcaagcgcggtacctgtagctaccttacaaaagctgtgatgaacctccttcttgaaggagaggtgaagcctaacaacgacgatccgtgcttgatatca

SEQ ID NO: 18179 - DNA, 3279 bp, synthetic construct
  misc_feature 1..3279: note = source = /note="Description of Artificial Sequence: Synthetic coding sequence"
  source 1..3279: mol_type = other DNA
atggccggtgctgcagggctcaccgccgaggtgtcgtggaaggtcctggaacgccgcgctcgtaccaagaggtctggaagcgtgtacgagcctctgaaatccatcaaccttccacggcctgacaacgaaactctgtgggacaaactcgatcactactacagaattgtgaagagcacccttctgctgtaccagagccctaccacaggtttgtttcctacaaagacctgcggaggtgatcagaaagccaagattcaagactcactctactgcgctgcaggagcttgggccctggccctggcgtaccgccgcattgacgacgacaagggccgtacccacgagctcgagcattcggcaataaagtgtatgaggggaattttgtattgttacatgcgccaagcagataaggttcagcagttcaaacaggaccctaggccaacaacctgcctgcacagcgtgtttaacgtgcataccggagatgagcttctcagttatgaagaatacggacatctccaaatcaatgccgtctcgctctatctgctgtatttggtcgaaatgatctcaagtggtttgcagatcatctacaacacggatgaagtgagcttcatccaaaatcttgtgttctgtgtggaacgggtatacagagttccggattttggcgtgtgggaacgcggatctaagtataataacggtagcaccgaacttcattcctcaagcgtcggattggcaaaggctgctttggaagcaatcaatggctttaatctttttggtaaccagggatgtagctggagtgtaatcttcgtcgatctggacgctcataaccggaacagacagaccctctgctccctgctgccccgggagtcccgtagtcacaacaccgacgctgcattgctgccctgcatctcataccccgctttcgccctggacgacgaggttctgttttcacagaccctggataaagttgtcagaaagctcaagggtaaatatggatttaagagatttctgcgggatggatataggaccagccttgaagaccccaaccggtgttactacaagccagctgaaatcaaactttttgatggaattgaatgtgagttccccatcttctttctgtacatgatgatcgatggcgtcttcagaggcaaccctaaacaggtgcaagaataccaagatttgctgacccccgtgcttcatcatacaaccgagggctaccctgttgtgcctaagtactactacgtacccgcagattttgtggaatacgagaagaacaatcccggttctcagaaaagatttccctctaactgcggtagggacgggaaactgttcttgtggggtcaggcgctgtacatcatagccaaacttctggctgacgagcttatctcccctaaggacatcgaccccgtgcagcgctacgtgcctctgaaagatcaacggaacgtgtcaatgaggtttagcaaccagggccccctggagaatgacctggtcgtccacgtagcattgattgcagaatcccaaaggctccaggtgttccttaacacctacggaatccagacacagacaccgcaacaggtggagcctatacagatctggccccagcaggagctggtcaaagcttacctgcaacttggaatcaacgaaaaactgggtctgagtggcaggcccgacaggcccatcgggtgcctggggacttccaaaatttatcggatcctgggcaaaacagttgtctgttatccaatcatctttgacctgagcgatttttacatgtcccaagacgtattcctgctaatagacgatatcaaaaacgcccttcagtttattaaacagtattggaagatgcatggaaggccacttttcctggtcttgattcgggaagataacattagggggtcgaggtttaacccgatcctggatatgctcgctgccttaaagaagggaatcattggcggagtgaaagtccacgtggataggcttcagactctgatcagcggagcagttgtcgaacagttagactttcttcgcatctccgataccgaggaattgccagaattcaaaagctttgaagagctggaaccccccaaacacagcaaggtgaaaagacagtcaagtacaccaagcgcacccgagctgggccagcagcctgatgtcaatatctctgaatggaaggataaacctacacacgagatcttgcagaagcttaacgactgctcatgccttgcttcccaggccatccttttgggcatccttctgaagcgcgagggacccaacttcataaccaaggaggggaccgtttccgaccacattgaacgtgtctacaggagggccgggtcccagaagctgtggttggcggtccgctatggagccgcattcacccagaaattcagcagtagcatcgcccctcatattaccacctttctcgtgcatggaaaacaagtcactctgggagctttcggacacgaggaggaggtgatctcaaaccccctgagcccgagggtgatacagaatatcatttactacaaatgcaacacccacgacgagcgcgaggccgtgatccaacaggaacttgtcattcacatcggctggattatcagcaacaatccagaactctttagcgggatgttgaagatcagaatcggttggatcatccatgcaatggagtacgaacttcaaatcaggggtggcgataagccagcattggacctctaccagctgtccccttccgaggtcaagcagctgctgctcgatatccttcaaccacaacagaacggaagatgctggttgaaccgccgccaaattgatggaagcctgaacagaaccccaactggattttatgaccgcgtttggcagatccttgagagaactcccaacggcataatcgtggcaggaaagcatctgccacagcaaccaactctgtccgacatgaccatgtacgaaatgaatttttctcttctggtcgaggacactctcggcaacatcgaccaaccacagtatagacaaatcgtcgtggaactgctgatggttgtgagcatagtacttgagcgcaacccggaattagagttccaggacaaggtggacctcgatagactggttaaggaagcttttaacgagttccagaaggatcagtctcgtttgaaggaaatcgagaagcaggacgatatgacaagcttctataacacgcccccactcggcaagcgcggaacatgttcttaccttacgaaagcagtgatgaatctgctcctcgaaggtgaggtgaagccgaacaacgatgacccatgccttatcagc

SEQ ID NO: 18180 - DNA, 3279 bp, synthetic construct
  misc_feature 1..3279: note = source = /note="Description of Artificial Sequence: Synthetic coding sequence"
  source 1..3279: mol_type = other DNA
atggcaggcgcagcagggctcaccgcagaagtctcatggaaagtgctggagcgccgcgcaagaaccaagagatcaggatcagtgtatgaaccactgaagtccataaatctgccaagaccagacaacgaaaccctgtgggataaacttgatcattactaccggattgtcaagtccactcttcttctttaccagtcgcctaccaccggactttttccaacgaaaacctgtggaggtgaccaaaaagcgaaaatacaggatagcttgtactgcgcagcaggggcatgggcgcttgcattggcatacagaagaattgatgatgacaaggggcggacccatgaactcgaacactcggcgatcaagtgtatgagaggaattttgtactgttatatgaggcaggcagataaagtccagcagtttaagcaagatcctagacccaccacttgtctccactcagtgtttaacgtgcataccggagatgagcttctctcctacgaagaatacggacatcttcagattaacgccgtgagcctgtacctcctgtacctggtggaaatgatctcctctggcttgcagattatctacaacactgatgaagtgtcgttcattcagaacctggtgttttgtgtcgagcgggtgtatagggtgcctgacttcggcgtgtgggagagaggctccaagtacaataatgggtccacggaacttcattcgtcgtccgtcggactggcgaaggccgcactcgaagcaattaacggcttcaacctctttggtaaccaggggtgctcatggagcgtcatcttcgtagatctcgatgcacataatcggaacaggcagactctctgcagccttcttccacgcgaatcgcgatcacataacaccgatgcagcacttctcccatgtatctcctacccagcatttgcgctggacgacgaagtgctgttttcccaaacccttgacaaggtggttagaaaacttaaaggaaagtacggatttaagagattcctgcgggacgggtacagaacctcgcttgaggaccctaatcgctgttactacaaacctgcggaaatcaaacttttcgatggaatcgaatgtgaatttcctatcttttttctgtacatgatgatcgatggagtctttcgtggcaaccctaagcaggtgcaggaataccaggacctgctgactccggtgcttcatcatactacggagggctacccagtcgtgcccaagtactactacgtcccggcagattttgtggagtacgagaagaataatccaggcagccagaagcggttcccgtcgaactgcgggcgggatggcaagctgttcctgtgggggcaagcattgtacatcatagctaaacttcttgccgacgagctcatttcacctaaagatattgacccggtccagcgatacgtcccacttaaggatcaaaggaatgtgtcaatgcgattttccaaccagggtccacttgaaaacgatctggtggtgcacgtggcgcttattgcagagtcgcagcgcttgcaagtctttctcaacacctacggtattcagacccaaactccgcaacaggtggagcccattcagatctggcctcaacaggagctcgtgaaagcctaccttcaactgggaattaacgaaaaacttggactgtccggacgccctgatagacctatcggatgccttggaacctccaagatttaccgtattctcggtaaaactgtggtgtgttaccccatcatcttcgatctgtcagatttctacatgtcacaagacgtctttctccttatcgatgacatcaaaaatgcacttcaattcataaagcagtactggaagatgcatgggcggcctctgtttctcgtgctcatcagggaagataacattcgtggatcgcgcttcaatccgattcttgatatgcttgcagccctcaagaagggaatcattgggggtgtgaaggtccacgtggatagactgcagacccttatttcaggcgccgtcgtggaacagctggattttctgcgaatttctgacactgaggaattgccagaattcaagagctttgaagagctcgaaccaccgaagcattccaaggtgaagaggcaatcttcaactccttccgcgccagagctgggccaacagcctgatgtcaacatctcggagtggaaggataagccaactcacgaaattctgcaaaagttgaacgattgttcgtgtctcgcctcgcaagcaattcttctgggaattctcctgaagagagagggtccaaatttcatcactaaggagggtaccgtgagtgatcatatagaacgtgtgtaccgccgtgcaggaagccaaaagctctggctggctgtccggtacggagcagcttttactcaaaagttttcatcgtccattgcgccgcacattaccacctttctggtccacggtaagcaggtcaccctgggcgctttcggtcatgaagaagaggtgatatcgaatcctctctcgccacgtgtgatccaaaacataatctactacaaatgtaacacccatgatgagcgggaagccgtgatccagcaagaacttgtcattcatattggctggattatctccaacaatcctgaactgttctcagggatgctgaagatacggatcggatggatcatccatgccatggagtacgaactgcaaattaggggtggagataagccagcgctggatctttaccaactgtcaccctccgaggtgaagcaactcctgctcgacatcctgcaaccacagcaaaacggtagatgctggctgaaccgtagacagatagacggatcgcttaacagaacccccaccggcttctacgatcgagtctggcagatactggaacggaccccaaatggaattatcgtggctggtaaacatcttccacagcaaccaaccctgtccgatatgaccatgtacgaaatgaacttttcgctcctcgttgaggatacccttggaaacatcgaccagccacaatacagacaaatagtggttgaactgctgatggtggtcagtatcgtgctggaaagaaaccctgaacttgaatttcaagataaggtggacttggatcgtcttgtgaaggaggcatttaacgaatttcaaaaggaccaatctcgcctgaaggagatagaaaagcaggatgatatgacctcgttttacaacaccccgccccttggtaagcgaggaacctgcagctaccttactaaggctgtcatgaaccttcttctggagggtgaagttaagccgaataatgacgacccttgtctgatttct

SEQ ID NO: 18181 - DNA, 3279 bp, synthetic construct
  misc_feature 1..3279: note = source = /note="Description of Artificial Sequence: Synthetic coding sequence"
  source 1..3279: mol_type = other DNA
atggcgggcgcggccggcctcaccgcggaagtcagctggaaagtgctcgaacgccgcgcaagaaccaaaaggtcgggcagcgtgtacgagccactcaaatcaatcaacctgccacggccggataatgagacgctgtgggataaactcgaccactactaccgcattgtgaagtccacgctgctgctctaccaatcccctactactggacttttcccgaccaaaacttgcggaggagatcagaaggctaagatccaggatagcctctactgtgccgccggagcctgggccctggcgctggcctaccgcagaatcgatgacgacaaagggagaacccatgaactcgaacatagcgcgatcaagtgcatgcgcgggatcctgtactgctacatgcgccaagctgataaggtgcaacagttcaagcaagatcctcgcccaactacttgcctccattcggtgtttaacgttcacacgggcgacgaactcctgagctacgaagagtacggacacctccaaatcaatgccgtgtccctctacctgctgtacttggtggagatgatctcgtccggactgcagatcatctacaacacggatgaagtttccttcatccagaacctcgtgttctgcgtggagagagtgtaccgggtccctgatttcggcgtgtgggagcgcggatcgaaatacaataatggtagcactgagctccattcctcaagcgtggggctggctaaagctgcgctggaggccatcaatggattcaacttgttcggaaatcagggctgctcgtggtcagtcatcttcgtggacttggatgcccataaccggaatcgccaaaccctgtgctccctgctgccacgggaatcacggtcacacaatactgatgctgcgctcctgccgtgcatctcctacccggcgtttgcactcgacgacgaggtgctgttctcccaaactttggataaagtggtgagaaagctgaagggaaagtacgggttcaaacggtttcttcgggacggttacagaacctcattggaggaccccaaccgctgctattacaagcctgccgaaatcaagctgtttgatggcattgaatgcgaattcccgatcttcttcctgtacatgatgatcgatggggtgttccggggcaaccccaaacaggtgcaggaataccaggacctcctcacccctgtcctgcaccacactaccgaaggttaccctgtcgtgccgaagtactactacgtgcccgccgatttcgttgaatatgaaaagaataacccggggtcacagaagcgctttccctcgaactgcgggcgggatggaaaacttttcttgtggggccaagccctttacatcatcgccaaactgcttgccgacgagctgatctcccccaaggacatcgaccctgtccagcgctacgtgcctctcaaggaccaacgcaacgtctcgatgcggttctcgaaccaaggcccgctcgagaatgacctggtggttcacgtggcgttgatcgctgagtcgcagcggctgcaagtgttcctcaatacctatggtatccagacccagactccacagcaggtggaaccaatccagatctggcctcagcaagaactggtgaaggcgtacctgcagctgggcataaacgagaaactcggcctgtccggacgcccggacaggccaattggatgtctcggaacttccaagatttaccggattctgggaaagactgtcgtgtgctaccccatcatctttgacctctccgatttctacatgtcgcaggatgtttttcttcttatagacgatatcaagaacgcccttcagtttatcaagcagtactggaaaatgcacggaaggccgctctttttggtcctcattcgcgaagataacattagaggctcaaggttcaatcctatcctggacatgttggccgccctcaaaaaaggaattatcggaggtgttaaagtgcacgtggataggttgcaaactctcatctctggtgcagtcgtggaacaattggatttcctccgcatctcagatactgaggagctcccggagtttaagtcatttgaggaactcgagccaccgaaacattcaaaggtcaagaggcagtcatcgacgccttccgctccggaactcggacaacagccggatgtcaacatcagcgaatggaaggacaagcccactcatgagatccttcaaaaactcaacgactgcagctgtctggcgtcccaagccatcctcctcggaatcttgcttaaacgcgagggaccgaacttcatcacgaaggaagggaccgtgtctgaccatattgaacgagtctaccgccgcgcgggatcccagaaactgtggctcgctgtgcggtacggtgcagccttcactcagaaattcagcagctccatcgcgccgcatatcacgaccttcctggtccacggaaagcaggtcaccttgggggctttcggtcacgaagaagaagtgatctcgaacccactgagcccccgggttatccagaacattatctattacaagtgtaacacccacgacgaaagggaggcggtgatccaacaggagctggtcatccatattggatggattatctccaataacccggagctgttttctggaatgctgaagatcaggatcggctggatcatccatgcgatggaatacgaactgcagatccggggaggtgacaagccggccctggacctgtaccaactgtccccatcggaggtcaaacaacttctgctcgacatcctgcagccgcagcaaaacggccggtgctggctgaatcggcggcagatcgacggaagcctgaatcgcactccgaccggattctacgatcgggtgtggcagattctggagcggactccaaacggaatcatcgtggcgggcaagcatctgccacaacaaccaaccctgagcgacatgaccatgtatgagatgaatttctcgttgctcgtcgaagataccctgggcaatatagaccagccgcaataccggcaaatcgtggtggaactgctgatggtcgtctcgatcgtcctcgaaagaaatccagagttggagtttcaggacaaggtggatctcgatcggctggtcaaggaggccttcaacgaattccaaaaggatcagtcgagactgaaggagatcgagaagcaggatgacatgacctcgttctacaacactccaccgctggggaagcgcggaacttgcagctacctgacgaaggcggtcatgaacctcctccttgaaggggaggtcaagccaaacaacgacgatccgtgtctgatttcg

SEQ ID NO: 18182 - DNA, 3279 bp, synthetic construct
  misc_feature 1..3279: note = source = /note="Description of Artificial Sequence: Synthetic coding sequence"
  source 1..3279: mol_type = other DNA
atggctggagctgcgggtttgactgccgaggtctcgtggaaagtgctggagcgccgcgcccgcaccaagcgttcgggatctgtttacgagcctttaaagtcaattaacctgccgcgccccgacaatgaaacattgtgggataaattggatcattactaccgaattgtcaagtcgactcttttgctttaccaatcacctactacgggccttttcccgaccaagacctgtggcggggatcaaaaggccaaaattcaagattcactttattgtgccgccggagcctgggcactcgccctcgcctatagacgcatcgatgacgataagggccgcacgcacgagttggaacattcggctattaagtgcatgaggggtatcctctactgttacatgcgacaggcagataaggtgcagcaattcaaacaggacccgagacccacaacgtgcctgcactcggtctttaacgtacacaccggtgatgaacttctgagctacgaggaatatggacatctccaaattaatgcagtttcgttatatctcttgtaccttgttgaaatgatttcaagcggcttgcaaatcatctataatacagacgaagttagtttcatccagaacctggtcttttgtgttgagcgggtttatcgcgtgccagattttggagtttgggagcgcggatcaaagtacaataacggctccaccgagctccactcatcctcggtgggtctggctaaagcggcattggaagcgatcaatggatttaatctgttcggcaaccaagggtgctcctggagtgttattttcgtcgaccttgacgcacataaccgtaaccggcagacactttgcagcttgctgcccagagagagtcgttcacataacacagatgcggcgctgttgccttgtatcagctatccggccttcgctttggatgacgaagtcctattttcgcagacattggataaggtggttaggaaattgaaagggaaatatggctttaaacggtttctccgggacggttaccgtacgtctcttgaagacccgaaccgttgttactacaagcctgctgaaatcaaactgttcgatggcatcgagtgcgaatttcccatatttttcctctatatgatgattgatggagtgtttagaggtaaccccaagcaagtgcaagaataccaggacttacttaccccggtcctacatcatacaacggaggggtacccggttgtgcctaagtactactatgttcccgcggatttcgtcgagtatgaaaagaataacccggggtcccagaagagatttccttctaactgtggtcgtgatggtaagctattcctgtggggtcaggcactgtatattatagccaagctccttgctgatgagttgatttcgccaaaggacattgaccctgtacaacgttacgtcccattgaaggaccaacggaatgtgtctatgcgtttcagtaaccagggtccactcgaaaacgaccttgtggttcacgtcgcactcattgccgaatctcaacgtctgcaggtttttttgaacacatatggaatccaaacacaaacccctcagcaagtggagcccattcaaatctggcctcaacaggagctggtaaaggcttacctgcagcttgggatcaatgaaaagcttgggctctcaggtcgtcccgaccgtccaatcggttgcctgggtacaagcaagatttatcgaattctcgggaagacagtcgtctgttatccaattattttcgacctgtcagatttttacatgtcccaggacgtttttctgttgattgacgacatcaagaacgccttgcagttcataaagcaatattggaagatgcatgggagaccccttttcctcgtgttgatccgagaggataatatcagagggtcacgttttaacccgatcctcgacatgctcgcggccttgaaaaagggcatcatcggtggggtcaaggtacatgttgaccggttgcaaactctgatatcaggcgccgtcgtcgagcaacttgattttctacgcatttccgacacggaagaactcccagagttcaagtcgttcgaagaattggagccgcctaagcattctaaggtcaagcgtcaatccagtacaccgtcggctcctgagttggggcaacagccagatgtgaacatctccgagtggaaggataaacctacccacgaaatcctccagaagctaaatgattgctcgtgtctagcttcgcaagcgattctcctcggtatccttctcaagcgagagggtcctaatttcatcaccaaagagggcaccgtctccgatcatatcgaaagggtttatcgtcgggctggaagccaaaagctgtggttggctgttcgttacggagcagccttcacgcaaaaattctccagtagcatcgcgcctcacatcacaactttcctagtacatggaaagcaggtgacactcggcgctttcggccatgaagaagaggtcatctcaaatcctttgtctcctagggtaatccagaacatcatttactacaagtgcaacacacatgatgaacgcgaggcggtgatccaacaggagctcgtaatccatatcggatggatcatctctaacaatcctgaactgttcagtgggatgctcaagattcggatcggctggattatccatgccatggagtacgaacttcaaattcgcggcggggacaagcctgccttggatctttatcaattgagtccatcagaggtgaagcagctattgcttgatatcttgcaaccacagcaaaacggacgttgttggttgaatagacgtcaaatcgatggctccctgaaccgtacacccacgggtttttacgatcgcgtctggcaaatactagagcggacacctaacggcataatcgtggctggcaagcatttaccgcagcagcctaccctctccgatatgactatgtacgagatgaacttttctctcctcgtcgaggacactctggggaatatcgatcaaccacagtatcgacaaattgttgtggagcttcttatggtcgtttcaattgtgctcgagcggaacccggagctggaattccaagataaggttgacctagatcgacttgttaaggaagcgttcaacgaattccagaaggaccaatcgcgacttaaggaaattgagaaacaagatgatatgacgtccttctacaatacaccacccctcggtaaaagaggcacttgcagttatttaacgaaggcggtcatgaatctacttttggagggtgaggtgaaaccgaataacgatgatccatgtctgatctct

SEQ ID NO: 18183 - DNA, 3279 bp, synthetic construct
  misc_feature 1..3279: note = source = /note="Description of Artificial Sequence: Synthetic coding sequence"
  source 1..3279: mol_type = other DNA
atggcaggtgccgcaggtctgactgcagaagtcagctggaaggtgctggagagacgggcacggaccaaaagaagcggctcagtgtacgaaccccttaagagcattaacttgcctaggccagacaatgaaaccctgtgggacaaactcgatcattactaccgcattgtgaagtccacccttctgctttatcaatcacctaccaccgggttgtttccaaccaagacctgtggtggcgaccaaaaggccaaaattcaggattcgctgtactgtgcagccggggcatgggcccttgcccttgcttacagacggattgatgatgacaaagggcggactcatgaacttgagcattcagcgattaagtgtatgagaggtatcctgtactgctacatgagacaagcagataaagtccagcagtttaagcaggaccctcgaccaactacgtgcctgcactccgtctttaacgtgcataccggagatgaactgttgtcgtatgaagaatacggccatcttcaaatcaacgctgtgtcactctacctgctgtaccttgtggaaatgatcagctccggtctgcaaatcatttacaacaccgacgaagtctcattcattcagaaccttgtgttctgcgtcgagagggtctacagagtccctgatttcggcgtctgggagagggggtccaaatacaacaacggtagcaccgaactccattccagctctgtgggactggccaaggcagcgcttgaggcgattaatgggttcaacctgtttggtaatcagggatgttcttggtcggtgatttttgtggatctggatgcccataacaggaatagacaaactctctgtagcctccttccgcgcgagtcaaggtcccacaacaccgatgcggcactgttgccttgcatttcctaccctgcatttgcgttggacgacgaagtgctgttttctcagaccctcgataaggtggtccgaaaactgaaaggaaagtacggctttaagagattcctgagagatggataccgtacttcgctggaagatccaaatcgctgttactacaaacccgcagagataaaactctttgatggtatcgaatgcgagtttcctatctttttcttgtatatgatgatagatggggtgtttcgcggtaaccctaagcaggtccaagaataccaggatctcttgacgcctgtgttgcatcataccactgaggggtaccctgtcgtgcccaagtattactacgtaccggccgactttgtcgaatacgagaagaacaatccaggttctcaaaaaagattcccgtcgaattgcgggcgagatggcaaactctttctctggggacaggcactgtacattatcgcaaaacttctggcagacgagctgatctccccaaaagatattgatccagtgcaacgctacgtgccacttaaggaccaaaggaatgtctccatgcgctttagcaatcagggtccactggagaacgacctcgtggttcatgtggctcttattgcagaatcgcagcggctgcaggtgtttctcaacacgtacggaatacagactcagacgcctcaacaggtcgaacccattcagatttggccccaacaagagcttgtgaaggcatatctgcaactgggcataaatgaaaagctcggactgtcgggacgtcctgacaggcctatcggatgccttggtacttcgaagatttaccggattcttggaaagacggtcgtatgttaccccatcatctttgatttgagcgatttctacatgtcgcaagatgtgttcctcctgatcgacgacattaagaacgcactgcagttcattaaacaatactggaaaatgcacggtagacccctgtttctcgttttgatccgtgaggacaacattagagggtccagattcaacccgatcctcgatatgctcgcagcgttgaagaagggaataatcggaggggtgaaggtgcatgttgataggttgcagaccctgatctcaggtgccgtagtggaacaacttgattttcttcgtatttctgataccgaagaattgcctgagtttaagtcatttgaagagcttgagcctcctaaacactccaaggtgaagcggcaaagctcgactccatcagcacctgaactcgggcaacagccagacgtcaacatctcagaatggaaggataaaccgactcacgaaattctccaaaagctgaatgattgctcgtgtcttgcaagccaggcaatactgcttggtattcttctcaagcgggaaggacctaacttcatcaccaaagagggaaccgtttcagatcatatcgaacgtgtgtaccgaagggccggctcacaaaagttgtggctggccgtgcgctacggggccgcatttactcaaaagttcagcagctcgatcgcacctcacatcactaccttccttgtgcatggtaaacaggtcacccttggtgcatttggacacgaagaagaagtgatctcaaacccactttctcctcgggtgatacagaacattatctattacaagtgtaatacccacgatgaacgcgaagctgtgattcaacaagaactcgtgattcatatcggctggatcatttcgaataaccctgaactgttttcggggatgctcaagatccgaataggatggatcattcatgcaatggaatacgaacttcaaatacgtggaggagacaagcctgcgctggatctgtaccaactctcgccctcagaggtcaaacagcttcttttggatattctgcaaccccaacaaaacggaagatgttggctgaaccgccgtcagattgacggatcgctgaatcgtaccccaactggattttacgatcgtgtgtggcagatcctggagagaacccctaacggcattattgttgccggtaagcacttgccacagcagccaactctctctgacatgactatgtacgaaatgaacttctcgttgcttgtggaggataccctcggaaacatagaccagcctcaatacagacaaatcgtcgtggaactgctgatggtcgtgagcattgtgctggagcggaatccggaacttgaattccaggataaggtggacctggatcgcctcgtgaaggaggcgtttaacgaatttcaaaaggatcaaagccggctgaaggaaattgagaagcaagacgacatgacttccttctacaatacgccccctctgggaaagcgaggcacgtgttcgtaccttactaaggccgtcatgaaccttcttcttgaaggtgaggtgaagccaaacaatgacgacccttgtttgatctct

SEQ ID NO: 18184 - DNA, 3279 bp, synthetic construct
  misc_feature 1..3279: note = source = /note="Description of Artificial Sequence: Synthetic coding sequence"
  source 1..3279: mol_type = other DNA
atggccggagcagctggtcttaccgcagaagtgagctggaaggtgctcgaacgccgtgcgcggacgaagcgatcaggttccgtctatgagcctctgaaatccattaatctgccacgaccagataacgagactctttgggataagttggatcactactacagaattgtcaaatccactctccttctttatcaatcgccaaccaccggcctctttccaaccaagacttgtggcggcgaccaaaaggcaaagatccaagactcgctgtactgtgccgcgggcgcctgggcactcgcgctggcataccggcgtattgatgacgataaggggcggacgcacgaacttgaacactcagcaatcaagtgtatgagagggatcttgtactgctacatgagacaggctgacaaggttcagcaattcaagcaagatccgcgccccactacgtgtctgcactccgtgtttaacgtgcacaccggagatgaacttctgtcgtacgaagaatacggtcaccttcagatcaacgcagtttcgctgtacctcctctatctcgtggagatgatttcttcaggactccaaatcatctacaatactgatgaagtcagcttcatacagaacctggtgttctgtgtggaacgcgtctaccgcgtgccagattttggggtgtgggagcggggcagcaagtataacaatggatcgaccgagctgcattcatcaagcgtggggctcgcaaaggcggcacttgaagcgattaacggattcaacctctttggtaatcaaggatgttcatggtcagtgatcttcgtcgatctggacgcacataatcgaaaccgtcagactctctgcagccttctcccccgcgaaagcagatcccataacaccgacgcagcactgcttccatgcatctcgtatcccgcatttgcccttgacgatgaagtgctgttttcgcaaactctggacaaggtcgtcagaaaactcaagggaaaatacggattcaaaagatttttgcgcgacggctaccgcacctccctggaagatcccaatcgatgttactacaagccggcggagataaagctgtttgatgggattgagtgcgagtttccaatattctttctgtatatgatgattgacggggtgtttcggggtaaccctaagcaagtccaggaataccaagatctgcttaccccagtgctgcatcatacgaccgaaggttacccggttgtccctaagtactactacgtaccagcagattttgtcgaatacgagaagaataatcctgggtcacaaaaacgatttccgagcaattgcggtagggacggaaaacttttcctttgggggcaagcactctacatcatagcgaagttgttggcagacgaactgatttcaccaaaggacattgatccagtgcagcgctacgtgccactgaaagaccaaaggaacgtgtcgatgcggtttagcaatcaaggaccgctggaaaatgatctcgtggtccacgtggcactcattgcggagtcgcagcgtctccaagtgtttcttaacacctacggaattcaaactcaaaccccacagcaagtcgaacccatacagatctggcctcaacaggagctggtgaaggcgtacctgcagttgggaataaacgagaagctcggcctctcgggtcgccctgatagaccaatcggatgtcttggaacttcaaagatctaccgtatcttgggcaaaactgtggtgtgttacccgatcattttcgacctttccgatttctacatgtcgcaggacgttttcctgctcatcgatgatatcaaaaacgccctgcagttcataaagcaatactggaagatgcatggacgacctctttttctggtgctgattagagaagataacatcagggggtcacgttttaaccccatactggacatgctggccgcactgaagaaagggatcattggaggcgtgaaggtccatgtggataggctccagactcttatctcaggagcagtggtggagcaattggattttcttaggattagcgataccgaagaacttccggagtttaagagcttcgaagaactcgaaccacccaaacatagcaaggtgaaaagacagtcatcgactccttcggccccagagctgggccagcagcctgacgtcaacatttccgaatggaaggataaacctacgcatgagattttgcaaaaacttaacgattgtagctgccttgcgagccaggctattctgctgggtatactcttgaaacgtgaaggcccgaatttcataactaaagaaggaaccgtgtccgatcatatcgagcgagtctaccggcgcgctggctcgcaaaagttgtggcttgcggtgcggtacggggccgctttcacccaaaagtttagcagcagcatagccccacacattaccacctttctggtgcacggaaagcaggtgactcttggtgcttttgggcatgaggaggaggtcatctcaaacccacttagcccacgcgtaattcagaacattatctactacaagtgcaatacccatgacgaaagagaagcagtgatccagcaggaactggtaatccacatcggctggattatctccaacaaccctgagctgttttcgggtatgctgaaaattcgaatcggctggataattcatgccatggaatacgaactccaaatcaggggaggtgacaagccagcccttgacctctaccaactttccccttcggaggtgaaacaactgcttcttgacatacttcaaccccagcaaaatggacggtgttggctcaatcggcggcaaattgacggttcgttgaatcgaacgccaactggattttacgatcgtgtgtggcagatcctggaaagaacccctaacggcattattgttgccgggaagcatttgcctcagcagcctaccctttcggatatgaccatgtatgaaatgaacttctcgctcctggtggaagataccctgggcaacatcgaccaacctcaataccgtcagattgtggttgagttgttgatggtcgtgtcaattgtcctggagagaaaccccgaactggaatttcaggataaggtggacctggaccgcctggttaaagaagcattcaatgaatttcaaaaggatcaaagccgccttaaggagatagagaagcaggatgatatgacttccttctataacaccccacccctcgggaagagaggaacgtgttcataccttactaaggccgtcatgaatttgcttctcgagggagaagtgaagcctaacaacgatgacccttgcctcattagt

SEQ ID NO: 18185 - DNA, 3279 bp, synthetic construct
  misc_feature 1..3279: note = source = /note="Description of Artificial Sequence: Synthetic coding sequence"
  source 1..3279: mol_type = other DNA
atggcaggagccgctggtctgacggccgaagtctcctggaaggttttggagcggagggcaagaacaaagcgcagtggctccgtgtatgagcccctcaagagcataaaccttccaagacccgataatgagactctctgggataaactcgatcactattaccgtatcgtgaagtcgacattgttgctgtaccaatcccccacgactggcctgttccccacaaagacttgcggaggggatcagaaagccaagatacaggactccttgtattgcgcagccggagcctgggctcttgcactggcttatcggcgcatagacgatgacaagggcaggacccatgaactcgaacacagtgctatcaagtgcatgcgtggcatcctgtattgctatatgcggcaggctgacaaagtccagcagtttaaacaagatcccagaccaacaacctgtctgcattctgtttttaatgtgcacaccggggatgaattactctcgtatgaggaatatggccacctccagatcaacgctgtgtcgctgtacctgctgtatctggtcgagatgatctcatcaggacttcagattatatataatactgacgaggtttcatttatccaaaatctggtgttttgcgtggaacgcgtttatcgcgttccagatttcggcgtgtgggagcggggctcaaagtataacaatggatccacagagctacacagttccagtgtaggactagctaaggccgccttggaagccatcaatgggttcaatctgttcggcaatcaggggtgcagttggagtgtaatatttgtcgatctggatgcacacaatcggaacaggcagaccctttgttccctcctaccgcgggagagtagaagccacaatacggatgcggcacttctgccctgcatttcctatcctgcttttgccctggacgacgaagttcttttttctcaaaccttggataaggtagtgcgcaagctgaaagggaaatatggctttaaacgctttctgcgagatggatatcggacctccttggaggacccaaatcgctgctattacaaacctgccgagataaaactgttcgatgggattgaatgcgaatttcccattttctttttgtatatgatgatcgatggcgtgtttcgtggtaatcctaaacaggtccaggagtaccaagatcttttaactcccgtcctacaccacaccactgagggctaccctgtcgtgccgaaatactactatgtacctgccgatttcgtcgagtatgagaagaacaaccccgggtctcagaagaggttcccatcaaattgtggccgtgacggaaaactgttcctgtgggggcaggctttgtacattatagctaaactcctagccgatgaattgatttcacctaaagacattgatccagtccagcgatacgttcccctcaaggaccagcgcaacgtgtcaatgcggttcagtaaccaaggccccctggaaaatgacctcgtggtacacgtggccttgattgcagagtcccaacgcctccaggtttttcttaatacctacggtattcagacccagaccccccaacaggtggagccaatacaaatctggccgcagcaagagttggtcaaagcatacctgcagctgggcataaacgagaagttgggcctgagtggacgaccagatagacctattgggtgccttgggacttccaagatttacaggatcctgggtaagacggtggtttgttatccaatcatattcgacctttccgacttttacatgtctcaggacgtatttttgcttatcgatgacattaagaatgctttgcagtttatcaaacaatactggaagatgcatggtcgaccgttgtttctggtcctcatccgggaagacaatatacgtggcagcaggtttaaccctattctggacatgctggctgcactgaagaagggcattatcggcggagtcaaggtccatgttgaccgtttgcagaccctgattagcggggcggtggtggaacaattggattttctaagaattagtgataccgaagagctgccagagtttaagagcttcgaagagctcgaacctcccaaacacagcaaagtgaagcgccagagttccacccctagtgcgcccgagttaggacagcagccggacgtcaacatctccgagtggaaagacaagccgacacatgagattctccagaaactcaacgattgcagttgcctggcctcccaggcaatcctcctcgggattctgttaaagcgcgagggacccaattttatcacaaaggaggggacagtcagtgatcacattgagcgagtctaccgacgcgccggcagccaaaagctgtggctagccgttcgctatggagccgcctttactcagaagttttcgtcttccattgctcctcacatcactacctttttagtgcacggcaaacaggtcacacttggcgcttttggacatgaagaagaggtgatttctaaccccctatctccccgggtgatccagaatatcatttactacaagtgcaatacgcatgatgaacgcgaggcggttatccagcaggaactggtgattcatatcggatggatcatcagtaataatcctgaactattttcaggaatgctgaagatacggatagggtggattatccatgccatggagtacgaactgcagatcaggggcggcgacaaacccgccttagatctttatcagctgagcccttcagaggtgaagcagctcctgctggacattctgcagccccagcagaacggtagatgttggctaaatcgcagacagatcgacggctcactcaatcggacaccgacaggcttttacgatagagtgtggcaaatcctggagaggaccccaaatgggatcattgttgcaggcaagcacctgcctcagcagcctacactctccgacatgactatgtacgagatgaatttctccttactggttgaagacacactcggcaacattgatcaaccccaatataggcagatcgtggtcgaattattgatggttgtgtcaatagtgctcgagcggaatccagaacttgaatttcaggacaaagtggacctcgaccggcttgttaaggaggcatttaacgaattccagaaggatcagtcacgtctgaaagagatagagaagcaggacgacatgacaagtttctacaacaccccacctctgggtaagagaggcacttgctcttatcttacaaaggcagtgatgaatctgcttctggagggtgaagtaaaacctaacaatgatgacccctgcctaatttca

SEQ ID NO: 18186 - DNA, 3279 bp, synthetic construct
  misc_feature 1..3279: note = source = /note="Description of Artificial Sequence: Synthetic coding sequence"
  source 1..3279: mol_type = other DNA
atggcgggcgccgcaggcctgaccgccgaggtgtcgtggaaggtgctcgaacgcagggcacgcactaagcgctccggatcagtgtacgagcctctcaagtccattaatctgcctcgcccggacaacgagacgttgtgggacaagctggaccattactaccggattgtcaagtcgacgctgctgctgtaccaaagcccgaccaccggactctttccaactaagacctgtggcggcgatcagaaggcaaagatccaggattccttgtactgcgcagctggagcctgggcgctcgccctggcctacagacgcatcgacgacgataaagggcgcacccacgaactcgagcacagcgcgatcaagtgcatgagagggatcctgtactgctacatgcgccaagctgacaaagtccaacaattcaagcaagatccgcgtcctaccacttgcctgcattcagtgttcaacgtccatactggagatgagctgctctcctacgaggaatacggccacctgcaaatcaatgcggttagcctctacttgttgtacctggtggaaatgatctcctcgggcctgcagatcatttacaatactgacgaggtgtcgttcatccaaaacctggtgttctgcgtggaaagagtgtaccgggtgcccgattttggagtctgggagagaggttcgaagtacaacaacggctctaccgaacttcactcctcctcggtgggactggctaaggctgcactggaggccatcaatggatttaacctgttcggaaatcagggctgttcatggtcggttatcttcgtggatctggacgcgcataaccggaataggcagaccctgtgtagcttgctcccgcgcgagtcccgctcgcacaacaccgacgcggcgttgctcccatgcatctcatacccggcgttcgcccttgacgacgaagttctcttttcccagactctcgataaggttgttcggaagttgaagggtaaatacggattcaagcgctttctgcgcgacggttacagaacctcactggaggacccaaacagatgctactacaagccggctgagattaagctgtttgacggaatcgaatgcgaattccctatcttcttcctgtacatgatgatcgatggtgtgttccgcgggaatccgaagcaggtgcaagagtatcaggacctgctgacgccggtgctgcaccacacgaccgaaggatacccggtggtgcccaaatactactacgtgcccgctgacttcgtggaatacgaaaagaataatccagggtcccagaagagattcccttcaaactgcggccgcgatggaaagctctttttgtggggacaggcactctacatcatcgctaagctcctggcggatgagctgatctccccaaaggatatcgatccagtgcagcgctacgtgccgctgaaggaccaacggaacgtctcaatgaggttcagcaatcaaggtcccctggaaaatgacctcgtggtgcacgtggcactcatcgccgaatcccaaaggctgcaggtattcctcaacacctatgggatccaaacccagaccccccagcaggtcgagcctatccagatttggccacagcaggaactcgttaaagcgtatctccagctgggtatcaacgaaaaactgggactctcgggacgtccagaccgaccgatcggctgtctgggaacctccaagatctaccgcatcctcggaaagaccgtggtgtgctatccgatcatcttcgacctgagcgacttctatatgtcgcaggacgtgttcctcctcatcgatgatatcaagaacgcgctccagttcattaaacagtactggaagatgcacgggaggccgttgtttctggtgcttatccgggaagataacatccgcggtagtcgtttcaacccgattctggatatgctggcagccttgaagaagggcatcatcggcggcgtcaaggtccatgtggacagactgcagactctgatctcaggagccgtggtggaacagctggattttctgcggatctcagacaccgaagaactccccgagtttaagagctttgaggagctcgaaccgccgaagcactcaaaggtgaagcgccaaagcagcaccccgtctgccccggagctcgggcagcagccggacgtgaatatcagcgagtggaaggataaaccgacccacgagattcttcagaagctcaacgactgctcctgcctcgccagccaagctatactgctcggtatcttgctgaagcgggaaggacccaacttcataacgaaggaggggaccgtctcagaccacatcgaacgggtgtacaggagggccggaagccagaagctgtggctcgccgtccggtatggcgcagccttcacccagaagttcagcagctcgattgccccgcacatcactaccttcctggtccatggaaagcaagtgaccctcggagccttcggacacgaagaggaggtcatctcgaatccgctctccccgcgcgtcatccaaaacatcatctactacaagtgtaacacccacgacgagagagaggccgtcatccaacaagaactggttattcacatcggttggattatcagcaacaaccctgagcttttctcgggaatgctcaagatcaggattggttggatcatccatgccatggaatacgagctccagatcagagggggtgacaagcctgcgctcgacctgtaccagctgagcccaagcgaggtgaaacagctgcttctggacatcctccagccgcaacaaaacgggaggtgttggcttaaccggagacagattgacggatcgttgaataggaccccaactgggttctacgatcgggtgtggcagatcctcgagcgcacgccaaatggaatcatcgtggccggcaagcatcttcctcaacagccgaccctgtcggacatgactatgtacgaaatgaacttctccttgctcgtggaagatactttgggcaatatcgaccagcctcagtaccggcaaattgtcgtcgaacttcttatggtggtgtcgatcgtgctcgaacggaaccccgagcttgaatttcaggataaggtcgacttggaccgcctggtcaaggaagccttcaacgaattccagaaggatcagtcgaggctgaaggaaatcgagaagcaggatgacatgactagcttttacaacactcctccactgggaaagcgcggcacctgctcttacctgactaaggcggtgatgaaccttctgctcgagggcgaagtgaagccgaacaacgatgacccgtgcctcatcagc

SEQ ID NO: 18187 - DNA, 3279 bp, synthetic construct
  misc_feature 1..3279: note = source = /note="Description of Artificial Sequence: Synthetic coding sequence"
  source 1..3279: mol_type = other DNA
atggctggggcggccggtctcacagctgaggtcagctggaaagtgctggaacgccgggccaggaccaagcgcagcgggtctgtgtacgagccgctgaagtcaattaaccttccaagaccggataacgaaacactttgggataaactcgatcattactacaggattgtgaaatccacgcttttgctgtaccagtctcccaccacgggactctttccgacgaagacctgcggaggagatcagaaggctaagatccaggactcactctactgcgccgccggcgcttgggcccttgccctggcctacagacggatcgacgatgataaaggtcggacgcacgagcttgagcactctgcgatcaagtgtatgagaggaatcctttattgctacatgagacaggcggataaagttcagcaatttaagcaggacccacggcccaccacctgcctgcacagcgtattcaacgtgcataccggtgatgaactgctgtcctacgaggagtacggtcatcttcagattaacgcagtctccctttacttgctttaccttgtggagatgatttcttctggcttgcaaatcatatataacaccgacgaagtgagcttcatccagaacctggtgttctgtgtggagcgggtgtacagagtgccagactttggcgtctgggagcggggctcaaagtataataacgggtcaaccgaactgcacagttcctcagtggggttggccaaggctgctctcgaggcaatcaatgggtttaatctcttcggtaaccaggggtgttcttggtccgtgatatttgttgacctcgacgcacataataggaatcggcaaaccctttgtagtttgctgccaagagaaagcaggtctcataatacggatgcggctctcctcccatgcatttcttatccagcgttcgcgttggacgatgaagtcctgttctcccagaccttggacaaggtggtccgcaaactgaaggggaagtacggtttcaagcgattccttcgcgacggctacaggacctcccttgaggaccccaacaggtgttattacaagcccgcagaaattaagctctttgatggcattgagtgcgaatttcctatattctttctctacatgatgatagacggagtcttccgcggaaatcccaagcaggtgcaggagtaccaggatctgttgactccggtcttgcatcacacaaccgaagggtacccagttgtgcccaagtactactacgtgcctgctgactttgtggagtatgaaaagaacaatccaggctcccagaaaagattccctagtaattgcggcagagatggaaaactgttcctgtggggccaggccttgtatattattgctaaactgctggctgacgaactcatctctcctaaggacatcgatcctgtccagagatacgtaccgctgaaggatcaaaggaatgtaagcatgcgattttctaaccagggaccattggaaaacgatctcgtggtccatgttgcccttatcgccgaaagccagagactccaggtttttctgaacacttacgggattcagactcaaacgcctcagcaggtcgagcctatacaaatttggccacaacaagagctggtgaaggcctatctgcagctggggatcaacgaaaagctgggactgagcggaaggccagatcgacccatcggctgcctcggcaccagcaagatatatcggattctgggaaaaacagtggtttgctaccctataatcttcgacctgtctgatttctatatgtcacaagatgtctttctcctcattgacgacatcaagaacgccctccagtttataaaacagtactggaaaatgcacggtcgcccactgtttctcgtcctgatccgcgaggacaatatcagagggagccggtttaacccaatattggacatgctggccgctttgaaaaagggtatcataggcggtgttaaggtccatgtggatcgacttcagaccctgatctctggagctgtggtagagcagctcgatttcctgcgcatctccgacaccgaggaactgcccgaattcaagtccttcgaagagctcgaaccacccaagcactcaaaagttaagcgccagagctctacgcccagcgccccagagcttggtcaacagcctgatgtgaatataagcgagtggaaagacaaacccacccacgaaatccttcaaaagttgaatgactgctcttgtctggcttcccaggcgatcctccttgggattctccttaagcgagagggaccaaatttcataaccaaagagggaactgtgagcgatcacatcgagcgcgtctatcgccgggccggttctcagaagctgtggctggcagttcgctatggggcggccttcactcaaaagttctcatccagtatagctccccacattactactttcctggtgcatggcaagcaggttacactgggcgcattcgggcacgaggaggaagttatttctaacccgctttcccctagagtcatccagaatatcatctactacaaatgcaatacccacgatgagcgagaggcagtgatacaacaggagctggtgatacacatcggctggataatcagcaataatccagagctgttctctgggatgcttaagattcgcatcggctggattatacatgccatggagtacgaacttcaaattcgcggaggagacaagcctgcactggatctgtatcagttgagcccctctgaagtaaagcagctcctgctcgatatactgcagccccagcagaatggcagatgctggctcaataggaggcagatagatggcagtctcaaccggacccctactggcttctatgaccgcgtgtggcagatcctggagaggactcctaacgggattattgtggctggcaagcatctgccacagcagcccaccctgtctgacatgactatgtatgaaatgaatttcagcctgctcgtggaagacactctcggaaacatcgatcagccacagtataggcagatcgttgtcgagctgttgatggttgttagcattgtgctcgagaggaacccagagctggaatttcaggataaagtggacctggatcgattggtgaaggaggcctttaacgagtttcagaaagatcaaagccggctgaaggagattgaaaagcaggacgatatgacgagcttttataatactccacctctgggcaagaggggaacgtgttcctacctgactaaggctgtgatgaacctgctgctcgagggcgaggtaaagcccaataatgacgacccttgtcttatctcc

SEQ ID NO: 18188 - DNA, 3279 bp, synthetic construct
  misc_feature 1..3279: note = source = /note="Description of Artificial Sequence: Synthetic coding sequence"
  source 1..3279: mol_type = other DNA
atggctggtgctgctggattaacagctgaagtttcttggaaagttcttgaaagaagagcaagaactaaaagatctggttcagtttatgaacctttaaaatctattaatttacctagacctgataacgaaacattatgggataaacttgatcattattatagaattgttaaatctactttattgttataccaaagtcctactacaggattattcccaactaaaacttgtggaggagaccaaaaagctaaaattcaagattcattatattgtgctgcaggagcatgggctcttgctttagcatacagaagaattgatgatgataaaggtcgtactcatgaattagaacattcagctatcaaatgtatgagaggaattctttattgttatatgagacaagccgataaagtacaacaattcaaacaagatcctagaccaactacatgtttgcattctgtttttaatgtacatacaggagatgaacttttatcatatgaagaatatggacatttacaaataaatgctgtttcactttatttattatatttagttgaaatgattagtagtggattacaaataatttataatactgatgaagtctcgtttattcaaaacttagttttctgtgttgagcgtgtgtatagagtaccagattttggagtttgggaaagaggatctaagtataataatggaagtactgaacttcatagttcaagtgttggattagcaaaagcagcacttgaagcaattaatggatttaatttattcggaaatcaaggatgttcatggtcggtaattttcgtagatttagatgctcataatagaaatagacaaacattatgtagtttattgccacgagaatcaagatcacataatactgatgctgctttacttccatgtatttcatatccagcatttgctcttgatgatgaagttcttttttcacaaacgctagataaagttgtaagaaaattgaaaggaaaatatggatttaaaagatttttgagagatggatataggacatcacttgaagatccaaatagatgttattataaaccagcagaaattaaattatttgatggaattgagtgtgaatttccaattttttttctatatatgatgatcgatggagtgtttcgtgggaatccaaagcaagttcaagaataccaagacttacttacaccagttttacatcatacaactgaaggatatccagttgttccaaaatattattatgttcctgcagatttcgttgaatatgaaaaaaacaatccaggatctcaaaaaagattcccttcaaattgcggaagagatggaaaattatttttatggggacaagctctttatattatagcaaaacttttagcagatgaacttatttcaccaaaagatattgatcctgtccaaagatatgttccacttaaggatcaacgtaatgtttcaatgaggttttcaaatcaaggaccattagaaaatgatcttgttgttcatgttgcattaattgcagaatctcaacgtttacaagtttttttaaatacttatggaattcaaactcaaacaccacaacaagttgaaccaattcagatttggccacaacaagaacttgttaaagcttatcttcaattaggtattaatgagaaacttggacttagtggaagaccagatcgaccaattggttgtcttggaacatcaaaaatttatagaatattaggaaaaacagttgtttgttatcctattatatttgatctttctgatttttatatgtcacaagatgttttcttattaattgatgatatcaaaaatgctttacaatttattaaacaatattggaaaatgcatggaagaccattatttcttgttttaataagagaagataatattagaggaagtagatttaatccaatccttgatatgttagcagctcttaagaagggaattataggtggtgtaaaagtccatgtagatagattacaaactttaattagtggagctgttgttgaacaattagatttcttaagaatatctgatacagaagaattaccagaatttaaaagttttgaagaattggaaccaccaaaacattcaaaagttaaaagacaatctagtacaccttctgcaccagaattggggcaacaaccagatgttaatatttctgagtggaaagacaaaccaacgcatgaaattttacaaaaattaaatgattgttcttgtttagcatcacaagctattttacttggtattttactcaaaagagaaggaccaaattttattactaaagaaggtactgtttcagatcatattgaaagagtctatagaagggctggatctcaaaaattatggttagctgttagatatggagcagctttcacacaaaagttttctagttcaattgctccacatattacaacctttttagtccacggtaaacaagttactttaggagcctttggacatgaagaagaagttatttcaaatccattgagtccaagggttattcaaaatattatttattataaatgtaatacacacgatgaaagagaagcagttattcaacaagaattagttattcatattggatggattattagtaataatccagaattattttcaggaatgcttaaaattcgtattggttggattatacatgcaatggaatatgaacttcaaatacgtggaggagataaaccagctttagacttatatcaattatcaccaagtgaagtaaagcaattattattagatatactacaaccacaacaaaatggacgatgttggttaaatcgtagacaaattgacggatcacttaatagaacaccaactggattttatgaccgtgtttggcaaattttagaaagaacaccaaatggaattattgttgctggaaaacatttaccacaacaaccaacattatcagacatgaccatgtatgaaatgaattttagtttattggttgaagatactttaggaaacatagatcaaccacaatatcgtcaaattgttgttgagttacttatggtggtttcaattgttcttgaaagaaatcctgaacttgaatttcaagacaaagtggatttagaccgtttagttaaggaagcttttaatgagtttcaaaaagatcaatcacgtcttaaagagattgaaaaacaagatgatatgacttctttttataatacccctcctcttggaaaaagaggtacatgttcatatttaactaaagcagttatgaatcttttattagaaggagaagttaaaccaaataatgatgatccatgtttaatttca

SEQ ID NO: 18189 - DNA, 3279 bp, synthetic construct
  misc_feature 1..3279: note = source = /note="Description of Artificial Sequence: Synthetic coding sequence"
  source 1..3279: mol_type = other DNA
atggcaggtgcagctgggctgacggccgaagtctcctggaaggtgctcgagcgccgggccaggactaaaaggtcaggatcagtctacgaaccgctgaagtcaatcaatctcccgcgcccggacaatgaaacgctgtgggataagctcgaccattactatagaatcgtgaagtcaaccctgctgctctaccagtccccgactaccggactgttccctaccaaaacctgcggaggtgaccagaaagccaagatccaagattcgctctattgcgcggccggagcgtgggcgctggctttggcatacagacgcattgatgacgataaggggcggacccatgaactggagcacagcgcgattaagtgcatgcggggtatcctgtactgctatatgagacaggcggataaggtccaacaattcaagcaagatccgcgccctaccacctgcttgcactcggtgttcaacgtgcacaccggagatgagctcctcagctacgaagaatacggacatctccagatcaacgccgtgtcgttgtaccttctgtacctggtcgagatgatctcctcggggctgcagattatctacaacactgacgaagtgtcgttcattcagaacctggtgttctgcgtggaacgagtgtacagagtgccggactttggagtttgggaacggggttcgaagtacaataatggatcgactgagctgcacagtagctcggtgggcctggctaaagcagctctcgaggcgatcaatggcttcaatctgttcggcaaccagggatgctcctggtcggtgatttttgtggatttggacgcccataaccggaacagacaaacgttgtgctcactgctgcctcgtgaatccagaagccataacaccgatgcagcactgttgccttgtatcagctacccggcttttgccctggacgacgaagtgctgttctcccagacccttgacaaggtggtgcgcaagctgaagggcaaatacggctttaagcgcttcctccgcgacggatacagaacgtccttggaagatccgaaccgctgctactacaagccggcagaaatcaagttgttcgatggaatcgagtgcgagttcccgatctttttcctgtatatgatgatcgacggagtgttcagaggaaatccgaagcaggtgcaagaataccaggacctgctcaccccagtgctccaccacactactgaaggatacccggtcgtcccaaagtactactacgttcctgccgattttgtcgaatacgaaaagaataacccgggatcccaaaagcggttcccgagcaactgtggtcgggacggcaaattgttcctttggggccaagcactctacatcatcgcgaaactgctggccgacgagttgattagccccaaggacatcgatcccgtgcaacgctacgtcccgctgaaggaccagcgcaatgtgtcaatgagattttcaaaccaaggaccactggaaaatgaccttgtcgttcatgttgctctgattgctgagagccaaaggctccaggtctttctcaacacttacggcatccagacccaaacccctcagcaggtcgagcctatccagatctggccgcaacaggagttggtgaaggcgtacttgcagttgggaatcaatgagaaacttggcctttcaggacggcccgatcggccaatcgggtgtctgggcacctcaaagatctatcgcattctgggcaaaaccgtggtttgctaccctatcatcttcgacttgtccgacttttacatgtcgcaagacgtgttcctgctgatagacgacatcaaaaacgccctgcagtttatcaaacagtactggaagatgcatgggcgtccactgttccttgttttgatccgcgaggataacatcagaggatcccgctttaaccctatccttgatatgcttgcagctctgaagaaggggatcatcgggggagtgaaggtgcatgtagaccggctgcagaccctgatctccggcgcagtggtggagcagttggatttcctccggatctccgatactgaagagttgccggaattcaagtcgttcgaagagttggaaccaccgaagcactccaaggtgaagcggcagtccagcactccctcagccccagaattgggccagcaaccagatgtgaatatctccgagtggaaagataagccaactcatgaaatcctgcagaagctgaatgactgtagctgccttgcctcccaggcaatccttttggggatcctgctgaagcgagaaggaccaaacttcattactaaggagggaactgtgtctgaccacatcgaaagagtctacaggcgcgccgggtcacagaaactgtggctcgcggtgaggtacggagctgcattcactcagaaattcagctccagtatcgcaccgcatatcacgacctttctcgtgcatggtaagcaggtcactctgggggctttcggacacgaggaggaagtcatttcgaatccgctgtcgccgcgcgtcatccagaacataatctactacaaatgcaacacgcatgatgaacgggaagcagtgatccagcaggagctcgtgatccatatcggatggatcatctcgaacaacccggagctgttctccggtatgctcaagatcagaatcggttggatcatccacgcaatggaatacgaactgcaaatccggggtggcgacaagcccgctctcgacctgtaccagctcagtccatcggaagtcaagcagctcttgctcgacatcctgcagccgcagcaaaatgggagatgttggctcaatcggaggcaaatcgacggctctcttaaccggacccctactggcttttacgaccgcgtctggcagattctggagcgtaccccgaatggtatcatcgtcgccggaaagcacctcccgcaacagccgactttgtccgatatgaccatgtacgagatgaacttctcgctcctcgtcgaggatactcttggcaatatcgaccagccacaataccgccagattgtcgtcgaactcctcatggtggtgtcaatcgtgctggaacggaacccagaacttgaatttcaggacaaagtcgacctggatcgcctggtcaaagaagcattcaacgaatttcagaaagatcagtcgcgcctgaaagaaatcgaaaagcaggatgatatgacctcattctacaacacgccgccattgggaaagcgcggcacctgctcgtacttgaccaaggccgtgatgaatcttctgctcgaaggagaggtcaagcctaacaacgatgacccctgcctcatttcg

SEQ ID NO: 18190 - DNA, 3279 bp, synthetic construct
  misc_feature 1..3279: note = source = /note="Description of Artificial Sequence: Synthetic coding sequence"
  source 1..3279: mol_type = other DNA
atggccggcgctgccggcctgaccgccgaagtgtcatggaaggtcctcgagagaagggcaagaaccaagcggtccggtagtgtgtatgagcccctgaaatccattaacttaccccgaccagataatgagaccctgtgggacaaactggaccattactatcgaatagttaagtcaaccctgctgttgtaccagtctcctacaaccggcttatttcccaccaagacctgtggaggtgatcaaaaagccaagatccaggacagcctgtattgtgccgcaggagcttgggccctcgcgctggcttaccgacggatcgatgatgacaagggccggactcacgagcttgaacatagcgccatcaagtgtatgcgagggatcctttactgttatatgcggcaggcagataaggtgcagcagttcaagcaggacccaagacccacgacgtgtctccatagcgtgtttaacgtacatactggggacgagcttctcagctacgaagaatacggccacttgcaaattaacgccgtgtctctgtacctgttgtacctggtggaaatgatttctagtggcctccagatcatatataacaccgatgaagtgagttttattcaaaatctggtattttgcgttgaacgtgtgtatcgggttcctgattttggagtgtgggaacgcggatccaagtataacaatggcagtaccgagctgcattcctccagtgttggtttggccaaagcagccctcgaagctataaacggctttaacttatttggaaatcagggctgtagttggtcggttatcttcgttgacttggatgcccacaatagaaaccgccaaaccctgtgcagcctgcttccccgcgagtcacgtagccacaacaccgatgctgccctgttaccctgtatttcctatcccgcctttgcactcgatgacgaggtgttgttctctcagacgcttgataaagtggtacgcaaactcaagggcaagtatggattcaaacgttttttgcgcgacggataccgtacctccctggaggatcccaacagatgctactacaaacccgcggagattaaattgtttgacgggatcgaatgcgagttccctattttttttctctacatgatgatcgacggggtgtttcgcggaaacccaaagcaagttcaggaatatcaggatctgcttacccccgttctccaccacaccactgaagggtatcctgtggttccgaagtactactatgtccccgctgactttgtggagtacgagaagaacaatcctggttctcagaaacggttcccatctaactgtggtagagatgggaaattgttcctttgggggcaggccctttacatcatcgcaaaactcctggccgatgagctcatatctcccaaagatatagacccagtacagcggtacgtgccgctgaaggaccagagaaacgtgtctatgcggttttctaatcagggaccgctcgaaaacgatttggttgtgcatgtggcgctgattgctgagtctcagcgactgcaggtgtttttgaatacgtatggcattcaaacccagaccccacagcaggtcgagcccattcagatctggcctcagcaggaactagtgaaggcttatctccagctgggaataaacgagaagctgggtctctctggacgtccagataggcccatcggctgcctcgggacctccaagatttaccggatcctgggaaagacagtggtgtgctatccaatcatcttcgatctttctgacttttatatgtcacaggacgtgttcttgctgattgatgatattaagaacgccctgcagttcattaagcagtactggaagatgcatgggaggcccttgtttttggtgcttatcagggaagataacatcaggggaagtaggttcaatcctatactggatatgctggctgccctgaagaaaggaattataggtggagttaaagtgcatgtcgataggctgcagactcttatctctggggctgtggtcgagcagcttgattttctcagaatctcagatacggaagagctgcctgagttcaaatcttttgaggagctagaacctcccaaacactctaaagtaaagcgccagagctccaccccttcagccccggaactagggcagcagccagatgtgaatatcagcgaatggaaagacaaacctacccacgaaatcttgcagaaactgaacgattgttcctgtctggcttctcaggcgatactgctgggcatactgctcaagagggaaggccctaacttcattactaaggagggtaccgttagtgatcacattgagagagtgtatcgtagggcaggatcccagaaactgtggctagccgtgcgctatggcgccgcttttactcagaagttctcatcaagtattgcccctcacataactacctttctggtacatggcaagcaagtgacactgggggcattcggccacgaggaagaggtaatttctaatccattgtccccaagggttatccagaacatcatttactacaaatgtaatacacacgacgagagggaagccgtgatccaacaggagctggtgattcacatcgggtggataattagcaacaacccggagctgttttctggcatgctgaaaattagaatcgggtggatcatccacgcgatggagtacgagctgcagatccgggggggagataagcccgccctggacctttaccagctcagccctagtgaggttaaacaactgcttcttgacatccttcaaccccagcagaatggacggtgctggctcaacagaagacagattgatgggtctctgaatagaacaccaacaggcttttacgaccgggtttggcagatcctagagcgcacgcctaacggcataatcgttgcaggaaaacatcttccacagcaacccaccctgtcagacatgaccatgtacgaaatgaatttctccttactcgtcgaggatactttaggcaacatcgatcagccacagtaccgccaaatcgtcgtggagctgctaatggtggtgtccatagtattggagcgcaaccctgagctagagttccaggacaaggtggatttggacaggcttgttaaagaggccttcaatgaattccaaaaggaccagtcccgtcttaaagaaattgagaaacaggacgacatgaccagcttctacaatactccacctttgggaaagcgcgggacttgctcatacctgactaaggctgtaatgaacttacttctggagggcgaggtgaagcctaacaatgatgatccctgtctgatcagc

SEQ ID NO: 18191 - DNA, 3279 bp, synthetic construct
  misc_feature 1..3279: note = source = /note="Description of Artificial Sequence: Synthetic coding sequence"
  source 1..3279: mol_type = other DNA
atggccggcgccgctgggttgaccgctgaggtctcgtggaaggtcctggaacgtcgcgccagaaccaagcgcagcggctcggtgtacgaaccgctaaaaagtatcaaccttccccgtcccgataatgaaactctgtgggataagttggaccattattatcgtatagtgaagagcactctcctgctttaccagagcccaacgacgggcctattccctaccaagacatgcggcggcgatcagaaagcaaagattcaggacagcctgtactgcgccgccggcgcttgggccctagctctcgcctaccgtcgcatcgacgatgacaaaggccggactcacgaactggagcacagtgccatcaagtgcatgcggggtatcctgtattgttatatgaggcaggcagacaaggtgcagcagttcaagcaagaccctcgccccaccacttgcctgcacagcgtcttcaatgttcacacaggtgatgagcttctgtcttacgaggagtacggccacctccaaatcaacgctgtgtccttgtacctgctgtacctcgttgaaatgatttcctccggtctacagataatatacaacacggacgaggtttctttcatccagaacctggtcttctgtgttgagcgtgtgtaccgagtgccggatttcggagtctgggagcggggctcgaagtacaacaatggcagcaccgagcttcacagctcgtccgttggtttagccaaggcggcccttgaagccattaacggcttcaacttgtttggcaatcagggctgcagctggagcgtcattttcgttgatctagacgcgcacaacagaaataggcaaacactgtgttctctgctgcctagagaatcccgatctcacaacacggatgcagcgctgctgccatgcatcagttacccagcttttgccttggacgacgaagttttgttctcgcagactctcgacaaggtggtgcggaagttgaaggggaagtacggattcaagcgattcctgcgagatgggtatcgcacgtctctggaggaccccaaccgctgctattataagccggccgagatcaagctgttcgacggcatagagtgcgagttcccgatcttctttctctatatgatgattgatggtgtgttccgcgggaacccgaagcaggtgcaagagtaccaggacttgctcactccggtactgcatcacactacggagggttatccagtggtccctaagtactactatgtccccgccgatttcgtggagtacgaaaagaacaacccgggctcgcagaagcgcttcccttcgaactgcggccgtgatggcaagctgttcctgtggggtcaggccctgtacatcatagctaagctgctggccgacgaactgatatcccccaaggacatcgatccggtgcaacggtatgtccctctgaaggatcagcggaatgtcagcatgcgattctcaaatcaaggccccttggagaatgatctggtcgtccatgtcgctctgatagcagagtcacaacggctacaggtattcctcaacacatatggtatccagacccaaacgccacagcaggtggagccaattcagatctggccccagcaggaattagtaaaggcctatttacagttgggaattaatgagaagctgggcctgtctggtcgcccggacaggcccatcggttgccttggaacgtctaaaatatatcggattctgggcaagacggtagtgtgttaccctatcatctttgatttgagcgacttctatatgtcccaggatgtgttcctgttgatcgatgatattaagaatgctctgcagtttatcaaacaatactggaagatgcacggcagaccactgttcctggtattaatccgggaggataacatccgcggctctcgtttcaatccaatactggatatgctggctgctctgaaaaaaggcattatcggcggtgtgaaagtgcacgtggaccggcttcaaacgttgatctcaggcgcagtggttgagcagttggacttcctgcgtatcagtgacaccgaggagctgcccgaattcaagtcattcgaggagctggagcccccgaaacattccaaagtgaagcgccagtccagcactccaagcgcccccgagctgggacagcagcctgacgtgaacataagcgagtggaaggacaaacccacgcacgagatcctgcagaagctgaacgactgctcgtgcctcgcgagccaggccatcctgctgggaatcctcctcaagagggaggggcccaatttcattactaaggagggtacagtgtcagatcacattgaacgcgtgtaccgccgcgccggtagccagaaactgtggctcgcggtgaggtacggtgctgcgttcacgcagaagttctcctcgtccatcgccccccacattactacgttccttgtgcacggtaaacaggtgacactgggtgcgttcggacacgaagaagaggtgattagtaatccgctatcccctcgcgtgattcagaatatcatttactataagtgcaatacccacgacgagagggaggccgtaatccagcaggagttggtcattcacattgggtggataatttccaataacccagagctcttttccggaatgcttaagatcagaataggctggatcatccacgccatggaatacgagcttcaaatccgcgggggcgacaagccggctctggacctgtaccaactgtcgccttcggaggtaaagcaacttctgctggatatcctccagccgcagcagaacggccgttgttggttgaatcgtcgacaaattgatggctcattgaaccgtaccccgacgggtttttatgaccgagtctggcagatcttggagcgcacaccgaatggtatcattgtagccggaaaacatttgccacagcagcctactctcagcgacatgaccatgtacgagatgaacttctctctgctggttgaggacaccctaggcaacatagaccaaccacagtatcgccagatcgtcgtggagttattgatggtggtgtcaatcgttctggagcgcaaccccgagctggagttccaggataaggtcgatctagatcgtcttgtgaaggaggccttcaacgagttccagaaggatcagtcccggctcaaggagatcgagaagcaggatgatatgacgtccttctataacaccccgccgttgggaaagcgtggcacttgcagctacttgaccaaggccgtcatgaacttactcctggagggagaagtgaagcctaataatgacgatccctgcttaatctcg

SEQ ID NO: 18192 - DNA, 3279 bp, synthetic construct
  misc_feature 1..3279: note = source = /note="Description of Artificial Sequence: Synthetic coding sequence"
  source 1..3279: mol_type = other DNA
atggcaggcgcagccggacttacggcggaggtgtcctggaaggtcttggaaaggcgtgcaaggaccaagagatcggggtccgtgtacgagccacttaagtctataaacctgccacgccctgataacgaaaccttgtgggacaaactcgaccattactaccggattgtgaagagcaccctcttgctgtaccagtcccctaccactgggctcttcccaaccaaaacttgtggaggggatcaaaaagcaaagatccaagactcgttgtactgtgcggccggcgcctgggccctggcacttgcatacagaaggatagatgatgacaagggcaggacccatgaactggaacattccgctatcaagtgtatgagaggaatcttgtattgctacatgcgccaggcagataaggtccagcagttcaagcaggacccgcgacctaccacctgcctgcattccgtgtttaatgtgcacaccggagacgagcttctttcgtacgaagaatacggacaccttcagattaacgcagtctctctttacctgttgtacctggtcgaaatgatctcgtcagggctccagatcatttacaacactgatgaagtgtccttcatccaaaacctggtcttttgcgtagaacgggtgtaccgcgtgcccgattttggcgtgtgggagagaggaagcaagtacaacaatgggtcgaccgagctgcactcgtcatccgtgggactggcgaaggcagcactcgaggccataaacggatttaacttgtttgggaaccagggatgtagttggagcgtcatttttgtggacctcgacgcacataacagaaacaggcaaactctttgctccctcttgccaagagagagccgttcgcataatactgatgcggcgttgctcccttgtatttcatacccagcattcgcccttgacgatgaagtgctttttagccagactctcgataaagtggtcagaaaactcaagggtaagtacggattcaaaagattcctgcgggacggttatcggacttcacttgaggatccaaaccggtgttactacaaacctgcagagataaaactttttgatggtattgaatgtgaatttcccattttcttcctgtacatgatgatcgatggagtgttccgaggtaaccccaagcaggttcaagagtaccaggatctgctgacccctgtgcttcatcataccactgaggggtatcccgtggtccctaaatactactacgtgccagcagacttcgtggaatacgagaaaaacaacccgggatctcagaagagatttccctccaactgtgggcgggatggaaagctgttcctttggggccaagcactctacattatagctaaacttctggccgatgaactcattagcccaaaggacatcgatccggtgcagcggtacgtcccacttaaggaccagagaaatgtgtcgatgcgctttagcaaccagggtccacttgaaaacgatcttgtcgttcatgtggcgctgatcgcagagtcccaacgacttcaggtgtttctgaacacttacggcatccaaactcaaactccacaacaagtcgaaccaattcaaatatggcctcagcaggaacttgtcaaggcgtacctgcagcttggaattaacgaaaaacttggtctgtccggacgaccggatcggcctattggatgtcttggaactagcaagatctaccgcatcctcggcaagaccgtggtgtgttatcctatcatatttgatctgtccgatttctacatgagccaagacgtctttttgttgattgatgacattaagaatgctcttcagttcattaagcagtactggaagatgcatggacgacccctgtttctggtgcttattcgtgaggacaacatcagaggtagcaggtttaacccaattcttgacatgctggccgcactgaaaaagggcattattggcggagtgaaggtgcatgttgatagactccaaaccctgatttcaggagcggtggtggaacaactcgactttcttcgcatatcggataccgaagaactgccagagtttaagagtttcgaagaacttgagccacctaagcattcaaaggtgaagcgacaatcatcaacgccctcggcaccagaactgggccagcaaccggatgtgaacatctccgaatggaaagacaaacctacccatgaaattctgcaaaaactcaatgattgcagctgtttggcatcgcaagcaattctgcttggaatcctgctcaaacgtgaggggcctaacttcatcactaaggaagggaccgtctcggatcatattgagagggtgtacagacgcgcaggatcgcagaaactttggctggcggtgagatatggtgctgcgttcacgcaaaagttttcttcgagcatagcccctcacatcacgacgttcctggtgcacggcaagcaggtcaccctgggcgcatttggccacgaagaggaagttatttccaacccactctcccctcgcgtgattcaaaacatcatttactacaaatgcaacactcacgatgagcgagaagcagtaatacaacaggaactggtgatccacatcggttggatcatctcgaacaaccctgaacttttttccggtatgttgaagattcggattggatggattatccatgctatggagtacgaactgcaaatcaggggaggtgacaagccggcactggacctctaccaactttcgcccagcgaagtgaagcaactgttgctggatattctgcagccacaacagaatggccggtgttggcttaaccggcggcaaattgacggcagccttaataggacgccaaccggattttacgaccgagtgtggcaaatcctcgaacgtaccccaaacggtataatcgtcgccggcaagcaccttcctcaacagccaactttgagcgacatgaccatgtacgaaatgaacttttccctgcttgtggaggatactctgggtaacattgaccaacctcaatacaggcagattgtggtcgaattgctcatggtcgtcagtatcgtgctcgaacgaaatccagaacttgagtttcaagataaagtggatctggaccggctggtgaaagaagcgtttaatgaatttcagaaagatcaatctaggcttaaggagattgaaaaacaggacgatatgacgtcgttctacaatactcccccactgggaaagaggggaacttgctcctaccttaccaaagctgtgatgaaccttctgctggaaggagaagtgaagccaaacaacgatgatccttgccttatttct

SEQ ID NO: 18193 - DNA, 3279 bp, synthetic construct
  misc_feature 1..3279: note = source = /note="Description of Artificial Sequence: Synthetic coding sequence"
  source 1..3279: mol_type = other DNA
atggccggcgccgcgggactgaccgcagaggtgtcctggaaggtcctggaacggcgggcgcggactaaacgctccggatccgtgtacgagccgctgaagtcaatcaacctgccacgccccgataacgagactctctgggacaaacttgatcactactaccgcatcgtgaagtcgaccctgttgctgtaccagtccccgaccactggactgttcccgactaagacttgcggaggagatcaaaaagccaaaatccaggactcgctttattgcgcggcaggtgcctgggcgctggcccttgcgtaccgccggatcgacgacgacaaaggacgaacgcatgagctggaacattcagccatcaagtgcatgagaggaatcctgtactgctacatgagacaggctgataaagtgcagcaattcaagcaggatccacggcctaccacttgcctgcactcggtctttaatgtgcatactggcgatgaattgttgtcctacgaagaatacggacatctgcaaatcaacgccgtgagcctgtatctgctctacctggtggaaatgatctcctcaggactccagatcatctacaacaccgacgaggtgtccttcatccagaatctcgtgttctgtgtggagagggtgtacagggtgcctgacttcggagtgtgggaacgaggttcaaagtacaacaacggttcgaccgaactccactcgtcgtccgtgggtcttgccaaggccgcgctggaagcgattaacggcttcaacctgttcggaaatcagggatgttcctggtcggtgattttcgtggacctcgacgcccacaaccgcaaccgccaaacgctctgttcccttctgccgagggaaagtagatcgcacaacactgacgcggcgctcctcccgtgcatttcatacccggctttcgctttggacgatgaagtcctcttctcgcagactctggacaaggtggttcggaagctcaaggggaaatacgggtttaaacgctttctccgggacgggtacagaacgtcgttggaagatcccaaccgctgctactacaagcccgcggagattaaactcttcgacggcatcgaatgcgagtttcccatcttctttctctacatgatgatcgacggcgtgttccgtggtaatccgaagcaggtccaggaatatcaagaccttctgactccggtgctgcatcataccactgagggataccccgtggtgccgaagtactactatgtgcccgcggatttcgtggaatacgagaagaataacccaggatcacagaaacgattcccaagcaattgtggaagagatggcaagttgttcctctggggtcaggccctctacatcatcgctaagctgctggctgacgaactgatctcgccgaaggatatcgacccggtgcagagatacgtgccactgaaggatcagagaaacgtatcaatgcggttctccaaccagggccccctggagaacgaccttgtggtgcacgtggctctgatcgccgagagccaacggctgcaggtctttttgaatacttacggaattcaaactcagactccgcaacaggtggagcccatccaaatctggcctcagcaagaactcgtcaaggcttacctccagctcggcatcaacgagaagctcgggctgagcggacggccggatcgtccgatcggctgcctgggcacttcgaaaatctaccgcattctgggcaaaactgtcgtctgctacccgatcatcttcgatctgagcgacttttacatgtcccaggacgttttcctcctgatcgatgacatcaagaacgcactgcaattcatcaagcaatactggaaaatgcacggacggcctctgttcctggtgctgattagggaggacaacatccgcggctcgcggttcaacccgattctggacatgctggcagcactcaaaaagggaatcatcggtggggtcaaggtgcacgtggaccgcctgcaaaccttgatcagcggagccgtggtggaacagctggatttcctccgaatcagcgacactgaggagcttcctgaattcaagtcattcgaggaactcgagccaccgaagcactcgaaagtgaagcgccagtcctcgactccctcagccccagagcttggccagcagccggacgtgaacattagcgaatggaaggataaaccaactcacgagatcctgcaaaagttgaacgactgctcgtgcctggccagccaggctatcctgctcggcatactgctcaagagagagggcccgaactttatcacgaaggaaggaactgtgagcgatcacatcgagagagtctaccgccgcgccggatctcaaaagctgtggctggctgtgagatacggggcggccttcacccagaaattctcttcatccattgcaccgcacatcaccacgtttctggtgcacggaaaacaagtgaccctgggagcatttgggcatgaggaagaggtgatctcgaacccactgtcgccgcgcgtaatccaaaacatcatctactacaagtgcaacactcacgacgaacgcgaggctgtgatccaacaggaactcgtaatccacatcggatggatcatttcgaataatccagaactgttctccggaatgctgaagattcgcatcggttggatcatccacgccatggagtacgagctgcagatacgcggcggagataagccggcactggatctctaccagttgtcaccaagcgaagtcaaacagttgctgttggacatcctgcagccgcagcagaatggccgctgttggctcaataggagacagatagatggctccctcaaccgcacccccaccgggttctacgaccgggtgtggcaaattctcgagaggaccccgaacggaataatcgtggccgggaaacatctcccacagcagccgactctgtccgacatgacgatgtatgagatgaacttcagccttctcgtcgaggatactctgggaaacatcgaccaacctcaataccggcaaatcgtggtggaactgctgatggtggtgtccatcgtgctggagagaaacccggaactggagttccaggacaaggtcgacttggaccggctcgtgaaggaggccttcaacgaattccaaaaggaccagtcccggctgaaggagatcgaaaagcaggatgatatgacctccttctacaacaccccgccgttggggaaacggggcacttgctcctacctgacgaaggcagtcatgaacctgctcctcgagggagaggtcaaaccaaacaacgatgatccatgtctgatctca

SEQ ID NO: 18194 - DNA, 3279 bp, synthetic construct
  misc_feature 1..3279: note = source = /note="Description of Artificial Sequence: Synthetic coding sequence"
  source 1..3279: mol_type = other DNA
atggccggggccgcaggcctcaccgccgaagtctcatggaaggtgttagagcgcagagcaaggaccaaacgctctggctctgtctatgagcctcttaagtctatcaacctacccaggcctgacaatgagacactgtgggacaagctggaccactactatcgtatcgtcaaatcaaccctcctcttatatcagtctcccactactggtttgtttcctacaaaaacttgtggaggcgaccaaaaggccaagatccaagattctctttattgtgctgctggggcgtgggcgctggccctggcctaccgacggatcgatgatgataagggacggacccatgagctcgaacactccgccatcaaatgcatgagaggtatcctttactgttatatgcgtcaggccgacaaagtgcagcagttcaagcaagatcccagacctacaacatgtctgcactcggtgttcaatgtgcatacaggagacgagcttctgtcatatgaagagtatgggcatctccagattaatgctgtttctttgtaccttctgtatctggtggaaatgatctccagcggcctacagataatctacaacacggatgaagtgagcttcatccagaacctggtgttttgtgtcgaaagagtctacagggtgccagatttcggcgtttgggaacggggatccaaatataacaatgggtccacagaactgcactcctcttctgtgggcttagctaaagctgccctggaggccatcaacggattcaatctgtttggcaaccagggatgctcttggtcagtgatcttcgtcgatcttgacgctcataacaggaaccggcagaccctgtgttccttactccctcgcgaatctaggagccacaacaccgacgcagcccttctgccatgtatatcatatccagctttcgccctggatgacgaggttctcttctcacagacgctggataaggtcgtccgcaagctgaagggcaagtatggttttaaaagatttctaagagacgggtatcggactagcctggaagatcccaataggtgttactacaaacccgctgagattaagttatttgatggaatcgaatgtgagttccccatcttcttcctctatatgatgatcgacggagtgttccgcgggaaccctaagcaggtgcaagagtatcaggatctgcttactccggttctgcaccatactaccgaaggctaccccgtggtgccgaaatattactacgttcccgccgatttcgtcgaatacgagaagaacaatcccggatcccaaaagcgctttccctccaactgcggcagagacggcaagttgtttctctgggggcaggctttgtatatcatcgccaaactgctcgccgacgaactaattagccctaaggatattgacccagtgcagagatatgtgcccctaaaagatcagagaaacgttagtatgaggttttccaatcagggacctttggagaacgatttggtggtgcacgtggcccttatcgcagagtctcagcgcctgcaggtgttcctcaatacatatgggatccaaactcaaaccccccagcaggtagagcctattcagatctggcctcaacaagagcttgtgaaagcttacctgcagctaggaattaacgagaagctcgggctgtcaggacgccctgatcggcccattgggtgtctagggacttccaaaatctatagaatcctcggtaaaaccgtcgtgtgttatcctataatctttgaccttagcgatttttacatgtctcaggacgtgttccttctgatcgatgatatcaagaatgcccttcaattcattaagcaatattggaaaatgcatggccgacccctgttcttggtgttgattagggaggataacatccggggatcgagattcaaccccatcttagatatgttggccgccttgaaaaagggcataataggtggggtgaaggtacacgtagatagactgcagacgctgatatccggcgctgtagtggaacagctggatttcctgaggatctccgacacagaggagctgccagagtttaagagtttcgaggagctggaaccccctaaacatagcaaggtgaaaagacagtcttccacccctagcgcacccgagctgggccagcagcctgacgtaaacatcagcgaatggaaagacaaacctacacacgaaatcctgcagaagctgaacgattgctcctgtttggcctctcaggctatcctgcttgggatcctgttaaagagagaaggcccgaattttattaccaaagagggcacagtgagtgatcacattgagagagtgtaccgacgggcggggtcacagaaactgtggctcgcggtccgctatggggctgcgttcacccagaagttcagcagcagcatagccccgcacattactaccttcttggtgcatggaaagcaggttacactcggcgctttcggccatgaagaagaggtgatatcaaatcccctgtccccccgcgtaatccagaatataatctactataagtgcaacacgcatgacgagcgcgaagcagttattcaacaggagttggttatccacattggttggataatcagcaataatcctgaactgttttctggaatgctgaagatccggatcgggtggatcattcatgccatggaatatgagctgcagattcgcggaggcgataaacctgctcttgatctgtatcagctgtcaccaagtgaagtgaaacagcttctcctagatattctccagccacagcagaacggcaggtgctggctaaacagacggcaaatagacggctccctgaatagaacccccactgggttttacgacagggtgtggcagatcctcgagcgtacccccaatggaatcattgtggcaggaaagcaccttccccagcaacccactctcagcgatatgaccatgtacgagatgaacttctcactgctggtggaggacactcttggaaatatcgatcagccccagtaccgtcaaatcgtcgtggagctgctcatggtagtgagcattgtgttagaaaggaaccccgagctggagttccaggacaaggttgatctggatcggctcgtcaaagaagccttcaatgagtttcagaaggatcaaagccgcttgaaggaaatagagaaacaagatgatatgacaagcttttacaacacaccaccccttggcaaacgcggcacttgtagttacctaacaaaagcggtgatgaacctcctgctcgaaggggaggtgaagcccaacaatgacgacccttgcttgatcagt

SEQ ID NO: 18195 - DNA, 3279 bp, synthetic construct
  misc_feature 1..3279: note = source = /note="Description of Artificial Sequence: Synthetic coding sequence"
  source 1..3279: mol_type = other DNA
atggccggggcggcaggtctgaccgccgaagtctcatggaaagtgcttgagcgtagggcaagaacgaagagatcgggcagcgtgtacgaacccctcaagagcatcaatctccctaggcctgacaacgaaaccttgtgggataaactcgatcactactacaggatcgtgaagtccaccctgctgctttaccaaagccctaccacgggattgtttcccaccaaaacctgtggtggtgaccaaaaagcaaagatacaggattccctttactgtgcagcaggagcctgggccctggccctggcttataggagaattgacgacgataagggcagaactcatgaactcgaacattcggcaatcaagtgtatgaggggcatactgtactgttacatgagacaagccgataaggttcaacagtttaagcaggatcctcgcccgacgacctgcctccattccgtgtttaacgttcacactggagatgagcttctttcttacgaggaatacggacatctgcaaatcaacgccgtgtccctttaccttctctacctggtggaaatgatctcgtcaggacttcagataatctacaacactgacgaagtgtccttcatccagaatcttgtcttttgtgtcgaacgcgtgtacagggtgccggatttcggagtgtgggaacggggatccaagtacaacaatggtagcactgaactgcactcatcgtcagtgggtcttgccaaggcagccctcgaggcaattaacggtttcaatctttttggtaaccaaggttgctcctggtcagtgatattcgtcgatttggatgcacataaccgtaaccgccaaaccctttgttctcttctgccaagagaatcccgctcccacaataccgatgcagctctccttccatgtatttcctacccggcgtttgcacttgacgatgaggtgctgttttcccagactctggacaaagttgtcaggaagttgaaaggaaagtacgggttcaagcgcttcttgagggatggttaccgtacctcgctggaggacccaaatcgatgctactacaagccagcggagattaaactgtttgatggcatagaatgtgagttccccattttctttttgtacatgatgatcgacggtgtgtttaggggtaatcctaaacaggtccaagaataccaagatctgctgacccccgtgctccatcataccacggaaggctaccctgtcgtcccaaagtactactacgtccctgccgattttgtggagtacgagaagaataatcctgggtcgcaaaagcggttcccaagcaattgcggaagagacggaaaactgtttttgtgggggcaggcactgtacatcattgcaaaacttctggccgacgaattgatttcgcctaaggatatcgatccagtgcaacgatacgtgcctctgaaagatcagagaaacgtgagcatgaggtttagcaatcaaggacctcttgaaaatgacctcgtcgtgcatgtcgcattgatcgcagagtcacaaagactccaggtttttctgaatacgtatggtatacagactcagacgccccagcaagtggagcccattcaaatatggccacaacaagaattggtgaaggcgtatctgcaacttgggattaacgaaaaactgggtttgtcaggtcgtcctgacagaccaattgggtgtctcggaacctcgaagatatacagaatcctgggtaagacggtggtgtgttaccctatcatttttgacctgtcagatttctacatgtcccaggacgtgttccttcttatcgacgatatcaagaatgcccttcaattcatcaaacaatactggaagatgcacggacggccgctctttttggtgcttattcgagaggataacattcgaggttcacgttttaacccgatactggatatgctcgcagcacttaagaagggaatcattggcggtgtgaaagtgcatgtggatcgcctccaaaccctgatttcgggagcagtcgttgaacaactcgattttcttagaatttcagataccgaagaactgcccgagtttaagagctttgaggaactggaaccacctaagcattcgaaggtcaaacggcaatcgtcgactccatcggcccccgaactcggacaacagccagatgtgaacatttcggaatggaaggataagccgacccacgagatactgcagaaactcaacgattgctcgtgtcttgcatcccaagccatactccttgggatcctgctgaaacgtgaaggacctaactttatcacgaaggaagggactgtgtctgaccatatagaaagagtttaccgcagagcaggatcgcagaagctctggcttgcggtgagatacggtgctgcgttcacccaaaagttctcttcatcgatcgctcctcacatcactacctttctggtgcatggaaagcaggtgaccctgggtgcatttggccatgaagaggaagtcattagcaatcctctctcgccgcgtgtcatccagaatatcatctattacaagtgcaacactcatgacgaacgcgaagcagttattcaacaagaactcgtgatacatattggttggataatctccaataacccggaactgttttccggcatgcttaagattcgcatcggctggatcatacacgcaatggagtacgagcttcagatacggggaggcgacaagccagctctggatctgtaccaactctcaccttcagaagtgaagcaacttctcctcgacattctgcaaccacaacaaaacggcaggtgttggctcaaccgcagacaaattgatggctccctcaacagaacccctactgggttttacgatagagtgtggcagattctcgaacgcactccaaacggaatcattgtcgcaggcaagcaccttccacagcaaccgactttgtccgatatgaccatgtacgagatgaacttttccttgctcgtcgaggacacgctggggaatattgatcagccacagtaccgccagatagtggtcgagctgctgatggtggtgtccatcgtgcttgaaagaaaccccgaactggagtttcaagataaagtcgacctggatcggcttgtcaaggaagcattcaacgagtttcagaaagatcagtcgagactgaaggaaattgaaaagcaggacgacatgactagcttctacaacacccctcccctcgggaagagagggacttgtagctacctgactaaggccgtgatgaaccttcttcttgaaggagaggtgaagcctaacaacgatgatccttgcctgatcagc

SEQ ID NO: 18196 - DNA, 3279 bp, synthetic construct
  misc_feature 1..3279: note = source = /note="Description of Artificial Sequence: Synthetic coding sequence"
  source 1..3279: mol_type = other DNA
atggcaggtgcagcgggccttacggcagaagtgtcgtggaaagtgctggagcgccgggctcgcacgaagcggtcaggctcggtgtacgaaccgttgaagtccatcaatctgccgcggcctgacaacgaaaccctctgggataagctggaccactactaccgcatcgtcaagtcgaccctgctgctgtaccaatccccgaccaccggcttgtttccgactaagacctgcggaggagatcagaaagcaaaaatccaggacagcttgtactgcgcagccggtgcttgggctctcgcgctcgcgtaccgccgcattgatgacgacaagggccgcacgcacgaactcgaacacagcgccatcaagtgtatgcgcggaatcctctattgctacatgcggcaggctgacaaggtgcagcagtttaagcaggatcctcggccgaccacttgcctgcatagcgtgtttaatgtgcacactggggacgaactgcttagttacgaggagtacggacatttgcagatcaatgcagtctccctctacctcctgtatctggtggagatgatttctagcggactgcagatcatctacaatactgacgaagtgtccttcatccaaaacctggtgttctgcgtggaaagagtgtacagggtgccggacttcggagtgtgggaacgtggctcaaagtacaacaacggatcaaccgagcttcacagctcttcggtgggactggccaaagcggcgctcgaggcgatcaacggtttcaacctcttcggcaatcagggatgttcatggtcagtcatcttcgtggacctcgacgcccataaccgcaatcgacagaccctgtgctccctcctgccgcgtgagagtcggtcacacaacactgatgctgcgcttctgccctgcatcagctaccctgcgtttgccctggatgacgaggtcttgttctcacaaactctcgataaggttgtgcgcaaactcaaggggaagtacggcttcaagagattccttcgggatggataccgcacgtcccttgaggatcctaatcggtgttactacaagccggcagagattaagctcttcgacggaatcgagtgcgagttcccaatcttcttcctgtacatgatgatcgatggagtgttccggggaaacccgaagcaagttcaagagtaccaagatctgctgactccggtgctgcaccataccactgaaggatacccggtcgtcccgaagtactactacgtgcctgcagacttcgtagaatacgaaaagaataaccctggatcccagaagcgcttcccttcaaactgcggaagagacggaaagctgtttctgtgggggcaggccctgtacattatcgccaaactgctggctgacgaacttatctctcccaaagatatcgatccggtccagcggtatgtgcctctgaaggaccagaggaacgtcagcatgcggttttctaaccagggtcccctggaaaatgacctcgtggttcacgtggcgctgatcgccgaatcgcaaagactccaggtgttcctcaatacttatggaatccaaacccagactccgcagcaggtcgagcccatccagatttggccacaacaggaactggtgaaggcctacctccagctgggaatcaatgagaagctgggtctgagtggcaggcctgacaggcccataggttgcctgggcacttccaagatctaccggatcctcggcaaaaccgtggtctgctacccgatcattttcgatctctcggacttttacatgtcccaggacgtctttctgctgatcgacgatatcaaaaacgccctccagttcatcaagcaatactggaagatgcacggcagaccactcttcttggtgctgatcagagaggacaacatccgagggagcagatttaacccaatcctcgacatgctggccgcgctcaaaaagggaatcatcggtggcgtcaaggtgcacgtcgaccgcctgcaaacccttatctcgggagcggtggtggaacagctggatttcctgcgcatctccgacacggaggagctgccggagtttaagtcattcgaagagctggaaccgccgaagcattcgaaggtcaagcgacagagctcgaccccttctgctcccgagctggggcaacaacctgacgtgaacatttccgaatggaaggataagccgactcatgagatcctgcaaaaactgaatgactgttcatgcctggcctcgcaggcaatcctgctggggattctgcttaagagagagggaccgaacttcattaccaaagagggtaccgtttctgaccacattgagcgcgtgtatcgacgggcggggtcccagaagttgtggttggcagtccgctacggtgcggcctttacccagaaattcagctctagcatcgctccacatatcaccacgttcctggttcatggaaaacaagtgactctgggcgccttcggccacgaggaagaggtgatctccaaccccctgtccccgcgggtcatacagaacattatctactacaagtgcaacactcacgacgaacgcgaagcggtgattcagcaagagttggtcatccacatcggatggatcatttccaacaacccggaacttttttcgggaatgctcaaaatccgcatcggctggatcatccacgccatggagtacgaactccagatcagagggggagataagccggctctggatctgtatcaattgtccccgagcgaagtgaagcaacttttgctcgacatcctgcaacctcaacagaatggccggtgctggctgaaccgccggcaaatcgatggatcactgaatcgcactccgacgggcttttacgaccgggtctggcaaatcttggaacgcacccctaacggcatcatcgtcgcgggaaagcacctccctcagcagcctaccctttcggacatgaccatgtacgaaatgaactttagtctgcttgtcgaagataccctgggaaacattgaccaaccgcagtataggcagattgtcgtcgagctcctgatggtggtgagcatcgtgctggaaaggaatcccgagctcgaattccaagataaggtggacctcgatcgccttgtgaaagaggccttcaacgagttccaaaaagaccagagcagattgaaagaaatcgagaagcaagacgacatgacctccttttacaacactccgcctctcggaaagcgcggaacgtgctcgtacctcactaaggctgtcatgaatctgctgctggagggagaggtcaagccgaacaatgatgacccatgccttatcagc

SEQ ID NO: 18197 - DNA, 3279 bp, synthetic construct
  misc_feature 1..3279: note = source = /note="Description of Artificial Sequence: Synthetic coding sequence"
  source 1..3279: mol_type = other DNA
atggcaggtgcagccgggctgacggctgaagttagctggaaggtcctggagcgccgggcccgaaccaagcgttccggcagcgtgtacgagccactgaaatccatcaacctcccccgtcctgataacgaaactctgtgggataaacttgatcactattatagaatagtaaaatccacactgctcctgtatcagtcccctacaaccggcctctttcctacaaagacctgtgggggcgatcagaaagccaagatccaggactcactctattgcgcagccggagcctgggccttggcattagcctataggcggattgatgatgacaaagggcgtacacatgaactcgagcattcggcaatcaagtgtatgagaggcattctgtactgttacatgagacaagctgacaaagtgcagcaattcaagcaagaccctcgaccaacaacctgtttgcacagtgttttcaacgtgcacactggagacgaactgctctcttacgaggagtatgggcacctacagattaacgcagtctctctgtacctcctgtacttggtggaaatgattagttctgggctccaaatcatctataacaccgatgaggtctcattcattcagaaccttgtcttctgcgtcgaaagggtctacagagtgcctgattttggggtgtgggaacgcggatccaaatacaacaacggctcaaccgagctccactcaagctctgtgggattggccaaagccgctctagaagccattaacggtttcaacctgtttggtaatcagggatgttcttggtcagtgatatttgtagacttagatgcccataatcggaatagacagactctgtgttcattactgccccgagaaagtaggagccataatacggatgctgcactactaccttgcatctcctaccccgcatttgctttggatgacgaggtcttgttttcccaaacgttggacaaggttgtacgtaagctgaagggcaagtacggttttaaacgatttctgagggatggatacagaacctccttggaggaccccaacaggtgttattacaaaccggctgaaatcaagctgttcgacggaattgaatgcgaattcccaatcttttttctgtacatgatgatcgatggcgtcttccgcggcaatccaaagcaggtgcaggagtatcaagacctcctcacccctgtactacatcatacaaccgaagggtatcctgtggttccgaaatattactacgtacctgctgattttgtcgagtacgagaagaacaaccccggctcacagaaacggtttccaagcaattgtggaagagatgggaagctgtttctgtggggtcaagcactgtatatcatcgccaagctgttggctgatgagctgatcagcccgaaagatatcgaccctgtccagagatatgtccctcttaaggatcaaagaaacgtatctatgaggtttagcaatcagggcccactggaaaacgacttggtggtgcatgtggctcttatcgcggagtctcagaggttacaggtgttccttaatacatacggaatacagactcagacaccccagcaggtggagcccattcagatctggcctcaacaggaactcgtgaaggcatacctccagctgggcatcaacgaaaaattaggattgtccggcagacccgaccgacctatcggttgtttgggcactagtaaaatttaccgtatacttgggaaaaccgtagtgtgttacccaattatctttgacctgagcgacttctacatgagtcaagacgtttttctgctgatcgatgatataaagaacgcactccagtttataaagcagtattggaagatgcacggtagacctctgtttctggtgttaatccgcgaagacaacattagagggtccagattcaacccaatactcgacatgctcgcagctctgaagaagggaataatcggaggggtcaaagttcacgtggacagactacaaacactgatctccggcgccgtagtggaacagctcgacttcctgaggatttctgacactgaagaactcccagagttcaagtctttcgaagaactggaaccaccgaaacactccaaagtgaaaagacagtccagtacgcccagtgcgccagaacttggccagcaaccagatgtgaacattagcgagtggaaggacaaaccaacccatgaaattcttcagaagctaaacgattgttcctgcttggcctcccaggccattctcctcggtatcctcctgaagagggagggcccgaattttataacaaaggaggggacagtctctgaccacatagagagagtgtaccggcgggctggatcgcagaagctctggctggccgttcggtacggagccgcgtttacacagaaattttcttcatctattgccccccacatcaccacatttctggtacatgggaaacaagtgaccttgggggccttcggacatgaagaggaggttatcagcaaccccctgagtccccgagtgattcagaacatcatctactataagtgtaatacgcacgacgaaagggaagccgtcatccagcaagaactcgttatacacattggatggattatttcaaacaatcctgagctgttttccggaatgctgaagatccgaatcggctggataatccacgcaatggaatacgaactgcaaatcagaggaggtgataagcctgccttggatctgtatcagctttccccatcagaggtcaagcagcttcttctagacatattgcagccacaacagaatggtcgatgctggctcaacaggcgacagatcgatggaagtcttaaccgaaccccaacaggattctacgaccgagtgtggcagatcctggagagaacacctaatggcattatcgtggccggcaagcacctgccacagcagcctactctgtcggacatgacaatgtatgagatgaacttcagcctgttagtggaagacactttaggaaacatcgaccagcctcagtatcggcagatcgtggtcgaactgctcatggtggtgtcaatagtgctggaaaggaaccccgagttagaatttcaggataaggttgacctggatcgattggtgaaagaggcatttaatgagtttcaaaaagaccagagccgtctgaaggaaattgaaaagcaggacgacatgaccagcttttataacactccgcctctcggtaagcgagggacctgcagttacctcacaaaggccgtgatgaatcttctgctcgagggcgaggtgaaacctaataacgatgatccatgtcttatctca

SEQ ID NO: 18198 - DNA, 3279 bp, synthetic construct
  misc_feature 1..3279: note = source = /note="Description of Artificial Sequence: Synthetic coding sequence"
  source 1..3279: mol_type = other DNA
atggccggcgcggcaggcttaactgcggaggtgtcatggaaggtgctcgagaggagggcaagaacaaaaaggtctggtagcgtatacgagccactgaagagcatcaatctcccaaggccagacaacgaaacactgtgggataaacttgaccactactaccgcatcgtaaaaagcaccctgttgttatatcagagccccaccaccggcctatttcccactaagacttgtggcggagaccagaaggctaaaattcaggacagtctgtactgcgcagctggcgcatgggcgctggcccttgcttatagaaggattgacgatgataaaggccggacccatgagctggaacatagcgccatcaaatgtatgagaggcatactctattgttacatgcgtcaggcagacaaggtccagcagttcaagcaggacccacgccccactacctgtctccactcagtgttcaatgtgcacacgggtgatgaactcttgtcctacgaggagtacgggcatctgcaaatcaacgccgtctctctctatctcctgtacctggtggagatgatctccagcgggctccagatcatttacaatactgacgaggtgtcattcatccagaatctcgtcttctgcgtggaacgcgtttacagggtgccagactttggagtctgggagcgcggtagtaaatataacaatggttccaccgagctgcactctagctcagtaggacttgccaaggcggccctggaggccatcaacggatttaacctgtttgggaaccaggggtgcagctggtccgtgatatttgtggacctggacgctcacaatcgcaatagacaaaccctatgttctcttcttccccgggagtctcgctcacacaacactgacgcggcactgttgccatgcatcagctaccctgcctttgccctcgatgatgaggtgctgttctcccaaactctggacaaggtcgtaagaaaactgaagggaaagtatggttttaagcggtttcttcgcgacgggtacagaaccagtctcgaggacccgaatcgatgttactacaaacccgcagaaataaaattgttcgatgggatcgaatgtgagtttccaatatttttcctctatatgatgattgacggggtattccggggcaatcccaagcaggtccaggaataccaggatcttctcacacctgtgctgcaccatacaacagagggatatcctgtggtacctaagtattactacgtgccagcggatttcgtagaatacgagaagaataaccccggcagccaaaagcgctttccatccaattgcggacgggatggtaaactcttcctctgggggcaggccctctacattatcgctaagttacttgccgacgagctgatcagcccaaaggacattgaccctgtccagagatatgtgccgcttaaagaccagaggaacgtatccatgcgtttttcaaatcaggggccacttgaaaacgacctcgtggtgcacgtagcattgatcgccgagagtcaacgactccaggtattcctcaacacctatgggattcagacacagacaccacagcaggtggagcctatacagatctggccacaacaggagctggtgaaagcttatctgcagctcggcatcaatgaaaagcttggattgtcgggacggccggacaggcctataggctgcctcggcacaagtaaaatctatcgaattctgggcaaaacggtcgtgtgctacccgataatcttcgatcttagtgatttctatatgagccaggatgtatttctgctgatcgacgacatcaagaatgctctccaattcataaagcaatattggaagatgcatggcaggcctttgttcttagtcctgatacgtgaagataatatccgagggagccggttcaaccctatcttagacatgctagctgcattgaagaaaggaatcatagggggggtcaaagtacacgtggatcggctacagactctcatttctggggccgtcgtcgagcagttagatttccttcgcatctcggacaccgaagagctacctgagttcaagagttttgaggagttagagccgcctaagcacagtaaggtgaaaagacagtcgtctacacccagtgcgcctgaacttggtcagcaacctgacgtgaatatcagcgagtggaaggacaaacctacccacgaaattctgcagaaactgaatgattgctcctgcttggcctcacaggccatcctcctcggcattctgctaaaacgggaaggacctaattttataacaaaagaaggaaccgtgtcggaccacatagagagagtttatcggcgggcaggctcacagaaactgtggctcgccgtgaggtatggcgctgcctttactcagaaattctcatcctctattgctccacatataactacttttcttgtccacgggaagcaggttactctcggcgcattcggacacgaagaagaagtcatttcaaaccccctgagcccacgcgtgatccagaacataatttactataagtgcaatacccacgacgagagagaagccgttatccaacaggagctggttatccacatcggttggataataagcaataatcctgagctgttctcgggaatgctgaaaattcgcattggttggataattcatgccatggagtatgaactccaaatcagaggtggcgataagccagcgctggacctgtaccagctctctcctagcgaggtcaaacagcttctactggatattctacagccacaacagaatggaaggtgttggcttaatcgaaggcagatagatggcagcttaaatcggactcctacaggcttctacgacagagtgtggcagatactagagagaaccccaaacgggataatcgtcgctgggaaacatcttcctcaacagccgactctgtccgatatgactatgtacgaaatgaacttcagtctgctagttgaagacaccctgggcaatatcgatcagccccagtatcggcagatcgtcgtggaactactcatggtcgtgagtatagtgctggagaggaaccctgagcttgagtttcaggacaaggtggatctggaccgtctagtcaaggaggcttttaacgaatttcagaaagaccagtctcgtctgaaagaaatcgagaaacaggacgacatgacctcattctataatactccacccctcggtaagcgcggaacctgttcttatttgacaaaagcggtgatgaacctgcttctagagggagaggtgaagcctaataatgatgacccgtgtttgattagt

SEQ ID NO: 18199 - DNA, 3279 bp, synthetic construct
  misc_feature 1..3279: note = source = /note="Description of Artificial Sequence: Synthetic coding sequence"
  source 1..3279: mol_type = other DNA
atggccggagcagccggtctgaccgcagaggtgtcatggaaagtgctggagcggcgagccagaactaagcgcagcggatcggtgtatgagccgcttaagtccatcaacctcccgcggccggacaatgagacgctgtgggataaacttgaccattactataggatcgttaagtctaccctccttctgtaccaatctcctaccactgggctgttcccgaccaagacctgtggcggtgatcagaaggccaaaatccaggacagcttgtactgcgcagcaggagcgtgggccctcgccctcgcctaccgcaggatcgatgatgacaagggaagaacccacgaattggaacattcagccatcaaatgtatgcggggaatcctgtactgctacatgcgccaggccgataaagtccaacagttcaagcaagacccgcgacctactacctgtctgcactccgtctttaacgtccacactggcgatgagttgctgagctacgaagaatacggacatctgcagattaatgccgtttcgctgtaccttttgtacctcgtggagatgatctcaagcggactccaaatcatctacaatacggacgaggtttcgttcatccaaaaccttgtgttctgcgtggagcgggtgtaccgggtgccggattttggcgtgtgggagcgcggctccaagtacaataatggaagcacggagctgcactcatcctcggtcgggctggctaaggccgccctggaggcgatcaatgggtttaacctgttcggtaaccagggatgctcatggtcggttatctttgtcgacctggacgcgcacaacagaaataggcagaccctgtgcagcttgctcccgagggaatctcgcagccacaacaccgacgcggcactcttgccatgcatctcgtacccggcgttcgctctcgatgacgaggtcctttttagccaaactctcgacaaggtggtgcggaagctcaaaggaaagtacggtttcaagagattcctccgggacggataccgcaccagcctggaggacccgaaccgttgttactacaaacccgctgaaatcaagctgtttgatggcatcgagtgcgagttcccaattttcttcctgtatatgatgatcgacggagtgtttaggggaaatccgaagcaagtgcaggaataccaagacctgctgactccggtgctccatcacaccaccgaaggttacccggtggtcccaaagtactactacgtcccggctgatttcgtggagtatgagaaaaacaacccgggaagccagaagcgctttccttccaactgtggaagggacggaaagctgtttctgtggggccaggctctgtacatcattgctaaactgcttgcggatgaattgatctcaccgaaggacatcgacccggtgcagcggtacgtgcctttgaaggaccagcggaatgtgtcgatgcgattctcgaaccaggggccactggagaacgatctggtggtccacgtggccttgatcgccgaaagccaacggctgcaagttttcctgaatacttacggtatccagacccaaacccctcaacaggtcgaaccgattcagatctggcctcaacaagaattggttaaagcctaccttcaactcggaatcaatgagaaactcggcctttcaggacggccggaccggccaattggctgcctgggtaccagcaagatctaccgaattctgggaaagactgtggtgtgctacccgatcatcttcgacctgtcggatttctacatgtcccaagacgtgttcctcctgatcgatgacatcaaaaatgcgttgcagttcattaagcagtactggaagatgcatggtaggccgctttttctcgtcctgattcgagaagataacattaggggctcgagattcaacccgatcctggacatgctcgctgcactcaagaagggaatcattgggggagtcaaggtgcacgtcgacagacttcaaactctgatctccggagccgtggtggagcagctcgacttcctccgcatttccgatactgaagaattgccggagttcaaatccttcgaagagttggaaccaccaaaacattcgaaggtgaaacgacagtcgtcgactccgagcgcgccggaactcggccagcaaccggacgtgaacatcagtgagtggaaggacaagcctacccacgaaatcctccagaagctcaacgactgcagctgcctggccagccaggctatcctccttggaattcttcttaaacgcgaaggaccgaatttcatcacgaaggaaggaaccgtgtcagatcacatcgaacgggtgtatcgccgcgctggatcccaaaagttgtggctcgcagtgcgctacggtgcagcgtttacccagaagttcagctcctcaatcgccccgcatatcaccaccttcttggtccatggaaagcaggtgactctgggagcatttggacacgaagaagaggtcattagcaacccgctgtctccacgcgtcatccagaatatcatctactataagtgcaatactcacgacgaacgggaggcagtcattcagcaagagttggtgattcacatcggatggattatctctaacaatccggaactgttctctggcatgctgaaaatccgcatcgggtggatcatccatgccatggagtacgagttgcaaattcgcggcggggataaaccggcactggacctgtaccaactgtcgccgtccgaagtcaagcaactgctcttggacatcttgcagccgcaacaaaacggacgctgctggctgaataggcgccaaatcgatggaagcctcaacagaaccccaactggattctacgaccgcgtgtggcaaatcctggagagaactcctaatggaatcatcgtggcaggaaaacacctcccccaacagccaactctgagcgacatgaccatgtacgaaatgaatttctcgctcctggtcgaagataccctcggaaacatcgaccagccacaataccggcagatagtcgtggagttgctgatggtcgtgtcaatcgtgctggaacgcaacccagaactggagtttcaggacaaggtggacctggatcgcctcgtaaaagaagcgttcaatgagttccaaaaggatcagtcccggctcaaagaaatcgagaaacaagacgacatgacgtcattttacaacactcccccactgggcaaaagaggcacttgctcttatctgactaaggctgtgatgaacctcctgctggaaggcgaagtgaagcctaataacgacgatccctgcctgatcagc

SEQ ID NO: 18200 - DNA, 3279 bp, synthetic construct
  misc_feature 1..3279: note = source = /note="Description of Artificial Sequence: Synthetic coding sequence"
  source 1..3279: mol_type = other DNA
atggcaggcgctgcgggcctcactgccgaagtgagctggaaggtgctagagaggagagccaggacgaaaagatctggctccgtttacgagccccttaaaagtattaacctgccacgaccagacaacgagactttatgggacaagctggaccactactacagaatagtgaaaagcacgctgctgttgtatcagtcccccaccacgggcttgttcccaaccaaaacttgcgggggtgaccagaaggctaaaattcaagacagcctgtattgcgctgccggcgcatgggctttggccctggcctacagacgcatcgacgatgataaaggcagaacccacgagttagagcattctgccatcaaatgcatgaggggcattctgtactgttatatgcgacaggccgataaagttcaacaatttaaacaggatccgcgacctaccacctgtctccactccgtgtttaacgtccatacaggggacgagcttctttcatacgaggagtacgggcacctgcaaatcaatgccgtatcactatacttgttgtatcttgttgagatgatttcttccggtcttcagattatttataatactgatgaggtcagtttcatccagaatctggttttttgtgttgaaagagtgtatagggtgccagactttggtgtttgggagcgaggtagcaaatataataacggcagtactgaattgcattcttccagcgtcggcctcgctaaggcagctctggaagccattaatggctttaacctcttcgggaaccagggctgtagctggtcagtgatattcgttgacctagacgcgcacaaccgcaaccgtcaaacactttgctctttgttgccgcgagaatcacgctctcataacacggacgcagcgcttcttccttgtatcagctaccctgcattcgcactcgacgatgaggttttgttctcccagacactggataaggtggtgagaaagctgaaaggcaagtacggttttaaaagattcctgcgtgacggatataggaccagccttgaggatccgaatcgatgctattacaagcctgccgagatcaagctttttgacggtatcgaatgtgagttccctatcttcttcctttatatgatgatcgatggggtgtttcgaggtaaccccaagcaagtccaggagtaccaggatctgctgacgcctgtgctacaccatacaactgagggataccccgtggtccccaaatactattacgtgccagccgactttgtcgagtatgaaaaaaataaccccggttcccagaagaggttcccatcgaattgcggtagagacgggaaactgttcctgtgggggcaggcactctacataatcgcaaaactactggcagatgaattaatcagtcccaaagatatcgaccctgttcaaagatatgtgcctctcaaggaccagagaaatgtgtccatgcgcttctcgaaccaggggccattggaaaacgacctggtagtacatgtcgcattgatcgcggagtcccagcgactgcaagtcttcctgaatacatatgggatccagactcaaactccacagcaagtggaaccgatccagatatggccacagcaggaacttgttaaagcctatctgcagcttggcattaacgagaaactcggcctgtctggacgccccgatcgacccattgggtgcctgggtacctccaagatataccggatactgggaaagactgtggtgtgttatcctattatattcgatttgtccgacttctatatgtcacaggacgtgtttctccttatcgatgacataaagaatgccttgcagtttatcaagcagtattggaagatgcacggcaggccgctgttcctcgtgctgatcagggaagacaatatccgtggcagccgatttaatccaatcctggacatgctggcagcattaaagaagggaatcataggaggggtgaaagtacacgtcgaccgtctccagactctgatatccggcgctgtagtagagcaacttgactttttaagaatttccgatacggaagaattgcccgagttcaaatccttcgaggagctggaaccgcccaagcatagcaaagtgaagcgccagtctagtacaccatcagcgcccgagctggggcagcagcctgacgtcaacatcagcgaatggaaagacaaacccactcacgagatcttgcagaagctaaatgactgctcatgtctagcctctcaggcaatcctcctggggatacttctgaagagagagggcccaaactttattaccaaggaaggaactgtgagcgaccacattgagagggtctatagacgggccggctcccaaaaattgtggctggctgtgagatacggggccgcgttcacacagaagttctcctctagcatcgccccacatatcacaacctttcttgttcatgggaagcaggtgaccctgggggccttcggccacgaagaagaagtgatttccaacccgcttagcccgagggtcattcagaatatcatctactacaagtgtaatactcatgatgaaagggaggccgtgatacaacaggaactggttatccacattggctggatcataagcaataatcccgagcttttttccggtatgctcaaaatccgcattggatggatcatccatgctatggagtacgaacttcaaattcgaggcggagacaagcccgctctggacctgtaccaactgtcgccttcagaggtcaagcagctgctgctcgatattctgcagccacagcaaaacggtcgttgttggctaaacaggcgtcagattgacgggtcccttaacagaaccccaaccggcttctatgaccgcgtttggcagattttagaacgtaccccaaacggaattatagtggccgggaagcacctgccacaacagcccacactgtccgacatgactatgtacgaaatgaatttctccctactggtggaggacaccttgggcaacatcgatcaacctcagtaccgccagatcgtggttgaactccttatggtggtatcaatcgtgctggagaggaatcccgaactggaattccaggataaggtggacctggacagactcgttaaagaggcttttaatgagttccagaaagatcaaagcaggctgaaggaaatcgagaagcaagatgatatgacttcattctacaatacccctcctctgggcaaaaggggcacttgctcttacctaaccaaggctgttatgaatctcttgctggaaggagaagtcaagccaaacaatgacgatccctgcttgatatca

SEQ ID NO: 18201 - DNA, 3279 bp, synthetic construct
  misc_feature 1..3279: note = source = /note="Description of Artificial Sequence: Synthetic coding sequence"
  source 1..3279: mol_type = other DNA
atggccggggctgccgggcttacagctgaggtgtcctggaaggtgcttgagcgcagggcccgcacaaaaaggtccggcagtgtctacgagccccttaaatccatcaacctgcccaggccagataacgagacactgtgggacaagctcgatcattactaccgaattgtaaaatcaacattgcttctgtaccaatcacccactaccggattgttccctacaaagacttgcggaggcgaccagaaagcaaaaattcaagatagtctctactgcgcagccggcgcttgggcccttgccctggcgtatcggaggattgacgatgacaagggccggactcacgagctggagcactcagccattaaatgcatgaggggcatactgtactgctatatgagacaggctgacaaggtacagcagttcaagcaagacccccgccctaccacttgcttgcactccgtctttaacgtgcacactggcgacgagctcttgtcttatgaagagtatgggcatctccagatcaatgccgtgtccctctatctgctgtatctcgtggagatgatcagcagcgggctccagatcatatataatacggacgaagtgagctttattcaaaatctggtcttctgcgtcgaacgcgtttatcgggtacctgacttcggcgtgtgggagcggggctctaagtacaacaacggcagtaccgagcttcacagttccagtgtgggacttgccaaggccgctctggaagccatcaacggattcaacctgtttgggaatcaaggctgtagttggtctgtcatcttcgtcgaccttgatgcccataatcggaatagacagacactgtgttctttgctccctagagaatcacgatcacataacactgacgccgctctgctcccgtgcatatcctaccctgcttttgcactcgacgatgaggtgctgtttagtcaaactctggacaaagtggttcgcaaacttaaggggaagtatggcttcaagcgctttttgagggacgggtaccgaacatcattggaggacccaaatcggtgttactacaagcctgccgaaatcaaactctttgatggcatcgagtgcgaattccccatcttcttcctgtatatgatgattgacggcgtgtttcgcggaaatcctaaacaggtgcaagagtatcaagaccttctcaccccagtcctccatcacacgacggaagggtaccccgtggtacccaagtactactatgtcccagccgattttgttgagtacgagaagaacaaccctgggtctcagaagcggttcccttctaactgcggtagagatgggaagctctttctgtgggggcaggccctttatatcatagctaagctgctggccgacgagctgattagtccgaaagacattgatcctgtgcagcggtacgttccgctgaaagaccagcggaatgtctccatgaggttttccaatcaaggccccctggaaaatgacctggtggtacatgttgcacttatcgcagagagccagagactgcaggtcttcctgaacacctatggcattcagacgcaaacgcctcagcaggttgaacccattcagatctggccgcaacaggaattggtgaaggcctacctgcaactgggcattaacgaaaagctgggattgtcaggtcgcccggatagaccaatcgggtgcctgggcacttctaaaatataccggatccttggaaagaccgtggtgtgttaccccattattttcgatctttccgatttttatatgtcccaagacgtgtttctcctgattgatgatataaagaatgcgctgcaattcatcaagcagtactggaaaatgcacggtaggcccctgttcctggtgctcattagggaggacaacataagaggttcacgcttcaacccaatcctggatatgctcgccgccctcaagaagggcatcattgggggagtgaaggtgcacgtggatcgccttcagacacttatcagcggggcagttgtggaacagctcgacttcctgaggataagcgacacagaagagttgccggagtttaaaagtttcgaggaactggagcccccgaagcactctaaggtgaagagacagtcttctactcctagcgcgccagagctgggacagcagcctgacgtaaatattagcgagtggaaggataaacccactcatgagattctccagaagctcaacgactgcagttgtctggccagtcaggctatcctgctcggcatattgctgaagagggaagggcctaattttatcaccaaggaaggtacagtgagcgaccatatcgaacgggtgtacagacgggccgggtcccagaaattgtggctggccgtgagatacggcgctgccttcacccagaagttttctagttccatcgctccacacataacaacttttttggtgcacggaaagcaagtgacactgggcgcatttggacacgaggaagaggtcatttccaaccccctgtccccacgcgtgatacaaaacatcatatactacaaatgcaatacacatgatgagcgcgaggctgtgattcaacaggagctggtaatccacatagggtggatcattagcaataacccagagcttttcagtggcatgctgaagatccgaatcggatggattatacatgctatggagtacgagctccagattcggggcggagacaagcccgcgctggacctgtaccagctttctccttctgaggttaagcaactgctgcttgatattctgcaaccccagcagaatggaaggtgttggctcaaccggaggcagattgatggctctctgaatcggacgccgacaggcttctatgaccgcgtatggcagattctggagcgaacacctaacggcatcattgtcgcagggaagcacctcccccagcagccaacactgagcgacatgacgatgtatgagatgaacttcagtctgctggttgaggatactttgggaaatatagaccagccccaatatcgacagattgtggttgaactcctcatggtggtatctattgtgttggagcggaacccagaacttgagttccaagataaggtggacctggaccgactggtcaaagaggctttcaacgagttccagaaggatcagagccgccttaaggagatcgagaaacaggatgacatgacttctttctataatactcctcccctgggaaaacgaggcacatgttcctatctgactaaggccgttatgaacctgctcctggagggcgaagtcaagcccaacaatgatgacccatgcctgatcagt

SEQ ID NO: 18202 - DNA, 3279 bp, synthetic construct
  misc_feature 1..3279: note = source = /note="Description of Artificial Sequence: Synthetic coding sequence"
  source 1..3279: mol_type = other DNA
atggctggggccgcgggactcactgctgaggtatcatggaaagttctcgagcgtcgcgcgcggactaagaggagtgggtcggtctacgagccactgaagtcaatcaacctgccgaggcctgataacgaaactctctgggacaaactcgaccattactaccggatcgtgaagtcgaccctgcttctctaccagtccccgaccacgggcttgtttccgaccaagacctgtggcggcgatcaaaaagccaagattcaggactcactctactgcgcggcaggggcctgggccctggcgctcgcataccgtcgcatcgacgacgacaagggacgcactcacgagcttgaacattcggccatcaagtgcatgcggggaatcctgtactgctatatgcgacaggccgataaggtccagcaattcaagcaggacccaagaccgacgacgtgcttgcactcagtgtttaacgtccacactggagacgagttgttgtcctacgaagagtacgggcacctgcagattaatgcggtgtcactctacctgctctatcttgtggaaatgatatcgtcaggcctccagatcatctacaacaccgatgaagtgtcattcatccagaatctggtcttttgtgttgagagggtctaccgagtccccgacttcggcgtctgggaacggggatcaaagtacaataacggatcgactgaactgcactcttcatcggtgggactggcaaaggccgctctggaagctatcaacggattcaacttgttcggcaatcagggatgttcctggtcggtgatcttcgtggacctggatgcgcacaaccggaaccgccagactctgtgctcacttctcccgagggaatcccgatcgcacaacactgacgcagctctcctgccgtgtatctcgtaccctgcgttcgccttggatgacgaagtactgttctcacaaacccttgataaagtggtgcgcaagctcaagggtaagtatggtttcaaaagattcctgagggacggctaccggacgtcgctggaggatccgaatcgctgctactacaaaccggccgaaatcaagctgttcgatggtatcgagtgtgagtttccaatctttttcttgtacatgatgatcgacggcgtattcagaggaaacccgaagcaggtgcaagaataccaagacctcctgactccagtccttcatcatactacggaaggataccctgtggtgccaaagtattactacgtgcctgctgacttcgtcgaatatgaaaagaataacccaggcagccaaaagaggttcccttcgaattgcggccgcgacgggaagctgttcctctggggacaggccctttacatcattgctaaattgttggctgacgaactgatcagcccgaaggacattgacccagttcagcggtacgtccctctgaaggaccaacgcaacgtgtcgatgcgctttagtaaccaaggaccactcgaaaatgacctggtcgtccacgtggcccttatcgcggaaagccagcggctgcaggtctttcttaacacctacgggatacagactcagaccccccagcaagtggagccaattcagatctggccgcaacaagaactcgtgaaggcatacctgcaactcggcatcaacgaaaaacttggactgtccggtcggccggaccgacccatcggctgtcttggaacttccaagatttaccgaatcttgggaaaaaccgtggtgtgctacccaatcatcttcgacctgtccgatttctacatgtcccaagatgttttcctgctgatcgacgacatcaaaaacgcgttgcaattcatcaagcagtactggaagatgcatggacggcctctcttcctggtcctgatccgcgaggacaatatcaggggctcgcgcttcaacccgattctggacatgctcgcagcactgaagaagggaatcatcggaggggtgaaggtgcacgtcgatcggctgcaaactctcatcagcggtgccgttgtggagcaattggacttcctgcgcatctccgacactgaggaacttcctgaattcaaatccttcgaagaactcgagccgccgaagcatagcaaggtgaaacgacagagctccaccccctcggcaccagaactgggccagcagccggacgttaacatttccgaatggaaggacaagccgactcatgagatactgcaaaaacttaatgattgctcctgtctggccagccaggcaatactgctcgggattctgctcaagagagagggaccgaatttcatcaccaaggaaggaactgtgtctgatcatatcgaacgcgtgtaccgccgcgctggtagccagaaactctggttggcggtgcggtacggagccgcgtttactcagaagttttcttcgagcatcgccccgcacatcaccacctttctggttcacggcaaacaggtgaccttgggcgctttcggacacgaggaagaggtgatcagcaatccgttgtccccgcgcgtgatccagaacattatctactacaagtgcaatacccatgacgaaagagaagccgtgatccaacaggaattggtgattcacatcgggtggatcatctcgaacaaccccgaactgttctccggaatgttgaaaattcggattggctggatcatccacgccatggagtacgagctccaaatccggggaggggataaaccggccctggacttgtaccagctctcgccctcagaggtgaaacagctgctgctggatatcctgcagcctcaacagaacggacgctgctggctcaaccggcgccagatagatgggagtctgaatcgcacgccgaccggtttctatgatcgtgtctggcagattctcgaacgcacccccaatggcatcatcgtggcgggaaagcatttgccgcagcagccaaccctgtcggatatgactatgtacgagatgaacttctccctgctggtggaagataccctcggaaacatcgaccagccgcaataccggcaaattgtggtcgaactcttgatggtcgtgtccatcgtgctggagcggaacccagagctggaatttcaggataaggtcgatctcgatcgcctggtgaaggaggcgttcaacgaattccagaaggatcaatccagactgaaggagatcgagaagcaggacgacatgacttcgttttacaacacccctccactgggaaagcggggaacctgcagctacctcaccaaagcagtgatgaatctgctgctcgaaggagaggtgaaacctaataacgatgacccgtgcctgatctca

SEQ ID NO: 18203 - DNA, 3279 bp, synthetic construct
  misc_feature 1..3279: note = source = /note="Description of Artificial Sequence: Synthetic coding sequence"
  source 1..3279: mol_type = other DNA
atggcaggagcagctggtcttacggcagaggtttcttggaaagtgctagaaagacgtgcccgtactaaacgttctggttctgtttatgaaccacttaagtctataaacttgccaagaccagataatgaaactctatgggacaagctcgatcattactaccgtatcgtgaaatcaactcttctgctgtaccaatcaccaacaaccggactcttcccgaccaagacttgtggaggagatcagaaagcaaaaatccaggacagtctctattgtgcagctggagcatgggcactggcccttgcatatcgcagaatcgacgatgataaaggcagaacacacgagctggaacattcagctatcaaatgcatgcgagggatcttatactgttacatgagacaagccgacaaagttcaacaattcaagcaggatcctcggccgactacctgtctacattcagtgtttaatgtccatacaggggacgaacttttgagctacgaggagtatggacatctgcaaataaatgctgtctcgctttatttgctctaccttgtcgaaatgattagtagtggacttcagattatttataatacagacgaagtctctttcatccaaaatcttgtcttctgcgtagaacgagtttatagagttccagattttggggtttgggaacgaggatcaaaatataacaacggaagtacagaactccattcatcctcggttggactagctaaggcagctttggaggcaataaacggatttaatctttttggaaatcaaggatgcagctggtccgtaatttttgtggatttagatgcgcacaataggaatagacaaacattgtgctcgcttcttccaagggaatctcgctcccataatactgacgcagcactccttccatgcatatcttatccggcttttgctcttgacgatgaagtacttttttcacaaacactggataaggtggtccgtaagctaaagggaaagtacggatttaaaaggtttcttcgtgatggttaccgaacatctctcgaagaccctaaccgatgctactataaaccagctgagattaaattgttcgatggaattgagtgtgaatttcctatcttttttctttacatgatgatcgatggagtctttcgcggaaatccaaagcaagttcaggaataccaagatctactaacgccagtattgcatcatactacagagggatacccggtggtgccgaagtactattatgtaccggcggatttcgtagaatatgagaaaaataatccgggatcgcaaaaacgttttccatcgaactgtggacgagatggcaagctctttttgtggggacaagcactgtatataattgcaaaattgttagctgatgagttaatctcgccaaaagatattgacccggtacagaggtatgtgcctctgaaagatcagagaaatgtttccatgcgattcagcaatcaaggaccattggagaacgacctcgttgttcacgtagccctcatcgctgagtcacaacgattgcaagttttccttaacacctatggaatccaaacgcaaactccacagcaagtcgaaccgattcagatttggccacaacaagaacttgttaaagcgtatttgcaattgggaatcaatgaaaagctgggactatcaggacgtccagacagaccaattggttgccttggcacctcaaagatttatcgaattctcggtaaaacagtggtttgttatccaattatctttgatttgtcagatttttatatgtctcaggacgtcttccttctgattgatgatattaaaaatgccttgcagttcataaaacaatactggaaaatgcacggacgtcccctgttccttgtgttgattagagaggacaacatcaggggatcgagatttaatccaatcttagatatgttagccgcactgaaaaagggtattataggtggagtcaaagtgcatgtagaccgcttgcaaactttgatttcaggagcagtagtcgaacagctcgacttccttcgcatatctgataccgaggaattaccagaattcaaatcttttgaagaattggaacccccaaaacattcaaaagtgaaacgtcagtcgtcgaccccatcagcaccagagttaggacaacagccagatgttaatatctctgaatggaaggataaaccaacacatgaaatcctgcaaaaacttaatgattgcagttgtcttgcatcacaagctattttgttgggaatactcttgaaacgagagggaccaaattttatcactaaggaaggaacggtatcagatcatattgaaagggtttaccgtcgagctggatctcaaaagctatggctcgctgtaaggtatggcgcagcttttacgcaaaagttttcttcatctattgcgccacatattacgactttcttggtccatggaaagcaggtcactttgggagcgttcggtcacgaagaagaagttatatcgaaccctctatccccacgagtgatacagaatatcatctattataaatgtaatacccacgatgagcgtgaggccgttattcaacaggaactcgtcattcatatcggttggatcatttccaataatccagaactattctcgggtatgttgaaaattcgaataggatggattatccatgcaatggaatatgaactacagattagaggaggagataaaccggcactcgacctttatcaactctctccgtccgaagttaagcaactgcttcttgatatcctgcagccacagcagaacggaaggtgttggctcaatcggagacaaattgatggctcccttaatcgaactccaactggattttatgacagagtgtggcaaattttagaacgtactccgaatggaataatagtagccggaaaacatttgcctcagcaaccaactttgtcagatatgactatgtacgaaatgaatttttcattgcttgttgaagatacattgggaaatatcgaccaacctcaatacagacaaattgtggtagaactattaatggttgtctcaatagttttggaacgtaatcctgaactggaatttcaagacaaggtggatcttgatagacttgtaaaagaagcctttaatgaatttcaaaaggatcagtctcgcctaaaggaaatcgaaaaacaggatgatatgactagcttctacaatacacctccattgggaaaaagaggtacatgcagctaccttacgaaggcagttatgaatctcctcctagaaggagaggttaagccaaacaacgatgatccgtgtctaatttct

SEQ ID NO: 18204 - DNA, 3279 bp, synthetic construct
  misc_feature 1..3279: note = source = /note="Description of Artificial Sequence: Synthetic coding sequence"
  source 1..3279: mol_type = other DNA
atggccggggctgcgggactgaccgcagaggtaagttggaaagtcctggaacggagggccaggaccaagcgctccggatctgtctatgagcccctcaaatcaatcaatctacccagaccagataacgagactctgtgggataaactagaccactactatcggattgttaagtccacgctgctcctgtaccagtcaccgacgacagggctatttccaaccaagacgtgcgggggagaccaaaaggccaaaatccaggatagtctatactgtgctgcgggcgcctgggctctggctctcgcatataggcggattgacgatgacaaaggtaggacccacgaattggagcattctgccatcaaatgtatgcggggcatcctgtactgctatatgaggcaggccgacaaagtgcaacagttcaagcaggacccgagaccaacaacatgcctgcactcagtctttaatgtgcacactggagacgagctgttgtcttatgaggaatatggacaccttcagatcaacgccgtatctctctacctgctttatctggtcgagatgatttcttcaggtctgcagattatctataacactgacgaagtgagttttatccagaatctcgtcttctgcgtggagcgggtatatcgggtgcccgactttggcgtgtgggagcggggaagcaaatacaacaatggaagtacagagttgcacagttccagcgtaggtcttgcaaaagctgcacttgaagctattaacggcttcaatttgttcggcaaccagggatgctcatggagtgtaattttcgtggaccttgacgcgcacaaccgcaacagacagacactctgcagcctgcttccccgtgagagcagatctcacaacactgacgccgccttgctcccgtgcatatcatacccggccttcgctcttgatgatgaggttttattctcccagacgctggacaaggttgtccgtaaattaaagggcaagtatggatttaaacggttcctgagagatggctataggacctctctcgaagacccaaatcggtgctactataagccagcggagattaaactttttgatgggatcgagtgtgagttcccaatatttttcctttatatgatgattgatggggtgtttaggggaaatcctaaacaggtgcaggaataccaagatctgctcacccctgtgctgcaccacaccacagaggggtacccggtagtcccaaagtactattatgtccctgctgatttcgttgaatacgagaagaataatccgggcagtcagaaacggttccccagcaattgtggtagggatgggaagctattcctgtgggggcaggccctgtatattatcgcaaagctgcttgcagatgaattaatctctcccaaggacatcgaccccgtccagcggtacgtgcctctgaaggaccagcgaaacgtgtccatgcggtttagtaatcagggaccgctggagaatgacctggtggtgcatgtagccctcatcgccgagagtcagcggttgcaggtctttctaaatacttacggtatacagacacagacccctcagcaggttgaaccgatccaaatttggccccaacaagaactcgtcaaagcctatttacagctggggatcaatgaaaagcttggtttgtccgggcggcccgatcggcctatagggtgcctcggtacctctaaaatctaccgcatcctgggcaagaccgtggtttgttacccaataatttttgatctttctgacttctacatgagtcaggacgtgttcctgctgatagacgatattaaaaacgcactgcagttcattaagcagtattggaagatgcatggccggcctctgttcctcgtcctgataagagaagacaacatccgaggctctagattcaatcccattctggacatgctggcagcgttgaaaaagggcattatcgggggtgtgaaagtacacgtcgaccgcttacaaaccctaataagcggggccgtggttgaacaactcgatttcttgagaattagcgacactgaagaactgcctgagtttaagagtttcgaagagctcgagccacccaagcacagcaaagtgaaaaggcagtcatcaacaccttccgcccccgagcttgggcagcagcctgacgtcaacatcagtgagtggaaagataagccgacccatgaaatactgcagaagctgaacgattgttcttgtctggccagtcaggccattctcctcgggatcctgctgaaaagggaaggcccaaactttatcaccaaagaaggcaccgtctctgatcatattgagagggtttacagacgagcgggcagccagaaactttggctagcagtacgctacggagccgccttcacacagaaattcagctcatccatcgcccctcatatcaccacattcctggttcacgggaagcaagtgacgctgggagcttttgggcatgaggaagaagtgatttccaaccccctgagtccccgcgtgattcaaaatatcatttactacaagtgtaacacccacgacgagagggaagcagtgatccagcaggagctggtgatccacattggctggattatctccaataacccggaactcttctcaggaatgctgaagattaggattggctggattatccacgccatggaatacgagctccagatcagaggaggtgataaaccagctctggatctctaccagctgagtccgtccgaggtgaagcagctactgctcgatattctccagccccagcagaatgggagatgctggctcaatagacgccagattgatggcagccttaaccgtacaccaaccgggttctacgaccgcgtgtggcaaatccttgagcgcacccctaacgggatcattgtggcaggcaagcatctgcctcaacagccaaccctgagcgatatgaccatgtatgagatgaatttctccttactagtggaggataccctgggaaatatagaccagccacagtaccgccaaattgtggtggaactgctaatggtggtatctattgtcttggagcgcaaccccgagctggagttccaggataaagtcgacctagaccgcctcgttaaggaagcattcaacgaatttcagaaagatcagtctaggctcaaagagatcgagaagcaagatgatatgacgagcttctataataccccccctttgggaaaaaggggcacttgttcctacttgaccaaggcagtcatgaatctgctccttgaaggggaagtgaagcccaacaatgatgatccttgcctcatctct

SEQ ID NO: 18205 - DNA, 3279 bp, synthetic construct
  misc_feature 1..3279: note = source = /note="Description of Artificial Sequence: Synthetic coding sequence"
  source 1..3279: mol_type = other DNA
atggctggcgccgccggtttaaccgcagaagtcagttggaaagttctggaacggcgcgctcgcactaaacgatccggctctgtgtatgagccattgaagagcatcaacctgccgaggcccgacaatgagaccctctgggacaaactagatcactattaccggattgtaaagagtaccctcctgctttatcagagcccgacaactggattatttcccacaaagacctgcggtggcgatcaaaaggcaaaaatccaggactctctgtactgcgcagcgggagcttgggcactggccctcgcgtatcgccgtatagatgacgataagggaaggacgcatgagcttgagcattcagccatcaaatgtatgcgggggattctctattgctacatgcgacaggccgataaggtgcagcagttcaagcaggatcccaggcctacaacatgcctgcatagcgttttcaacgtccatactggtgatgagctcttaagctacgaagagtatggccacctgcagataaacgccgtgagtctgtatctcctctatctggttgagatgatctctagcgggctccagatcatttataacaccgatgaggtgagcttcattcagaacctcgtgttttgcgtcgaaagggtgtaccgcgtacctgactttggagtgtgggagcgtgggtctaaatataacaacggaagcacagagctccactctagcagtgtcggcctcgctaaggctgccttggaggccattaatggcttcaacttgttcggtaaccaagggtgttcttggtccgtcatattcgtggacctagatgcccacaatcgtaatcgacagaccttgtgctctctgctgcctcgggagtctagaagtcacaataccgacgccgcactgctgccgtgcattagttatcctgcttttgccctggatgacgaagtactcttttctcaaaccctcgacaaagtcgtacgcaagttgaaagggaagtacggattcaaacgctttttacgcgacggctacagaacatctctggaggatccgaaccggtgttactacaaacccgcggagatcaaactgtttgacgggattgagtgcgaatttcctattttcttcctctacatgatgattgacggcgtgtttcgcggaaatcctaagcaggttcaagagtatcaggacctgctgacccctgtgctgcaccataccacggagggctaccctgtggtacctaagtactattatgtacccgcagatttcgtcgaatacgagaagaataaccccggctctcagaaacgctttccatccaattgcggcagggacggtaagctatttctgtgggggcaggcactctacattattgccaagttgctggcagacgaactcatttcgccgaaagatatagatcccgtccagagatacgtcccgttgaaggatcaaaggaatgtatcaatgaggttcagcaatcaggggccgctggagaatgatctggtggtgcatgttgcactcatcgcagagtcacagagactgcaagtgttcctgaacacttacgggattcagacccagactccgcagcaagtagaacccattcaaatatggccccagcaagagctggtgaaagcgtatctgcagctggggatcaatgaaaaacttggactatctgggcgcccggaccgccctatcgggtgcctggggaccagtaagatctacaggattctcggtaagacagtcgtctgctaccctataatcttcgacctgagcgacttttacatgtcccaggacgtcttcctcctcatagatgacattaaaaacgctctccaattcatcaagcagtattggaagatgcacggtagacctctttttttagtgctgatcagagaggacaatatcagaggtagccgctttaaccctattctcgatatgctggctgccctgaaaaagggtatcattggaggagtgaaggttcatgtcgatcggctccagactctgatcagcggcgcagtcgtagagcagctggatttcttgcgcattagcgataccgaggagctcccagagttcaagtcattcgaggaactcgagcctccaaagcatagcaaggtgaagcgacaatcttcaaccccatcagctccggaattgggtcagcagcctgatgtcaacatatccgagtggaaggacaaacccacacatgagattctccaaaaactgaatgattgcagttgtcttgcgagccaggccattctgcttgggatcctgcttaagcgggaaggccccaatttcattaccaaggaagggactgtgagtgatcacattgaacgcgtgtatcgtcgcgccggatctcagaagttgtggttagcagtgcgttatggggccgcctttacccagaaattttcctcttcaatcgccccgcatatcacaacattccttgtgcatggcaagcaagtaactctcggcgctttcggccacgaggaagaagtgatttcaaaccccttgtctccacgcgttattcagaacatcatctactacaagtgcaatacccatgatgagagagaagccgtcatccagcaagagctggtcatacacatcgggtggatcatctctaacaatcctgaattgttcagtgggatgctgaagatcagaataggatggattattcatgcgatggagtacgagctccagatccgcgggggtgataagcctgcgctggacctgtaccagttgtccccctccgaggtgaaacagctgctccttgacattctgcagccccagcagaacggcaggtgctggttgaatcgtaggcaaatcgatggctcccttaacagaacccccaccggcttctacgaccgcgtgtggcaaattcttgagcgtacgcctaacggcattatcgtggcgggcaagcacctcccacagcaacccaccctttcagatatgacaatgtatgagatgaatttctcccttttggtagaagacacactggggaacattgaccagcctcagtatcgccagatcgtggtggaactgctcatggtggtgagtatcgtgctcgaaaggaatccagagctggaatttcaagacaaggttgatcttgaccgtcttgttaaggaagcatttaacgaatttcagaaggaccaatcgcggttgaaggagattgagaagcaggacgatatgacgagtttttataacacccccccccttggcaagcgtgggacctgctcatacctaaccaaggcggtgatgaatttgttgctcgaaggggaagtgaaaccaaacaacgacgatccttgcctaatcagt

SEQ ID NO: 18206 - DNA, 3279 bp, synthetic construct
  misc_feature 1..3279: note = source = /note="Description of Artificial Sequence: Synthetic coding sequence"
  source 1..3279: mol_type = other DNA
atggcaggagcagcggggctgactgccgaagtgtcgtggaaagtcctggaaaggcgcgcacggaccaaaaggtcgggatccgtctacgagcctctgaagtcgataaatctgcctcgcccagataatgagactttgtgggataagctcgaccattactacagaattgtgaagtccactcttctgctctaccaatcgcctactaccggtttgttcccaactaagacttgcgggggtgatcagaaggcaaagattcaggacagcctgtactgtgcagctggggcttgggcattggccctggcctacaggcgaattgacgatgataaaggtagaactcacgagcttgaacactcggcaatcaagtgcatgcgggggatcctttactgttacatgcgccaagcggataaggtgcagcagtttaagcaagatcccagacctaccacgtgtctgcattccgtgtttaacgtccataccggagatgagctgctctcctacgaagaatacggtcatctccagataaatgccgtgtcgctttaccttctgtaccttgtggaaatgataagctcgggactgcagattatctataacaccgatgaagtgtcgtttattcaaaacctggtgttttgtgtggaacgggtctatcgcgtgcccgatttcggcgtctgggagagaggttcaaaatacaacaatggaagtaccgagttgcatagctcaagcgtgggactcgcaaaggccgccctggaagccattaacggctttaacttgtttggaaatcaagggtgttcgtggtcggtcatttttgtggatttggacgcacacaatagaaatcggcaaaccctttgttcacttcttcctcgagaaagccgttcgcacaatactgacgcagccttgctgccatgtatatcatacccagcattcgcgcttgatgatgaggtcctcttctcccaaactcttgataaagtagtgcggaaattgaagggaaagtacggtttcaaacgatttcttcgggatggatacagaacgtcgctggaggatcccaacagatgttactacaagcctgcagaaatcaagctctttgatggtattgaatgcgagtttcctatcttcttcctttacatgatgattgatggcgtgtttcgaggaaaccccaagcaggtgcaggaataccaggatctgcttaccccagtgctgcatcacaccacggaagggtacccagtggtgcccaagtactattatgtgcctgccgatttcgtggagtacgaaaagaataatccaggttcgcaaaagagatttccgtccaactgtggaagagatggcaaattgtttctttggggacaggcactttacattatcgctaaacttctggcagatgaactgatctcgcctaaggatatagaccctgtccaaagatacgtccccctgaaagatcaaagaaacgtaagtatgaggttctcgaaccagggcccactcgaaaatgatttggtcgtgcatgtggctctgattgcagaaagccagcgccttcaagtctttctcaacacctatggtatacagacccagacccctcagcaggtcgaaccaattcaaatatggcctcaacaagaacttgttaaagcgtacctccagctcggcataaacgagaagctcggattgtccggcagaccagatcgaccaattggttgcctgggtacgagcaagatttacaggatcctgggtaagacggtcgtgtgctacccaatcatttttgacctcagtgacttttacatgtcccaagacgtttttctgctcattgacgacatcaagaatgcgttgcaattcatcaaacaatactggaaaatgcatggccgccccctcttcctggtcctcatacgtgaagataacatcagaggttccagattcaaccctattctggacatgctggcagcgcttaagaaaggaatcatagggggcgtgaaggtgcatgtggatcgtctgcaaactcttattagcggggcagtcgtcgaacaactcgattttcttcggatctccgatactgaagaactgccagagttcaaatccttcgaggagcttgagcctcctaagcactctaaggtgaaacgccagagctccactccgtcagcacctgaacttggacaacaacctgatgtgaacattagcgaatggaaagataagccaacccatgaaatccttcaaaagttgaacgattgcagctgccttgcatcccaagctattctcctcggcattctgctgaagagggagggtccgaactttatcactaaagaaggtacggtgtccgatcacattgagagagtgtaccggagggcagggagccaaaagctctggttggcagtacgttacggagccgcctttactcagaagttttcgtcgtcaattgcaccgcatattaccacttttcttgtgcacggtaagcaggtgaccttgggagcgtttggacatgaagaagaagttatttccaatcccctctccccacgtgtcattcaaaacatcatatactacaagtgtaacacccacgatgagcgcgaggccgtcattcaacaagagcttgtgattcatattggttggatcatctcaaacaaccctgaactttttagcggaatgctgaagatacgaatcggatggattattcatgcaatggaatatgaactgcagatcagaggtggagacaagcccgcactggatctttaccaactgtcgcctagcgaagtcaaacaactgctccttgacatcttgcagccacaacaaaatggaaggtgttggctcaatcgcagacagatcgatggatcactgaatcggaccccaactgggttttatgaccgcgtgtggcagatcctcgagaggacccctaatggaattatcgtggcagggaagcatcttccccaacaaccgacgctcagtgatatgactatgtacgaaatgaacttctctttgctggttgaggacaccctgggtaacatcgaccagccgcagtaccggcagattgtcgtggaactgttgatggtagtctcgattgtgctggagcggaaccccgagctcgaattccaagacaaggtggaccttgacaggctcgtgaaggaggccttcaacgaatttcagaaggaccagtcccgtctgaaggagattgaaaagcaagacgacatgacctcgttttacaacactccgccactgggcaaacgaggtacctgttcttacctgaccaaagcggtgatgaacctcctgctggaaggagaagtgaaacccaacaatgacgacccttgccttatcagc

SEQ ID NO: 18207 - DNA, 3279 bp, synthetic construct
  misc_feature 1..3279: note = source = /note="Description of Artificial Sequence: Synthetic coding sequence"
  source 1..3279: mol_type = other DNA
atggccggtgccgctgggctcactgcagaagtgtcgtggaaagtgcttgagcgtagagcacgaaccaaaagatcggggagcgtgtacgagccacttaagagtatcaatctgcctagacctgataacgagactctgtgggataaacttgatcactactaccggatcgtgaagtcaaccctgctcctttaccaatctccaacgactggtctgttcccgaccaagacttgtggaggggatcagaaggcaaagattcaagactcactttactgtgcagcaggagcttgggcactggcattggcctatcgacggattgatgacgataagggtcgcactcatgagctcgaacattccgcaatcaagtgtatgaggggaatcctttactgctacatgcgtcaggcagataaagtgcaacagtttaaacaagatcctcgtccaactacgtgtctgcactccgtgtttaacgtccatactggcgatgagctgctttcctacgaagaatatggccacctgcagataaatgcagtgtctttgtaccttttgtatcttgtggaaatgatctcgtcgggactgcagattatctacaacaccgacgaggtgagcttcatacaaaacctcgtgttttgtgtggaacgcgtgtatcgcgtgcctgattttggagtttgggagagaggttcaaagtacaacaacgggtcgacggaacttcactcgtcaagcgttggcctggccaaggcggccctcgaagctattaacggattcaacttgtttggtaaccaaggttgtagctggtcagtgatctttgtggatctcgatgcacataacagaaatagacagaccctttgttcacttcttcccagagaatcaagatcccataacaccgatgcagcactccttccttgcatctcctaccctgcctttgcgctggatgacgaagtccttttctcacagaccctggataaagtggtgcgcaaattgaagggcaaatatggattcaagcgattcctgcgagatggttaccgtaccagccttgaagatccaaacagatgctactacaaacccgcagaaatcaaactttttgatggaattgaatgcgaatttcccattttcttcctgtacatgatgatcgatggggtctttcgtggaaatccaaaacaggtgcaggagtaccaggaccttttgaccccagtcctgcaccacactactgaaggatacccagtggtgcccaagtactactacgtgcctgcggattttgtggagtacgagaagaataacccaggatcacagaagagattcccatccaattgtggaagagatggaaaactttttctttggggtcaggcgctgtacatcattgccaagctgctggcagatgagctgatctcaccaaaggatatagatcctgtgcaacgatacgtgcctcttaaggaccaaagaaacgtctcaatgcgcttttccaaccaagggccactcgagaacgacctggtggtgcatgtcgctctcattgctgaatcccaaagattgcaggttttcctcaatacctacggtatccaaacgcaaacccctcaacaagtggagccgatccaaatttggccgcaacaggagcttgtcaaggcgtatctgcaactcggaattaacgagaaacttggtctttcaggaaggcccgataggccgattggctgtttgggaaccagcaagatctacagaattttgggcaagaccgtggtttgttacccaattatcttcgatctgtccgatttctacatgtcccaggacgtgtttctccttatcgatgatatcaagaacgccctgcagtttatcaagcaatattggaagatgcacggccggcctcttttccttgtccttattcgagaggataacatccggggatcgaggtttaatcctatcctggatatgttggccgctcttaagaaaggaatcataggaggagtgaaggtgcatgtcgatagacttcagaccctgatctcaggcgcagtggtggaacaacttgattttcttcgtatttccgacaccgaggaactgcctgagtttaagtccttcgaggagttggagcctcctaagcatagcaaggtgaagagacaatcctcgaccccttcagccccagaactcgggcagcaacccgacgtcaacatctccgaatggaaagataagcccacccatgaaattctgcaaaaacttaacgattgcagctgcttggcatcccaggcaattctcctcgggattttgctgaaaagagaaggacctaacttcattactaaggaagggactgtgtcggatcatatagaacgcgtgtacaggagagcgggctcccaaaagctctggcttgccgtgcggtacggagcagcatttactcaaaagtttagctcgtcaattgcccctcacattacgacttttctcgtgcatggcaagcaggtgacgctgggggcctttggccatgaggaagaggtgattagcaatcctctttcgccaagagtcattcagaatatcatttactacaaatgtaacacccacgatgaacgtgaggcagttatccaacaggaactggtgatccatattggctggatcatatccaataaccctgagctcttttcgggaatgttgaagatccggattggctggattattcatgcaatggagtacgagctgcaaattaggggaggagataagcctgcgctggatctttaccaactttcgccatcagaagttaaacagctgctcctcgatatccttcagccacagcaaaatggccgatgttggcttaaccgcaggcaaattgacggttcgcttaatagaactccaaccggtttctacgacagagtatggcagattctggaaagaactcctaacgggattattgtcgctggaaaacatctgcctcaacagcctaccctgtcggatatgactatgtacgagatgaatttctccctgctggtcgaggataccctggggaatattgaccaacctcagtacagacaaatcgtggttgagcttctgatggtggtgtccatagtgctggaaagaaatcccgagctggaatttcaggataaggtggatctggaccggcttgtgaaggaggcgtttaacgaattccagaaggaccaatcccggctgaaggaaattgaaaagcaggatgatatgacttcattctacaatactccacctcttggtaagaggggaacctgttcctaccttactaaggctgtgatgaacctcctgcttgagggtgaagtcaagccgaacaacgatgatccgtgcctgatatca

SEQ ID NO: 18208 - DNA, 3279 bp, synthetic construct
  misc_feature 1..3279: note = source = /note="Description of Artificial Sequence: Synthetic coding sequence"
  source 1..3279: mol_type = other DNA
atggcaggcgccgcggggctgaccgccgaggtgtcatggaaagtcctcgagcggagagccaggactaagcgctcaggttcagtctacgaaccacttaagtccatcaacctgcccaggcccgataatgaaacgctctgggacaagctcgaccattattacagaatcgtcaaaagcaccctgctgctgtatcagtcaccaaccaccggactgttccctaccaagacctgcggtggagatcagaaagcaaagatccaagactcactgtactgcgcggctggcgcttgggccctcgccctcgcttacaggcggatcgacgatgataagggacgcacccacgaactggaacatagcgcgatcaagtgcatgcgaggaatcctgtactgctacatgcggcaagccgacaaggtgcagcagttcaaacaagacccgcgcccaaccacttgtctgcactccgtgtttaacgtgcacactggagacgagcttctcagctacgaggaatatggacatctccagatcaacgccgtgtcactgtacctgctgtacttggttgaaatgatctcctcgggcttgcaaattatctacaacactgatgaagtctcgttcatccagaatctggtgttctgcgtcgagcgcgtctaccgcgtgccagacttcggcgtgtgggagcggggctcaaagtacaataacggctcgacggaactccattcctcgtccgttgggctggcaaaggctgcactcgaggccattaacggattcaacctcttcggaaatcaaggatgctcgtggtccgtgattttcgtggacctggatgcccacaataggaaccgccagaccttgtgctcacttctgccgcgggaatcgcgctcgcacaacaccgacgcggccttgcttccgtgtatcagctaccctgcgttcgcgctggatgacgaggtgctgttttcgcaaaccctggacaaggtcgtgcgcaaactgaagggaaagtacgggttcaagcgcttcttgcgggatgggtacagaacctccctggaggacccgaaccggtgctactacaagccagcagagatcaagttgttcgacggcattgaatgcgaattccctatcttctttctgtacatgatgatcgatggcgtgttccgcggtaatcccaaacaggtgcaagaatatcaggatctcctgactccagtgctccatcatactactgaagggtacccggtcgtccctaagtactactacgtgcctgccgacttcgtggagtacgagaaaaacaatcccggtagccagaagagatttccgtcgaactgcggacgggatggaaaactcttcttgtggggacaggccctttacatcatcgcgaaactcctggcagatgaacttatctccccgaaggacattgacccggtgcaacgctacgtgccactgaaggaccaacggaatgtctccatgcgatttagcaaccagggtccgctggaaaacgacctggtcgtccacgtagcccttatagctgaaagccagcgcctgcaggtgttcctcaacacctacggcatccaaacgcagactcctcagcaagtcgagccgattcagatctggccgcaacaggaacttgtcaaagcatacttgcagctcggcattaacgagaagctgggactgtccggaaggcctgacagaccgatcggctgcctcggaacttcgaagatctaccgcatccttggaaaaactgtcgtctgttacccgatcatcttcgacctcagcgacttctacatgtcacaagacgttttcctgttgatcgacgacatcaagaacgccctgcagttcatcaagcagtactggaaaatgcacggacgcccactgttcctcgttctgatccgtgaggacaatatcagaggatcgaggttcaaccctatcctcgacatgcttgccgcccttaagaagggaatcattggaggtgtgaaggtgcatgtggatcgcttgcaaacgctgatctccggagcggtggtggaacagctggattttctgcggatctcggacactgaggaactgccggaattcaagagcttcgaggagctggaaccgcccaagcattcgaaggtgaaacgccaatcgtcaactccgtctgcgccagagctcggacagcagcctgacgtgaacatctccgaatggaaagataagccgacgcacgaaatcctgcagaagctcaacgactgtagctgcttggcgtcgcaggccatcctgttgggaatcctgctgaagcgcgaaggcccgaactttattactaaagaaggaaccgtgagcgaccacatagagagagtgtatcggagagcgggctcgcaaaagctgtggctggcggtgcggtacggggctgccttcactcagaaattttcgtccagcatcgcaccacacattaccactttcctggtgcacggcaagcaggtgaccctgggcgctttcggacacgaggaagaggtcatcagcaacccgctcagtccgagagtcattcagaatatcatctactataagtgtaacacccacgatgagcgagaagccgttatccagcaggaactcgtgatccatattggatggatcattagcaataatcccgagctcttctccggaatgctgaagatccgcatcggatggattatccatgctatggaatacgagcttcagatccgcggtggggacaagcccgcactcgacctgtaccaactgtcgccgtccgaagtgaagcaactcctgctcgatatcctgcaaccacaacagaacgggagatgctggctgaacaggagacaaatcgatggttccctgaatcggactccaaccgggttttacgatagagtgtggcagatcctggaacgtaccccaaatggcatcatcgtggcagggaagcacctcccgcagcagccaaccctgtcagatatgaccatgtacgaaatgaacttctctctgctcgtggaagatactttgggaaacatcgatcaacctcaataccggcagattgtcgtggaactcctgatggtggtcagcatcgtgctggaacggaatccggagctcgagtttcaagataaggtggaccttgatcggctcgtgaaagaggctttcaatgagtttcagaaagaccagtctcggttgaaggaaatcgaaaagcaggatgacatgacgtccttttacaatactccaccgctgggaaagcgcggtacttgttcctacctgaccaaagccgtgatgaatctgttgctcgagggagaggtcaaacccaacaacgacgacccttgcctcatctca

SEQ ID NO: 18209 - DNA, 3279 bp, synthetic construct; identical to SEQ ID NO: 18174
  misc_feature 1..3279: note = source = /note="Description of Artificial Sequence: Synthetic coding sequence"
  source 1..3279: mol_type = other DNA

SEQ ID NO: 18210 - DNA, 3279 bp, synthetic construct
  misc_feature 1..3279: note = source = /note="Description of Artificial Sequence: Synthetic coding sequence"
  source 1..3279: mol_type = other DNA
atggcgggcgccgctgggttgacggcggaggtgagctggaaagtgctcgaacgccgcgcacgcacaaagagatctggttcggtctacgagcctctgaaatccattaatctcccacgtccagacaacgaaaccctgtgggataagctggaccactactatcgcattgttaagagcactttgctgttatatcaaagccctaccacgggtcttttcccgaccaagacatgcgggggtgaccaaaaggccaagattcaagattccttgtactgcgccgccggtgcgtgggcactagcactggcctatcgtagaattgacgacgacaagggtcgcacccacgagctagagcacagcgccatcaaatgtatgagggggattttgtactgctacatgcgacaagcggataaagttcagcagttcaagcaggacccgcgtccaaccacgtgtctccattcagttttcaatgtccataccggtgatgaactgttgagttatgaggaatacgggcacctacagatcaatgcagtcagcttgtacctcttgtacctggtggagatgatcagctcaggtctgcagatcatctataacactgacgaggtgtctttcattcaaaatttggtgttctgtgttgagcgcgtgtatcgcgttcctgacttcggcgtgtgggaaagaggatccaagtataataacggcagcacagagttacattcaagcagcgtcggtttagcgaaagcggcattagaagcgatcaacggttttaacctgttcggtaatcagggctgttcatggtccgttatcttcgtggacctggatgcgcataaccgaaacagacagactctgtgtagcttactgccacgcgagtccagatctcataacaccgacgcggctttgctgccatgcattagctacccagcgtttgcgctggatgacgaggtcctgttttcccagaccctggataaagtcgtgcgtaagttgaaggggaaatatggctttaagcgttttctgcgcgatggttatcgcaccagcctggaggatcctaaccgttgttactataagcctgcggagatcaagttatttgacggtattgagtgtgaatttcctatctttttcctgtatatgatgattgatggcgtttttaggggtaatcctaaacaggtgcaagagtaccaggatttgctgaccccagttctgcaccacactacggagggctatccggtggtgccaaaatattattacgtgccagcggacttcgtagaatatgaaaagaataacccgggaagtcaaaagcgttttcctagcaattgtggtcgcgatggtaagctctttctatgggggcaggcactatacatcatagccaaattgttggcggatgaattgatttccccaaaggatattgacccggtgcagcgttatgtcccactcaaagaccagcgcaatgtgagtatgcgattcagcaatcagggtccactcgagaatgatctagtcgtccatgttgctctgattgctgaaagccagcgcctgcaggtgttcttgaacacttacggtatccagacccaaactccgcagcaagtggagcctatccagatctggccacagcaggagctggttaaggcgtacctccagctgggaatcaacgaaaagctgggcctgagcggtcgtcccgaccgcccaataggttgcctgggaacctctaagatatatcgaatactgggcaagactgtggtgtgttacccgataatcttcgacctgagcgacttttacatgtcccaagatgtgtttctgctgatcgatgacatcaagaatgctttgcagtttattaagcagtactggaagatgcacggccggcctttgtttttggtgctaatccgtgaggacaacattcgaggtagccgcttcaatccaatcctcgacatgctcgccgcactgaagaaaggaatcatcggcggagttaaggtccacgtcgatcgtctgcaaacactcattagcggcgcggtggtggaacaactggacttcctgcgcatctcagataccgaagagctgccggagtttaaatccttcgaggaactggaaccaccaaaacactcgaaggtgaagcgccagagctccacaccgagcgccccggaactcggtcaacaaccagacgttaacatttcagaatggaaggataaaccgacgcacgagattctgcagaagctgaacgactgttcctgtctggcctcccaggctatcctgctggggatcttactcaaacgcgagggaccgaacttcattacgaaagagggaactgtttcagatcacatcgagcgcgtctacagacgtgcgggcagccagaaactgtggctggccgtgcgttacggggcagccttcacccagaaatttagcagctccattgcgccacacattactacctttttagttcacggtaaacaggtgacccttggtgcttttggccacgaggaggaagtgattagcaatccactgtcccctcgcgtgatccaaaatatcatttactacaaatgcaacactcatgacgaacgggaggccgtgattcagcaagaactggtcatccacattggttggatcatttctaataatcctgaactcttttccggtatgttgaagatccgcatcggttggatcatccacgccatggaatatgagttacaaatccgcggtggtgacaaaccggctctggatctgtatcaactgagcccttctgaagtgaaacaactcctgctggatatactgcaaccgcagcaaaatggccgctgctggcttaaccgccgtcagattgacgggagcctgaatcgcacgccgacgggattctacgatcgagtgtggcaaattctggagcgcactcctaatggaattatcgtagcgggcaagcacctgccacaacagcctacgttgtctgacatgacaatgtatgagatgaacttctctcttttggtcgaggatactttaggtaacatagatcaaccacagtaccgacaaattgtggtggagcttctgatggttgtttctatcgttctggaaaggaatccagaattagaattccaggacaaggtggacctggatcgcctggttaaagaggcatttaacgagtttcaaaaggaccagagccgtctgaaggagattgaaaagcaagacgacatgacatctttctacaatactccgccattagggaagcgcggtacgtgctcatacctgactaaggccgttatgaacctgctgttagagggcgaggtaaaacctaacaatgacgacccttgtctgatcagt

SEQ ID NO: 18211 - DNA, 3279 bp, synthetic construct
  misc_feature 1..3279: note = source = /note="Description of Artificial Sequence: Synthetic coding sequence"
  source 1..3279: mol_type = other DNA
atggcaggagccgctgggctgaccgccgaggtctcatggaaagtcttggagcgccgagcccgcacaaaacggtccggctccgtctacgaaccactgaagtccatcaacctgcccaggcctgataatgaaactctatgggacaaactggatcactactacagaatagttaagtcgactctcctgctctatcagagccctaccaccgggttgttccccacaaaaacatgtgggggggatcagaaagcgaaaatacaggatagcttgtattgcgctgcgggcgcatgggccctcgccctggcctacaggcgcattgacgatgataagggtcgtacacatgagctggagcactctgccataaaatgtatgcggggaattctgtactgctacatgcggcaagcggacaaggtacaacaatttaaacaggacccccggcctactacctgtctacacagtgtctttaacgtgcatacaggagacgagcttctttcctacgaggaatatggccacttgcagattaatgctgtttccctgtatctgctgtatctggtggaaatgatcagtagtggattacagatcatctacaatactgacgaggtgagctttatacagaacctggtgttctgtgtcgagcgagtgtatcgggtgcctgatttcggcgtgtgggaacgcggcagtaaatacaacaatggatccaccgaactgcactcatcctctgtggggctcgccaaggccgctttggaagctatcaacggctttaacctttttgggaatcaggggtgctcgtggtccgtcatcttcgtcgacctggacgcacacaatcggaacaggcagacactgtgctcgctgctaccgcgggagtcgagaagccacaataccgatgcggcgctcctcccctgtatttcttacccagcctttgctctggacgatgaagtcctcttctcgcagaccctggacaaagtggtccggaaactgaagggtaagtacgggttcaaacggtttttacgcgatggctatagaactagcctggaggacccaaatcgctgttattacaaaccagctgaaatcaagctgttcgacggaatcgagtgcgaatttcccatttttttcttatacatgatgatcgacggggttttcaggggaaatccgaaacaggtccaggaataccaagaccttctgaccccggtgctgcaccatactaccgaagggtatccagtggtgccaaaatactattacgtacccgcagattttgttgagtacgagaagaataatccgggctcccagaaaagattcccatccaattgtggccgggacggaaagttgttcttgtggggtcaagcactttacattatagcaaagctcttggccgatgagctcattagccctaaagatattgaccccgtccagcgctacgtgcccctgaaggaccagagaaatgtgtcgatgcggttctccaaccagggccctctcgaaaacgacctggtcgttcacgtcgctctgatcgcggaaagccagcggctgcaggtcttccttaacacatatggaatccagacgcaaactccgcagcaagtcgaaccaatccaaatctggccacagcaggagctcgtgaaagcctacctgcagttaggtatcaatgaaaagctgggcctgagcggcaggcccgaccggcccataggctgcctgggtactagcaagatctatcgaatcctggggaagaccgttgtgtgctaccccataatattcgatttgagcgatttttatatgtcccaggatgtgttcctgctgattgatgacatcaaaaacgcactgcagtttattaaacagtattggaagatgcacggcagacccctctttttggtgctcatacgggaggacaacatcaggggctcaaggttcaatccaattctcgatatgcttgcggccctcaagaaggggattatcggtggggtgaaggtgcacgtggacagactgcagacactgatatctggcgcggttgtagagcagctggacttcctgaggatctccgacaccgaggaacttcctgagtttaaatcgttcgaggaacttgagccacctaaacactccaaggtgaaacgtcagtccagcactccatccgccccagagctaggccagcagcccgatgttaacatctctgaatggaaagataaacccacccatgagatcctccagaaattaaatgactgttcttgcctggccagccaggccatcctgctggggattctgctgaagagagagggtcccaacttcatcaccaaggaaggcaccgtctctgaccacattgagcgagtctatcgacgcgcaggctctcagaaactatggttggctgttcgttatggggccgcattcacgcagaaatttagctcgtccattgcccctcacatcaccaccttcctggtgcatggtaagcaggtcacccttggggccttcggccacgaagaggaggtgattagtaacccgttgtctcccagggttatccagaatattatctactacaaatgcaatactcacgacgagagagaagctgtgatccagcaagagctcgtgatacacattggatggattatttccaacaatcctgaactgttctctggtatgctgaaaatcaggattgggtggatcatccacgctatggagtacgagctccagatcaggggcggggataaacccgcgttagacctgtaccagctgtccccctctgaggttaaacagctactgctggatatacttcagccgcagcaaaacggacgctgctggcttaaccggcgtcagatagacgggtccctcaataggacgccgaccggattctacgaccgcgtttggcagattcttgagagaacccccaatggtattatcgtggccggcaagcatctgcctcaacagccgactctaagcgatatgaccatgtatgaaatgaatttttcccttttggtggaggacacactgggcaatatcgaccagccacagtatcgccagatagtggtggagctgctgatggtcgtttccattgtgctggagagaaaccccgagttagagttccaagacaaagtcgatcttgacaggctggtgaaggaggccttcaacgagtttcaaaaagatcagtcacggctgaaagagattgagaaacaggacgacatgacaagcttctacaatacaccaccgctgggaaaacgtggcacttgtagttatcttacgaaggctgtgatgaacctgctgctggagggtgaagtgaaacctaataatgatgacccctgcctcatcagc

SEQ ID NO: 18212 - DNA, 3279 bp, synthetic construct
  misc_feature 1..3279: note = source = /note="Description of Artificial Sequence: Synthetic coding sequence"
  source 1..3279: mol_type = other DNA
atggcaggtgctgcaggcctcactgctgaggtgtcttggaaagtgcttgagcgaagggcgcgaactaaaagatcaggcagcgtttatgaaccattaaagtctataaatctcccacgcccagacaacgagactctctgggacaagctcgaccattactacagaatcgtcaaaagcaccttgcttctgtatcagagtccaactacgggacttttcccaactaagacctgtggtggagatcaaaaggctaaaatacaggactcgttgtattgcgctgcaggtgcttgggctctggctttagcataccgcaggattgacgatgataaaggtaggactcatgagctcgaacatagtgcaataaagtgcatgcgtgggatcctctactgttacatgagacaggccgataaagttcaacagtttaagcaagatccccggcctactacttgcctccatagcgttttcaatgttcacacaggtgatgaacttctttcctatgaagaatacgggcatctccagatcaatgctgtgagcctatacctgctgtacttggttgaaatgattagtagtggacttcagattatctataatacggatgaggtttcattcattcagaacttggtgttctgtgttgaacgagtgtaccgtgtacctgattttggtgtttgggaaaggggatctaaatacaataacggttccaccgaacttcatagttccagtgtaggcctcgctaaggcagccttggaagctattaacggatttaatttgttcgggaatcaaggctgtagttggtccgtgattttcgttgacctggatgcacacaatcgaaatcgtcaaaccttgtgtagtctccttccgcgtgagtcccgttcacataacacggatgccgccctccttccttgcatcagttaccctgccttcgctttggatgacgaggtgttgttctcacaaaccctcgataaggttgttcgtaaattgaaaggcaagtatggattcaagaggttcctccgagatggttatcgaactagtctagaggatcctaatcgatgctattataagcctgcggaaattaaactcttcgatggtatcgaatgtgaattcccaatctttttcctgtatatgatgatagacggagtttttagggggaacccaaagcaagtccaagaatatcaagatttactgacgccagtgctacaccacaccactgagggttaccctgtagtccccaaatactactatgttcccgctgattttgtcgaatatgaaaaaaacaatcccggctctcagaagagatttccctccaactgtgggagagatgggaagctgttcctgtggggtcaagccctttatattatcgctaagttgcttgctgatgaacttattagccctaaagacatcgatcctgttcagcgatatgtgccactgaaggatcagaggaatgttagtatgcgattctccaatcagggacctcttgaaaacgatttagttgtccacgttgctctcattgctgagtcccaacggttgcaagttttccttaacacttatgggattcaaactcaaactcctcaacaggtggaaccaatacagatctggccacagcaggagctcgtcaaagcatatttgcaacttggaatcaatgaaaagctcggcctcagtggtcgtcctgatcgtcccattggatgtttggggacttcgaaaatctaccgcatcctaggcaaaactgttgtttgctaccccataatatttgatttgagtgatttttatatgagtcaggacgtcttcctgctcattgatgatataaaaaatgctcttcagtttattaagcaatattggaaaatgcacggtaggcctctgtttttggtattaatccgggaggacaatatcaggggtagcagattcaatcctattttagatatgctggcagctcttaaaaagggtattataggtggggttaaggttcatgttgataggctccagactttgatatctggggctgtggttgagcaattggatttcttgcggatcagcgacactgaggagcttccggagttcaagtcattcgaagagttagaacctccgaagcacagcaaggtcaaaagacagagttccacaccatccgcacctgagttgggccaacaacctgacgtcaatatctccgaatggaaggataagccaactcacgagatccttcaaaagcttaatgactgctcctgccttgcttcacaagctatcctcttgggcattctcctgaagcgtgagggccctaacttcatcacaaaggagggtaccgttagtgatcatatagagcgtgtttacagacgagctgggagtcagaaactttggcttgcggtacgatacggtgcggctttcacccagaaattttctagctctatcgccccgcatatcaccacttttcttgtgcacggcaagcaggtgacccttggagctttcggacatgaagaagaggtgatttctaacccactctcacctagggtcatacagaatattatttattacaaatgtaacacccatgatgagcgtgaagcggttatacagcaggagcttgttattcatatcggttggattatatccaataatccagaactgttttcaggaatgttaaagatacgtattggatggattattcacgccatggaatacgaattgcagattagaggcggcgataaaccagccctcgacctctatcaacttagtccatctgaggttaaacaacttcttctggatatattacaaccacaacagaacggccgttgctggcttaatcgtagacaaatcgatggtagcttgaatcgcactcccaccggtttctacgatcgtgtttggcagattcttgagaggacgccaaatgggataattgtggctggtaagcatctcccacagcagccaaccctttccgatatgacaatgtacgagatgaatttttcgttgttggtcgaagacactctgggaaacattgaccagcctcagtataggcaaattgtggtagaactattaatggtcgtgtctatagtgttagagcgtaatccagaattagaatttcaggataaagtagacttggataggctggtgaaggaggccttcaacgagttccagaaggatcaatcacgcttaaaggaaattgagaaacaagatgacatgactagcttctacaacactccccccctcggaaagagaggtacgtgttcatacttaacaaaagccgttatgaaccttctacttgaaggagaagttaagcctaataacgacgatccttgtttgatttca

SEQ ID NO: 18213 - DNA, 3279 bp, synthetic construct
  misc_feature 1..3279: note = source = /note="Description of Artificial Sequence: Synthetic coding sequence"
  source 1..3279: mol_type = other DNA
atggcaggtgccgcgggccttaccgccgaagtctcctggaaggtgcttgagcgccgagcgaggaccaagagatcaggatcggtgtacgagccgcttaaatccatcaatctgccacgcccagataacgaaactctgtgggataagctggaccattactacaggattgtaaagtcgacccttctgctgtaccaatcaccaaccactggcctgtttcccactaagacctgtggaggggaccaaaaagcgaagatccaggattccctctactgtgcagcgggtgcgtgggccttggcccttgcgtaccggcgaattgatgacgacaagggacggacccatgaactcgagcatagcgcaatcaaatgtatgagaggaatcctgtactgctacatgaggcaagccgataaggtgcagcaattcaagcaggatccacggccaaccacctgccttcactcggtgttcaacgtccatactggcgatgaacttctgtcatatgaagaatacggacatctccagataaacgccgtctccctgtacctcttgtaccttgtggagatgatatccagcggactgcaaatcatctacaacactgatgaagtgtcatttatccaaaaccttgtgttttgtgtggaacgcgtctacagagtgcctgattttggggtctgggagaggggatcaaagtacaacaacggaagcaccgagctccattccagcagcgtcggacttgcgaaggcagcccttgaagctattaacggattcaacctgttcggaaatcaggggtgttcatggtcagtgatatttgttgacttggacgcccataatagaaatagacaaaccctttgttccctccttccacgggagtcccgttcgcataacaccgacgcagcactgttgccatgtatttcgtatcctgccttcgcactggatgatgaggttcttttttcccaaactctggacaaggtggttagaaaacttaagggaaaatacggttttaagcgatttctcagagacgggtaccgcacctcgctggaggacccgaaccgctgttattacaaacctgcagagattaagctgtttgacggaattgaatgtgaatttcctattttcttcctgtacatgatgattgacggagttttcaggggaaaccccaagcaagtccaagaataccaagatctgttgacccccgtcctgcatcataccaccgagggctaccccgtggtgcctaagtactactacgtgccagcggactttgtcgaatacgagaagaataatccaggatcgcaaaaacggttcccatcgaactgcggaagagacggtaagctgtttctttggggacaagcattgtacattattgcaaaactgctcgctgatgaacttatcagcccaaaagacattgatcctgtccaaagatacgtccctctcaaggaccagagaaacgtgagcatgcggttttcgaaccaaggtccgttggaaaacgatctcgtggtccatgtggcactgattgccgaatcccaaagactgcaggtgtttctgaatacgtacggaattcaaacccagactcctcagcaagtggaacctatccagatttggccacaacaggaactcgtgaaggcatacctgcagcttgggattaacgaaaagctcggactgtcgggacggcctgataggcctattggttgtcttgggacgtcgaagatctacagaatcctcgggaaaactgtcgtctgttaccccattatcttcgatttgagcgatttctacatgagccaagatgtgtttctccttattgacgatatcaagaatgcattgcagttcattaagcaatattggaagatgcatggcaggcctctctttctggtgctcattagagaggacaacatcaggggctcgagatttaacccaatccttgatatgcttgcagcactcaagaagggaattatcggtggtgtgaaggttcacgtggacaggctgcagaccctcatatccggcgccgtggttgagcaactcgattttcttcgaatcagcgatactgaggagcttcctgagtttaagagctttgaggaacttgaaccacctaagcattccaaggtcaagcgtcaatcaagcactccgtcagcgcctgagttgggacaacagccagacgtgaacatctcggagtggaaagacaagccaacccatgaaatcctgcagaaacttaatgattgctcctgccttgcgtcccaagcgattctgctgggaattctgttgaaaagagaaggtccaaacttcattaccaaggagggaaccgtgagcgatcacatagaaagggtgtacagacgggccggatcgcagaagctgtggctggcagtgagatacggtgccgcctttactcagaagttttcgtcctccatcgcacctcacatcaccaccttcttggttcacggcaaacaagtgacccttggtgcattcgggcacgaagaagaggtgatctccaaccctctttcgccacgtgtgattcaaaacattatctactacaagtgtaacactcatgatgaaagggaggcagtgatccaacaggagctggtcatccacatcggttggatcatttcgaataatcccgaattgttttcgggaatgctcaagattcgaattgggtggataatacacgctatggaatacgagcttcagattagagggggtgataagcctgcacttgacctctaccagctttccccctcggaagtcaagcagctgctgttggatattctgcaaccccaacaaaatggcagatgttggcttaatagaaggcaaatcgatggaagccttaatcgcactcctaccgggttctacgatagggtgtggcagatcctcgaaaggacccccaacggtatcattgtggcagggaagcaccttcctcagcaaccgaccctgtcggatatgaccatgtacgaaatgaacttcagcctgttggtggaagatactctgggaaatatcgatcaacctcaatacagacagattgtggtcgagcttctcatggtggtgagcatcgtgctcgaacgcaaccctgaactggagttccaggacaaggtggatctggatcgtctcgtgaaggaggcatttaacgaatttcagaaggatcaatcccgactgaaggaaattgaaaaacaggatgatatgacgtcgttttacaataccccacctctcgggaagcgtggtacctgcagctacctcacgaaagcggtgatgaatctgcttcttgaaggtgaggttaagcctaacaacgatgatccatgccttatttcg

SEQ ID NO: 18214 - DNA, 3279 bp, synthetic construct
  misc_feature 1..3279: note = source = /note="Description of Artificial Sequence: Synthetic coding sequence"
  source 1..3279: mol_type = other DNA
atggccggcgcggccggcttaaccgccgaggtgtcctggaaagtgcttgagcggcgggctcgcaccaagcgctctggctctgtgtatgagccactaaagtccatcaacctccccagacccgataacgagactctgtgggacaagttggaccattactacagaatcgtgaagtccacccttttactctatcagagtccaacgaccggattattccccactaaaacttgcggcggtgaccaaaaggctaagatccaggattcactctattgtgctgctggggcttgggctctggctctcgcctacagacgtatcgacgacgataaaggcagaacacacgagctggagcacagtgccatcaagtgcatgcggggcattctatattgctatatgagacaggccgacaaagtccaacagttcaagcaagatcctagacccaccacttgccttcactccgtgtttaacgtgcatacaggcgatgaactgctgtcatacgaggagtacgggcacctccagattaacgccgtgtcattgtatctgttgtatctcgtggagatgatctcctctggcctgcagatcatctacaatacagacgaggttagcttcatccagaatctggtgttctgcgtcgaaagagtgtatcgcgtccctgactttggcgtatgggagagaggctctaaatataataatggttctaccgaactccactcatcttctgtgggcctagctaaggcggcgcttgaagctattaatggatttaacctgtttgggaaccaaggttgtagttggtccgtgatttttgtagatctggacgcacataacaggaacagacagacgctgtgttcgctactgccccgggaatcccgttcacataacaccgatgcagccctcttgccatgcatctcttacccagctttcgctctcgatgacgaagtactcttctcacagacattggacaaggtggtgcgcaaacttaaggggaaatacggcttcaaacgcttcctcagagatggctatcgcaccagcctagaagacccaaaccgatgttactataaaccggccgagatcaaactgttcgacggcatcgaatgtgagtttcctatcttcttcttgtacatgatgatagacggagttttccgcggcaacccgaaacaagtccaagaatatcaggacttactcactcccgttctacaccataccacagagggttacccagtcgtgccaaagtactactatgtgcctgcagacttcgtggaatatgaaaaaaataaccccgggtctcagaaacggtttccatccaattgtggccgtgatggcaaactgtttctttggggccaggcgctgtatatcattgccaagcttctggcggacgagcttatttctccaaaggacatcgatcctgttcaacgctatgtgccattaaaggatcagaggaacgtgtcgatgcgcttttccaatcagggaccgctggaaaacgacctcgtcgttcacgttgccctgatcgcagaatctcaaaggttacaggtttttctgaatacatatggcatccaaacacaaacccctcagcaggttgaacctattcaaatctggcctcagcaggagttggtgaaagcatacctacaactgggcataaacgaaaagctgggattatccggacgcccagaccgcccaatcggatgtctgggcacatctaagatttatagaatcctcggtaaaaccgtggtttgctacccaataatatttgacctctctgatttttacatgtcacaggacgtgttcctgctgatcgacgacattaaaaatgccctgcagttcattaaacagtactggaaaatgcatgggagacctctctttctggtgttaatcagggaagataatatcaggggttcacggttcaatcctatcctggacatgttggccgctctgaagaagggcatcattggaggcgtcaaggttcacgtcgaccgtctgcagacactgatctctggggctgtagtggaacaactcgattttctgcgcattagtgataccgaggagctgcctgaattcaagagctttgaggagctcgagccacccaagcactcgaaagtgaaacggcaatcatccacccccagcgcccccgagctgggccaacagcccgacgtgaatatttctgagtggaaagataaacccacacatgagatactgcagaagctgaatgactgctcttgtctggcaagccaggcaatcctgctagggatcttactgaagcgcgagggacccaacttcataaccaaagaaggcacagtgtctgaccacatcgagagggtgtaccgaagggccggcagtcagaagctttggcttgccgttagatatggcgccgcttttactcagaagttttcatcaagtatcgcccctcatatcactacgttcctggtccatggtaaacaggttacgttaggagctttcggtcatgaggaggaggtgatatccaacccgctttctccaagggtgattcagaatatcatttactataaatgcaacacacacgacgagagggaggctgtgatccagcaggagttagtgattcatatcggttggatcatttcaaacaaccccgaacttttcagcgggatgctcaaaataaggattggatggattattcacgccatggaatacgaactgcagatacgcggaggcgacaagcccgccctggatctctaccagctctctccctcagaggtcaaacagttgctcctggatattctccagccccagcagaatggcaggtgttggctgaaccggaggcagattgacgggtccctgaatcggacgcccacaggcttttacgacagggtgtggcaaattcttgaaagaactcctaatggcattatcgtcgccggaaagcacttgcctcagcagcctaccctctcagacatgactatgtacgagatgaatttcagcctcttagtggaggacaccctggggaacattgatcaacctcaataccgtcaaatcgtggtggagctgcttatggtagtgagtatagtcctagagaggaatccagaattggaattccaggacaaggtcgacctggacaggctggtgaaggaagcgtttaacgagtttcagaaggatcagtccaggctcaaggaaatagagaagcaggacgatatgacctcattctacaataccccaccactgggcaagcgaggaacctgctcatatctcacaaaggccgtgatgaatctgttactcgagggcgaggttaagccgaacaacgatgatccttgtctgatcagc

SEQ ID NO: 18215 - DNA, 3279 bp, synthetic construct
  misc_feature 1..3279: note = source = /note="Description of Artificial Sequence: Synthetic coding sequence"
  source 1..3279: mol_type = other DNA
atggcgggagccgcgggccttactgcagaagtgtcatggaaggtgcttgagagacgggcaagaaccaagcgctccggttctgtgtacgaacctctgaagagcattaacttgccaagaccagacaacgaaactctttgggataagctggatcattactaccggatagtcaagagcaccctgctgttgtaccaatccccaaccacgggcctttttcctactaaaacctgtggaggagatcaaaaagccaagattcaggattccctttactgcgcagctggtgcttgggcacttgcgctggcctaccggagaatcgacgatgataagggaagaacgcatgagttggagcactcggcaattaagtgtatgcgcggaattctgtactgctacatgcgccaggctgataaggtgcagcaattcaagcaagatccgcgcccaactacttgccttcattccgtctttaacgtgcacactggagacgaactgctgtcatacgaggagtacggtcaccttcagatcaacgcagtctcgctgtatctgctttacctggtcgagatgatctcatctggactgcaaatcatctacaacaccgacgaagtgtcgttcattcagaatcttgtgttttgtgttgagcgcgtgtatcgggtgccagactttggagtctgggagagaggtagcaaatacaacaacggatcgaccgagctgcattcctcctcggtgggacttgcgaaggcggcccttgaggcaattaacggattcaacttgtttggcaatcagggatgttcgtggtccgtgatcttcgtggatctggacgctcacaatcgaaaccgccagactctttgttcgctccttcctagggagtcgcgctcccataataccgatgcagcattgctgccatgcatctcctaccctgcctttgcactggatgatgaggtgcttttttcccagaccctggacaaggtggtgcgcaagctgaagggaaaatacggattcaagaggtttttgagagacggttacagaacctccctggaggatccaaatcggtgttactacaaaccagccgagattaaactttttgacggaattgaatgcgaatttccgatattcttcctctacatgatgattgatggggtgtttcgtggcaaccctaagcaagttcaagagtaccaagaccttctcaccccagtgctgcatcatactaccgaaggatatccagtcgtccctaagtactactacgttccagccgactttgtggaatacgagaaaaacaatcctggttcgcaaaaacgttttccttcgaattgtgggagggacggcaagctgtttctttggggccaagcgctttacataattgcaaagctgcttgcggatgaactgatttcccccaaggacattgaccctgtgcagcgatatgtgcctctcaaagatcaaagaaacgtgtccatgagattttcaaatcagggaccactggaaaacgaccttgtggtgcacgtggcactcatcgcagagtcccagcgcctgcaagtctttcttaacacctacggtattcaaacccaaacgcctcaacaggtggaacctatacaaatttggccgcaacaggagttggtgaaggcttacctgcagctgggcattaatgaaaaacttggacttagcggtaggccagatcggcccatcggctgtcttggaacctcgaaaatctaccggatacttggaaagacggtcgtctgttatcctatcattttcgatctttccgacttttacatgtcccaagatgtctttcttctcattgatgatatcaaaaacgcactccagtttatcaagcagtactggaagatgcatgggcggcctctttttctggtgctgatcagggaagataacattcgggggtcccgctttaatcctattctggatatgttggcagcacttaagaagggcattataggaggcgtgaaagtgcatgtggatcggctgcagactctgatctcgggggcagtcgtggaacagctggattttctccggattagcgataccgaagaacttcctgagttcaagtcgttcgaggagctcgaaccgccaaaacattccaaggtgaagcgccaatcgtcaaccccttccgcacctgaactggggcagcaaccagacgtgaacatttctgaatggaaagacaagcctactcatgaaatcctgcaaaagctgaacgactgctcatgtctcgcaagccaagctattctgctcggcattcttcttaaacgagaaggaccaaatttcatcaccaaggagggaaccgtctccgatcacattgaacgcgtctacagacgggccgggagccagaaactttggctggcagtgagatacggcgcggcctttactcagaagttttcatcctccatagcacctcatatcaccacttttcttgtgcatgggaagcaagtcactctgggcgcattcgggcatgaagaggaagtgatttccaatccactgtcgccaagagtgattcagaacataatctattacaaatgtaacacgcatgatgaacgcgaagcagttatacagcaggagcttgtgatccatattggttggattatctcgaataaccccgagcttttctcggggatgcttaagattaggatcggttggattattcacgctatggaatacgagcttcagatccggggtggcgacaagccagctcttgatctgtaccaactttcaccttcggaggtcaagcaacttctcctggatattctgcagccccagcagaatgggcgctgttggctcaaccgtagacaaatcgatgggtccttgaatcgaactcctactggattttacgaccgcgtgtggcaaatccttgagcgaaccccaaacgggattatcgtggctggtaagcacctgcctcagcagcccaccctctccgacatgactatgtacgaaatgaactttagcttgctggtggaagatactcttggcaacattgatcagcctcaataccgtcaaatcgtcgtcgaactcttgatggtggtgagcattgtcttggagcgaaacccagagcttgaatttcaagacaaagtggatctggatcggctggtcaaggaagcgtttaacgaatttcagaaggaccagagccggctcaaggaaatcgaaaaacaggatgacatgacctctttctacaacaccccacctttgggaaagcggggtacttgctcgtatctgaccaaggcagtcatgaatcttttgctcgaaggagaagtgaagccgaacaatgatgatccctgtcttatttcg

SEQ ID NO: 18216 - DNA, 3279 bp, synthetic construct
  misc_feature 1..3279: note = source = /note="Description of Artificial Sequence: Synthetic coding sequence"
  source 1..3279: mol_type = other DNA
atggccggggctgctgggcttacagcagaagtctcctggaaagtactagagagaagagcccgcacaaagagatctggatcagtgtatgaaccactcaaaagtataaacctgccccggcctgacaatgaaacactctgggacaaacttgatcactattacagaatcgtaaaatccactctccttttatatcagtctcctactacaggactattcccaacaaaaacttgtgggggggatcagaaagccaaaatccaagattcactctattgcgccgcaggggcttgggcccttgccctggcctatagacggatcgatgatgataaagggcggactcatgagttagagcactccgccatcaagtgtatgagggggatcctgtactgttatatgcggcaggccgataaagtgcaacagttcaaacaggatccacgcccaacaacttgcctgcactctgtgtttaatgttcatacaggagatgaacttctatcatatgaagaatacggacatctccagataaacgcagtgtcattatacctcctctacttagtggagatgatctcatccgggctacaaatcatatataacacagatgaagtgtctttcatccagaatcttgtattctgcgtggaaagggtgtatagagttccagatttcggagtgtgggaaagggggtcaaaatataataatggatctactgagctccattcctcctccgtggggctggccaaagctgccctcgaggccataaatggattcaatctttttgggaatcagggatgctcttggtctgtgattttcgtagatctggatgcccacaaccggaacagacagactctttgttccctcctgcctagagaatccagatctcacaacacagatgctgccctgctcccctgtatatcttaccccgcgtttgcactagatgatgaggtgctcttctcgcagactctagataaggtcgtgaggaaactgaaagggaaatatgggtttaaacggttccttagagacggatacagaacttcactggaggatcctaacagatgttactataaacccgctgagatcaaacttttcgacgggatagaatgcgaattcccaatcttctttctgtacatgatgatcgacggagtatttagggggaatcccaagcaggtccaggagtaccaggatctcctcactccagtgctccatcatacaactgaagggtatcctgtggtcccaaaatactattatgtgccagctgatttcgtggaatatgaaaaaaataaccccgggtcacagaaaagattcccctccaattgtgggagagatggaaaactgtttctatggggacaggctctctatatcatagccaaacttttggccgatgaacttatctcccccaaagatattgatcccgttcagaggtacgtgcccctgaaagaccagcggaacgtatctatgcgattcagtaatcagggaccacttgaaaatgaccttgtcgtgcatgtcgcattaatagcagaatctcaacgacttcaggtctttctaaacacttatgggatccagacacagactccacaacaggttgagcctatccagatctggcctcagcaggaactggtcaaagcctacctccagctcggaatcaacgaaaaactggggctgtctgggagacctgataggccaatcgggtgtctggggacatccaagatctatagaatactaggaaagacagtggtatgttaccccatcatctttgatctcagtgacttctatatgtcccaagatgtgttcctgcttatagacgatatcaaaaatgctcttcagttcataaaacagtattggaaaatgcatggaaggcccctgttcctggtcttaatccgcgaggataatataagggggtctcgatttaatccgatcctcgacatgctggccgcccttaaaaaagggattatagggggggtgaaagtgcatgtcgatcggctgcaaacactaatctctggagctgttgtagaacagttggattttctgagaatatcagatacagaggaactaccagagttcaaatcatttgaagaattagaacctcctaaacactccaaagtgaaaaggcaaagttcaacaccatcggcccctgaactcgggcagcagcctgatgtgaatatatccgaatggaaggataagcctactcatgaaatactccaaaaactcaacgattgttcgtgtctcgcctcacaggcgatcctcctcggaatcctacttaaacgggaggggcctaacttcattactaaagaagggacagtgtccgaccatatcgagagagtatatagaagggctggatcccagaaactgtggctagccgtgcggtacggggccgcctttacacagaaattcagttcctcaatcgccccacacataacaactttcctcgtgcatgggaaacaggtcacactcggagctttcggacacgaagaagaagtgatcagtaacccactctcaccacgagtgatacagaatatcatatattataaatgtaatactcacgatgaaagggaagctgtgatacagcaagagctggtcatacatatagggtggataatatcaaacaatcctgagctgttctccgggatgttaaaaatcaggatagggtggataatccatgccatggagtatgaactgcagataagaggaggggataaacccgcccttgacctataccagctgtctccttctgaagtaaaacagttactgctcgatattttgcagccccagcagaacgggcggtgttggctgaaccgccgccagattgatggaagtctcaaccggactccaacagggttctatgatagagtctggcagatccttgaaaggacacccaatggaattatcgtcgcaggaaaacacctccctcagcagcccacactttctgatatgacaatgtacgaaatgaatttctcactgctcgttgaggatactctaggaaacatcgatcagcctcaatatagacaaatcgtcgtcgaattattaatggtggttagtattgttttggaacgcaaccctgaactcgaatttcaggataaagtcgacttagatcggctggtgaaagaagctttcaacgaattccagaaagatcaatcacggctgaaagaaatcgaaaaacaggatgacatgactagtttctacaacacacctcctctgggaaaacgtggaacatgcagttatctaacaaaagctgtaatgaaccttctcttagaaggagaagtaaagcctaacaatgacgatccctgcctcatatca

SEQ ID NO: 18217 - DNA, 3279 bp, synthetic construct
  misc_feature 1..3279: note = source = /note="Description of Artificial Sequence: Synthetic coding sequence"
  source 1..3279: mol_type = other DNA
atggctggcgccgccggattaacagctgaagtgtcctggaaagtcctggagcgccgggctcggactaagcgcagcggttctgtgtatgagccgcttaagagtatcaatctcccaagacctgacaacgaaacattgtgggataagctggaccattattatagaattgtgaagagtacgctgctgctgtatcaatcaccgactaccggactgttcccaacaaagacctgtggaggtgaccagaaagctaaaatccaggacagtttatattgtgccgctggcgcctgggccctggccttagcttaccgccgaatcgacgacgacaagggacgcacgcacgaactcgagcactctgcaattaagtgcatgcgtggaattctctactgctatatgcgacaggccgacaaggtacagcagtttaagcaggatccccggccgactacatgcttgcatagtgtctttaatgtccacacaggtgacgaactgctgtcctacgaggaatacggccaccttcaaattaacgctgtctcactctatcttttgtacttggttgaaatgatttccagcggactccagatcatttataacacagacgaggtgagcttcattcagaacctggtattctgcgttgaaagggtgtaccgtgtgcccgacttcggcgtctgggagcgcggctctaagtataataacggctcaactgagctgcactcctctagcgtggggctggccaaggctgcactcgaggcaatcaatgggtttaatctgttcgggaatcaggggtgtagctggagcgttatcttcgtggacctggatgcccacaatcgcaacaggcagaccctctgctcgttgttgcctagagagtccagaagccataacaccgacgcagccctcctgccatgtattagctaccctgcattcgcccttgatgatgaggtgttgttttctcaaaccttggacaaggtggtacgtaagttgaagggcaagtatggcttcaagcggttcctccgcgatggctatcggacctctctggaggaccctaatcgttgttactataaacccgctgaaattaagctgtttgatggcatcgagtgcgagtttcccattttttttttgtacatgatgatcgatggagtgtttagagggaacccgaaacaggtgcaagaatatcaggacctgctgacccccgtgctgcatcacaccacagaaggctatccggtcgtgcccaagtactattatgtcccagccgacttcgtcgaatacgagaaaaataatccgggcagccagaagagattcccgtctaactgtgggagagatggaaaattattcctttggggacaagctctctatattattgcaaagctattggcagacgagttaatttctcctaaggatatcgacccagtgcaaagatatgttcctctgaaagatcagaggaacgtgtctatgcgcttcagtaaccaggggccactggaaaatgatctagtggtccatgtggccctcattgcggaatcacagcgactccaagtgtttctcaacacctatggcatccagacgcagactccacaacaggttgagccaatccaaatttggcctcagcaggagctagttaaagcttacctgcagctcgggatcaacgaaaaactggggctctcaggcaggccagataggccgatcggatgtctcggaacgtccaagatctatcgcatcttgggaaagacagtcgtgtgctatcctattatcttcgatttatccgatttttatatgtcacaggacgtcttcctgctgatcgatgatatcaagaacgctctgcaatttatcaaacagtactggaagatgcatggaagaccgctgttcttggtactcatacgcgaagataacatacgcggctcacgcttcaacccaatccttgatatgcttgctgctctaaagaaggggatcattggtggggtgaaagtgcacgttgacagactacagactttgatatcgggtgcggttgtggaacagctagatttcttgaggatctctgatacggaagagctacctgaatttaaaagctttgaagagctggagccgccaaagcacagtaaggtgaagcgacagtcgtccacacccagcgcccctgagctcggccagcagcccgacgtgaatataagtgagtggaaagacaaacccactcacgagatcctgcagaagctgaatgattgctcctgtctcgctagccaagctatcctcttgggcattctcctcaaacgcgaggggcccaacttcattacaaaggagggaactgtgtcagaccacatagagcgcgtttaccgaagagccggatcacaaaaactttggctggccgtgaggtatggcgccgccttcacacagaaattctcgagctccattgcaccacatatcactacctttcttgtccacggaaagcaggtaactctcggggcttttgggcatgaagaggaggtgatcagtaatcctttgagcccaagggttatccaaaatataatctactataagtgcaacacacacgatgaacgagaggccgtgatccagcaagaactggtgatccatattgggtggatcatttctaacaatcccgaactgtttagcggcatgttgaaaatcaggattggatggatcatccatgctatggaatacgagttacagattaggggcggcgataagccagcgcttgacctatatcagttaagcccatccgaagtaaaacaactactcctcgacatcttgcagccacagcagaacggcaggtgctggctaaaccggaggcagatcgatgggtccctgaatcgaactccaaccgggttttacgatcgggtatggcaaatattagagaggaccccaaatggtatcatagtggcgggtaagcacctaccacagcagccaactctgagcgacatgacaatgtacgagatgaatttctcgctcttggtggaagacactctgggaaatatcgatcagcctcagtaccggcagatagtggtcgagctcctgatggtcgtgagcatcgtcctggagcgaaaccctgagctagagtttcaggacaaggtcgatctggacagactcgtgaaggaagcgttcaatgaattccagaaggatcagtctcggttaaaggagattgagaagcaggatgacatgaccagcttctacaacacccctcccttggggaagagaggcacctgttcctatctaactaaggccgtgatgaacctcttgctcgaaggcgaggtcaagcctaacaacgacgatccatgcctcatctct

SEQ ID NO: 18218 - DNA, 3279 bp, synthetic construct
  misc_feature 1..3279: note = source = /note="Description of Artificial Sequence: Synthetic coding sequence"
  source 1..3279: mol_type = other DNA
atggccggagccgccggactgacagccgaagtgagctggaaggtcttggagagacgagctcgcaccaagcggtcaggttccgtttacgagccccttaaaagtataaatctgcctaggccagataacgagaccttgtgggataaactggatcactactacagaatcgtgaaatccaccttgcttctgtaccagtcgcctaccacaggcttgtttcctacaaagacatgtggcggagatcaaaaagccaagatacaggacagtctgtattgcgccgctggcgcctgggcattggcgctggcctaccgtcgcattgatgacgataaaggaaggactcacgaactcgagcattccgccattaagtgtatgagaggaattctgtactgttacatgcgccaggctgataaagtgcagcagtttaagcaagacccgcggccaacaacatgcctccactctgtattcaatgtgcatacgggcgacgaactgctttcctatgaggaatacggacatttgcaaattaatgccgtttccctttatctgctatacctcgtggagatgatatcatccggactgcagatcatctacaatacggatgaagtaagtttcatccagaacctcgtgttttgtgttgagagggtgtaccgggttcccgactttggggtgtgggagagaggttctaagtacaacaacggttctacagagctgcatagttcttccgtgggacttgccaaagctgcacttgaggcaattaacgggttcaacctcttcggcaatcagggctgtagttggagcgtgatctttgtagacttggatgcccataatagaaatagacagaccctctgttcccttttaccccgcgagagccgatcccacaacaccgatgctgcactgcttccatgcatttcatatcctgcattcgcattggacgacgaggtgcttttttcccagaccctggacaaagtcgtccgtaagctgaagggtaagtatgggttcaagcgcttcctaagagatggatataggacatcccttgaagaccctaaccggtgttattataaaccggccgagatcaagctgttcgacggcatcgagtgtgagtttccaatattctttctttacatgatgattgacggcgtgttccgcggaaatcctaagcaggtacaggaataccaggatcttctgacacctgtgttacaccatacaactgaaggctatcctgtagtgcccaagtattattacgtgcccgccgactttgtggaatacgagaaaaataatccggggtctcaaaaaaggtttcctagtaactgcggaagagatggaaaattattcctttggggacaagctttatacatcattgctaaactcctggcagacgagctgatctcccctaaggatattgatcccgtgcagcgttatgtgccactgaaggaccagcggaatgtgagcatgaggttctcaaaccagggtccgttagagaatgacctggtggtgcacgtagccctgattgcagagagccagcgcctccaggtctttctgaacacatatggaattcaaacacagactcctcagcaggtcgagccgattcagatttggccgcagcaagaactggttaaagcttatctacagctgggcatcaacgagaagctcggattatctggacgacccgatcggccaatcggctgcctcggcactagcaaaatctataggattttaggtaaaaccgtggtctgctaccctatcatcttcgatttgagcgatttttatatgtcccaggacgtgtttctcctgatcgatgatattaagaatgccttacaattcattaagcaatattggaagatgcatggacggcctctgtttcttgttctcatcagggaagacaatattcgaggctcacgcttcaatccgatcctggatatgctggctgccttgaaaaaagggattattggaggtgtgaaagttcacgtggacagactgcagactctcatctctggtgctgtggtggaacagctcgattttctgagaatctccgacaccgaggagttgcctgaattcaagagttttgaggaacttgagccccctaagcattccaaggtcaagaggcagtcctccaccccctctgccccagagctcggccagcagcccgacgtgaatattagtgaatggaaggacaagcccacccacgagatcctgcagaaactgaatgattgctcctgtttggcctctcaagccatactgctaggaatactactgaaacgagagggtccaaactttattacaaaggaagggaccgtctcggatcacatcgagagagtctaccgtcgagccgggtcccagaagctgtggcttgctgtcaggtatggggcagcattcacccagaagttctcaagtagcattgccccccatataactacattccttgtacacgggaaacaagttactttgggggcctttggacatgaagaggaggtgatatcaaatcctttatctccacgggtgatccagaacatcatctactataaatgtaacactcatgacgaacgggaagcagtaattcagcaggagctcgtcatccacattggatggattatttctaacaacccagagctgttttcaggaatgctgaagatcaggatagggtggattattcatgcgatggaatatgaattacagattcgcgggggtgacaagcccgcgctggatctgtaccaattgtcgccctcggaggtgaaacaattgctgctggacattctacagccccagcagaacggccgatgctggctgaatcggaggcaaattgacggatccttgaaccgcacccccaccggtttctatgaccgggtgtggcaaattttagagcgcacgcctaacggcatcattgtcgccgggaagcacctccctcagcaacctacactctcagacatgactatgtacgagatgaacttctccttgctggtcgaagataccctggggaacattgaccaaccccagtatcgccagatcgtggttgagttattgatggttgtctcaattgtactcgagcgtaatccagagctagaatttcaggataaagtcgatttagaccgcttggtgaaggaagccttcaacgagttccagaaggatcagtcacggcttaaggaaatcgaaaagcaagatgacatgacgagtttctacaacaccccgccactcggcaagcggggcacctgctcctatctgacgaaagctgtcatgaaccttctgctggaaggcgaagtgaagccaaataacgacgacccctgccttataagc

SEQ ID NO: 18219 - DNA, 3279 bp, synthetic construct
  misc_feature 1..3279: note = source = /note="Description of Artificial Sequence: Synthetic coding sequence"
  source 1..3279: mol_type = other DNA
atggcaggagccgcgggactcaccgcagaggtatcgtggaaggtgctcgagaggagggcacgcactaagagatcggggtccgtctacgaacccctgaagtcgatcaacttgccgaggccggacaacgagacgctgtgggataagctcgatcactattaccggatcgtcaaatccactcttctgctctaccagtcacctactaccggactcttcccaactaagacttgtggaggcgaccaaaaggcgaagatccaagactctctctactgcgctgcgggcgcatgggccctcgcactggcataccggcggattgacgacgacaaggggcggacccacgaactcgaacactccgcgattaagtgtatgcgcggaatcctctactgctacatgagacaagcggacaaggtgcagcagttcaaacaggacccaaggcctaccacctgcctgcactccgtgttcaacgtccacactggcgacgaattgttgtcttacgaggagtacggacatctgcagatcaacgcggtgtcgctctacctgctctacctggtggagatgatatcctctgggctccagattatctacaacaccgatgaggtgtccttcattcagaacttggtattctgcgtggaacgcgtgtacagagtccccgactttggagtttgggagcgcggttctaaatacaataatggatcgaccgaactgcattcgtcgtcagtgggcctcgcaaaggctgccctggaggctataaacggattcaatctgtttgggaatcagggttgctcctggtcagtcattttcgtcgacttggacgcgcacaacagaaaccgccaaacgctgtgcagcctgctgcctagggagagccgcagccacaacactgacgcggcgctgctcccatgcattagctacccggcttttgcactggatgatgaggtgctgttttcacagaccctcgataaggtggtgcggaaattgaaaggcaagtacggcttcaagcgcttcctgcgcgacggctaccgtactagccttgaggatccgaatcggtgctactacaagccggccgagatcaaactgttcgacggaatcgaatgcgagttcccgatcttcttcctctacatgatgatagacggagtgttccggggaaatccgaagcaagtgcaagaataccaagacctcctgacccccgtgctgcatcacactaccgagggatacccagtggtgccgaagtattactacgtgccagccgactttgtcgaatacgagaagaacaacccggggtcccaaaagcgctttccatcaaattgtggaagagacggaaaactctttctgtggggacaagccctttacatcatcgccaagctgctggccgatgaactcatctcacccaaagacatcgatcctgtccagcggtacgtcccgctgaaggaccagagaaacgtgtccatgcggttctccaatcaaggaccactcgaaaatgatctggttgtccacgtggctctgattgccgagtcccagcgcttgcaagtgtttctcaatacgtacggcattcaaacccaaactccacagcaggtggaaccgatccagatctggcctcaacaggagctggtgaaggcctacttgcagttgggaatcaatgaaaagctgggtctgtcaggcagaccggacaggccgatcggatgcctgggaacttcgaagatctaccggatcttggggaaaacggtggtctgctacccaatcatcttcgatctgtccgacttttacatgtcgcaggacgtgttcctcctgatcgatgacattaagaacgctctccagttcatcaaacagtactggaagatgcacggacgtccgctgttcttggtcctgatccgggaagataacatcagaggatcccgctttaatccaatcctggatatgcttgcagcgctgaagaagggtatcatcggaggggtgaaagtgcatgtggaccgactgcagaccctgatctcaggggcagtggtggaacagctcgactttctgcggatttccgacactgaagaactgccggaattcaaatctttcgaggaactggaaccgccaaagcactcaaaagtgaagcggcaatccagcaccccgtctgcaccagaactggggcaacagcccgatgtgaacatcagcgagtggaaggacaagcctacccatgagattcttcagaagctcaatgattgctcatgcctcgcgagccaggctatcctgttgggaatcctccttaagcgtgaaggcccgaatttcatcaccaaggaaggaactgtctcggatcatatcgagcgcgtctacaggagagcaggctcgcaaaagttgtggctcgcggtgcgctatggcgcggcctttacccagaaattctcttcctcgatcgctccgcatatcaccaccttcctggtgcacggcaagcaggtgaccctcggcgccttcggccacgaagaagaggtgatctcaaacccgcttagcccgagagtgatccagaacattatctattacaagtgcaacacccacgacgaacgggaagcggtcatccagcaagaactcgtgatccatatcggatggatcatttcgaataacccagaactgttctccgggatgctgaagatccggatagggtggataattcatgctatggaatacgaactgcaaatcaggggaggagacaagccggccctggatctctaccagctgagcccttccgaggttaagcagctgctgctcgatatcttgcaaccgcagcagaacggtcgctgttggctgaaccgccgccaaatcgacggatcactgaaccggactccgactggattctatgacagagtgtggcagatcctcgaacggactcctaacgggatcatcgtcgcagggaaacatctgccacaacagccgaccctgtcggatatgaccatgtacgaaatgaacttctccctgctggttgaggacacccttggtaatatcgaccagcctcaataccggcagattgtggtggagttgctgatggtcgtgtcgattgtgctcgaacggaatccggaactcgagtttcaggataaggttgatctggatcgcctggtcaaggaggcattcaatgaattccaaaaggaccagtcccggctgaaggagatcgaaaagcaagatgatatgacttccttttacaatactccacctcttggcaagcgcggaacctgttcgtacctgaccaaggccgtcatgaacctgctcctggagggcgaggtgaagccgaacaatgacgacccatgtctcatcagc

SEQ ID NO: 18220 - DNA, 2430 bp, synthetic construct
  misc_feature 1..2430: note = source = /note="Description of Artificial Sequence: Synthetic coding sequence"
  source 1..2430: mol_type = other DNA
atggagcacaaagaggtggtgctgctgctattgttgtttttgaagagcggacagggagaacctctggatgactacgtcaatactcagggagcctcactattctcagtcacaaagaaacagctgggtgccggatctatcgaggagtgcgccgcaaagtgcgaagaggatgaggaatttacctgtcgtgcattccagtaccattctaaggagcagcagtgtgtaataatggcagagaacagaaagtcttccatcataattaggatgcgggacgttgtattgttcgagaagaaagtctacctgagcgaatgtaagactggcaatgggaaaaactacagaggtaccatgagtaagactaagaacggcattacatgccagaagtggagttctacctctccacataggcctcggtttagtcccgctacgcatccgagtgaaggtttggaagaaaactactgccgcaacccagacaatgatccccagggtccgtggtgttacacaacagatccggaaaagcgctatgactattgcgacattcttgagtgcgaggaggaatgtatgcactgctccggggagaattatgatggtaaaatctccaagaccatgtcaggcctcgagtgtcaggcctgggatagtcagtcacctcatgcacatggctacataccttccaaattccctaacaaaaaccttaagaagaactattgcagaaaccctgatcgagaactccgtccttggtgttttacaactgaccccaacaaaagatgggagttatgtgacattccacgctgcacaactcccccaccctctagtggacctacctaccaatgcctgaaggggaccggcgagaattataggggcaacgtggccgtgaccgtgtcaggccacacttgtcaacactggagtgcacaaaccccacatacgcacaaccggaccccagaaaacttcccttgcaagaacctggatgagaactactgtcggaacccagacggaaaaagggccccctggtgccacaccaccaatagtcaggtgagatgggaatattgcaaaatccccagttgtgactcaagccccgttagtacagagcagctggcaccgactgctccacctgaactgaccccggttgttcaagactgttaccatggagacggccagtcataccgcgggacgtccagcaccaccaccactggcaagaagtgccagtcatggagttccatgaccccacacaggcatcagaagacacctgaaaactaccccaacgccggcctcacaatgaactactgccggaacccagatgctgataaggggccatggtgttttaccaccgaccctagcgtcagatgggagtactgtaacctgaaaaagtgttccgggaccgaggcctcggtagtcgcccccccgcccgtcgtgttgcttccggacgtcgagaccccaagcgaagaagattgtatgttcgggaatggaaagggatatcgaggcaaacgcgctaccaccgtcacaggaacaccatgccaagattgggcagcccaggagccacatcggcatagcatattcacccctgagacaaatcccagggcaggattggagaagaattattgccgaaatcctgatggcgacgtgggcggtccatggtgttatactacaaacccccggaagctctacgattattgcgatgttcctcagtgtgctgcgccttcattcgactgcggcaagccccaggtggagccgaagaagtgccccggccgggttgtcggcgggtgcgtggcacacccccattcatggccgtggcaggtgtcgctgaggacaagattcgggatgcacttctgtggtggaactctcatatcccctgaatgggttctgacagcggcacattgcctcgaaaaaagccctaggccgtctagttacaaagtcattttgggcgcccaccaggaagtgaacctggagcctcacgtgcaggagattgaggtatctaggctgtttctggagccaacacgtaaagatatcgctctgctgaagttgagttcacccgccgtcataaccgataaagtcatccctgcatgtctgccctcccccaattatgtcgtcgccgatcgcacagaatgcttcatcaccggttggggggaaacgcagggcacctttggagcagggcttctcaaagaggcacagctccccgtgattgagaacaaagtgtgtaatcggtatgaatttttaaatgggagagtgcaatctacggagctgtgtgctggccacttggccggaggaaccgattcatgccagggtgattccggaggcccactagtgtgtttcgaaaaggacaaatacatactccaaggggtgactagttggggtctagggtgtgcgaggccaaacaagccaggtgtctacgtacgtgtctcacgcttcgttacatggatcgagggtgtaatgagaaacaac

SEQ ID NO: 18221 - DNA, 2430 bp, synthetic construct
  misc_feature 1..2430: note = source = /note="Description of Artificial Sequence: Synthetic coding sequence"
  source 1..2430: mol_type = other DNA
atggaacacaaagaagttgtcttgttgttgctcctgtttctgaagtctggccagggagagcctctggatgactatgttaatacacagggtgcgagtttgttcagcgtgactaagaagcagctgggggccggaagtattgaggagtgtgcggctaaatgcgaagaagatgaagagtttacctgccgcgcatttcaataccatagcaaagagcagcaatgcgtcatcatggcggaaaaccgcaagagcagcatcattattcgcatgcgggacgtggtgttgttcgagaagaaagtttatttgagcgagtgcaaaacgggcaacggaaaaaactaccgtggtaccatgagcaaaaccaaaaacggaatcacctgccagaagtggagcagcaccagcccacataggcctcgttttagcccagccacccacccgtccgaaggcctggaagagaattattgccgcaatccagacaacgacccgcaagggccatggtgttataccacagaccctgagaagcgctatgattactgtgacattcttgaatgcgaggaggaatgcatgcattgctcaggcgaaaattacgatggcaagattagcaaaaccatgagtggcctggaatgtcaagcgtgggacagtcaatcccctcatgcccacggttatattccttccaagttcccaaacaaaaacctgaagaagaactattgtcgcaacccggatcgtgagctgcgtccatggtgcttcacaacagacccaaacaaaaggtgggagctgtgtgacatcccacgttgcacaaccccaccgccgtcatcagggccgacctaccaatgtctgaaaggcactggagaaaactatcgcggtaatgtggcagttaccgtcagcggacacacctgtcagcactggtccgcccagacaccgcatactcacaaccgcaccccggaaaacttcccgtgcaagaatctggatgagaactactgcaggaacccggatggcaagcgagcaccttggtgccatacgacgaattcccaggtccgctgggagtactgcaagatcccaagctgtgactctagcccagtgagcacggaacagctggccccaaccgcaccaccagaacttaccccggtcgtgcaagattgttatcatggtgatggtcaaagctaccgcggtactagcagcaccactacaaccggaaagaagtgtcagtcttggagcagcatgaccccgcatcgacaccagaagacccccgagaattaccctaatgcgggtctgacgatgaattattgtaggaacccggacgccgataaaggcccctggtgtttcaccactgatccaagtgtgcgatgggagtattgtaacttaaaaaagtgttctggcaccgaggcgtccgttgttgcccctccgccagtggtgctcctccctgatgtggaaaccccttccgaggaggactgtatgttcggtaacggtaagggttataggggtaagagggccaccaccgtgactggcaccccttgtcaggactgggcagcccaggagcctcaccggcacagcatcttcactccggagaccaaccctcgcgcagggctggaaaagaattattgccgaaaccctgatggcgatgttggcggcccttggtgctatactacgaatccacgcaagttatacgattactgtgatgtgcctcaatgtgccgctcctagtttcgactgcggaaaaccccaggttgaacccaaaaagtgtcctggtcgcgttgtcggcggctgtgtggcacatccgcacagctggccgtggcaagtctccctgcggaccaggtttggtatgcacttctgcgggggtactctcatctcgcctgaatgggttttgaccgccgctcactgtttggaaaaatctccacgcccgtccagctataaagttatactgggtgcccaccaagaggtgaacttggagccacacgttcaggagatcgaagtatccagactgtttctggagcctactcgaaaggatatcgcactgctgaaactgagttctcctgcagttatcacggacaaagtcatccctgcgtgcttaccctctccgaattatgtggtggccgaccgcaccgagtgcttcatcacgggttggggcgaaacccaagggaccttcggcgctggtctcttgaaagaagcacaactgcccgttattgaaaacaaagtttgtaatcgttacgaatttcttaatggacgcgtccaatcaaccgagctgtgcgccgggcacctcgcaggcggtacggacagctgtcaaggcgattccgggggtccgctggtttgtttcgagaaagacaagtacatcctgcagggcgtgaccagctgggggctgggctgtgcgcgccctaataaacctggggtttacgtgcgcgtttcacgcttcgtcacctggatcgagggtgtgatgcgcaataat

SEQ ID NO: 18222 - DNA, 2430 bp, synthetic construct
  misc_feature 1..2430: note = source = /note="Description of Artificial Sequence: Synthetic coding sequence"
  source 1..2430: mol_type = other DNA
atggaacacaaggaagttgtcctgctgcttctcttgttcttgaagtcagggcagggcgagcccctggacgattatgtaaacacgcagggtgccagcctgttttcggtcactaaaaaacaactgggcgcgggctctattgaagagtgtgctgccaagtgcgaggaagatgaggaatttacttgtcgggcatttcaataccactctaaggagcagcagtgtgtcattatggcagagaatagaaagtcatctattatcatacggatgagggatgtggtcctattcgaaaaaaaagtttacctgtccgagtgcaaaaccggcaatggaaagaattacagaggaacgatgtccaagaccaaaaatggcataacatgccagaagtggagctcaacgagcccgcataggcctcggttttctccagcaacccatccctcagaagggcttgaagagaattactgtcgcaatccagacaacgacccccaagggccttggtgttatacaacagacccagagaagaggtacgactattgcgacatactggaatgcgaggaggagtgcatgcactgtagcggtgaaaattatgatggaaagatctccaagaccatgtccggcctggagtgtcaggcgtgggattctcagagtccacacgcccatgggtatatcccctctaagtttccaaacaagaaccttaagaaaaactattgcaggaatccagatcgagaactgcgtccatggtgcttcactaccgatcctaacaagcgctgggagctctgtgacattcctcgatgtaccactccccctccgagtagtggccctacataccagtgtctcaagggtacgggagagaactacagaggaaacgtggccgttaccgtctcaggccacacctgtcagcattggtcggctcagaccccacacacccacaatagaacccccgagaactttccctgcaaaaacttggatgagaattactgtagaaatccggatggaaaacgcgcgccatggtgtcacacaaccaattctcaggtgcgctgggagtattgcaaaataccatcctgtgactcatcaccagtgtccactgagcagctcgcacccacagcgccccccgaattgaccccagtagtgcaagactgttatcacggcgacggccagagttatcggggcacgagctccactaccaccacaggtaaaaagtgccagagctggtcaagtatgacccctcacaggcaccagaagacacccgagaattaccctaacgcaggcttgactatgaactattgccgtaatccagatgcagacaagggcccctggtgcttcacaacagacccgagcgtccgttgggagtattgcaatcttaagaaatgctccggaacggaggcatccgtggttgcacctccacccgtcgtgttactgcctgacgtggagaccccgtctgaggaggattgcatgtttgggaacggaaaagggtatcggggtaagagagctaccactgtaacgggtacaccttgccaggactgggcggcccaggaacctcatagacatagtatcttcacacctgagactaatccacgtgctgggctggaaaagaattactgcaggaatcctgacggggatgttggcggcccgtggtgttacacgactaatccacggaagctgtatgactactgcgacgtaccacagtgtgccgccccatctttcgactgtgggaaaccacaggtggaaccaaaaaagtgcccaggtcgagttgtcggaggctgtgtagcccaccctcattcgtggccttggcaggtgagcctgcgaacccgcttcggaatgcacttctgcggcgggaccctcataagtcccgaatgggtcctgactgctgcccactgtctcgagaagtctccacggccatctagctataaagttatccttggggcacatcaggaggtgaatcttgaaccccatgtgcaggagatcgaggtgagcagactgtttttggagcctacacgcaaggatatcgctcttctaaaactctcatctcctgcagtgatcacggacaaagttattcccgcatgcctaccatctccaaattacgtggtggcggacagaacggagtgttttattactggttggggagaaactcagggtacctttggggccggactgctgaaggaggcccagctaccagttatagagaacaaggtctgtaacaggtatgagtttctgaacggtcgcgttcagtccactgaattatgcgctgggcacctggcgggtgggaccgattcttgccagggtgactccggcggtcctttagtgtgcttcgagaaagacaagtacatcctacaaggagtgaccagttgggggctgggttgcgctaggccgaataaacctggggtgtatgttcgcgtcagccgattcgttacgtggatcgaaggcgtgatgagaaacaac

SEQ ID NO: 18223 - DNA, 2430 bp, synthetic construct
  misc_feature 1..2430: note = source = /note="Description of Artificial Sequence: Synthetic coding sequence"
  source 1..2430: mol_type = other DNA
atggaacacaaagaagtggtccttcttctcctcttgtttcttaagtctggtcagggggagccactggatgattacgtaaatacacaaggggcctctttgttttccgtgacgaagaaacagctgggagccgggtcaatcgaggagtgtgccgctaaatgcgaagaagatgaggagttcacttgccgggccttccagtaccactctaaggaacaacaatgcgtgatcatggcggaaaatagaaaatcctccatcatcatccgaatgcgtgatgttgtgctgtttgagaagaaagtatacctgagtgagtgcaagactggcaacggaaagaattacagaggtactatgagcaaaaccaaaaacgggataacttgccagaaatggtcaagtacgagtccccaccgaccacgcttcagcccagctacacaccctagtgagggcctggaggagaattactgccgaaaccccgacaacgacccccagggcccatggtgctacactactgaccccgagaagcgttacgactactgcgacatcctagagtgtgaggaagagtgtatgcattgttctggcgaaaactatgacgggaaaatcagcaagactatgtcgggcctcgaatgccaggcctgggacagccagagtccacacgctcacgggtacattccctctaagtttcccaacaagaaccttaagaaaaattactgccggaaccccgaccgggagcttaggccatggtgtttcactaccgaccccaacaaacgttgggaactgtgtgatatccctcgttgcaccacaccgccaccaagtagtggtccaacctatcaatgcctgaaaggcactggggagaactaccgcggcaacgtggcagtaaccgtaagcgggcatacttgtcagcattggagcgcacagacgccacatacacataatcgcacacccgaaaattttccttgcaagaatctcgacgagaactactgtagaaaccccgatggcaaaagggcgccgtggtgccacactacaaattcccaggtccgttgggaatactgtaaaattccttcttgcgactccagtcccgtgagcacggagcagctggcaccaacagctcctccagaactgacaccagtggttcaggactgctatcatggcgacggtcaatcctataggggaacctctagcacaacaactactggcaaaaagtgtcagtcctggagcagcatgacaccccacagacaccagaagactcctgagaactacccaaatgcaggactgacaatgaattattgcaggaatccagacgccgataagggtccatggtgtttcacaacagatcctagcgttagatgggagtactgtaacctcaaaaaatgctctggaaccgaagctagtgtggtcgcgcctccgcctgtggtacttctgcccgacgtcgaaacccccagcgaggaggactgcatgttcggcaatggtaaaggatacagagggaagcgtgctaccactgttacaggtactccctgccaggattgggcagcccaggaaccgcaccggcactcaatctttactcccgagaccaatccccgtgccggattggagaaaaactattgccgtaacccagacggggacgtcggaggcccttggtgctacactactaaccccaggaaattgtacgattactgcgacgttcctcagtgtgccgctcctagcttcgattgtggcaaaccccaggtagaacctaagaaatgcccaggtcgggtcgtggggggctgcgtggctcatccacactcttggccttggcaggtctcgctgcgcactagatttggcatgcatttctgtggtgggacattgatctcccccgaatgggttctaactgctgcacactgcttagagaagagtccgcgcccctcttcatacaaggttatcctgggggcgcatcaagaggtaaaccttgagccacacgtacaagagatcgaagtctctagactgttcttagagccgacgcgaaaagacattgctttactcaagttatcgtcccccgccgtgatcacagataaggtgataccagcctgcctccccagccccaactatgtggtggcagatcgtacagaatgtttcattactggatggggagagactcagggaaccttcggtgccggcctactgaaggaagcacagctgcccgtgatcgaaaacaaggtttgcaacaggtacgaattcctgaacggaagggtccagagcactgaactgtgtgcaggccatttagccggcgggactgatagttgtcagggagactccggaggacctctcgtgtgttttgagaaggataagtatattctgcagggcgtgacctcctgggggctcggatgcgcccgcccaaacaagccgggagtgtatgtcagggtgtccaggtttgtgacctggatcgaaggggtgatgaggaataat

SEQ ID NO: 18224 - DNA, 2430 bp, synthetic construct
  misc_feature 1..2430: note = source = /note="Description of Artificial Sequence: Synthetic coding sequence"
  source 1..2430: mol_type = other DNA
atggaacataaggaggtggtgctcttattattgctgttcttaaagagcggccagggcgaacctctggatgactacgtaaacactcagggtgcctccctgttcagcgtgaccaagaagcagcttggagcagggagtatcgaggagtgtgccgccaagtgtgaggaagacgaggaattcacctgccgggcattccaatatcacagtaaggagcagcagtgcgttatcatggctgaaaatagaaaaagcagcataattatccggatgcgagacgtggtcctgttcgagaagaaggtgtatctctctgagtgtaaaaccgggaacggcaagaattatcggggaacgatgtccaaaaccaaaaacggaattacgtgccagaagtggtccagcacaagccctcatcgcccccgatttagcccagcaacacatccctctgagggcctggaggaaaactactgcaggaatccggataacgatccgcaaggaccctggtgttacactactgacccagagaagagatatgactattgtgatatcctagaatgcgaagaggaatgtatgcactgctccggggagaattacgatgggaagatctccaagactatgtccgggttggaatgtcaggcctgggactcacagtctccccatgcacacggttacatcccaagtaagttcccaaataagaaccttaaaaaaaattactgcagaaacccagaccgcgaactgcggccgtggtgttttactactgatcccaacaaaagatgggagctgtgtgacattccccgctgcaccacgcctcctccgagttcgggcccaacttaccagtgcctgaagggcactggagagaactacaggggaaatgtggcggttaccgtcagcggtcatacttgtcagcactggtctgctcagacaccccacactcataataggactcctgaaaattttccatgtaagaatcttgacgagaactattgccgtaatcccgatgggaagcgagccccgtggtgccacacaaccaactcccaagttaggtgggagtactgcaaaatcccctcatgtgacagctccccagtgagcaccgagcagctggccccaaccgccccgccagagttgacacccgtggtccaggactgttaccatggcgacggtcagagctaccgtggcaccagttccacaaccactactgggaagaagtgccaatcgtggtcatccatgacccctcaccgccaccaaaaaacccctgaaaactatccaaacgccgggctgacaatgaactactgtcggaaccctgacgccgacaaaggcccgtggtgcttcacgactgacccgtccgtgaggtgggaatattgtaacctgaaaaagtgcagcggcacagaggcttccgtggtcgcaccccctcctgtggtgctgttgcccgatgtcgagacaccttcagaagaagactgcatgttcgggaatggcaaggggtaccgggggaagagagcgacaaccgtgacggggacaccttgccaggactgggccgctcaggaaccacaccggcactctatctttactcctgagactaaccctcgcgcaggcctggagaagaactactgccgtaatcccgatggcgacgtgggtggcccctggtgctacacaaccaaccctcgtaagctgtacgattattgtgacgtcccacaatgcgcggcgccaagctttgactgcggtaagcctcaggtcgagccgaagaagtgcccagggcgggtcgtgggaggctgtgtggcacatccccactcctggccatggcaagtgagtctgagaacaaggtttggcatgcatttttgcggagggaccttaattagccccgagtgggtgttgacggcagctcactgcctcgagaaatcccccagaccgtcctcgtataaggtgattctgggagcccaccaggaggtgaatctggagccccacgttcaagaaatcgaggtctccagactttttctggaaccaacaagaaaagatatcgcgttactgaaactgtccagcccagcagtaatcaccgacaaggtcattccagcatgtcttccctcacctaattacgtcgtcgcagatcgtacagaatgctttattacaggatggggtgagacccaagggacgttcggcgccggattgctgaaagaagcccagctccctgtgatcgaaaataaggtatgcaataggtatgaattcctcaacggacgagtgcagagtactgaactctgtgctggtcacctggccggaggaactgatagttgtcaaggcgacagtggtgggcctctggtatgcttcgagaaggataagtatatccttcagggcgtgacctcatggggcctgggctgtgctagacctaataaaccaggggtttacgtgagggtgagtaggttcgtgacatggatcgaaggagtaatgcgcaataac

SEQ ID NO: 18225 - DNA, 2430 bp, synthetic construct
  misc_feature 1..2430: note = source = /note="Description of Artificial Sequence: Synthetic coding sequence"
  source 1..2430: mol_type = other DNA
atggagcacaaagaggtcgtgctactactgctcctgttcttgaaatccggacagggtgagccgttagatgattacgtcaacacccagggggcgtcattatttagcgtgactaagaaacaattgggcgcgggaagcattgaagaatgtgccgccaaatgcgaggaagacgaggagttcacctgccgagcctttcagtaccattcaaaagaacaacaatgcgtgattatggccgagaaccgaaaatcttcaattattatccggatgagggacgtggtactatttgaaaagaaagtgtatctttcagagtgtaagaccggcaatggaaagaactaccgaggtacaatgagcaagacaaaaaacggtatcacctgccagaaatggtctagcactagcccgcataggccacgattttcaccagcgacacacccatccgaaggacttgaggaaaattattgccgcaaccctgacaacgaccctcaaggtccatggtgctatacaactgacccagaaaaaaggtatgactactgtgatatcctcgaatgtgaggaggagtgtatgcattgctcgggcgaaaattacgatgggaagatcagcaaaaccatgagtggacttgagtgtcaggcctgggacagtcagagtccacacgcacatgggtatataccctccaaattcccaaacaagaacttgaaaaaaaactactgccgtaaccccgatagggagctgcgcccgtggtgtttcaccacggatcccaacaagcgatgggagctgtgtgacataccaaggtgcaccacgccaccgccatcctcggggccgacttaccagtgcctcaagggaaccggagaaaactaccgggggaacgtggccgttacagtgtccggacacacttgtcagcactggagcgcacaaactccacatactcataatcgaaccccagagaattttccctgtaaaaatctcgatgaaaactactgccgcaatcccgatggtaaaagagcaccttggtgccacactacgaacagtcaggtgaggtgggagtactgtaaaataccctcttgcgatagcagtcccgtgagcacagagcagctggcacccaccgctccccctgaactgacccctgtggtgcaggattgttaccacggagatggacagtcctaccggggtacttcctctaccactactacagggaaaaagtgtcagtcttggagctctatgaccccacacaggcatcagaaaacgcctgagaattaccccaacgcaggtctcacgatgaattattgcaggaaccccgacgctgacaagggcccatggtgttttactacggatcctagcgtgagatgggagtactgcaatctaaaaaagtgcagtgggactgaggcctctgtagttgcccctcctccagtagtgctgcttccggatgtagaaaccccctcggaggaggactgtatgttcgggaatggcaaaggttaccgcggcaaacgagccactaccgtgacgggaactccctgtcaggactgggccgcgcaggagccacatcgacactccatctttacgcctgaaaccaatccgcgcgcaggcttggagaagaactattgtcgaaatcccgacggagatgtgggcggaccttggtgttatacaacaaaccccaggaaactgtacgactattgcgatgtgccccagtgcgctgccccatccttcgactgtgggaaacctcaagtggaacccaaaaagtgtccaggcagagttgtgggcggttgcgtcgctcacccccatagctggccatggcaggtaagtttgaggaccaggttcggaatgcacttttgcggggggacattgatatcaccagagtgggtgctgactgccgcccactgcctcgagaaatcccctcgacccagtagttacaaagtgattttaggcgcacatcaggaggtgaatctagaacctcatgtgcaggagatcgaggtgtcccgactgtttctagagcctacacgtaaggatatcgcgctgctgaagctctcaagtcccgctgttatcacagacaaggtaatcccagcctgtctgcccagccctaattacgttgtggcggatcggacggagtgcttcatcacaggctggggagaaactcagggaacattcggagcagggctgctgaaagaggcccagttacccgtgattgaaaataaagtgtgcaacagatatgagtttcttaatggcagagtccagtccactgagttatgcgccggccatttggcaggcggcacagactcatgtcaaggcgacagtggtggcccactagtgtgtttcgagaaggacaaatacatcctacaaggcgtaaccagttggggtctaggatgtgcaaggccaaacaaaccgggggtgtatgtccgtgtctctcggttcgtcacatggatagagggagtcatgcgcaacaac

SEQ ID NO: 18226 - DNA, 2430 bp, synthetic construct
  misc_feature 1..2430: note = source = /note="Description of Artificial Sequence: Synthetic coding sequence"
  source 1..2430: mol_type = other DNA
atggaacataaagaggtggtactgctgctgctgctctttctgaagagcggccagggggaaccattagatgactatgtcaatactcagggcgcatcactctttagcgttactaaaaagcagctgggggctggctcaatcgaggagtgcgccgccaagtgcgaggaggatgaagagttcacctgccgggccttccagtaccattccaaagagcagcagtgcgtgattatggccgaaaatcggaagagttcaattatcattagaatgcgggacgtagtgctgttcgagaagaaagtctatctgtctgaatgcaagacagggaacggcaagaactacagggggactatgtctaagaccaagaatgggattacatgtcagaaatggtccagcactagcccacaccgcccccgattttcacccgccacccatccgtccgaaggcctggaggaaaattattgccggaaccccgacaatgatccccagggcccatggtgctacaccactgaccctgagaagcgatacgactactgcgacatcttggagtgtgaagaggaatgcatgcattgctctggggaaaattacgacgggaaaatcagcaagacaatgtctggactcgaatgccaggcatgggactctcaatctccccacgctcatggatacatcccctctaaattcccaaataaaaacctaaagaaaaattactgtcggaacccagaccgagaactgagaccctggtgtttcactacagatcctaataagaggtgggagctttgcgatatcccgcggtgcactacccctcctcccagttctgggcctacctaccagtgcctgaaaggcactggggagaattatagaggcaatgttgccgtgaccgtgtcaggtcacacttgtcagcactggtcagctcagactccacacactcataacaggacaccagaaaacttcccctgcaagaatctggacgaaaattactgccgcaatcccgatggcaagagggcaccatggtgtcacaccaccaactcacaggtgcggtgggaatactgcaagatcccaagctgcgattcttctccggttagtaccgaacagctggcgcccaccgctccccctgaactgacacccgtcgtgcaggactgctaccacggtgacggacagtcatacaggggcacttccagtacaactacaactggtaaaaagtgtcagtcatggagtagcatgacacctcataggcaccagaagacccccgagaattatcctaacgcaggcctaaccatgaactactgtagaaacccggacgctgacaaaggcccatggtgtttcacgaccgatccaagtgtcaggtgggaatactgtaacttgaaaaaatgtagcggaacagaagcctcagtcgtggcccctccgcctgtggtcctgctccctgatgtggaaaccccttcagaggaagattgtatgttcgggaatgggaaagggtatcggggtaagagagccaccaccgttacggggactccttgccaggactgggctgcgcaggagcctcatagacattcaatattcacccccgagaccaatcctcgggctggactcgagaagaattactgtagaaaccctgatggcgatgttggcggtccttggtgttatacaaccaatccccgtaaattgtacgattattgcgatgtgccccagtgtgcagctccttcatttgactgcggcaaaccccaagttgagcctaaaaaatgtccaggtagggtcgtcggaggatgtgttgcccacccacatagttggccctggcaagtttcgctgagaacgagattcggtatgcacttctgtggaggcaccctgatttcccctgaatgggtgttgactgccgctcactgcctcgaaaaaagcccgcggccaagcagctataaggtgatactgggcgcccaccaggaagtgaacctcgagccacacgtccaggaaattgaagtgagcaggctttttctagaaccaaccagaaaggacatcgctctgctgaaactgtcatcgcctgctgtgatcactgacaaggttattccagcgtgtctgccttcccccaattacgttgtggccgataggaccgagtgcttcatcaccggttggggtgaaacacagggtacattcggagctggattattgaaggaagcccagcttccagtgattgagaacaaggtttgtaatcgctacgagtttctgaatggacgggtgcaaagcaccgagctttgtgccggccacctcgccggtggcactgactcttgccaaggggacagcggaggccccctcgtctgttttgagaaggataagtatatcctccaaggcgtgacatcgtgggggctaggatgtgctaggccaaataagccaggcgtgtatgtaagggtttcaagattcgtcacgtggatcgaaggtgtcatgcgcaataac

SEQ ID NO: 18227 - DNA, 2430 bp, synthetic construct
  misc_feature 1..2430: note = source = /note="Description of Artificial Sequence: Synthetic coding sequence"
  source 1..2430: mol_type = other DNA
atggagcataaggaagtggttctcttgttactgctgttcctgaaaagtggtcagggcgagccactggatgactacgtcaatacccagggggctagcctgttcagtgtaactaagaaacaattgggggcaggcagcatcgaagaatgcgccgccaagtgcgaggaagatgaggagtttacctgcagggcttttcaataccactctaaggagcagcaatgcgtaatcatggcagagaaccgaaagtcgtccatcataattagaatgcgagacgtggtgctgtttgagaagaaagtctatctcagcgagtgtaaaactggtaacggaaaaaactacaggggcacaatgtcaaaaactaagaatggaattacatgtcagaagtggagctcaaccagtccgcaccgacctagattttctccagccacccatcccagcgagggattggaggaaaattactgtcgtaatcctgacaatgatcctcaggggccatggtgttatacaaccgaccctgagaagcgctatgattactgcgacattctcgaatgtgaggaggaatgtatgcactgtagcggggagaattacgacggaaaaatctctaaaacaatgtccggcctcgagtgtcaggcatgggatagccagtccccacatgcccatggctacattcctagtaaatttccgaacaagaatctcaagaaaaattattgcaggaacccggatcgtgagctcagaccctggtgcttcaccactgatcccaataaacgttgggagctttgtgacatcccccggtgcacaacacccccccccagctctggccctacctatcaatgtcttaagggaaccggagaaaattacagaggaaacgttgcggttactgtatccggacacacgtgccaacattggagtgcccagactccacacactcataaccgcacccctgagaatttcccctgcaagaacttggacgagaattattgtagaaaccctgacggcaaacgggccccatggtgccacacaacaaacagtcaggtgcggtgggaatactgtaagatcccaagctgtgattcttccccagtgtctactgagcaactcgcccccacagcaccacctgagctaaccccagtggtgcaggattgctaccacggcgacggacaatcttacagaggaacatcaagtacaactaccaccggaaagaagtgtcagagctggagtagcatgacaccccaccggcaccagaagacccccgaaaattatcctaacgcaggactaaccatgaattactgccgcaaccccgatgctgacaagggcccgtggtgttttaccaccgaccctagcgtgcgctgggaatattgcaacctgaagaagtgcagtgggacagaagcctctgtcgtggctcctcctccagtggtccttctgccggatgtggaaaccccttctgaagaagattgcatgttcggcaacggcaagggatatagggggaaacgggctactacagtcaccggaacaccttgtcaggactgggctgcccaggaaccccaccggcattccatattcacacctgagacaaatcctcgcgcaggcctggaaaagaattattgccgcaaccctgatggcgatgtgggcggtccatggtgctatactacaaatccccggaagttgtacgactattgtgacgtcccacagtgtgctgcaccatctttcgactgcggtaagccacaagttgagcctaaaaaatgtccaggacgcgttgtgggtggctgtgtggctcaccctcattcctggccttggcaagtgagcctcaggacccggttcggaatgcatttctgcggtgggacattgatctctccggaatgggtgctgactgctgcacactgtctcgagaaaagccccagaccttcctcctacaaggtgatcctgggcgctcatcaagaagttaatctcgagccccacgttcaggagatcgaggtttctcgactattccttgagccgacccggaaggatatcgccctcctcaagctctccagtcccgctgttattacagacaaggtgattcccgcatgcctgccttcacctaactacgtcgtggcagaccgcactgagtgttttatcacaggttggggagaaacccagggcaccttcggggcaggccttctgaaagaggcacagctgccggtgatcgagaacaaagtgtgcaaccgctacgagtttctgaacggcagggttcagagcaccgaactttgcgctgggcacctcgctggaggcactgacagctgccagggggatagcggtgggccgctcgtctgcttcgagaaggacaaatacatcctccagggggtgacgagctggggccttgggtgtgcccggcccaataagccgggagtgtatgtgcgagtaagccgctttgtgacatggatcgagggagtaatgaggaataat

SEQ ID NO: 18228 - DNA, 2430 bp, synthetic construct
  misc_feature 1..2430: note = source = /note="Description of Artificial Sequence: Synthetic coding sequence"
  source 1..2430: mol_type = other DNA
atggaacacaaggaggtggtgcttctcttgctgctgttcttgaaaagcggacaaggtgagcccctggatgactacgttaacacccaaggcgcctccttgtttagtgtgactaagaaacagctcggagccgggagcatcgaggagtgtgctgcgaaatgcgaggaggatgaagaatttacctgtcgcgctttccagtaccatagtaaggagcagcaatgcgtgatcatggccgaaaataggaaatcttctatcattattaggatgcgggatgtcgtcctctttgaaaagaaagtctatttgagcgagtgtaagaccggaaacgggaaaaattatcgagggacgatgagcaaaaccaagaacgggatcacttgccagaagtggtcctccacctccccgcaccgcccccgcttttctcccgcgacacatccatctgaagggttagaggaaaattattgtcgaaatccggacaatgatccgcagggaccctggtgctacaccactgaccccgagaaacgttacgactattgtgatatccttgagtgtgaggaggaatgtatgcactgcagcggggagaactacgacggtaaaatcagtaagacaatgtctggccttgaatgtcaggcatgggacagtcagagcccacatgcacatggctacatccctagcaagtttccaaataaaaatcttaagaagaattattgccgcaatcctgatagagaactaagaccgtggtgcttcacaacagatcctaataagcgatgggaactatgcgatatacctagatgcaccacgcctcccccctcgtctggaccaacgtatcagtgcctgaaaggcacaggcgagaattatcgcggaaatgttgccgtgaccgttagtggccacacttgccagcattggtccgcccagacaccacacacacacaaccggacacccgagaatttcccttgtaagaaccttgacgagaattattgcaggaatcccgatggaaagcgcgctccatggtgccacaccaccaattcccaggtccggtgggaatattgcaaaattccatcttgcgactcctctcccgttagtaccgagcaattggcccccactgccccacccgaactgacaccagtcgtgcaagattgttatcatggtgatggacaatcatacaggggcactagcagtacaacaactacgggcaagaaatgtcagtcctggtcttctatgacgccgcaccgtcaccagaaaacaccagagaattatcccaacgccgggctcacaatgaattactgccgaaatcctgacgcggacaagggaccctggtgttttaccaccgaccccagcgtccgttgggaatactgcaatctcaaaaaatgcagtggtaccgaagcctccgtggtcgcaccaccaccagtggtgctcctccctgatgtggaaacaccaagcgaggaagactgcatgttcggtaatggcaaaggctataggggcaagcgggccacaaccgtgaccggcacaccctgccaggactgggctgcgcaggaacctcaccgccatagcatttttacacccgagaccaaccctcgggcagggctggaaaagaactactgcaggaatccggatggggatgtcggcggaccatggtgctatacaacaaacccaaggaagctttatgactattgtgacgtcccacagtgtgctgcaccgagcttcgattgtggcaagcctcaagtggagcccaaaaagtgtcctggcagggtcgtgggtggttgcgttgcacacccccattcgtggccgtggcaggtttccctgcggacccgcttcggtatgcacttctgtggcggcacactgatttcccctgagtgggtccttactgccgcacattgtttggagaaatcaccccgcccttcgtcctacaaggttattttgggagctcatcaggaagtcaatctggagccacacgtacaggaaattgaagtcagtcgcttattcctcgagccaacacggaaagatattgcactcctcaagttgtcatcacctgccgtgattacagataaagtaatccctgcatgcctaccgagtcccaactatgtggtggcagatcggaccgaatgctttattacgggatggggagagactcaaggaacctttggggcaggactcctaaaggaggctcagctgcctgtgatcgagaataaggtgtgtaacagatacgaatttctgaacggacgcgtccagagtacagagctctgcgctggccatctggccggtggaacagactcatgccagggggactccggcggacctctggtctgctttgagaaggataaatacattctgcagggcgtgaccagttgggggctgggttgtgcaaggcctaataaacctggggtgtacgtcagggtaagccgcttcgtcacctggatcgaaggtgtcatgagaaataac

SEQ ID NO: 18229 - DNA, 2430 bp, synthetic construct
  misc_feature 1..2430: note = source = /note="Description of Artificial Sequence: Synthetic coding sequence"
  source 1..2430: mol_type = other DNA
atggaacacaaagaagttgtactgctgctactgttattcctcaaatcaggtcaaggagagccactagacgattatgtaaatacccagggggccagcttgtttagcgtcactaaaaagcagcttggcgctggctccatagaggaatgtgcggctaaatgtgaggaagacgaggagttcacttgccgcgccttccagtaccatagcaaagagcagcagtgcgtgattatggcagaaaaccgcaaatcaagcattataatccggatgcgcgatgtggttctgtttgagaagaaggtttacctatccgagtgtaaaactggtaatggcaagaactaccggggaaccatgagtaaaaccaagaacggcatcacatgccagaaatggtcctctacttctccccaccgaccgaggttctcacctgctactcacccttccgagggacttgaggagaactactgtcgcaatcctgataacgatccacagggtccctggtgttatacaacagaccctgagaagagatacgattactgtgatattctggagtgcgaggaagagtgtatgcattgttccggggagaattacgacggtaaaatctctaaaacaatgtccgggctcgagtgccaggcgtgggacagtcaaagtccacatgctcacggttacatcccctctaagttccctaataagaatctcaagaagaactattgcagaaaccctgatcgggagctgcgaccctggtgtttcaccactgacccgaataagcgctgggaattgtgcgatattccaagatgtaccacgcctccaccatcttctggccccacctaccagtgtctaaagggtactggcgaaaattacagaggcaacgtggcagtcacggtgagtgggcatacctgtcagcattggtctgcccagacacctcatactcacaataggaccccggagaactttccctgcaagaacctcgacgagaattattgcagaaaccctgacggtaagcgcgcaccgtggtgccacacaactaatagtcaggttcgatgggagtactgcaaaatcccctcttgcgatagctctccagtctcaactgagcaattggctcctactgccccacccgagcttactcctgtggtccaggactgttatcatggagacggtcagagctacaggggcacttctagtaccacaacgaccggcaagaagtgtcagtcctggagcagtatgaccccgcacagacaccagaagacgccagagaactatcccaatgctgggctcacaatgaactactgccgcaatcccgatgccgataaaggtccctggtgctttacaaccgatcctagtgtccggtgggaatattgcaatctgaagaagtgctctggaaccgaggcaagcgtcgtagcacctccccccgtggtcctcctgccagacgtggagactccgagcgaagaggactgtatgtttggaaatggcaagggctaccgtggtaagagggcaacgaccgtcactggaacgccctgccaggactgggcagcccaggagccccacaggcatagcattttcactcctgaaactaacccgagagcaggcctcgaaaagaactactgccgaaaccccgatggggacgtgggagggccttggtgttatacaaccaaccccagaaagctatatgactattgcgatgtgcctcagtgcgccgcacctagctttgactgtgggaagccccaggtggagcctaaaaagtgccccggaagagtcgtcggcggctgtgttgcccatccccattcctggccttggcaggttagtctgaggacacggtttggtatgcacttctgcggtggcacccttatttcgcccgaatgggtgctaactgccgcgcactgtctggagaaatctccgcgcccctcaagttataaggtcatccttggagctcaccaggaggtgaacctggaacctcacgtgcaagagatcgaggtcagccggctgtttctggagcctacaagaaaagacatagccttactgaagctttcatcaccagcggtgattaccgataaggtcattccagcgtgcctcccttccccaaattatgttgtggccgatcgtacggagtgcttcattaccggctggggtgagactcaggggacgtttggagccgggctgctcaaggaggcccagcttcctgttatagaaaacaaagtgtgtaatcgttacgaatttctgaacggcagggttcagtccactgaactgtgtgcaggccacctggcaggcggtaccgacagctgtcaaggcgacagcggggggcccctggtgtgcttcgagaaggataaatatatcctacagggtgtgacatcttggggactcggatgtgctagaccaaacaaacctggtgtgtacgtccgagtttcaaggtttgtcacatggatcgagggggtgatgagaaataac

SEQ ID NO: 18230 - DNA, 2430 bp, synthetic construct
  misc_feature 1..2430: note = source = /note="Description of Artificial Sequence: Synthetic coding sequence"
  source 1..2430: mol_type = other DNA
atggagcacaaagaagtagtcctactgcttctactcttcctgaaatctggccagggagagcctctggacgattacgtcaatactcagggtgcaagcttattttccgtcaccaagaagcagttgggcgctggcagcatagaggagtgtgcggccaaatgcgaggaggatgaagaattcacctgcagggccttccaataccattctaaagaacagcaatgtgtcattatggcagaaaatagaaagtccagcataataatacgcatgagggatgtcgtcttgttcgagaagaaagtgtacttgtctgagtgtaaaaccgggaacggaaaaaactatcgcggcacaatgtctaagactaaaaatgggattacctgccagaagtggtcctcaaccagccctcatcgccctcgcttttcaccagctacccatccttctgagggcttggaggaaaattactgccgaaaccccgacaacgacccccaggggccctggtgctacacaaccgaccctgagaagcgatacgactactgtgacatcctcgaatgcgaagaggagtgcatgcactgctccggtgagaactacgatggcaagatctctaagacaatgtccggactcgaatgtcaggcctgggactcacaatcaccccacgctcacggctatattccaagtaaattccctaacaaaaatctcaagaagaactactgccgaaaccctgatcgggagttgcgcccatggtgtttcaccacggatccaaataaaaggtgggagctgtgcgacattccgcggtgcaccactccacccccctcttccgggcccacatatcaatgcttaaagggaactggggaaaactaccgaggaaacgtggccgtgaccgtaagcggccatacctgccaacactggagcgcccagactcctcacacccataatcgcacgcctgaaaacttcccatgcaagaacttagacgaaaactattgccgcaaccccgacggaaagcgagcaccctggtgtcataccaccaacagtcaggtgcgttgggagtactgtaagatccctagctgtgacagctcaccggtgtccaccgaacagctggctcctaccgcaccacctgagctgaccccagtggttcaggattgttatcatggcgatgggcagagttatcgaggaacttcaagtaccacaaccaccggaaaaaagtgccagagttggtctagcatgacaccccacagacaccagaaaacacccgaaaactatcctaacgccgggctcactatgaattactgcaggaatccggacgccgataaggggccgtggtgtttcacaactgatccgagcgtaaggtgggagtactgcaacctgaaaaagtgctccggtaccgaggcctctgtggtggctccgccccccgttgtactgctgccagacgtcgagactccctcagaagaggattgcatgtttggaaacggcaaaggttaccgcgggaaacgagccacaacagtcactggaactccctgccaggattgggccgcacaagagccacaccggcattccatttttacaccggaaactaaccctcgggccgggctggaaaagaactactgccgcaacccagacggtgacgtgggaggcccctggtgctatacgacaaacccaagaaaactctatgattactgcgatgtaccgcagtgtgctgcccccagctttgactgtggtaaaccccaagtagaacctaagaaatgtcctgggcgggtggtcggaggttgcgttgctcatcctcactcctggccttggcaggtgtcactgagaacccggtttggaatgcatttctgtggagggacgttaataagccctgagtgggtgctgacagcagcccactgtctggagaagtcacccaggcctagctcctacaaggttattctgggcgcacatcaggaagtcaatctggagccacacgtccaggaaattgaggtctctagattgtttttagagccaacccggaaagatatcgccttgcttaaactctcctcccctgccgtgatcactgataaggttatcccagcctgtctgccaagcccaaattatgttgtcgctgacagaaccgaatgctttataaccggttggggtgagacccaggggaccttcggagctggccttttaaaggaagcccagttgcccgtgatcgagaacaaggtgtgtaatcggtatgagttccttaatggacgcgtgcagagtacagagttgtgtgcaggacacttggccgggggcacggacagctgtcaaggtgacagcggcggaccactcgtgtgctttgaaaaggacaaatatatcctgcagggggtcactagctggggcctcgggtgtgctcgacccaataaaccaggcgtgtatgtaagagtgagtaggttcgtcacgtggatcgagggcgtgatgcgaaacaat

SEQ ID NO: 18231 - DNA, 2430 bp, synthetic construct
  misc_feature 1..2430: note = source = /note="Description of Artificial Sequence: Synthetic coding sequence"
  source 1..2430: mol_type = other DNA
atggagcacaaggaagtggttctgctgctgctcctgtttttgaagtctggccaaggcgaacctctcgatgactatgtaaatacccaaggggccagccttttcagcgtgacaaagaagcagctgggagccggcagcatcgaggaatgtgcagccaagtgtgaagaagacgaggagttcacctgtagggctttccagtatcactccaaagagcaacagtgtgtgataatggccgaaaatcggaaaagttctattattatcaggatgagagatgtcgtcctctttgagaaaaaggtgtatctctccgagtgtaagacagggaacggaaagaactaccgcggaaccatgtccaagaccaaaaacggcatcacttgccagaagtggtcatccaccagtcctcataggccaagattcagccctgcaacacatccgtccgaaggactcgaggagaactactgccggaatccagacaacgatcctcaggggccctggtgctacacaaccgaccccgagaaacggtacgactattgcgatattctcgaatgcgaagaggaatgcatgcactgttcaggagagaactatgacgggaaaattagtaagacaatgtccggacttgagtgccaggcctgggactcccagtcaccgcacgcccacgggtacattccatccaagttccctaacaaaaatctgaagaagaattattgcaggaatccagaccgcgagttgagaccatggtgtttcaccacagatcccaacaagagatgggaactttgcgatataccacgctgcactacaccccctccatcttctgggcccacatatcaatgcctcaaagggactggcgagaactatagagggaatgtggcggtgactgttagcggtcacacttgccagcactggagtgcgcaaacaccacacactcacaatagaacccctgaaaacttcccatgcaagaacctcgacgaaaattattgtcgaaacccagatggcaagagagccccctggtgccacactaccaactctcaggtccggtgggagtattgtaaaataccatcttgtgactcaagtcctgtttctactgaacagttggcccctaccgctcctcctgagctcacccccgtggtgcaggattgttaccacggagatggtcagagttatcgcggcacctcaagtacaactacaacaggcaagaaatgtcaaagctggagctcaatgactccccataggcaccagaagaccccagagaactaccccaacgcgggactgacgatgaattactgcaggaacccagacgctgacaagggcccctggtgctttacaactgacccctctgttcggtgggagtattgcaatctgaaaaagtgttccggcactgaagcctccgttgtggcccctccccccgtggtgctgctgccggacgtcgagacaccgtcagaagaagattgcatgtttggcaacggaaaggggtatcgaggaaagagggccactacagttaccggaacaccttgtcaggattgggccgcacaagagccccatagacactcaattttcacgcccgaaacaaacccgcgcgcaggacttgaaaagaactactgtaggaatcccgatggcgacgtgggcggtccctggtgctacacgacaaatcctcggaagttgtatgactactgcgacgtgcctcagtgtgccgctccttccttcgactgtggaaaacctcaagttgagcccaagaagtgcccaggcagagtcgtcggcgggtgcgtggcacaccctcattcctggccctggcaggtgagccttcggactaggttcgggatgcacttctgcggagggacacttatcagccctgagtgggtgctgaccgctgctcactgtctggaaaagtccccaaggccatccagctacaaggtcatcttgggcgcacaccaagaagtcaacctcgaaccgcacgtgcaggagattgaggtatctcgcctgttcctggagccaacccggaaagatatcgccctgctgaagcttagcagtcctgccgtgattactgacaaagtaatccccgcctgtcttcccagcccaaactacgtggttgctgacaggacagaatgtttcatcaccggatggggcgagactcagggcacattcggcgccggcctgctgaaagaggctcaactccccgtgatcgaaaataaagtgtgtaataggtacgagtttctgaacggccgcgtgcagtccaccgagctctgcgccggtcatcttgcgggcggcacagattcttgccagggcgactcaggcgggcccctggtgtgtttcgaaaaagacaaatacattttgcagggcgtgaccagctgggggttgggatgcgcacggcccaacaaacctggggtgtacgtgcgcgtctctcgctttgtgacatggatcgagggagtgatgagaaataat

SEQ ID NO: 18232 - DNA, 2430 bp, synthetic construct
  misc_feature 1..2430: note = source = /note="Description of Artificial Sequence: Synthetic coding sequence"
  source 1..2430: mol_type = other DNA
atggagcataaggaagtggtactcctcctccttcttttcttgaagtccggtcagggcgagccactggatgattacgttaacacacagggagcttcactgttcagcgtaaccaagaagcagctgggcgctggatcaattgaggagtgcgccgctaagtgcgaggaagatgaggagttcacttgcagggctttccaatatcatagtaaggagcaacagtgtgtgattatggcggagaatcgcaagagctccatcatcatcagaatgagggacgtcgtactgtttgaaaagaaagtgtacctgtccgagtgtaaaacaggcaatggcaagaactaccgcggaacaatgagcaaaacaaaaaacggtattacatgccaaaaatggtcctctacttctccgcacaggcctaggttctctcctgccacacaccctagcgagggacttgaagagaactactgccgcaaccctgacaatgacccgcagggtccctggtgttacactaccgacccagagaagagatacgactactgtgacatccttgagtgtgaagaggaatgtatgcactgtagcggcgagaattatgacggcaagatctccaagaccatgtccggattggagtgccaagcgtgggactcccaatctccgcacgctcatggttacatcccctcaaagttcccaaacaagaacctcaagaaaaattactgcaggaaccctgacagagaacttaggccctggtgttttactaccgaccccaacaagagatgggagctgtgtgacattccccgctgtacgactcctccaccctcctccggccccacatatcaatgtctcaaaggaactggagaaaactaccgcggcaatgtggcggtcactgtctcaggacacacttgtcagcattggagcgcccagactccacatacgcacaataggacccccgagaactttccttgcaaaaatctggacgagaactactgcagaaaccctgatggaaagagggccccttggtgtcacaccaccaattctcaggtcagatgggaatactgcaagataccgtcctgtgacagcagcccagtcagtaccgaacagcttgcacccacagctccccccgagcttacccccgttgtccaggattgctaccatggtgacggtcagagttaccgcggaacctcttctactactactaccggcaaaaagtgtcagtcctggagctccatgacgccccacagacaccagaaaaccccagaaaactaccctaacgctggactcactatgaactattgtaggaaccctgatgcggacaagggaccatggtgcttcaccaccgatcctagtgtgaggtgggagtattgcaatcttaagaagtgctccggaaccgaggccagcgtggtcgctcccccacctgtcgtcctgttgcccgacgtggaaacgccaagtgaggaggactgcatgtttggaaacggcaaaggttacaggggtaaaagagcaaccacagtcaccggtacaccttgccaggactgggctgctcaggagccgcacagacacagcatctttacgcctgaaacaaaccctagggctggactggaaaagaactactgccgcaacccagacggcgacgtgggtggtccctggtgttatacaaccaaccctcgcaagttgtacgactattgcgacgttcctcagtgtgccgccccaagcttcgactgcggcaagccgcaagtcgaacccaaaaagtgccctggccgcgtagttggcggatgcgtcgcacacccccatagttggccgtggcaagtctccttgagaactagattcggaatgcatttctgtggcggaacacttatctcccctgagtgggtgttgaccgccgctcactgcctcgagaagagccccaggcccagttcctataaggtcattctgggagctcaccaagaagttaatctggagccccatgtgcaggaaattgaggttagtcgcctgtttctcgaacccacacgcaaagacatagctctccttaagctttcctctcctgcagtcatcaccgataaggtaatccccgcctgcctccccagtcctaactacgtggtggctgacaggacagaatgcttcattaccggttggggcgaaacccaaggcacattcggagcgggacttttgaaggaggcccagctcccagtaattgagaacaaggtctgcaataggtacgagttcctgaatggaagagtccagagtacagaactgtgcgccggccaccttgccggcggcactgactcttgtcagggcgattcaggaggccccctcgtctgtttcgaaaaggacaagtatattctgcaaggagtaacgtcctggggacttggatgcgctaggccgaataagcccggtgtgtatgtcagggtctccaggttcgttacttggatcgaaggagtaatgaggaacaac

SEQ ID NO: 18233 - DNA, 2430 bp, synthetic construct; identical to SEQ ID NO: 18226
  misc_feature 1..2430: note = source = /note="Description of Artificial Sequence: Synthetic coding sequence"
  source 1..2430: mol_type = other DNA

SEQ ID NO: 18234 - DNA, 2430 bp, synthetic construct
  misc_feature 1..2430: note = source = /note="Description of Artificial Sequence: Synthetic coding sequence"
  source 1..2430: mol_type = other DNA
atggaacacaaggaagtggtcttgcttcttcttctattcctgaagagcggccagggcgagcccctggatgattatgttaacactcaaggtgcttctctgttttcagtgacaaagaagcagttgggagctggttcaatcgaagaatgcgcagcgaaatgtgaggaagacgaagaatttacctgccgggcttttcaataccattcaaaagaacaacaatgcgtcattatggctgagaacagaaaatcttcaataattatccgcatgagagatgtcgtccttttcgagaaaaaagtgtatctcagcgaatgtaagaccggaaacggcaaaaactaccgcggtaccatgagtaaaactaagaacggtattacttgccagaagtggtcgtctactagcccccacagaccaagattctcgcccgccacccatcctagtgagggactcgaggaaaactattgtaggaacccagataacgatccgcagggcccatggtgttacacaaccgatccagagaaacggtacgattactgcgacatcctggaatgcgaggaggagtgcatgcactgcagtggcgaaaactatgacgggaagatcagcaagacaatgagcgggctggaatgccaggcttgggactctcagagccctcatgcccacggctacattccatcaaagtttcccaacaaaaatctgaaaaagaattactgccgaaaccccgatagagagctgaggccttggtgcttcacgaccgacccaaacaaaaggtgggagctgtgcgatatccccagatgcactacccctcccccttcctctggcccaacctaccagtgtcttaagggtacaggtgagaattataggggcaacgtcgccgtgactgtgtctggccacacctgtcagcattggagtgcccagacaccacacacacataataggaccccggagaactttccttgtaaaaacctggacgagaattattgcagaaacccagatgggaagagagctccatggtgccacactaccaatagccaggttagatgggaatattgcaagatcccatcatgcgatagtagccctgtcagcacagagcagcttgctcccaccgctccacctgaacttactcctgtcgtccaagattgctatcacggcgacggccagagctatcgcggcacctcttctaccaccaccacaggaaagaaatgtcagagttggtcttccatgacaccccacagacaccagaaaacgcctgagaactacccaaacgccggactaacaatgaactattgtaggaaccctgacgctgacaaaggcccttggtgctttaccacggatccaagcgttcggtgggagtattgcaacctcaaaaaatgtagtggaaccgaagctagcgtcgttgccccaccaccggtcgtgcttctgcccgatgtggaaacccctagcgaggaagattgcatgttcggcaatgggaagggctatcggggcaaaagggccaccacagttacaggaacgccatgccaggactgggccgctcaggagccacaccgacacagcatttttactccagagacaaatcctagagctggtctggagaaaaattactgtaggaacccagatggagatgtgggaggaccctggtgctacactaccaatcccagaaagctgtacgattactgcgacgtcccgcagtgcgccgctccaagctttgactgcggaaaaccacaggtcgagcccaaaaagtgccccggccgagtcgtaggcgggtgcgttgctcaccctcacagctggccgtggcaggttagtctgaggacacgattcggcatgcacttctgtggaggaactctgatctctcctgagtgggtgctgactgccgcccactgcctcgaaaagagcccacgaccaagttcttataaggtgatcttgggcgcccaccaagaagtaaacctcgagcctcacgttcaagaaatcgaggtgtcccggttgttcctggaacccacccggaaggatatagccttgcttaagctctcttcccctgcggtgatcacagataaggtgatccctgcatgtttgccttctcccaattatgtagtggcagataggactgaatgttttattacaggctggggcgagactcagggaacatttggagctgggctcctgaaggaggctcagctgccagtgattgaaaataaggtctgtaacaggtacgaatttctgaatgggcgggtgcagagtaccgagctctgtgcagggcatttggcagggggaaccgactcctgccagggggatagtggaggacctctcgtctgctttgagaaggataagtatatccttcagggtgtaacatcttggggcctgggatgtgctcgtccaaacaagcccggcgtttacgtcagagtgtccaggtttgtaacctggattgaaggcgtaatgaggaacaac

SEQ ID NO: 18235 - DNA, 2430 bp, synthetic construct
  misc_feature 1..2430: note = source = /note="Description of Artificial Sequence: Synthetic coding sequence"
  source 1..2430: mol_type = other DNA
atggagcataaggaggtcgtgctactgctgctcctctttctcaaaagtggtcagggtgaacctttggacgactacgtgaacactcagggggctagcttattttcggttactaaaaagcagctcggcgccggaagcatagaagaatgcgctgccaaatgcgaggaggatgaggagttcacatgcagggcttttcagtaccattcgaaagagcagcagtgtgtcattatggctgaaaatcgcaagagcagcattatcataaggatgcgggatgtcgtgctgttcgaaaagaaagtgtatttgtcggagtgcaaaacaggcaatggaaagaactacagagggacaatgtccaagacaaaaaatggaatcacgtgccaaaagtggagttctacatcgccccaccggccccggttttcacccgccacccacccaagcgaggggctggaggaaaattattgcagaaatccggacaatgatccccagggtccctggtgctacaccacagaccccgagaagcgctacgactattgcgacattcttgagtgtgaagaggaatgtatgcattgttctggcgaaaattacgacgggaagatcagcaagacgatgtccggtctcgaatgccaggcgtgggactcccagtctccacacgcacacggatacattccctctaagttccctaataaaaacttaaagaagaattactgccggaacccagatcgggaattaaggccgtggtgcttcactactgatcccaacaaacgatgggagctatgcgatatcccacgctgtactacccctccacctagttctggccccacttaccaatgtctgaaaggcactggagaaaactatagaggaaacgtggcagtcacagtgtccgggcacacttgccagcattggagtgctcagaccccccatacacacaacaggacgcctgagaattttccgtgcaagaatctggacgaaaattactgcagaaaccccgacggaaagcgggcaccatggtgccatacaacaaacagtcaagtccggtgggagtattgtaagattcctagctgcgactccagccccgtttccacggaacagcttgcacctactgctccgccagagctgacccccgtggtgcaggattgttaccacggtgacggccaatcataccgcggcactagctccacaaccaccaccgggaagaagtgccagagctggtcttcaatgaccccacaccgccatcagaagacgcctgaaaattaccccaatgctggcttgaccatgaattactgccgcaaccctgatgcggataagggaccttggtgttttactaccgaccctagcgtgagatgggagtattgcaacctgaaaaagtgtagcgggactgaggcttccgtggtcgcccctcctcctgtggtcctgctgccagacgtggagaccccctcagaggaggattgtatgtttggaaatggcaaaggctataggggaaagagggcaactaccgtgacaggaacaccttgccaagattgggctgcccaagagccgcatagacactccattttcacacccgagactaaccctagggctggcttggaaaagaattactgcagaaacccagacggcgatgttggcggaccttggtgctacacaactaatccaaggaagctgtatgactattgcgacgtgccccagtgtgccgctccctctttcgattgcggaaaaccccaggtggaacccaagaaatgtcctggtcgggtggttggcgggtgcgtggctcacccacactcttggccttggcaggtctcattgaggacacgcttcggaatgcatttctgcggcggaaccctgatcagtcccgaatgggtgctgacggcagcccattgtcttgagaaatccccaaggccatcatcgtataaagtgatactgggcgcccatcaggaggtaaaccttgaaccacacgtgcaggagattgaggtgagccgactgttcctagagcccaccaggaaggacatagccctcctgaagctgtcctctccagcggtgatcaccgataaagtaatccctgcttgccttccgtctccaaattacgtggtagctgacaggaccgaatgttttatcaccgggtggggcgagacgcagggaacgtttggagcagggctgctgaaggaggctcagctgcccgttatcgaaaacaaagtgtgcaaccggtatgaattcctgaatggaagagtccagtcaaccgagttgtgcgccggtcacctggccgggggaacagactcttgccaaggcgattccggtgggcccttggtgtgctttgagaaagacaagtacattcttcagggagtgacgtcttggggactgggatgtgctaggcccaacaaacctggagtctatgtgagggtctctagattcgtgacatggatcgaaggcgtcatgcgaaataat

SEQ ID NO: 18236 - DNA, 2430 bp, synthetic construct
  misc_feature 1..2430: note = source = /note="Description of Artificial Sequence: Synthetic coding sequence"
  source 1..2430: mol_type = other DNA
atggagcacaaggaagtggtcctcctgctgctacttttcttaaagtctgggcagggtgagcccctagatgactacgtgaacacacagggcgcatcgctgttctctgtcaccaagaagcagctgggcgccggctccattgaagaatgcgctgcaaagtgtgaagaagacgaggagtttacttgtagagcttttcaataccactccaaggagcagcagtgtgttatcatggctgagaatagaaaatcttccataataattcggatgagagacgttgtgttgtttgagaagaaggtgtacctaagcgagtgcaagacaggcaatgggaaaaactacaggggcacaatgagtaagacaaagaacggcattacttgtcagaagtggagctctacgagcccacacagaccgcgattttcccctgcaacgcatccatccgagggcttagaggagaactattgcaggaaccccgacaacgacccgcaaggcccctggtgttacactactgatccagaaaaacgctatgattattgtgatatccttgaatgcgaagaggaatgcatgcactgctcaggggagaactatgacggaaagatctccaagactatgtctggcctggagtgccaggcttgggattcccaatcaccacacgcgcatggatacattccttctaaattcccgaacaagaacctgaaaaagaactactgcagaaatcctgaccgtgagctccgtccctggtgcttcactacagatcctaataaacgctgggaactttgcgacatcccacgctgcaccaccccgcccccttcaagcggacccacctaccaatgcctgaagggcacaggagagaattatagaggtaatgtcgccgtgacggtctccggccacacgtgccagcattggagtgcccagactcctcacacccataataggaccccagaaaacttcccctgtaagaatctggacgagaactactgccggaaccccgatgggaagcgagccccctggtgtcacacgacaaattcccaggttagatgggagtactgtaagatcccaagctgcgactcctcaccagtcagtaccgagcagcttgctccgactgcaccacccgaactgactcccgtagtgcaggactgctatcacggggacggccaatcttacagagggacctccagcactaccactaccggcaagaagtgccagtcatggagtagtatgactccccatagacaccagaaaacccctgagaactatccgaatgcgggactgacaatgaattactgcaggaaccctgacgctgacaaggggccttggtgcttcacaacagacccaagtgtgcgttgggaatattgcaatcttaagaaatgttctggcacagaagcctcggttgtggcaccacctcccgtggtgctccttcctgatgtggaaaccccgtctgaggaggattgtatgttcgggaacggcaagggctatagaggcaaacgggccacaacagtcacagggactccttgtcaggactgggccgcacaggaaccacatcggcattcaatcttcacacccgagaccaaccctcgtgccggactggagaaaaattactgtcggaaccccgatggggacgttggcggcccatggtgctacactaccaacccccggaagctatatgactactgtgacgtgccccagtgtgcagctccatccttcgactgcggtaaaccccaggtggaaccaaaaaaatgtccagggcgcgttgtcggaggatgtgtggctcaccctcattcatggccttggcaggtcagtctgaggacccgattcggaatgcatttctgcggcggcaccttaatttcacccgagtgggtcctgaccgccgcacactgcctcgagaaaagtccgcggccctctagttacaaagttatcctgggggcgcaccaagaggtgaatttggagccccatgtacaggagatcgaggtaagccgactgtttctagagcccacgcggaaagatatcgccctattgaagttgtccagtcccgcggtcattaccgacaaagtgattcccgcctgtctgccgagccccaactatgttgtcgcagatcggaccgagtgcttcatcaccggctggggcgagacacagggcacatttggagctgggttgctgaaggaagcccaactacccgtgattgagaacaaggtatgcaaccgatacgagttcttgaatggcagggtgcagagcaccgaactgtgcgctggacacctggctgggggtaccgactcttgccaaggtgatagtggtggccccttggtctgtttcgagaaagataagtacatcctccagggggtaacctcgtgggggctcggatgtgcacgtcctaataaacccggggtgtacgtgagagtctcaaggtttgtaacatggatcgaaggcgttatgaggaacaac

SEQ ID NO: 18237 - DNA, 2430 bp, synthetic construct
  misc_feature 1..2430: note = source = /note="Description of Artificial Sequence: Synthetic coding sequence"
  source 1..2430: mol_type = other DNA
atggagcacaaggaggtggtgctgctcctcctgctgttcctgaagtccggccagggagagccgctggacgattacgtcaatacccagggcgcctcccttttttccgtcacgaagaagcaactgggagccggaagcatcgaagagtgcgcggccaagtgtgaggaggatgaggagttcacctgccgtgccttccagtatcattcgaaggagcagcagtgtgtgattatggccgagaatcggaaatctagcattattataagaatgcgagacgtcgtgctgtttgaaaagaaggtatatttgagcgaatgcaagacgggcaatggcaaaaattaccgaggcacgatgtcgaagacgaaaaatggtattacttgccagaaatggagtagtacgagtccccacagaccgcgtttctcgcctgcaacccatccctcagaagggttggaggagaattactgccgcaacccagataatgacccccagggcccttggtgctacacgactgatccagaaaagcggtacgactattgcgatatcctggagtgcgaggaagagtgcatgcattgctcgggcgaaaactatgacggcaagatctcgaagacgatgtccggtctagagtgtcaagcatgggacagccagagcccgcacgcccacggatacattcccagcaagtttcctaacaaaaacctaaagaagaactactgccgcaacccggatcgagagcttagaccgtggtgttttaccactgatcccaacaagcgctgggaactctgcgacattccacgatgcaccacgccaccaccaagcagcggccctacctaccagtgtctcaagggaacaggtgagaactaccgtggcaatgtggccgtgaccgtgtccggccacacgtgccagcactggtccgcccagacgccccacacgcacaacagaacgcccgagaacttcccctgtaagaatttggacgagaattattgccgcaaccccgatggaaagcgcgcgccctggtgtcacacgactaatagtcaggtcagatgggagtattgcaagataccgtcgtgcgattcctccccggtgtccacggaacagctggccccaacagctcccccagagctgactcccgtcgtgcaggattgctaccacggcgatggccaatcctaccgcggcacgtcttccacaacgacgaccggaaagaaatgccagtcctggagctccatgacaccgcaccgccatcagaagaccccggagaactacccaaatgccggcctgacaatgaattattgccgcaatccggatgccgataagggcccatggtgcttcactactgatccatcggtgcgctgggagtactgcaacctgaagaagtgcagcggcaccgaggcgtctgtggttgctcccccgcccgtcgtactcctgcctgacgtagaaacccccagtgaagaggactgcatgttcggtaacggcaaagggtaccggggcaaaagggccaccaccgtgaccgggaccccatgccaggattgggctgcacaggagccccacaggcactcaatatttacccctgagaccaatccgcgcgctggactggagaaaaactactgtcgtaaccccgacggtgatgtaggtggaccctggtgttacacgaccaacccgcgcaagctgtatgattactgcgacgtgccccagtgcgccgctccctcgttcgactgcggaaaaccccaggtggaaccaaagaagtgtcccggccgggtggtaggcggatgtgtggcccacccccattcctggccatggcaggtaagcctgcgaacccgattcgggatgcatttctgcggcggaacactgatatcccccgaatgggtgctgacagctgcacactgccttgagaagtctccccgtccctccagctacaaagtgattctgggtgcacaccaggaggttaacctggaaccacacgtgcaagagatcgaggtgtcgcgattgtttcttgaacctacgaggaaggacattgctctgcttaagctgagttcgcccgctgttatcactgacaaagttattcctgcctgtctgccatcaccgaattacgtagtggcagatcgtacggagtgcttcatcactggctggggggaaacgcaaggaacatttggggcaggcctgttgaaggaggcccaactgccggtcatagagaacaaggtgtgtaatcgatacgagttcctgaatggaagagtgcagagtactgagctctgcgcaggccatctggctggaggcacagattcctgtcagggtgatagtggtggacccctggtatgcttcgaaaaggataagtacattctgcagggcgtcacgtcctggggtttggggtgcgcgcggcccaacaagcccggagtgtacgtgcgcgtgtcccgcttcgtgacatggatagaaggcgttatgcgcaacaac

SEQ ID NO: 18238 - DNA, 2430 bp, synthetic construct
  misc_feature 1..2430: note = source = /note="Description of Artificial Sequence: Synthetic coding sequence"
  source 1..2430: mol_type = other DNA
atggaacacaaggaggttgtactgctcttgctcctatttctgaagagtgggcagggtgagccccttgatgactatgtaaacacgcagggtgccagtctgttcagcgtgacaaagaaacaacttggtgctgggtctatcgaagaatgcgccgccaagtgtgaagaggacgaggaattcacgtgcagggctttccagtatcatagtaaggagcagcagtgtgtgataatggccgagaatcggaaaagcagcattatcattcgcatgcgcgacgttgtgctgttcgagaagaaagtgtatctatccgaatgtaagaccgggaacggcaaaaattatagaggaacaatgtccaaaaccaagaacggaatcacgtgccagaagtggtcgtcaaccagcccccatcggcctcgtttttccccggctacccatccgtctgaagggttggaggagaactattgccgaaatcctgacaatgatcctcaaggcccctggtgttacactacagacccagagaaacgttacgactactgcgatatcctggagtgcgaggaggagtgcatgcactgttcaggggaaaactacgacggcaagatctcaaagaccatgagcggcctggaatgccaagcctgggactcacagagtccacacgcccacggatacatcccttctaagtttcctaacaagaacctcaagaagaattattgcagaaatccagaccgggaattgaggccctggtgctttactacagaccccaataagcgctgggaactgtgcgacatcccgcggtgtacaaccccaccacctagtagcggtccaacataccagtgtcttaaaggaaccggggaaaactatcggggcaatgtggctgtcacagtttcaggccacacttgtcagcactggagcgcccagactcctcacacacacaacagaacacctgagaacttcccatgcaagaatctcgacgagaattactgtagaaatcccgacggaaagcgtgccccttggtgccacaccacgaacagccaagtgcgttgggaatattgcaaaattccttcctgcgatagcagtcctgtcagcacggaacaacttgcacccaccgctcctccagagttaacgccagttgtccaggactgctatcatggggacggtcaatcttaccgaggcacaagctccaccacaaccaccgggaagaaatgtcagagctggagctctatgaccccccatcggcaccagaagacacctgagaactacccaaacgctggactaacaatgaattattgccgaaaccccgacgcggacaagggcccttggtgcttcactaccgaccctagcgtgaggtgggagtattgtaatctaaagaagtgcagcggcactgaggcttcagtcgtggccccgcccccagttgttctactgcctgacgtggagacaccgtcggaggaggattgcatgtttggaaatggcaaaggatataggggcaagagggccacaacagtgactggcacaccctgtcaggactgggcagcccaggagccacaccgccactccatttttactccagagacaaatccccgggcaggtctagagaaaaactattgccggaatcctgacggtgatgttggcggtccgtggtgctacacaactaatccaaggaaactatatgattactgcgatgtaccccagtgcgcagcaccaagttttgactgcggtaagccccaggttgagccaaagaaatgccctgggcgggtagtgggtggatgtgtcgcccatcctcattcgtggccatggcaggttagcctgaggacaagattcggcatgcacttctgtggcggaaccctgatctctcccgagtgggtactgaccgcggcacattgcctggaaaagtccccgcgcccttcctcctacaaggtgatcctcggcgctcaccaagaagtgaatcttgagcctcacgtgcaagagattgaggtcagtcggctctttcttgagcccacccgcaaagatatcgctctgctgaagttgagttctcctgctgttataaccgataaagttatcccagcatgcctgccctcacccaactatgtggtggcagatcgcacagagtgcttcattaccggttggggggagacccagggaactttcggagccggcctcctaaaagaggcacagctccccgtgatcgaaaataaagtgtgtaaccggtatgagttccttaatggaagggtacagtccaccgaactgtgcgccggccatttggctgggggaactgattcatgccagggcgactcaggaggaccactggtttgtttcgagaaggataaatatattctgcaaggcgtgactagctggggtctgggttgtgcgcgtcccaacaaaccaggagtttatgttagggtatcccggttcgtgacatggatcgagggtgtgatgcgcaacaat

SEQ ID NO: 18239 - DNA, 2430 bp, synthetic construct
  misc_feature 1..2430: note = source = /note="Description of Artificial Sequence: Synthetic coding sequence"
  source 1..2430: mol_type = other DNA
atggaacataaggaggtagtgcttctcctgctgctgtttctcaagtccggacagggtgagccactggatgactatgtgaatacacagggcgcctcattgtttagcgttaccaagaaacaattgggagcaggttccatcgaggagtgtgctgcaaagtgtgaagaggatgaggagttcacctgtagggctttccaataccacagtaaggagcagcagtgcgtaatcatggctgagaataggaagtcatccatcattatccgtatgagagatgtggtcctctttgagaagaaggtgtacttgtccgaatgcaagaccggaaacggcaagaactataggggcactatgtcaaaaaccaagaatggaatcacatgccagaaatggtcctctactagtccacatagacctcgcttctcacctgcaacccatccatcagagggtctggaagagaattactgtaggaaccccgataacgatccccaaggcccttggtgttatactaccgatcccgaaaagaggtacgactactgcgacatcctggaatgtgaggaggagtgcatgcactgtagtggtgagaattatgatggcaagatctctaagacaatgtctggcttggaatgtcaagcctgggacagccaatcacctcacgctcatggatacattccctctaagtttcctaataagaatttgaaaaaaaattattgtcgtaatcctgatcgtgagctgcgtccctggtgtttcactacagaccctaataagcgttgggaactgtgcgacatcccccgttgcacaacccctcctccatccagtggtccaacataccagtgtctcaagggaacaggcgaaaactaccgcggaaacgttgcagtgaccgtgagcggccacacatgccagcactggagcgctcagacacctcacacacacaacagaacccccgagaacttcccctgcaagaacttggatgaaaattattgcagaaatccagatggaaagcgcgctccatggtgccacaccactaattcacaggtccgttgggaatactgcaagatcccatcatgcgactcctctccagtctctacagagcaactggcacctaccgcaccaccagaactcacacccgtggttcaagactgctaccatggagatggacaaagttacaggggtacctcatccacaactactaccggtaaaaaatgccagtcttggtcttccatgaccccccacagacaccagaagacccccgaaaactatcccaatgccggtctcacaatgaactactgcaggaaccccgatgctgataaaggtccatggtgcttcaccacagatcccagtgttaggtgggagtactgtaacctcaagaaatgctccggtacagaagcttctgtcgtcgcacctccccccgtggtgctgctccccgacgttgaaactcctagcgaagaggactgtatgttcggtaacggcaagggctacaggggaaaacgtgctaccactgttaccggaaccccatgtcaggattgggcagcccaggaaccacatcgtcactcaatcttcacccccgagacaaacccacgtgctggactcgaaaagaactattgtaggaatcctgatggagacgtcggaggcccatggtgttacaccaccaacccccgcaaactctacgactactgcgatgtcccacagtgtgcagctccctctttcgactgtggtaagccccaggtagagcccaagaaatgccccggcagggtcgtcggtggttgcgtggctcaccctcactcctggccttggcaggtttccctgcgtacccgctttggcatgcacttttgtggtggtactttgatctctcccgaatgggtcctgaccgctgcccattgcctggagaagtccccacgtccctcttcctacaaagtaatactgggagcccaccaggaagtgaatcttgaaccacacgtgcaagagatagaggtgagcaggcttttcctggagcccactagaaaggacattgctctcctcaagttgtcttctcctgctgttatcactgataaagtaattcctgcctgtctccccagccctaactacgtggtggcagataggacagaatgctttatcacaggatggggcgagacacaaggaactttcggcgccggcttgctgaaggaggcccagctgcccgtaatcgaaaataaagtgtgcaaccgttacgagttcctcaacggtagagtgcagtctaccgaattgtgtgcaggccatctcgctggaggtactgattcctgccagggcgattctggaggtcctctcgtgtgcttcgagaaagacaagtacatcctccaaggtgtaacctcttggggccttggatgtgccaggcccaataagcctggagtgtatgtcagggtatctcgcttcgtgacttggatcgaaggcgtcatgcgtaataac

SEQ ID NO: 18240 - DNA, 2430 bp, synthetic construct
  misc_feature 1..2430: note = source = /note="Description of Artificial Sequence: Synthetic coding sequence"
  source 1..2430: mol_type = other DNA
atggaacataaagaggttgtgctgctgctgcttctttttctgaaatccggccaaggggaaccactcgacgactatgttaacacccaaggcgcctccctttttagtgtgacgaagaaacagctgggggcaggatctatagaggagtgtgctgccaaatgtgaagaagatgaagagtttacttgtcgtgccttccaataccacagcaaggaacagcagtgcgtgattatggccgaaaacagaaaatctagtataatcattcgtatgagggacgtggtgctattcgagaagaaagtctacctgtctgagtgtaaaactgggaatggcaagaattaccgaggcactatgtccaaaacaaaaaatggcataacctgccaaaagtggagctccacttctcctcatcgtcccagatttagtcccgcaactcacccttcagaaggccttgaggaaaactactgtcgaaaccccgataatgaccctcaggggccttggtgctacaccacagacccggaaaaacgttacgactattgtgacatcctggaatgcgaagaagagtgcatgcactgctcaggggagaactacgacggtaaaataagtaagactatgagtggcttagaatgtcaggcttgggattcccagtccccccatgctcacgggtacataccttctaagtttccgaataaaaaccttaaaaagaattactgccgcaatcctgatcgagaacttaggccttggtgtttcactaccgatcctaataaacgctgggagctgtgcgacatcccaagatgtaccacacctccccctagctctgggccaacttatcagtgcttgaagggcactggcgagaactacaggggcaacgtcgccgtaaccgtgtctggccatacttgccagcactggtcagctcagacccctcatacacataaccgcacacctgagaactttccttgtaaaaatctcgacgagaattattgccgcaacccagacgggaagcgggcaccctggtgtcataccaccaactcacaggttaggtgggagtactgtaagatcccatcatgtgactcatcccctgtaagtacagagcaactggctcctaccgctcccccggagttgactccagtggtccaggattgctatcatggtgacggtcagtcatacagaggtacgtcatccactaccactacaggtaaaaaatgccagagttggtcctccatgaccccacatcgccaccaaaaaactcccgagaactaccccaacgctggactcacaatgaactactgccgcaaccccgatgccgacaaaggcccatggtgctttacaaccgacccctcggtcaggtgggagtattgcaatctgaagaaatgttctgggaccgaggctagtgtggttgcgcccccccctgtcgtgctgctacctgacgtggaaaccccttcagaggaggattgtatgtttggaaacgggaaggggtaccggggcaaaagggcaaccacagtaacggggaccccttgtcaagattgggcagcacaggaacctcatagacatagcatctttacccctgaaaccaatccccgcgctgggctggaaaaaaattattgccgcaacccagacggcgatgtcggaggcccttggtgctataccaccaatccccggaaattatacgactattgcgacgtgcctcaatgtgcagcaccatcttttgattgtggaaagccgcaggtggaaccaaagaaatgcccgggacgagtagtgggtgggtgtgttgcacatccgcattcttggccctggcaggtaagcttgagaacacgctttgggatgcatttctgcggcggcaccctgatttcaccggagtgggtcctgactgcagcgcactgcctggaaaaatcgccgcggccttccagttataaagtcattctgggtgcacatcaggaagtgaacctggaaccgcacgtgcaggaaatcgaagtcagcagactattcctcgaacctaccaggaaggatatcgcactgctcaagttgtccagtccggccgtgatcacagacaaagtgatccccgcttgtctgccatcacctaactacgttgtcgcagaccgcaccgagtgtttcatcacaggatggggagagacccagggaacttttggtgctggattactcaaagaggcacagctgccagtcattgaaaacaaggtgtgtaaccgatacgaattcttgaatggaagagtccagtctacagaattatgcgccgggcatttggctgggggaacggactcttgccagggggatagtggcggcccactagtgtgctttgagaaggacaaatacatcctgcagggtgtgacctcctggggtctcggctgcgcccggcccaacaagcctggcgtgtacgtgagggtttctcggttcgttacatggatcgagggtgtgatgagaaataac

SEQ ID NO: 18241 - DNA, 2430 bp, synthetic construct
  misc_feature 1..2430: note = source = /note="Description of Artificial Sequence: Synthetic coding sequence"
  source 1..2430: mol_type = other DNA
atggagcacaaagaagtcgtgctgctcctcctcctctttctcaaatccgggcagggtgagcccctggacgactacgttaatacccagggcgccagcctctttagtgttacgaaaaaacagcttggagccgggagcattgaagaatgtgcggccaagtgtgaggaagatgaagagttcacatgtcgggccttccagtaccactctaaggaacagcagtgcgttattatggccgagaatcgcaagtcgagtatcatcatccgcatgcgagacgtggtgttgttcgagaagaaggtgtacctgtccgaatgcaaaactggcaatggaaaaaattatcggggaactatgagcaagactaagaacggaatcacctgccagaaatggtcatctacctctccccacagacctcgattctccccagccacccacccaagcgaggggctcgaagagaattactgtaggaaccccgacaatgacccacagggcccgtggtgttataccactgaccctgagaagcggtatgactactgtgatatcctcgagtgtgaggaggagtgtatgcattgcagcggagaaaactatgatggaaaaatctctaagacaatgtctggcctcgaatgtcaagcctgggattcacaaagtcctcatgcgcacggttacatcccttccaaattcccaaataaaaacctcaaaaaaaattattgtcgtaatcctgatagggaattaaggccatggtgtttcacaaccgacccaaacaagcggtgggaactgtgtgacatcccccggtgcacaactccccccccatctagcggccccacctatcagtgcctgaagggaacaggcgaaaactaccggggtaacgtggccgtaactgtgagcgggcatacgtgccagcattggagcgcgcagacaccgcacacgcataacaggacccccgagaatttcccatgtaaaaacttggatgagaattattgtaggaacccagacggcaagagggctccctggtgtcacaccacaaattctcaggtgcggtgggagtattgcaaaattcccagctgtgacagctctcccgtctcaactgagcagctagcaccgacagctcccccagagctaactccagtagtacaggattgctaccacggcgacggccagagctataggggtacctcatcaaccactactaccggcaaaaagtgtcaatcctggagctctatgaccccccatcggcatcagaagaccccagagaactaccctaacgccgggctcaccatgaattattgtcgcaatcccgacgccgacaaaggcccttggtgcttcacaacagaccccagcgtcaggtgggagtactgcaacctgaaaaaatgctctggcacagaagcatctgttgttgcaccccccccggtagtacttctcccagacgtggagactccttctgaggaggactgcatgttcggaaatggtaagggataccgaggcaagagagctaccaccgtgactggcacaccctgccaggactgggcagctcaggagccccacaggcatagtattttcacacccgagacaaacccaagggccgggctggaaaagaattactgtcggaatcctgacggggacgtcggcgggccatggtgttacacaactaatcctcggaagctttatgactattgcgacgtcccacaatgtgcagccccatccttcgactgtggcaagccccaggtagaaccgaagaaatgtcctggacgagtggtaggcggctgtgttgcccacccccatagctggccctggcaggtgagtctaagaaccagatttggcatgcacttttgtggcggcacactaatctccccagagtgggtgctcactgccgcccattgcctcgaaaaaagccccaggccctccagctacaaagtgatcttgggggcacatcaggaagtgaatttggaacctcacgtccaggagatcgaagtgtcaagactgtttctcgagccgaccaggaaagatattgcactcctcaaactgtccagcccggctgtcatcacagacaaggttattcccgcatgtcttccaagtcccaattatgtagtagcagacaggaccgaatgcttcataactggctggggtgagactcagggaactttcggagcgggcctccttaaggaggcccagctcccagttatagagaataaggtatgtaatcgctatgaatttttgaatggtcgggtgcagtctacagaactttgtgcaggacacctcgcgggcggaacagactcttgccagggtgactcgggcgggccccttgtttgtttcgaaaaggacaagtatatccttcaaggcgtgacctcctggggattgggttgtgctcggccgaataagcccggagtgtatgttcgggtctcccggttcgtgacatggattgaaggggtcatgagaaacaat

SEQ ID NO: 18242 - DNA, 2430 bp, synthetic construct
  misc_feature 1..2430: note = source = /note="Description of Artificial Sequence: Synthetic coding sequence"
  source 1..2430: mol_type = other DNA
atggaacacaaagaggtggtactactcctgctgctattcctcaaatctgggcaaggtgagccgctggatgactacgttaacactcaaggagctagcctgttttccgtgacaaagaaacagctgggcgccggatctattgaggagtgcgcagccaagtgtgaagaagatgaggagttcacctgtagagcattccagtaccattccaaagaacaacagtgtgttattatggcagagaaccgaaagtcgtcaatcattattagaatgcgtgacgtagtcctgttcgaaaaaaaggtatacttaagcgaatgcaagacggggaacgggaagaactatcgaggcactatgtccaagaccaaaaatggtattacatgccagaaatggagttctacctctccccataggcctcgtttttctcccgctacccacccttcagaaggattggaggagaactattgcagaaacccagataatgacccccagggaccttggtgttacacaacagacccagagaagaggtatgattactgcgacatcctcgaatgcgaagaggaatgcatgcactgctccggcgagaattacgacggcaagatttctaagaccatgtcaggattggagtgtcaggcgtgggactctcagagtccgcacgctcatggatatatcccttctaaattcccgaacaagaacctcaagaagaattattgtcgaaatccggatagggaactgcggccttggtgttttactactgacccaaacaagagatgggagttgtgcgacattccacgttgcaccacccccccccctagctccgggcctacctatcagtgcttgaaggggacgggagaaaactataggggcaacgtggctgtcacggtgagtggccatacatgccaacattggtcagcacagacccctcacacccacaatagaaccccagaaaatttcccctgcaaaaatcttgacgagaattattgcaggaatcccgatgggaaaagggctccatggtgccacacaaccaactcacaagtcagatgggagtactgcaaaattccttcttgcgacagttcgccagtgtccacagagcaactggcaccaactgcacctcccgaactgacgcccgtagtacaggactgctatcacggcgatggccagtcctacagagggacatccagcacaacgaccactggcaagaagtgtcagtcctggtcttccatgacccctcatcgccaccagaagactcctgaaaactatcctaacgctggattaaccatgaattactgccgaaatcccgacgcagacaaaggaccatggtgtttcaccaccgacccctccgtgcgatgggaatattgcaacttgaaaaagtgttctggtaccgaggccagcgtggtggcgcccccacctgtggtcctgcttcctgatgtagagacgccatccgaggaggattgcatgtttggcaatgggaaaggatatcgcgggaagcgcgcaactaccgtcacagggacaccgtgtcaggactgggcagctcaagaaccccataggcattcaatcttcacacccgagactaacccccgcgcgggactggagaaaaactattgccgtaacccagatggggacgtcggtggaccgtggtgctacacaaccaatccacgaaaactgtacgattactgcgatgtgcctcagtgtgcagcgccgagctttgattgtggtaagccccaagtcgagcccaagaaatgcccaggacgcgtagtaggaggctgtgtagcccatccccatagctggccatggcaggtcagtctgcgaactcggttcggtatgcatttttgtggcggcacccttatttctcctgaatgggttctcactgcagcacattgcctcgaaaaatccccacgaccttccagttataaggtgatattgggagcccatcaagaggttaacctagagccccacgtgcaggaaatagaagtctcacgattatttcttgaacctactcgaaaagatatcgcccttctcaaactctcttccccagcggttattactgacaaggtgattcccgcctgcctgccatctcccaattacgttgtggctgataggacggaatgcttcatcaccggctggggcgaaactcaggggactttcggtgcaggcctccttaaggaggcccaactgccagttattgaaaataaggtttgtaatcgatacgaattcctgaacgggcgagtgcaatccaccgaactgtgtgcgggacacctggcgggaggaacagatagttgtcagggcgattcaggcggtcctctggtctgctttgaaaaagataaatacattttgcagggcgtgacaagttggggactcggctgcgcccgaccgaataaaccaggagtgtacgtgagagtttcccgctttgttacctggatcgaaggtgtgatgagaaataac

SEQ ID NO: 18243 - DNA, 2430 bp, synthetic construct
  misc_feature 1..2430: note = source = /note="Description of Artificial Sequence: Synthetic coding sequence"
  source 1..2430: mol_type = other DNA
atggagcataaggaagtggtgctgctgctcttgctgtttttgaagagcggccaaggtgagcctctcgacgattacgtcaatacacagggagcctccttattcagcgtaaccaagaagcagctgggcgccggatctattgaggaatgtgccgccaagtgcgaggaggatgaagagttcacctgccgtgctttccaataccattcaaaagagcagcaatgcgtcattatggccgaaaaccgaaaatcatccatcatcatccgtatgcgagacgtcgttttatttgagaagaaggtgtatctgtctgagtgtaaaactggtaatggcaagaattaccgtggcaccatgagcaagaccaagaatggcatcacatgtcaaaagtggtcaagcacatcaccccacagaccccgcttcagccctgctacccaccccagcgaggggctagaagaaaactattgtcggaaccccgacaacgacccccagggtccctggtgctacactacagacccagagaaaaggtatgactactgtgacattctggagtgtgaggaggagtgtatgcactgctccggggagaattacgacggtaaaatctctaaaactatgagtgggctggagtgccaggcctgggactcacagagtccacatgctcacggctacatcccgagtaaattccccaataagaacctcaagaagaactactgtcgaaacccagatcgtgaattgcgcccatggtgtttcaccaccgaccccaacaagagatgggaactatgcgacatcccacgttgtactactccaccaccctcatccgggcctacataccagtgcctcaagggaacaggggagaattatcgaggaaatgtagctgtcacagtaagcgggcacacttgccaacactggtctgcccagacccctcacacccataatcggacacctgagaatttcccatgtaaaaacctagatgagaattactgcagaaaccctgacggaaaacgggctccttggtgtcacacaactaactcccaagtgcgctgggagtattgtaaaattccatcctgcgattcctcaccagtctccaccgagcagctcgctcctacagctcctcccgagcttacccccgtggttcaagattgttaccatggggacggacagtcttacagaggcacaagtagcaccactaccactgggaagaaatgtcagtcatggagctccatgaccccacataggcatcagaagacgccagaaaactaccccaacgccggactcacaatgaactactgcaggaaccccgacgcagataagggaccctggtgtttcaccactgacccgtctgtgagatgggagtactgcaatttgaaaaaatgttcgggtactgaggccagcgttgtggctccgccaccagtggttctgctgccagacgtggagaccccatccgaggaagattgcatgtttggcaatggcaaaggttatcggggcaagcgtgctacaaccgtgactggcaccccatgtcaggactgggcagcacaggagccacataggcactccattttcacccctgaaacaaaccctcgcgcgggcctggaaaagaactactgtcgtaatcccgacggggacgttggcgggccctggtgttataccacaaatccgaggaaactgtatgattactgtgacgttccgcaatgtgcggcaccctctttcgactgtggcaagcctcaggtcgagccgaagaaatgccctgggagggtggtaggtggctgtgtcgcccatccacattcgtggccttggcaagtctcactccggacacggtttggcatgcatttctgtgggggaacattgattagcccagaatgggtactgaccgcagcacattgtctggagaaaagtccgcggcctagctcatataaagtcattttgggggcccatcaggaagtgaacctcgagcctcatgtccaggagattgaagtctctcgtctctttctggaaccgacacgtaaggacattgcccttctgaaactttccagccccgctgtgattacggataaggtgattcccgcatgtctcccctctccaaactacgtggtggctgaccgaacggagtgcttcatcaccggttggggtgaaacacaggggacattcggcgccggcttgctaaaagaggcccagctgcctgttatagagaataaagtgtgcaatcgttatgagttcttaaatgggagagtccagagtacagaattgtgtgcaggccatttagctggcggtacagatagctgtcagggtgattcaggcggccctctggtttgctttgagaaggataagtacatcttgcagggagtgacaagttgggggcttggttgcgcgcgtccaaacaagcccggcgtctacgtgcgggttagtcgttttgtgacctggatcgagggtgttatgaggaataat

SEQ ID NO: 18244 - DNA, 2430 bp, synthetic construct
  misc_feature 1..2430: note = source = /note="Description of Artificial Sequence: Synthetic coding sequence"
  source 1..2430: mol_type = other DNA
atggagcacaaggaagtcgtgctgctactgctactgttcttgaagtccggacagggagaacccctagatgactacgttaacacccagggagcatctctgttcagcgtgacaaagaaacagctcggggccggtagtattgaagaatgtgctgcaaaatgcgaggaagacgaggagttcacgtgccgggcattccaataccattccaaggagcagcagtgtgttatcatggccgagaaccgaaaatcttccatcattattcggatgcgcgacgtggtcctgttcgaaaagaaggtgtatctctccgagtgcaaaaccggaaatggcaagaattataggggaaccatgtctaaaaccaagaacgggattacctgtcagaagtggtccagcaccagtccccaccggcccaggttttctcctgcaacacacccaagcgagggtctggaagaaaactactgtcggaacccagacaatgatccccagggcccgtggtgctataccacggaccccgagaagcggtacgactactgcgatatcctggagtgcgaggaggagtgtatgcattgtagcggcgaaaattacgatgggaagattagcaaaaccatgagtgggcttgagtgtcaggcctgggattcccagtctccacatgctcacggatacataccctctaaattccctaataagaatctgaagaagaactactgtcggaatcctgatagggagctgaggccatggtgttttacgacagaccccaacaagcggtgggaactgtgtgacatcccacgttgtaccacaccgccaccctcgagtggacccacctaccaatgtttgaaggggacaggcgagaactaccgcgggaacgtggccgtgaccgtgtcaggccatacatgccagcattggtctgcccagactccccatacacacaataggacccccgagaacttcccatgcaaaaacctagatgaaaattactgtagaaatccagacggcaaaagagcgccttggtgtcacactactaacagccaggtccggtgggaatactgtaagatccctagttgcgatagttctcccgtgagcacagagcagctagctcccaccgcacccccagaacttacacccgtggtgcaggattgctaccacggggacggccaatcttaccgggggacctcctctacgactaccacaggaaagaaatgtcaatcttggtcctcaatgacacctcaccggcatcagaagacccctgagaactatccgaatgctgggctgaccatgaactattgccggaatcccgacgcggataagggcccctggtgttttaccacggatccctctgtcaggtgggagtactgtaatctaaagaagtgtagtggcaccgaggccagcgtcgtggccccgcctccagttgtacttctgcccgatgttgagacaccctccgaagaggactgcatgtttggaaacgggaaggggtatcgaggaaaacgcgcaaccaccgttaccggcactccctgccaggactgggccgcgcaggagcctcacaggcacagcatcttcacgccagagacgaacccacgggctgggctggagaaaaattactgccggaacccagacggggacgtcggcggcccatggtgttacacaactaacccgcggaaactctacgactactgcgatgtgcctcagtgcgccgcacctagcttcgattgtgggaagcctcaggtagaacctaagaagtgtcctgggcgggtcgtcggaggatgtgtggcccacccccactcctggccttggcaagtgtccctgcggactagattcgggatgcatttctgtggaggcactcttatttcccccgaatgggttctgaccgcagcccattgtctcgaaaaaagcccacggcctagcagctataaggtaatcctgggagcgcaccaggaggtgaacctcgaaccccacgttcaggaaattgaagtgtcaaggttatttctggagcccacccgcaaggatatagcactgcttaagctctcttctccagccgtgattacagataaagtgattcccgcttgcctgccttcacccaactatgtagtcgcagatcgcaccgaatgcttcattacgggatggggcgagacgcagggaacctttggtgcaggcctactaaaagaggctcagctgcctgtgatcgagaacaaggtttgtaaccgctacgagtttctgaacgggcgagttcagtccacagaactgtgcgccggtcatctcgcaggcgggacagattcttgtcagggggacagcggcgggcccctggtatgcttcgaaaaggataaatacattctccaaggcgtgactagctggggcctgggctgcgcacggcctaataaaccaggagtctatgttagagtctcaagatttgttacttggatagagggggtgatgcgtaataat

SEQ ID NO: 18245 - DNA, 2430 bp, synthetic construct
  misc_feature 1..2430: note = source = /note="Description of Artificial Sequence: Synthetic coding sequence"
  source 1..2430: mol_type = other DNA
atggagcacaaagaggtcgtactgcttctgcttctttttctcaaatcagggcaaggcgagcctcttgatgattacgtgaacacccagggcgctagtctgttcagtgtaactaaaaagcaactaggagccgggtcaatagaagagtgtgctgcgaagtgcgaggaagatgaagagttcacttgtcgcgctttccaataccactctaaagagcagcagtgcgttatcatggcggaaaatcggaagtcttcgataatcatccgcatgagggatgtggtgctcttcgagaaaaaagtatatttgtccgaatgcaagactggcaatggtaaaaactaccggggaactatgtccaaaacaaaaaatggaataacatgccagaagtggtcatcaactagcccacacaggcctcggttcagtcccgccacccacccatctgaggggctggaggagaactactgtagaaaccctgataatgatccccagggcccttggtgttacaccacggacccagagaaaagatacgattattgcgatattctggaatgcgaagaggaatgtatgcactgcagcggtgaaaactatgatgggaagatcagcaaaacaatgagtgggctggaatgccaggcctgggacagtcagtcaccccatgctcacggatacatcccatcgaaattcccgaacaagaaccttaagaagaactactgcagaaaccccgacagggagctccggccttggtgctttaccaccgatccaaacaaacgctgggaactctgcgatattccgagatgtacaaccccacctcccagcagcggaccaacctaccagtgcctgaagggcacaggagagaactatcgtggaaacgtcgccgtgacggtctctgggcacacttgtcaacattggagtgcgcagacaccacacactcacaacagaactcctgaaaacttcccatgtaagaacctggacgaaaattattgccggaaccctgatggtaaacgcgccccttggtgccatacaacgaacagccaagtgcgctgggagtactgtaaaatcccaagctgcgattcaagtccagtttctactgaacagttagcacccacagcgccaccagagctcaccccagtagtgcaggactgctaccatggcgacggtcagagctacaggggtacttcaagcactaccaccacaggcaaaaagtgccagtcatggagtagcatgacccctcacagacaccagaagaccccagagaactatccaaacgccggccttaccatgaactattgcagaaatccagatgcagacaagggaccatggtgtttcaccactgatccctcagtccgttgggagtactgtaacctcaaaaagtgctcgggcactgaggccagtgtcgtcgctcctcctccagtcgtcctgttgcctgatgtggaaacaccatctgaagaagactgtatgtttggtaacggcaaaggctacagggggaaacgcgccactacagtgacgggcactccatgccaggactgggcagctcaggagccacataggcattccatcttcacacccgagacgaacccacgggctggccttgagaaaaattactgtcgcaacccggacggggacgtcggcggaccatggtgctataccacaaaccctcggaaactgtacgattactgcgacgtccctcaatgtgccgcaccttcttttgattgcggaaagccacaggtggaacccaaaaaatgtcctgggcgtgtcgtcggcgggtgtgtggcacacccacatagttggccctggcaggtgtctctgaggactaggtttggaatgcacttttgcggcggcaccttgatttctccagagtgggttctgaccgctgctcactgcctggaaaaatccccccgaccgtcaagttataaagttatcctgggcgcccaccaggaggtaaacctcgaacctcatgtacaagaaatcgaggtcagccgcctgtttctggaaccaacgcgcaaagatattgctctgctgaaacttagttccccagcagtgataacggataaggttattccagcctgtcttccatctcctaattacgttgtggctgaccgcacggaatgttttatcaccgggtggggcgaaactcagggtacattcggcgctgggctgctgaaggaagcccaattgcctgtgattgagaacaaggtatgtaataggtacgagtttctgaacggacgcgtacagagcaccgagctgtgcgccggacaccttgccgggggtacagattcatgtcagggtgattccggagggccactggtttgcttcgaaaaggacaagtacatcttgcagggggtcacttcttggggcctgggatgcgctcgcccaaacaagcctggggtttacgtcagggtgtcgcgcttcgtgacgtggatagaaggagtcatgagaaacaac

SEQ ID NO: 18246 - DNA, 2430 bp, synthetic construct
  misc_feature 1..2430: note = source = /note="Description of Artificial Sequence: Synthetic coding sequence"
  source 1..2430: mol_type = other DNA
atggaacataaagaggtggtgctgctgctactgttgttcttgaagtccgggcagggggagcccctcgacgactacgttaacacccaaggcgcctctcttttcagtgtcacgaagaagcagctgggcgctggatctatcgaagagtgcgcagcgaaatgcgaagaggacgaggagttcacctgccgggccttccagtatcactccaaggaacagcagtgcgtgatcatggctgaaaatcgtaaatcttccatcatcattcgtatgagagatgtggtgctcttcgagaagaaggtgtacctctcagagtgtaaaacggggaatggtaaaaattatcggggcaccatgagcaaaacaaagaacggtatcacttgccagaaatggtcctctacgtcaccccaccgcccccgttttagccctgctactcatccctccgaaggtttggaagagaactactgccgcaatcctgataatgatcctcagggcccgtggtgttataccaccgacccagaaaaacgctatgactactgtgatattctcgaatgcgaggaagagtgtatgcactgttccggagaaaactacgatggcaaaatcagcaagaccatgtcaggccttgagtgtcaggcgtgggattcgcaatccccccacgctcacggttacataccgtcaaagttccccaataaaaatttgaagaaaaactattgcaggaatcctgacagagagctgaggccatggtgtttcaccactgatcctaacaagaggtgggagctgtgtgacattcccagatgcactacaccgcctccttcatctggccctacctatcagtgcttgaaggggacgggggagaactatagaggtaacgtggctgtgacggtcagtggccatacatgccagcactggagcgcacagaccccacacactcacaatagaacacccgaaaacttcccctgcaagaacctggacgagaactattgtcgcaaccctgatggtaaaagagcgccgtggtgtcacacaactaattcccaggtccgatgggagtattgcaaaatcccttcatgtgactcaagccctgtgagcacagagcagctggccccaaccgccccacctgagctgaccccagtggtgcaagattgttaccacggagatggccagagctataggggcacatcttctaccactacaacaggtaaaaagtgccagtcatggtcatcaatgactccccatagacaccaaaagacacccgaaaattaccctaatgctggtctgactatgaactactgtcgcaatcctgacgctgacaaaggaccctggtgctttacgacggacccctcagtcaggtgggagtactgcaacctcaaaaaatgcagcggaaccgaagcttctgtggtagctcccccccccgtggtgcttcttcccgatgtggaaacaccatctgaggaagactgtatgtttggcaacggcaaaggatatcgcggcaagcgggcaactaccgtgaccggaaccccttgtcaggactgggccgcccaggaaccacaccgccatagcatctttaccccagagacaaacccaagagcgggacttgagaagaactactgtagaaatcccgacggcgatgtggggggaccctggtgctacactaccaatccaaggaagctctatgattactgtgacgtgccacagtgtgctgccccatcctttgattgtggcaagccccaggtcgaacctaaaaagtgtcccggtcgtgtagtgggtggctgcgtggcccacccacacagttggccttggcaggtgagcctgaggacacgatttggcatgcacttctgcgggggaaccctgatctcccctgagtgggtgctgactgccgctcactgcttagagaagtcaccaagaccaagctcatacaaagtgatcttaggagctcaccaagaagtgaatctggagccccacgttcaagaaatcgaggtgtccagactgttcctggaaccaacccgcaaggacatcgccctcctcaagctgagttctcctgccgtgattacagacaaagtgatccccgcctgcctaccatcacctaactacgtggtggccgatcggacagagtgctttatcacgggctggggagaaactcaaggcacctttggtgccgggctgcttaaggaagcccagcttcccgttatcgagaacaaagtgtgcaatcggtacgaattcttgaacggccgggtgcagtccactgaattgtgcgcagggcacctggcgggcgggactgatagctgtcagggtgactcgggcggtcctctcgtgtgttttgaaaaagacaagtatatcctacaaggcgtgacatcctggggcctggggtgcgcgcgccctaacaagcccggcgtctacgtccgcgtctctcggttcgtgacgtggattgaaggtgtcatgcggaataac

SEQ ID NO: 18247 - DNA, 2430 bp, synthetic construct
  misc_feature 1..2430: note = source = /note="Description of Artificial Sequence: Synthetic coding sequence"
  source 1..2430: mol_type = other DNA
atggagcacaaggaggttgtccttctcttgttgctgtttttgaaatcggggcaaggggaacctttggatgattatgtcaatacacaaggggcttcgctcttttccgttaccaagaaacagttgggagccggatcaattgaggagtgtgctgcaaagtgcgaggaggatgaagaattcacctgtcgagctttccagtaccattctaaagaacagcaatgcgttatcatggccgaaaataggaaaagcagcataataataagaatgcgtgacgttgttctctttgaaaagaaggtctatctttctgaatgcaagacaggaaatggaaagaactatagaggtaccatgagcaagactaagaacgggattacatgtcagaagtggtccagtacctcccctcataggccgagattctcacctgccacccatccctcagagggtcttgaagaaaattactgccgcaacccggataacgatccccagggtccgtggtgttataccaccgatccagagaaaagatacgattattgtgatatcttagagtgcgaagaagaatgtatgcattgttctggagagaactacgacgggaagatatctaagacgatgtccgggttagagtgtcaggcctgggactcccaaagcccccatgcccatggatatattccatcgaaattcccgaacaagaatcttaagaaaaattactgcagaaacccagatagggagttgcgaccttggtgttttacgactgatcctaacaaacgctgggagctatgcgacattcctagatgtaccactcctccgccatcctcgggcccgacatatcagtgcctaaaaggaacaggtgaaaattatcgtggtaacgtcgctgttaccgtctctggccatacttgccagcactggtctgcacaaaccccccatacacataacaggactcctgaaaacttcccttgtaagaacctagatgagaattactgccgtaacccagacggtaagagagccccatggtgtcatacaaccaatagccaagttaggtgggaatactgcaaaatacccagttgtgacagttcaccagtttcaacggaacagctagctccaaccgctccacctgagcttacccctgtggtacaagattgttatcatggtgatggtcaatcctaccgcggaacgagcagtacgacaaccacaggcaaaaaatgtcaaagttggagttcgatgacgccacatagacaccagaaaacacctgagaattacccaaatgcaggattgaccatgaactattgtcgtaaccctgacgcagataagggaccttggtgcttcaccaccgacccttctgttcgatgggagtattgtaatttgaaaaaatgcagtgggaccgaagccagtgtcgttgcaccgccaccagttgttttgctcccagatgtggaaactccttccgaagaagattgtatgtttggaaatggaaagggttatagaggcaaacgtgcaactactgttacgggcactccatgtcaagattgggctgcacaagagccacacagacatagtattttcacgcctgaaacaaaccctcgagcagggttagaaaaaaattattgtaggaatcctgatggcgatgtcggtggaccgtggtgttatacgacgaatcctcgaaagctgtatgattactgtgatgtccctcaatgtgcggctccctcttttgactgtggcaaacctcaggtagaacctaagaagtgcccgggacgtgtggtaggtggctgtgtggcacatccgcactcctggccttggcaagttagtttgaggacacgattcggcatgcatttttgtggtggtactttgatctcccccgagtgggttctcaccgcggctcattgtttagaaaaatctccgcggccatcatcgtataaggtgatattaggcgctcatcaagaggtcaacctcgaacctcacgttcaggaaatcgaagtctctaggttatttcttgagcctactagaaaggatatcgccctcttgaagctctcgtcaccggctgtgataacagataaagtcatccccgcatgcttgccgagtccgaattatgttgtggctgacagaaccgagtgtttcataactggatggggagaaacacaagggaccttcggcgctggtctcctcaaggaagctcaactccctgtaatcgaaaataaagtttgtaatcgttacgaattcctgaacggaagagtgcaatccaccgaactctgcgccggccatcttgcgggaggaaccgattcttgtcaaggcgactctggaggtccactcgtttgtttcgaaaaggataaatatatccttcaaggtgttacctcttgggggttggggtgtgcacgtcctaataagccgggcgtatatgtcagggtgagcaggttcgtcacttggatagagggggtcatgagaaataac

SEQ ID NO: 18248 - DNA, 2430 bp, synthetic construct
  misc_feature 1..2430: note = source = /note="Description of Artificial Sequence: Synthetic coding sequence"
  source 1..2430: mol_type = other DNA
atggaacataaggaggttgttctccttctgctcctttttcttaagagtggtcagggtgagcctttagacgattacgttaatacacaaggtgccagcctgttcagcgtcacaaagaaacaactgggtgccggaagcatcgaagagtgcgctgcgaaatgcgaggaggacgaggaattcacctgccgagccttccagtatcattccaaggaacagcaatgtgtgatcatggccgagaatcggaagtcaagtattatcatacgaatgcgtgacgtggtcctgtttgaaaaaaaggtttatctttcagaatgtaaaaccggtaacggcaagaattaccgcggtaccatgtctaagacaaaaaatggtatcacctgtcaaaagtggtcgtccacgtcgcctcacaggccgcgtttctcgccggcaacccatccctcagaggggttagaggaaaactactgtcggaatccagataacgatccacagggcccttggtgctacactactgacccggagaagcggtatgattattgtgacatacttgaatgtgaggaggagtgtatgcattgctctggcgagaactacgatgggaaaatctctaagacaatgtccgggttggagtgccaagcgtgggactcgcagagtccccacgctcatggctacattcccagcaagttccctaacaaaaaccttaaaaaaaactattgtcggaatcccgatcgagaacttcgtccttggtgctttactactgatcccaacaaacgttgggagctctgcgacatcccaaggtgcaccacccccccgccgtccagcggtcccacttatcagtgtctgaaagggactggggaaaattatcggggcaacgtagctgttactgtcagcgggcacacttgtcagcattggtctgcacaaacccctcatacgcataaccgtacgcccgaaaacttcccgtgcaagaacttggatgagaattattgtcgcaaccctgacggtaaacgtgcgccatggtgccatactacgaattcgcaagttcgatgggaatattgcaagatccccagttgtgattcttcgccggtttctactgagcaactggcgcctacggcacccccggaattgactcctgttgttcaggactgttatcatggagacggccaaagttatagaggcacgtcttccactaccactaccggcaaaaagtgccagtcctggtcgtctatgacaccgcatcgccaccagaagaccccagagaactatccgaacgccggtctcaccatgaattattgtcgtaaccctgatgctgataaaggtccttggtgcttcaccaccgatccgagcgttcggtgggagtattgcaacttgaagaagtgttccggaacagaggcctcggttgtcgcaccgcctccggtagtgctgcttcctgatgtcgaaacaccttccgaggaagactgtatgtttggtaatgggaagggctaccgaggtaagcgagccacaaccgtgactggcactccttgccaagactgggcagctcaagaaccacatcgacattccatttttacgccagagacaaacccgcgtgccggattggagaagaactactgtcggaatccagatggcgatgtgggtggaccgtggtgttatacaacgaacccaagaaagctatacgactattgcgatgtgccacaatgcgctgccccttccttcgactgcgggaaacctcaggttgagcccaaaaagtgtccgggccgcgtggtcggtggatgcgtggcccacccccattcttggccttggcaagttagtttgcggacccgcttcggtatgcatttttgtggtggcacactgatttctccggaatgggttcttacggcagcacattgtcttgaaaagtctccccgaccaagctcttataaagtaattctgggggcgcaccaggaggttaatttagaaccccatgttcaagagatcgaggtgtctcgactctttttggagcccacccgcaaggacattgcactgcttaagctatcttcgccagccgttataacggataaggttatcccggcttgtctaccttcccctaactacgtcgttgctgaccgtactgaatgtttcatcaccgggtggggtgagacgcaaggcacctttggcgctggtctgcttaaggaagcccagcttccggtaatcgaaaacaaagtgtgtaaccggtacgaattcctcaatgggcgtgtccagagcacggagctttgcgcaggccatttggctggtggcacggactcctgccagggggattccggtgggccccttgtctgtttcgagaaagacaaatatattttgcaaggagttaccagctggggcttaggttgtgctcgccctaacaaaccaggggtgtatgtgcgagtgagccgttttgtcacatggattgaaggcgtcatgcgcaacaat

SEQ ID NO: 18249 - DNA, 2430 bp, synthetic construct
  misc_feature 1..2430: note = source = /note="Description of Artificial Sequence: Synthetic coding sequence"
  source 1..2430: mol_type = other DNA
atggagcataaagaagtggttcttttgcttctactttttttgaaaagtggccagggcgaacctctggatgactacgtcaatacgcagggtgcatctctcttctctgtgaccaagaaacagttgggagctggaagtatcgaggagtgtgctgccaagtgcgaagaggacgaggaatttacttgcagggccttccagtatcactctaaagaacagcagtgcgtaataatggccgagaatcgtaaaagctctataataataaggatgcgagatgtcgtcctgttcgagaaaaaggtctatctgtcagaatgtaagaccgggaatggcaagaactaccgaggcactatgtccaagaccaagaacggcattacttgccaaaagtggtcaagcaccagtccacataggccacggttcagccccgctactcacccttctgaagggctggaggagaactattgccgcaatcccgacaatgaccctcaaggaccatggtgttatacgactgatccggaaaagcggtatgattactgcgacatcctggagtgtgaagaggagtgcatgcattgctccggggaaaactatgatggtaaaatcagcaaaactatgagtggccttgagtgccaagcatgggactcccagagcccccacgcccacggttacatcccaagtaagttccccaataagaaccttaagaaaaattattgcagaaatccagatagagaactgcgtccgtggtgctttactacagaccctaacaagagatgggagctgtgtgatatccctaggtgcactacgcctcccccatcttccggcccaacctaccagtgtctgaagggaaccggcgagaattaccggggtaacgtcgccgtcaccgttagtgggcatacatgtcaacactggtccgcgcagaccccccatactcacaaccgcactccagagaattttccttgtaaaaacctagacgaaaattactgtcgtaatcccgatggtaagagggcaccgtggtgccacaccaccaatagccaggtgcgctgggagtattgcaagattccctcctgtgacagcagccccgtgtccacagaacagttggcccctacggctcccccagaactgactccagtcgtacaagattgttaccacggggacggccagtcctatcgcgggacttcgagcacgactacaacagggaagaagtgccagtcctggagctccatgactccgcaccggcatcagaagacgccggagaactatcccaacgctgggcttacaatgaattactgtcgaaatcctgacgccgataaggggccctggtgttttacgacagacccatccgttcgttgggagtactgtaacctgaagaagtgtagcggcacagaggctagcgttgtagcaccacctcccgttgtcctgctgccagacgtcgaaaccccatcggaggaagactgcatgtttggcaacgggaaagggtatcgcggcaagagggccaccactgtgaccgggactccttgtcaggattgggccgcccaggagccacaccgccactcaatctttactccagaaacaaatccacgcgccggacttgaaaagaactactgcaggaatcccgacggcgacgtgggtggcccttggtgttatacaactaatccacgaaaattatatgactactgcgacgtacctcaatgtgcagcccccagtttcgactgcggaaagccacaggtggagccgaagaaatgccccggaagggtggtcggtggttgcgtcgcccatccccactcatggccgtggcaggtgagcctgcggacgcgctttggaatgcacttttgcggaggaactctgatcagccctgagtgggtcctgaccgctgcccactgcctcgagaagagcccacgtcccagctcatacaaagtcattcttggtgcacatcaagaagtcaatctggagccccacgtccaggagattgaggtctccagactgttcctggagcccacccgaaaagatattgcgctgttgaaactgtctagccccgcagtgattaccgacaaagtaattcctgcctgtttgcccagtcccaactacgtcgttgcagatagaactgagtgctttatcactggttggggcgaaacccagggaacctttggcgctggccttctgaaagaagcgcagttgccggtcatagagaataaagtctgcaacagatatgaatttttgaacggccgggtacaatccactgagctgtgtgccggccacctggcaggaggaacggactcctgccagggagacagcgggggcccattggtttgttttgaaaaggacaagtacattctacaaggggttacctcctggggcttggggtgtgcacgcccgaacaaacctggtgtatacgtgagggtgtccaggtttgttacctggattgaaggggtcatgcgtaacaat

SEQ ID NO: 18250 - DNA, 2430 bp, synthetic construct
  misc_feature 1..2430: note = source = /note="Description of Artificial Sequence: Synthetic coding sequence"
  source 1..2430: mol_type = other DNA
atggagcataaggaagtagtgttgctgcttctcctgtttctgaagtccggacaaggggagccgctggacgactacgtgaatacgcagggagccagcttgtttagtgtgactaagaaacagctcggcgccggatctatcgaagagtgtgcggcgaagtgtgaggaagacgaagaattcacctgtcgcgcttttcagtaccattccaaggagcagcagtgtgtaattatggctgagaatagaaaaagctccatcattatccgaatgcgggatgtggtactcttcgagaagaaagtgtatctgtcggagtgcaagactggtaacggcaagaactaccggggcaccatgtccaagacaaagaacggcatcacctgtcagaagtggtcctccacgtccccgcacagaccaagattttcccccgctacacacccaagcgaggggctggaagaaaactattgccgaaatcctgataatgatccccagggcccttggtgctacacaacagaccctgagaaacgttacgattattgtgatattcttgaatgcgaggaagagtgcatgcactgttctggcgaaaactatgatggcaagatctccaagacaatgtctggcctggaatgccaggcttgggattcacagtccccgcacgcacacggctatatcccaagcaaattccccaataagaatcttaaaaaaaactattgccggaatcctgatagggagctgcgaccttggtgttttactaccgaccctaataaacggtgggaactctgcgatataccacgatgcaccacaccccctccctcatctggcccgacttaccagtgcctgaagggcacaggggaaaactaccgaggaaatgtcgccgttactgtgtcaggtcacacttgtcagcattggtcagctcagactcctcacacccataatcgtacaccagagaacttcccttgtaaaaacctggacgagaactattgcaggaaccccgatggcaagagggctccttggtgtcacacaacgaacagccaggtgcgctgggagtattgcaagattccgagctgcgacagcagcccggtgagtaccgaacagctagcgccgaccgcacccccagaactgacacctgtggtgcaggattgttatcacggtgatgggcagagttacaggggcaccagctccaccacaaccactggcaaaaagtgtcagtcttggagctccatgactcctcatcggcatcaaaagactccagagaactacccaaacgcaggactgacaatgaattactgtagaaatcccgacgccgacaaggggccctggtgctttacaaccgatccaagtgtgcggtgggaatactgcaatctgaaaaaatgttctggcacggaagcatccgttgtggccccacctccagtggtgttgctgcccgatgtcgaaactccaagcgaggaagattgtatgttcggtaacggcaaggggtaccggggaaaacgtgcgacgacagtgaccgggaccccttgccaggactgggcagcccaggagccccaccgtcatagcatctttacccctgaaaccaatcccagagcaggtctagagaagaattactgcagaaatcctgatggggacgtggggggtccttggtgttatactaccaacccacgaaaactgtacgactattgcgatgtaccccagtgtgccgctccttctttcgactgcggcaagcctcaagtggaaccaaagaaatgtcccggccgcgtagtgggggggtgcgtagcgcatccccattcatggccatggcaggtgtctttgcgaacacggtttgggatgcatttctgcggcggtacactgatctcacccgagtgggtgctcacggccgcacattgtctggagaaaagccctcggccgtcatcttataaggtgatactgggggctcaccaagaggtgaatttggagccacatgttcaagaaatagaggtcagcagattgttccttgaacctacacggaaggatatcgctctgctgaagctttcttcacccgctgtaatcactgacaaggtaattccagcgtgtttgccctctcccaactatgtcgtggccgacagaaccgagtgttttatcaccggctggggcgaaacccaggggacatttggcgctggtctgctcaaagaggcccagctccccgtgatcgagaataaagtatgcaacaggtacgagtttctaaacggtcgtgtgcagagcactgaactgtgtgccggtcatctagctggaggtaccgattcttgtcaaggtgattccggcgggcctcttgtgtgctttgaaaaagacaaatacattctccagggagtgacaagctgggggctgggctgcgcgcgaccaaataaacccggagtgtacgtccgagtttcacgctttgtgacctggatcgagggcgttatgagaaacaat

SEQ ID NO: 18251 - DNA, 2430 bp, synthetic construct
  misc_feature 1..2430: note = source = /note="Description of Artificial Sequence: Synthetic coding sequence"
  source 1..2430: mol_type = other DNA
atggagcacaaggaagtagtgctccttctcctgctcttccttaaatcaggccagggcgaaccacttgatgactacgtcaacacccaaggggcgtctttgttcagcgtgactaagaagcagttgggcgcaggctctattgaagaatgcgctgccaagtgcgaggaagacgaggaattcacgtgtcgagcattccaatatcattcaaaagagcagcagtgcgtgatcatggctgagaacaggaaatccagtattattattaggatgagggatgtggtgttgttcgagaaaaaggtgtacctctccgagtgtaaaacaggcaatggcaaaaactatcggggcaccatgtccaagaccaagaatggtatcacttgccagaaatggagctctaccagcccccaccggccaaggttctctcctgccacccaccccagtgaaggtctggaggagaattactgcagaaaccccgacaacgaccctcagggaccatggtgctacactaccgacccagagaagcgctacgactactgtgacatcctcgagtgtgaagaggaatgtatgcactgttctggcgagaattacgatggtaagatttctaaaaccatgagcggcctggagtgccaggcctgggactcccagagtccccacgcacacggatacattccatcaaagttcccgaataagaacctcaaaaaaaattactgccggaatcctgatagggaactgcgcccatggtgctttacaactgacccaaacaagcgatgggaactgtgcgacattccaagatgcacgactcctcccccctcttcagggcctacctatcagtgcctgaagggcaccggggaaaattataggggcaacgttgcggtgacagtgtctgggcatacctgtcagcactggagcgcccagacccctcatacccataacagaacacccgagaacttcccatgcaaaaatttggatgaaaattattgtaggaatccagacggaaaaagggccccatggtgtcatacaaccaactctcaggtgagatgggagtactgtaagattccatcatgcgacagctcacccgtgtctactgaacagctggcccctactgcccctccagaactcacacccgtagtgcaggactgctatcacggcgatggccagtcctataggggcacttcttccacaaccacaactggaaaaaagtgtcaatcttggagctcaatgactccccaccgccaccagaagaccccagagaactatccaaacgccggcctcacaatgaattattgccgcaacccggatgctgacaaaggcccgtggtgtttcacaacagatccgtctgtccggtgggagtattgtaacctgaagaagtgctccggaacagaggccagtgtagtcgccccgccccctgtggtgctcctccccgacgttgagactcctagcgaggaggactgtatgttcggcaacggaaaaggttacagagggaagagagccacaaccgttaccggcaccccctgccaggattgggccgctcaggagccccaccggcattccattttcacccctgagaccaacccacgcgcaggtctcgaaaagaactattgccggaatcccgatggcgatgtcggcggcccctggtgctatacaacgaatcctcggaaactgtatgactactgcgatgtgccacagtgtgccgctccttcttttgactgtgggaagccccaagtggagcctaagaaatgccctggtcgggtcgtcggcgggtgcgtggctcaccctcacagctggccatggcaggtgagcctcaggacacgcttcggcatgcacttttgcgggggtacgcttatctccccagagtgggtcttgactgcagcccactgtctcgagaagagccctcggccaagttcatataaggtgattttgggtgctcaccaggaggtgaacctcgaaccgcacgtacaggagatcgaggtttctcgactgttcttggagccaactcggaaagacattgccttgctcaagctgagctcacctgctgtcatcactgataaagtaatacccgcctgcctgccgtccccgaattacgtggtggctgaccgaacagagtgcttcatcaccggctggggagaaacacaaggtaccttcggtgcgggcctgctcaaagaagctcagctccccgttatcgaaaacaaggtctgcaaccggtacgaattcctgaacgggcgggtgcagtccaccgagctttgcgctggccacctggcaggcgggacagactcctgccagggagattctgggggtccactggtctgctttgagaaagacaagtacatccttcaaggagtgacttcttggggattgggatgcgccaggccgaataagcctggtgtgtacgtgagggtgtcccggtttgtaacgtggattgaaggtgtcatgcgaaacaac

SEQ ID NO: 18252 - DNA, 2430 bp, synthetic construct
  misc_feature 1..2430: note = source = /note="Description of Artificial Sequence: Synthetic coding sequence"
  source 1..2430: mol_type = other DNA
atggagcacaaggaagtggttctcttgcttctgctgttcctgaagagtggccagggcgagcctctggacgattacgtgaatactcagggagctagccttttctctgtcaccaaaaaacagctgggcgccggctccattgaggagtgtgcggccaaatgtgaagaggatgaagagttcacatgccgagcatttcaataccactcaaaagagcagcaatgtgtgattatggcagaaaatcgaaaaagttcaatcataattcgcatgcgagacgtcgtgttatttgagaaaaaggtatatctttctgagtgcaaaaccgggaacggaaagaactaccgaggcacgatgagtaaaacgaaaaatggaattacttgtcagaagtggagtagcactagcccgcatcgcccccggttttccccggcgacacatccgtccgagggtctggaggaaaactactgtcgcaaccctgacaacgacccacagggtccttggtgctacaccactgaccctgaaaagcggtatgactattgcgatatactggagtgcgaagaagagtgcatgcactgcagtggggagaactatgacggtaagatttcaaagactatgtctggtctggaatgtcaggcgtgggactctcagtcccctcacgctcacgggtatattcctagcaagtttccgaataagaacttgaagaaaaattattgcaggaaccccgatcgggagttaaggccctggtgtttcaccacagatcccaataaacggtgggaactatgcgacattcctcggtgcacaacaccaccaccaagtagtggcccaacctatcagtgcctgaaagggaccggtgaaaactatcgtgggaatgtggcggtgaccgtgagtgggcatacttgccagcactggagcgcccagacaccacatacccataatcggactccagagaacttcccctgcaaaaacctggacgagaactattgtcggaacccagacggaaagagggcaccgtggtgtcacactactaactctcaggtgcgatgggagtactgtaaaatccccagttgcgattcctcgcctgtcagtacagagcagctggcccccaccgccccccccgagcttacgccagtcgtgcaggactgctatcacggcgacggacagtcctaccgaggaacttcctctactacaaccaccggaaaaaagtgccagagttggagttccatgaccccccatcggcaccagaagactcctgaaaactacccaaatgcaggccttactatgaactattgccgtaatccagacgccgataaaggcccctggtgcttcactaccgaccctagcgtgaggtgggaatattgcaatctgaaaaaatgtagtgggacagaggcttcagtggtggccccgccccctgttgtgctacttccggacgtggagactccatcggaggaagactgtatgtttgggaatggcaaggggtacagagggaaaagagctaccactgtcactggcacaccctgtcaggactgggcagcccaggagccgcatagacattctattttcacacccgagaccaatccacgtgcgggactcgaaaaaaactactgcaggaacccagatggagacgtaggcggtccatggtgctataccaccaatccccgaaagctttatgactattgcgatgtgcctcagtgtgccgctccgtcatttgactgtggtaagccgcaggtggagcccaaaaaatgtcccggaagagttgtcggtggatgcgtggctcatccccatagttggccttggcaggtgagcctgcgcacccggttcggtatgcacttctgtggaggtactttgatctccccggagtgggtgttgaccgcagctcactgtttggagaaaagtccacgtcccagctcctacaaagtaatattgggcgctcaccaagaagtaaacctggagccccacgtgcaggagatcgaggtgagtcggctttttctggagcctacgcggaaggatattgccttgctgaagctctcgtctcctgcggtgatcacagataaagttatccctgcttgtctcccgagcccaaactatgttgtagcagataggaccgaatgtttcataacaggatggggcgagacacagggaactttcggcgccggcctcctgaaagaggcccaactgccagtcattgagaacaaggtctgtaacagatacgagttcctgaatggaagagtccaatccacagagctctgcgcaggccatctggctggtggcaccgattcctgtcaaggagactccggcggacccctcgtatgcttcgaaaaagataaatacatcctgcagggggtgacctcttggggcctgggctgcgccagaccaaataagcctggcgtgtatgtaagggtctcacggtttgttacctggatcgaaggcgtcatgcggaacaat

SEQ ID NO: 18253 - DNA, 2430 bp, synthetic construct
  misc_feature 1..2430: note = source = /note="Description of Artificial Sequence: Synthetic coding sequence"
  source 1..2430: mol_type = other DNA
atggaacacaaggaggttgttctgctgctgctcctatttctaaaatcaggtcagggggaaccgttggatgactatgtcaatacccagggtgcatctctcttcagcgtcactaaaaagcagctgggggccggcagcatcgaagaatgtgccgctaagtgcgaggaggatgaagaattcacctgtcgggcctttcagtaccacagcaaagagcaacagtgcgtgattatggctgagaaccgaaaatctagtatcatcattcgaatgagagatgtggtgctgtttgagaagaaagtgtatttaagcgaatgcaaaacaggcaatggtaagaattaccggggcactatgagcaaaaccaagaatggtattacttgccagaaatggtcctccacatcccctcaccgacctcgattctctcctgctactcacccatctgaaggcttggaggaaaactattgcaggaatcccgacaacgatccccagggcccttggtgctatacaaccgatcctgagaaacgatacgactactgcgatatcctggagtgcgaggaggagtgcatgcactgttctggtgagaattacgacggcaagatttccaagaccatgtcggggcttgagtgccaggcctgggactcgcaatctccacacgcacacggctatatcccgagcaaattccccaacaagaatcttaaaaaaaactattgtaggaatcccgatcgggagctgaggccctggtgtttcaccactgatcccaataaacgctgggaattatgtgatattccacgatgcacaacgccaccccccagcagcgggcctacctatcagtgcttgaaggggactggcgagaattatcggggcaacgtagcagtgacagtctcagggcacacctgtcagcactggagcgcgcagacgccacacacacacaatcggacacctgaaaactttccttgtaagaacctggatgaaaattactgccggaatcctgatgggaagagggccccatggtgtcataccaccaattcccaggttcgatgggagtattgcaagatcccttcatgcgactcctcccctgtctccacagagcaactcgcacctacagctcccccagaacttacacctgtcgtgcaagattgttaccacggcgacggccagtcgtaccgggggacctcaagtaccaccacaaccggaaagaagtgtcagagctggtcaagtatgacccctcatcgccaccagaaaacacctgagaactacccaaatgccggcttgacaatgaactactgccgcaaccccgacgccgacaaagggccttggtgtttcaccacagacccatccgtgcgttgggaatactgtaatttgaaaaagtgcagtggcactgaagccagcgtggtggctccacctccggtggtattactgcccgacgtggagacacctagcgaggaggactgcatgttcggaaatgggaagggataccgggggaagcgagccactactgtaactgggaccccctgccaagattgggcagcccaggaaccgcaccgacattccatttttactccagaaaccaaccccagagcaggcctcgaaaagaattattgccggaatcctgatggcgacgtaggcgggccttggtgctatacaaccaatcctagaaaattgtacgactactgcgacgtgccacaatgtgcggcaccatccttcgattgtggaaagccacaagttgagccaaaaaaatgccctggtagggtggtgggcggctgcgtggcccatccacacagctggccttggcaggtatcgcttcggaccaggttcggcatgcacttttgtggcggtacactgataagccccgaatgggtcttgaccgctgcccactgcctggaaaagtcacctagacccagctcctataaggtcatcctgggggctcatcaggaggtgaacctggaaccacacgtgcaagagattgaggtgtcaagactgttcctggagccaacacggaaggatatcgccctcctgaagctatcctctcctgccgtgattacagataaggtcattccggcttgccttccttccccgaattacgtggtggccgatcgaactgagtgtttcattacgggctggggcgagacccaggggacattcggtgctgggctgctcaaagaggcacaactaccagtaatagagaacaaggtgtgtaatcgatacgaatttctgaacggcagagttcagtcaaccgagctgtgtgccgggcatctggcaggcgggactgacagctgccagggggactctggcggcccactcgtgtgcttcgaaaaagataaatacattctccagggagttacgtcttggggcctgggctgtgccaggcccaataagcccggggtctacgttcgggtcagtagattcgttacctggattgagggggtaatgaggaacaac

SEQ ID NO: 18254 - DNA, 2430 bp, synthetic construct
  misc_feature 1..2430: note = source = /note="Description of Artificial Sequence: Synthetic coding sequence"
  source 1..2430: mol_type = other DNA
atggagcataaggaggtcgtgctgcttctcctgctgttcctgaagtccggccaaggggagcccctcgacgattatgtgaacacccagggtgcttctctattttctgttacaaaaaaacagctaggtgccggcagcattgaggagtgcgccgcaaagtgtgaggaagatgaggagttcacctgccgtgcattccagtatcattctaaggaacagcagtgtgtaatcatggctgagaacaggaaatcatcaatcattattagaatgagagacgttgtgctgttcgaaaagaaggtgtatttatctgaatgtaagactggcaacggcaagaactatcgggggactatgtcaaagaccaagaatggtataacttgccagaagtggtcttctactagtcctcaccgtccacggtttagcccagccacccacccttccgagggcctggaagaaaactactgtaggaatcccgacaacgatccccagggtccctggtgctatacaaccgaccccgaaaagcggtacgactactgcgatattctcgaatgtgaagaagagtgcatgcattgtagtggagagaactatgatggaaaaatatctaaaactatgagcggattagagtgccaggcttgggactcccaaagtcctcatgctcacggctacatcccaagtaaatttcctaacaagaacctgaagaagaattactgtcggaatcctgatagagagctccggccatggtgttttactactgacccaaataaacggtgggagctatgtgatatccccagatgcacaactccaccaccctcctctgggcctacctaccagtgcttgaagggaacaggggagaactaccgaggtaatgtcgctgtgaccgtgtccggtcatacctgtcagcactggtctgctcagactcctcacactcataatagaacacccgaaaacttcccttgtaagaacctggatgagaactattgcaggaaccccgatggtaaacgagcaccatggtgccacaccaccaactctcaggttcgctgggagtactgcaagattccatcttgtgacagctcccctgtgtcaacagaacaattggcacctacagctcctcccgaactgacccctgtcgtgcaggactgttatcacggggatggacagtcatacaggggcacaagctcaactacaactaccgggaagaagtgccagtcatggagttccatgacaccacaccgacatcaaaaaacccccgagaactacccaaatgctggcctaacaatgaattactgtcggaatcctgacgctgataaggggccatggtgttttactaccgatccctcagtccgctgggagtactgtaacctgaagaaatgcagtggcacagaggcatcagtcgttgcacccccaccagtagtgctcctgcccgacgtggagacaccaagtgaggaagattgtatgtttgggaacggcaagggctacaggggcaagcgagctactacagtgactggtactccttgtcaggattgggctgcacaggagccacacagacattccattttcacacctgagacaaatcctcgtgcaggcctggaaaagaactattgccggaacccagacggcgacgtgggggggccttggtgttacactacaaacccaagaaaattgtatgactactgcgatgttccccagtgtgcagcaccatcttttgactgcggcaaacctcaggtggagccgaagaagtgcccggggcgggttgttggaggctgcgtggcacatcctcacagctggccatggcaggtcagcctgaggacaagatttggcatgcacttctgcgggggaactttgatcagtccagagtgggtcctgaccgctgcccattgtctcgagaagtccccacggccatcctcatacaaggtcattctgggcgcacatcaggaggtgaacctggaaccccatgtccaggagatagaggtctcaagactgtttttggaaccaacacgcaaggatattgccctgttgaagctgagcagccccgctgtgatcactgacaaggtgatacccgcatgtctaccctccccaaattatgtggtggccgaccggaccgagtgttttatcaccggctggggggaaacccagggtacattcggcgccgggctgctcaaagaagcacagctgcccgtgatagaaaacaaagtgtgtaacaggtatgagtttctaaacgggagagtgcagagtaccgagctatgtgccgggcatttggccggcggtactgattcctgccagggcgattctgggggcccactggtttgtttcgagaaagataaatacattttacagggtgtgactagttggggcctgggatgcgcccggccaaataagcctggcgtgtatgttcgggttagccgctttgttacatggatcgaaggagtgatgcgcaacaac

SEQ ID NO: 18255 - DNA, 2430 bp, synthetic construct
  misc_feature 1..2430: note = source = /note="Description of Artificial Sequence: Synthetic coding sequence"
  source 1..2430: mol_type = other DNA
atggaacacaaagaagtggtccttctgcttttgctctttcttaaatcaggtcaaggcgaaccgttagatgattatgtgaacacacaaggagcgtcacttttttcagttactaaaaaacaactgggtgccggctcaattgaagagtgtgctgctaaatgtgaggaggacgaagaatttacatgtagagcgtttcagtaccacagcaaagaacagcaatgcgtaatcatggccgaaaaccggaaaagctcaatcattattcgcatgcgggatgtcgtcttgttcgaaaaaaaagtttacctatctgaatgtaaaacaggaaatggcaaaaactatcggggcactatgagcaaaactaagaatgggatcacatgtcagaagtggtcgagcacctctccgcataggcctcgtttctccccggctacgcatccgtctgaaggactggaggagaattattgccgcaaccccgataatgaccctcagggcccttggtgttatacaacagatcctgagaagagatatgattattgtgatatcttagaatgtgaggaagaatgcatgcattgctcaggcgagaactacgatggaaagatttctaagacaatgtcagggctggagtgccaagcatgggatagccaaagtccacatgctcatggctacattccgtcaaaatttcctaacaagaatttaaagaagaattactgccggaacccggatagagagctgcgcccttggtgctttacgactgatcccaacaaacgctgggaactgtgtgatattccgcgttgtacaacaccacctccgtcatctgggcccacctatcaatgcctaaaaggcactggtgagaattatcggggcaacgtggcggtgactgtatcgggacatacttgtcagcattggtcagcccaaactccgcatacacataatagaacaccggagaattttccatgcaaaaatcttgatgaaaattactgcagaaatcctgatggcaagcgagcaccatggtgccacacgacgaatagccaggtacgttgggaatattgcaagattccgtcatgcgactcatcacctgtaagcacagaacagctcgcaccgactgcccctccggaactgacacctgtagttcaagattgctaccatggagacggtcagtcttatagaggcaccagcagtacgaccacgacgggaaaaaagtgtcaatcttggagtagcatgacgccacaccgccatcagaaaacgcctgaaaactatccgaatgccggcttgactatgaactattgtcgaaatcccgacgccgacaagggaccgtggtgtttcactacagatccatcagtacgctgggagtattgcaacctcaaaaaatgctctggcacggaagcatcggtggtggccccacctccggttgtgttgttgccggatgttgaaaccccgtccgaagaagattgcatgttcggcaatggaaagggatataggggtaagcgggcaacgactgtcacaggaacaccatgtcaagattgggctgctcaagaacctcaccggcatagtattttcacaccggaaactaacccgagagcggggcttgaaaaaaattactgtagaaacccggacggcgatgtgggcggtccgtggtgctatacgacgaacccgcggaaattgtatgattattgcgacgtcccgcagtgcgcagcgcctagctttgattgcggaaaaccacaagtggaacctaaaaaatgcccgggacgggtggttggcggttgcgtagctcatccacattcctggccatggcaagtctcccttcgaacgcgttttggtatgcatttttgcggcggaactttgatctcacctgagtgggttttaaccgcagcgcattgcctcgagaaaagcccaagaccatcttcttacaaagtcattcttggtgcgcatcaggaggtgaatctggaaccgcacgtgcaggaaattgaggtgagccggctcttcctagaacctacacggaaggatattgcgctgctgaaactgtcaagtccagccgtaatcaccgacaaggtgattccggcatgtttgccaagtccaaactacgttgtagctgataggacagagtgctttattacgggttggggcgaaactcaaggtacgtttggagccggattattaaaagaagcgcaactgcctgtaattgaaaataaagtctgcaatcgatacgaattcctgaacgggcgtgtccagtccacggaactatgcgccggccacttagctggaggtaccgacagttgccaaggcgattcagggggccctctggtctgcttcgagaaagataaatatatcctgcaaggtgtcacttcctggggacttggttgcgcacgaccgaataagccgggcgtctatgtgcgtgtcagtcgctttgtcacctggattgagggcgtgatgcggaataat

SEQ ID NO: 18256 - DNA, 2430 bp, synthetic construct
  misc_feature 1..2430: note = source = /note="Description of Artificial Sequence: Synthetic coding sequence"
  source 1..2430: mol_type = other DNA
atggagcataaagaagtggtactcctgctgctgttgttcttaaagtctggccagggagaacctctggatgactacgtcaatacccagggcgcctccctcttctcggtcactaaaaagcagcttggcgcgggcagcatcgaggagtgcgctgcaaagtgtgaagaggatgaagagtttacctgccgcgccttccaataccacagcaaggagcaacagtgcgtcatcatggccgaaaacagaaagtcctccatcatcatccgtatgcgcgacgttgtgctcttcgagaagaaggtgtatctgtcggagtgcaagaccggaaatgggaagaactaccgtggcacaatgagcaaaactaagaacggaataacgtgccagaagtggagctcgacctccccgcaccgtccccgtttcagtccggcgacgcatcccagcgagggccttgaggagaactactgccgcaatcccgataacgacccgcagggcccctggtgctataccactgatccggagaaacgctacgactactgtgatattcttgagtgcgaggaggagtgtatgcattgctcgggcgaaaactacgacggtaaaattagcaagaccatgagtggcctggagtgtcaagcatgggactctcaatccccgcacgcccacggctatattccctccaagtttccgaacaagaacctcaaaaagaactactgccgtaaccccgatcgcgagcttagaccctggtgtttcaccacagatccgaacaaacgctgggagctgtgcgacatcccccgttgtacaaccccgcccccctccagtggccctacgtaccagtgtctgaaaggcactggcgagaattaccgaggtaacgttgctgtgacagtctcgggccatacttgtcagcattggagtgctcagaccccccacacccataatcggacccctgagaactttccgtgtaagaacttggacgagaactactgccgcaaccctgatggcaagcgtgccccgtggtgtcacactactaactctcaagtgcgctgggagtactgcaagatcccctcctgtgattcctctcccgtgtctaccgagcagctcgccccaacggccccgcccgagctgacccccgtcgtccaagactgttaccacggtgatggccagtcctaccgtggcaccagttcgaccaccacaacaggaaagaagtgtcaaagctggtcttcaatgaccccccaccgccaccagaagactcctgagaactacccgaacgcaggcttgaccatgaattattgccgcaatcctgacgccgacaaaggcccctggtgctttacaaccgatccctcggttcgctgggagtactgcaacctcaagaagtgctccggtaccgaggcttccgtagtggcccccccccctgtggtactgctcccggacgttgaaactccttccgaggaggattgtatgttcggcaacggcaaggggtaccgcggcaagagggctaccaccgtcacgggtaccccttgtcaggactgggcagcccaggagccccatcgtcattcgattttcactccggagactaaccctcgcgcgggcctggagaagaattattgtcgtaatcccgatggagatgtaggcggtccgtggtgctacaccacgaatcctcgcaagttgtacgactactgcgacgtgccccagtgcgcggcacctagctttgattgcggcaagccgcaggttgaaccgaagaagtgcccgggccgtgttgtcggcggatgcgtggctcaccctcatagctggccttggcaagtctcattacgaactcgctttggcatgcacttctgcggcggtaccctgatatctccagagtgggtcctcacggccgcgcactgccttgagaagagcccccgcccatcctcgtacaaggtcattcttggcgctcatcaggaagtgaacctggaaccgcacgtccaggagattgaggtgagtagattgttcctggaaccaacccgtaaggacattgccctcttgaagctatcctcacctgccgttatcaccgataaggttatccccgcttgccttccttctcccaactacgtggtcgccgacaggacggagtgtttcatcaccggttggggcgagactcaggggaccttcggcgcgggcctcctgaaggaggctcaactcccggtcatcgagaataaagtgtgcaatagatacgaattcctgaacggccgtgtccagtccactgagctttgtgccggacatctagctgggggcaccgattcgtgtcagggcgattcaggcggacctctcgtctgcttcgagaaggataagtacatcctccagggcgttaccagctggggtctcggttgcgcacgtcccaataagcctggcgtttacgttcgcgttagtcgcttcgtcacctggattgaaggcgttatgcgcaacaat

SEQ ID NO: 18257 - DNA, 2430 bp, synthetic construct
  misc_feature 1..2430: note = source = /note="Description of Artificial Sequence: Synthetic coding sequence"
  source 1..2430: mol_type = other DNA
atggaacacaaagaagtagtgctcctcctcctattattcctaaaatcgggacaaggcgagcctcttgatgattatgtcaatacccaaggagcgtcgcttttttctgtgactaaaaaacaacttggagctggatcaattgaggagtgtgcagcaaaatgtgaagaggatgaggaattcacgtgccgcgcttttcaatatcacagtaaggagcaacaatgtgtcattatggcggaaaatcgaaaatcaagcatcattatcagaatgagggatgtggtgttatttgaaaaaaaggtgtatttatctgaatgcaaaacaggaaatggtaagaactatcgtgggacaatgtcgaagactaaaaatggaattacatgtcaaaaatggagttctacctcgccgcatagaccacgtttctctccggcaacacacccatcggagggattggaagagaattattgtagaaacccagataatgaccctcaaggaccatggtgctacacaaccgatcctgaaaaacgttatgactattgcgatatactggagtgtgaggaagagtgtatgcactgctcaggggaaaactacgatgggaaaatttcaaaaacaatgtccggtcttgaatgtcaagcatgggacagccaatctcctcatgcacatggttacattccctcgaaattccccaataaaaatctcaagaaaaattattgtcgtaacccggaccgtgaactgagaccatggtgcttcacaactgatccaaataagcgatgggaattgtgcgacattcctcgatgcactactccaccaccaagttctggacccacctaccaatgcttgaaaggaactggtgaaaattacagaggtaatgtggctgtaacagttagtggacatacttgtcaacattggagcgcacaaactccacatacgcataatcggactccggagaactttccttgcaaaaacctggatgaaaattactgtagaaatccagatggaaaacgtgcaccgtggtgccacactacaaattcgcaagtgcgttgggagtattgcaagattccatcttgcgactcatctcctgtcagcacagaacaattggcgccaactgccccacctgaacttactcctgtggttcaagattgttatcatggagatggtcaatcgtatagaggaacatcgagtaccaccaccaccggaaaaaaatgtcaatcttggtcatcaatgacaccacaccgacatcaaaaaaccccagaaaactacccaaacgctggattaaccatgaattattgccgaaatccggatgcggataagggaccgtggtgctttaccaccgatccatctgtccgctgggagtactgtaatcttaaaaagtgttcaggaacagaagctagtgtagttgcaccaccgccagttgttctacttccagatgttgaaacgccgtccgaagaagattgtatgttcggcaatggaaaaggatatcgtgggaaaagggcaacgactgtaactggaactccatgtcaggattgggctgcacaggagcctcatagacattcaattttcacgccagagaccaacccaagggcaggcctcgagaagaactactgcaggaatccagatggagacgtaggtggaccctggtgttacaccaccaaccctagaaagctctacgattactgcgatgtccctcaatgtgcagcgccatcctttgattgcgggaaaccgcaagttgaacctaaaaagtgtccgggtagagttgttggcgggtgcgttgcacacccacactcatggccttggcaagtatcattgcggacgcggttcgggatgcatttctgtggtgggacattgatttcgccagaatgggtgctcacggcagctcattgccttgaaaaaagtccacgtccatcttcatataaggttatcctgggagcacaccaagaagtcaatttggagccacacgtgcaagaaattgaagtgtcaaggctcttcttggagccgacgcgtaaggatatcgccttactgaaattgagttctccagcagtcattacagataaagttattccggcctgtctcccgtccccgaattacgtcgtggctgaccgtacagaatgttttatcaccggatggggtgagacgcagggaacattcggagctggactacttaaggaagcacaactcccagtaattgaaaataaagtttgtaatcggtatgaattcttgaatggaagagtccagtcaacagaattgtgtgcaggacatctcgccggcgggaccgattcatgtcaaggagactctgggggaccacttgtgtgttttgagaaggataaatatatcctgcaaggagtgacttcgtggggactggggtgtgctcgcccaaataaaccaggtgtctacgtaagagtaagccggttcgttacatggatcgagggagtaatgcgaaataat

SEQ ID NO: 18258 - DNA, 2430 bp, synthetic construct
  misc_feature 1..2430: note = source = /note="Description of Artificial Sequence: Synthetic coding sequence"
  source 1..2430: mol_type = other DNA
atggaacataaggaagtcgtcctcctgttactgttattcctcaagagcggacagggggagccattagacgactatgtcaatactcagggtgccagccttttctcagttactaagaagcagctgggggcgggctcgattgaggagtgcgccgccaaatgtgaagaggacgaagagtttacatgtcgagcctttcaatatcactcaaaagagcagcaatgtgtgatcatggcagagaacaggaagagctccattatcatacgaatgagggatgtagttctatttgagaagaaggtctacctgtcagagtgtaagaccggcaatgggaaaaattaccgaggcaccatgtcaaagaccaagaatgggatcacctgccagaagtggagttctacttccccacaccgacctcggttttcccccgcgactcaccccagtgaggggttggaagagaactactgtcggaaccccgataacgatcctcagggtccctggtgctataccacagatccagaaaagaggtacgactactgtgatattctggaatgcgaggaggaatgcatgcactgcagcggagagaattacgacgggaaaataagcaagaccatgagcggtcttgagtgccaagcctgggatagccaatctccacacgcacacggctatatcccaagcaagtttcccaataaaaatttgaagaaaaattattgccggaaccccgatagggagctccggccgtggtgtttcactacagaccctaataagaggtgggaactgtgcgacatcccccgttgtaccacccccccaccatcgtctggccctacataccagtgccttaagggcactggagagaactataggggtaatgtagctgtgaccgttagtgggcatacttgtcagcattggtccgcccagaccccgcacacacataacagaactcccgagaactttccctgcaaaaacttggatgagaattactgcagaaatcccgatggtaagagggctccttggtgtcacacaacaaactcccaggtaaggtgggagtattgtaaaattccctcctgtgactcgtcccccgtttctaccgaacagcttgcccctacggctccaccagaactgactcccgtggtgcaggattgctatcacggggacgggcagagttacagaggcacctcttcaacaaccacaacgggcaaaaagtgtcagagttggagctccatgacgccccacaggcaccaaaaaacaccagagaactatccgaatgcaggcctcacaatgaattattgtcgaaacccagatgccgacaagggaccgtggtgctttactacagaccccagcgtaaggtgggagtactgcaatctgaaaaaatgcagtggcaccgaagcgagcgttgtggctccccctccagtcgtccttttgccagatgttgagaccccctctgaggaggactgcatgttcggaaatggcaagggttatcgcgggaagcgagccacaacagtgactggcaccccgtgccaggattgggctgcccaggagcctcacagacattccatattcactccagagaccaaccccagagctggcctggaaaaaaactactgccggaacccagacggggacgttgggggcccctggtgctataccaccaatccaaggaaattgtatgactactgcgatgtaccacagtgtgccgcccctagtttcgactgtggtaagcctcaggttgagccaaaaaagtgccctggtcgcgtggtgggaggctgtgttgcgcaccctcacagttggccgtggcaggtgagtttgagaacgcggttcgggatgcatttttgcggcgggacactgatctcacctgagtgggttcttacggcagctcattgcctggaaaaatctcctaggcccagctcatataaggttatcctgggcgctcaccaggaggtcaacttggaacctcacgtgcaagaaatcgaagtgagccgtctgttcctcgaacctaccaggaaagacattgccttgttgaagttgtcatcaccggccgtgatcactgacaaagtcatccccgcctgtctgcccagtcccaattacgtggtcgcagaccgcaccgagtgttttattactggatggggggagacccagggaacctttggcgccggtttgctgaaggaggcacagcttcctgttatcgaaaacaaggtatgtaaccgttatgagttccttaacggtcgggtgcagtcaaccgagctgtgcgctggtcaccttgctggtggaacagacagttgtcaaggcgactcaggtggccccttagtatgctttgagaaggacaaatacatacttcagggggtcacgtcctggggcctcgggtgtgccaggcccaacaagccgggtgtctatgtgcgagtgtcccgctttgtgacttggattgaaggcgtaatgcgaaacaat

SEQ ID NO: 18259 - DNA, 2430 bp, synthetic construct
  misc_feature 1..2430: note = source = /note="Description of Artificial Sequence: Synthetic coding sequence"
  source 1..2430: mol_type = other DNA
atggagcataaggaggttgttcttctgctgcttttgttcctaaagagcggacaaggagaacccctggatgactacgtcaacacacagggcgccagcctgttctcagttaccaaaaaacagctgggagccggctctatcgaagagtgcgccgccaaatgcgaggaagatgaagagtttacctgccgcgctttccagtatcactcgaaggaacagcagtgcgtgatcatggcagagaatagaaagtccagtatcatcattcggatgcgggacgtggttctgtttgaaaaaaaggtgtatttatcggagtgtaagactggcaacggcaagaattatcgaggaactatgtctaaaaccaagaatggcatcacttgtcaaaaatggtccagtaccagtccccatcgtccccggttttctcctgctactcatccttctgaagggctggaagagaactactgtagaaatcctgataatgacccccaggggccgtggtgctataccacagacccggagaagcgatacgactattgtgatattctggaatgtgaggaagaatgcatgcattgctctggcgagaattatgacgggaagataagcaagacaatgtctgggctggagtgtcaggcatgggactctcagagtccgcatgctcatgggtatattccaagtaagtttcctaataaaaaccttaaaaagaattactgtagaaacccagaccgggagctgcgtccctggtgcttcacaaccgacccaaacaagcggtgggagctctgtgacattcctagatgtactacacctccacctagttccggaccgacctatcagtgccttaaggggactggtgagaattaccgaggtaatgttgccgtgactgtctccgggcatacctgccagcactggagcgcacagaccccgcacacccataatcgtacaccagagaactttccttgtaagaatctcgatgagaattactgccggaaccccgacggcaagcgcgcaccctggtgccacactacaaatagtcaggtgcggtgggaatactgtaagatcccctcctgtgattcttcccctgtgtctaccgaacagctggcccctacagccccccctgaacttactccagtagtacaggactgctaccatggcgatggacaatcatatcggggaaccagctccactacaactactgggaagaaatgtcaatcatggagcagcatgactccccatcgccatcagaagacacccgagaattatccaaatgctggcctgacaatgaactattgtcggaacccagacgctgacaagggaccctggtgctttacgaccgacccctccgttcgatgggaatattgcaatttgaaaaaatgcagcggaaccgaagcttctgtagttgccccaccccccgtggtgctgctcccagatgtggaaactcccagcgaggaggactgcatgttcggcaatgggaaaggatatagagggaaacgggccaccaccgtgacggggacaccctgtcaggattgggccgcccaggagccacataggcatagtattttcacacctgaaaccaaccctcgggccggcctcgagaagaactactgtcgtaaccccgatggggacgtcggcgggccttggtgttataccaccaaccccagaaaattatacgactattgcgacgtgccacaatgtgcagccccaagcttcgactgcgggaaaccccaggtggagcccaagaagtgccccggacgcgtcgtggggggttgtgtggcacacccacattcgtggccctggcaggtctcgctgagaacacgatttgggatgcacttttgcggcggaaccttgatctcccccgagtgggtcctgaccgccgcacattgtctagaaaaatccccaagaccatcttcctacaaggtaatcctcggagctcatcaagaggtcaacttggagcctcacgtacaagagatagaagtttccagactcttcctcgaacccacccgaaaggatatagcactgttaaagctctcctcgcccgcggtgattactgacaaggtcatcccggcttgtttacccagcccgaactacgtcgttgcggatcggacagagtgttttataaccggctggggagagacacaggggacgttcggtgctggtctgcttaaagaagcccagctccctgtcattgaaaacaaggtatgtaacaggtacgaattcttgaacgggagggtacaaagcaccgaactttgcgctggccatctggctggaggaacagattcctgtcagggtgatagtggaggcccgttggtatgcttcgagaaagacaagtacatcctacagggcgtgacaagctggggcctgggatgcgctcggccaaataaacctggtgtatacgttcgtgtctccaggtttgtaacgtggattgaaggtgtcatgaggaacaac

SEQ ID NO: 18260 - DNA, 2430 bp, synthetic construct
  misc_feature 1..2430: note = source = /note="Description of Artificial Sequence: Synthetic coding sequence"
  source 1..2430: mol_type = other DNA
atggaacacaaagaggtcgttcttctcctgcttctgttcctgaagtccgggcagggggaacctcttgatgactacgtgaacacgcaaggcgcctccttgttcagcgtcacaaagaaacagctgggggccgggtctattgaggagtgcgccgccaaatgtgaagaggatgaggaattcacatgccgcgcgttccaataccactccaaggagcagcagtgcgtgattatggctgagaatcggaagtcctccatcataatccggatgcgggacgtggtcttatttgaaaagaaggtctacctcagcgaatgcaagaccgggaacggaaaaaattatcggggcaccatgagtaagacaaagaacggcataacatgtcagaagtggagttctactagtcctcatagaccacgctttagtcccgccacacacccgtccgagggcttggaggagaattactgcaggaaccctgataatgatccacaggggccctggtgctatacaactgatcctgaaaagcgctatgattactgcgacattctcgagtgtgaggaggagtgtatgcattgttcaggagagaactacgacggaaagatctccaagaccatgtccgggttggagtgccaggcgtgggactcgcagtccccacatgcccatgggtatatccctagtaagtttcctaacaagaacttgaaaaaaaattactgccgcaacccggaccgggagctgcggccatggtgtttcaccactgacccaaataagagatgggaactctgcgacattccccggtgtaccacaccaccaccatcatccgggccaacctaccaatgcctgaagggaacgggggagaactaccggggtaatgtggccgtcacagtgagtggccatacgtgtcaacactggtccgcccaaactcctcatacgcataacaggactccggaaaacttcccttgcaagaacctggatgaaaactattgccggaaccctgatgggaagagagccccatggtgccacacgaccaattcgcaagtgcggtgggagtattgtaagatcccatcgtgtgactcctcacctgtgtccactgaacaactggcaccaactgctcctcctgagctcacccccgttgtccaggattgctatcatggcgatggccagagctaccgggggaccagttccaccaccacaacgggaaaaaagtgtcagagctggagttccatgactcctcaccgccatcagaagacaccggagaactacccaaatgctggactgacgatgaactactgtaggaatcctgacgccgataaaggcccatggtgcttcaccactgatccgagtgtccgctgggaatactgtaatctgaagaaatgctctggaacggaggcaagtgtggtcgcacccccacctgtagtgctcctccccgacgtggaaaccccttcggaagaggactgtatgtttgggaacgggaagggctatagggggaagagggcaaccaccgtcacaggtaccccctgtcaagattgggccgcccaggagccgcataggcactcaatcttcacgcccgagactaaccctcgcgccggactggagaaaaattactgccggaaccctgacggcgacgtgggtggcccatggtgctacaccacaaatccccgaaagctgtatgactattgtgacgtgccccagtgcgccgcaccttcctttgattgtgggaagcctcaagtcgaaccaaaaaagtgtcccggtagggtggtgggcggctgtgtggcacacccgcacagctggccatggcaggtgagtttgcgaacacgcttcggaatgcacttctgcggaggaaccctgatcagccctgaatgggttctcaccgctgctcactgcctggaaaagagcccccggccctctagctataaagtgattctgggtgctcatcaagaggtgaatctcgagccccacgtacaggagattgaggtgagccgcttatttctggagccgaccagaaaggatattgccctgttgaagcttagctctcccgccgtgatcaccgacaaggtcattcccgcttgccttcccagcccgaactacgtggtggcagatagaaccgaatgttttatcacagggtggggagagacgcaggggaccttcggcgcaggcctgctgaaagaggcgcagctacccgttattgaaaacaaagtgtgtaatagatacgagttccttaacggccgggtccagtcaaccgaactctgcgctggccacctggccggagggaccgacagttgtcagggtgatagtggcggacccctcgtgtgtttcgagaaagataaatacattctgcagggggtcaccagctggggtctgggctgtgcccgcccgaacaagcccggagtatatgtccgggtaagtcgttttgtcacttggatcgagggtgtgatgaggaataac

SEQ ID NO: 18261 - DNA, 2430 bp, synthetic construct
  misc_feature 1..2430: note = source = /note="Description of Artificial Sequence: Synthetic coding sequence"
  source 1..2430: mol_type = other DNA
atggaacataaagaagttgtactactactactattatttctaaaatcgggtcaaggtgaaccgttagatgattatgttaatacgcaaggtgcgtcgttattttcggtaacgaaaaaacaactaggtgcgggttcgatagaagaatgtgcggcgaaatgtgaagaagatgaagaatttacgtgtcgtgcgtttcaatatcattcgaaagaacaacaatgtgtaataatggcggaaaatcgtaaatcgtcgataataatacgaatgcgtgatgttgtattatttgaaaaaaaagtatatctatcggaatgtaaaacgggtaatggtaaaaattatcgtggtacgatgtcgaaaacgaaaaatggtataacgtgtcaaaaatggtcgtcgacgtcgccgcatcgaccgcgtttttcgccggcgacgcatccgtcggaaggtctagaagaaaattattgtcgaaatccggataatgatccgcaaggtccgtggtgttatacgacggatccggaaaaacgatatgattattgtgatatactagaatgtgaagaagaatgtatgcattgttcgggtgaaaattatgatggtaaaatatcgaaaacgatgtcgggtctagaatgtcaagcgtgggattcgcaatcgccgcatgcgcatggttatataccgtcgaaatttccgaataaaaatttaaaaaaaaattattgtcgtaatccggatcgtgaactacgtccgtggtgttttacgacggatccgaataaacgatgggaactatgtgatataccgcgatgtacgacgccgccgccgtcgtcgggtccgacgtatcaatgtttaaaaggtacgggtgaaaattatcgaggtaatgtagcggtaacggtttcgggtcatacgtgtcaacattggtcggcgcaaacgccgcatacgcataatcgtacgccggaaaattttccgtgtaaaaatttagatgaaaattattgtcgaaatccggatggtaaacgtgcgccgtggtgtcatacgacgaattcgcaagttcgttgggaatattgtaaaataccgtcgtgtgattcgtcgccggtttcgacggaacaattagcgccgacggcgccgccggaactaacgccggtagttcaagattgttatcatggtgatggtcaatcgtatcgtggtacgtcgtcgacgacgacgacgggtaaaaaatgtcaatcgtggtcgtcgatgacgccgcatcgtcatcaaaaaacgccggaaaattatccgaatgcgggtttaacgatgaattattgtcgaaatccggatgcggataaaggtccgtggtgttttacgacggatccgtcggtacgttgggaatattgtaatctaaaaaaatgttcgggtacggaagcgtcggttgtagcgccgccgccggttgtactattaccggatgtagaaacgccgtcggaagaagattgtatgtttggtaatggtaaaggttatcgtggtaaacgagcgacgacggttacgggtacgccgtgtcaagattgggcggcgcaagaaccgcatcgacattcgatatttacgccggaaacgaatccgcgtgcgggtttagaaaaaaattattgtcgtaatccggatggtgatgtaggtggtccgtggtgttatacgacgaatccgcgtaaattatatgattattgtgatgttccgcaatgtgcggcgccgtcgtttgattgtggtaaaccgcaagtagaaccgaaaaaatgtccgggtcgtgtagttggtggttgtgtagcgcatccgcattcgtggccgtggcaagtatcgttacgtacgcgttttggtatgcatttttgtggtggtacgctaatatcgccggaatgggtattaacggcggcgcattgtttagaaaaatcgccgcgtccgtcgtcgtataaagtaatactaggtgcgcatcaagaagtaaatctagaaccgcatgttcaagaaatagaagtttcgcgattatttctagaaccgacgcgaaaagatatagcgttattaaaattatcgtcgccggcggttataacggataaagttataccggcgtgtctaccgtcgccgaattatgttgtagcggatcgaacggaatgttttataacgggttggggtgaaacgcaaggtacgtttggtgcgggtctactaaaagaagcgcaactaccggttatagaaaataaagtatgtaatcgatatgaatttttaaatggtcgagtacaatcgacggaactatgtgcgggtcatttagcgggtggtacggattcgtgtcaaggtgattcgggtggtccgctagtatgttttgaaaaagataaatatatattacaaggtgttacgtcgtggggtctaggttgtgcgcgtccgaataaaccgggtgtatatgttcgagtatcgcgatttgtaacgtggatagaaggtgtaatgcgtaataat

SEQ ID NO: 18262 - DNA, 2430 bp, synthetic construct
  misc_feature 1..2430: note = source = /note="Description of Artificial Sequence: Synthetic coding sequence"
  source 1..2430: mol_type = other DNA
atggaacacaaagaggttgtgctattgttgctactgtttctgaagtctggtcagggcgaacctctggatgattatgtgaacacccagggtgcttcactcttttcagttaccaaaaagcagcttggcgccggtagcattgaggagtgcgccgcaaaatgcgaggaggacgaggaatttacctgtcgagcctttcagtatcactcaaaggaacagcaatgtgtgatcatggcagaaaatagaaagtcctcaataatcatccgaatgagggacgtggttctgttcgagaaaaaggtgtacctgagcgaatgcaaaacaggcaatggaaagaactaccgaggaaccatgtctaagacaaagaatgggattacttgccaaaagtggtcatcaacaagcccacatcgccccagattctcccctgcaacacacccaagcgaggggctcgaagaaaactactgtagaaatcctgataacgaccctcagggcccttggtgctataccactgaccccgagaagaggtatgactattgcgatatcctcgaatgtgaagaggaatgcatgcattgcagcggcgaaaactatgacgggaagatttcaaagaccatgtctggcctggaatgtcaggcctgggattcccagtctccccatgcccacggctatatacctagtaaatttccaaacaaaaatctgaagaagaattactgtagaaatcccgatcgggagctgcgaccgtggtgcttcacaacagaccccaacaaacgatgggagctctgcgacatccctcgatgcacgacccccccacccagttccggccctacatatcagtgcctgaagggaactggcgagaattaccgaggaaatgtcgcagtgacagtgtctgggcacacatgccagcactggagtgctcagacacctcacacacacaataggacccccgagaactttccctgcaaaaacttggatgagaactactgtaggaatcccgatggcaaaagggctccatggtgccacacaaccaactcacaggtacgatgggaatattgcaaaattccctcctgcgattcatcccccgtgtccacagagcagctggctcctactgctcctccagaactgacacccgtcgtacaggactgctatcatggcgacggacagagctatcgagggactagtagcaccactacgaccggaaagaagtgccagagctggtctagcatgactcctcacagacatcagaagacccccgaaaactatcctaatgccggcctgactatgaattactgccgaaatccagacgcggacaaggggccttggtgcttcacgactgaccccagtgtcagatgggagtattgtaatttgaagaagtgtagcgggaccgaggcctctgtggtggctcccccgccggttgtgctgctgccagacgtggaaaccccctccgaagaggactgcatgtttggtaacggcaaaggctatagggggaagcgagcgaccaccgttactggtacaccttgccaggactgggccgcgcaggaaccacacagacactcaatatttaccccagaaacaaacccaagagccggactggagaagaactactgtcgaaatccggatggcgacgtgggaggaccgtggtgttatactacaaatcctaggaagctgtacgactactgtgatgtacctcagtgcgccgcccctagtttcgattgtggcaagcctcaggtcgagcctaagaagtgtccgggtagagtggtcggtgggtgcgtggctcatcctcatagctggccttggcaggtatccctgaggacaaggtttgggatgcacttctgcgggggcactctaatttcacccgagtgggtgttgactgcagctcattgcctagagaagagtccaagaccatcatcatataaagttattctaggggctcaccaggaagtgaacttggaaccgcatgtgcaggaaatcgaagtcagtagattgttcttggaacctacaaggaaggacattgccctgttgaagttgagttctcccgctgtgataacggataaggttattcccgcctgtctacccagccccaactatgtcgtagctgaccgcactgagtgtttcatcactggctggggcgagacacaagggacatttggcgctggacttctgaaggaggcacagttgccggtcatcgaaaataaggtgtgcaatcgatacgaattcttgaatgggcgtgtgcagagcacagagctgtgtgctgggcacctcgcgggtggaacagattcctgtcagggagatagcggaggtccgcttgtctgttttgagaaagataaatacattctgcaaggcgtgacaagctggggccttggctgtgccagaccaaataaaccaggcgtgtatgttcgagtctccaggttcgtgacctggatagaaggcgtgatgaggaataat

SEQ ID NO: 18263 - DNA, 2430 bp, synthetic construct
  misc_feature 1..2430: note = source = /note="Description of Artificial Sequence: Synthetic coding sequence"
  source 1..2430: mol_type = other DNA
atggagcacaaggaggtagtgctgctcctcctcctgttcctgaaatccgggcagggtgaaccactggacgactacgtcaacacccagggagcgtccctgttctcggtgactaagaagcagctgggcgctggctccattgaagagtgcgcggccaagtgtgaagaagatgaagagtttacctgccgcgcgtttcagtaccactcaaaggaacagcagtgtgtgatcatggcagagaaccggaagtcctccatcatcatccgcatgagagacgttgtgctgttcgaaaagaaggtctacctgagcgagtgcaaaaccgggaacggcaagaactatcgcggtactatgtccaaaacgaaaaacggcatcacttgccagaagtggtcctcgacgtccccacatagacctcggtttagcccggccacccacccgtcggaaggactggaagaaaactactgtcgcaatccagataacgacccacaagggccgtggtgctatactaccgatccggagaaacgctacgattactgcgacattctggaatgcgaagaagagtgcatgcattgcagcggagagaattacgatggaaagatcagcaagactatgtcgggactcgagtgtcaagcatgggactcccaatcgccacatgcccacgggtacatcccatcgaaattcccgaataaaaacctcaagaagaattactgtcgaaacccagatcgggaacttcgaccgtggtgttttaccacggacccaaataagcggtgggagttgtgtgatattccacggtgcactactccacccccatcgagcggtcctacttaccagtgcttgaagggaacgggtgagaattaccgggggaacgtcgccgtgaccgtgagcggacatacctgccagcattggtcagcgcaaacccctcatactcacaacaggacgcctgagaatttcccatgcaagaatcttgacgagaattattgcagaaacccggacggaaaacgggccccgtggtgccataccacgaactcacaggtgaggtgggagtactgcaagatcccgtcctgcgattcaagccccgtgagcaccgaacaactcgctcccactgcccctccggagcttactccggtggtccaggactgttaccacggcgatggacagtcttacagaggcacctcctcgactactaccactggaaagaagtgccagtcgtggtcatccatgaccccccatcggcaccaaaagacccccgagaactacccgaatgcaggtcttactatgaactactgccgtaacccggatgccgacaagggcccctggtgtttcaccaccgacccatcggtgagatgggaatactgcaatctgaaaaagtgctcggggaccgaggcctctgtcgtggccccaccccccgtggtcctccttccggacgtggaaactccgtccgaagaggactgtatgttcggaaacggtaaaggatacagaggaaagcgcgcgactaccgtgaccggtactccgtgccaagactgggccgcacaggaaccgcacagacactcaatcttcaccccggagacgaacccgagggctggcctggaaaagaactattgcaggaaccctgacggagatgtgggaggaccttggtgctacaccaccaacccaagaaagctctacgactactgcgatgtgccgcagtgcgctgcaccgtcgttcgactgcggcaaaccgcaggttgagccaaaaaagtgccctggacgcgtcgtgggaggctgcgtggcccacccgcacagttggccttggcaagtcagcctgcgcacccggttcggcatgcatttttgcggcggaaccctcatctcgccggaatgggtcctcactgcggcccattgtttggaaaagtcgccgcgcccgtcaagctacaaggttatcctcggggctcaccaggaagtgaacctggagccacacgtgcaggaaatcgaagtgtccaggctgttcctggaaccaactcgcaaagacatcgccctcttgaagctgagtagcccggcggtcataaccgacaaggtgatccctgcgtgtctgccgtcacctaattacgtggtggccgaccggaccgagtgcttcattactggctggggagaaactcaggggacttttggcgcaggactgctgaaagaagctcaactgcctgtgatcgagaataaagtctgcaaccgctacgaattcctgaacggccgggtgcaatcaaccgagttgtgcgccggccacctggcggggggaaccgattcgtgtcagggagattccggaggtccgctggtgtgtttcgaaaaggacaaatacatcctgcaaggagtcaccagctggggactcggatgcgcacggcctaataagcccggagtgtacgtccgcgtgtcacgcttcgtcacttggatcgaaggagtgatgcgcaacaat

SEQ ID NO: 18264 - DNA, 2430 bp, synthetic construct
  misc_feature 1..2430: note = source = /note="Description of Artificial Sequence: Synthetic coding sequence"
  source 1..2430: mol_type = other DNA
atggaacataaggaagtggtactgctgcttctgctgttcctgaaaagtgggcagggggaaccattagatgattacgtgaatacgcagggcgcgtcccttttcagcgtcacgaaaaaacagctaggagccggctctatcgaggagtgcgccgctaagtgcgaggaggacgaagaatttacatgtcgagcctttcaatatcattctaaggagcaacagtgcgtcatcatggcagagaatcgaaaatcatcaatcatcataagaatgagagacgtggtgctgtttgagaagaaggtttatctcagtgagtgtaagacaggcaatgggaagaattacagagggacaatgtctaagaccaaaaatggcattacctgtcaaaagtggtccagtacctccccacacagacctagattctcaccagcgactcatccatctgaaggattggaggaaaactactgtcgcaatccagataacgatcctcagggaccttggtgctacacgacagacccagagaaacgttatgactattgcgacattcttgaatgcgaagaggaatgcatgcattgttcaggggagaactacgatggcaagatttcaaagacaatgagtggattggagtgtcaggcatgggactcacaaagccctcatgctcacgggtacatcccttccaaattccctaataaaaacctgaagaagaactactgcagaaaccccgaccgcgagttgcgaccgtggtgtttcacgaccgaccccaataagagatgggagctctgtgatatcccaaggtgtacgacaccccccccaagcagtggaccaacgtaccagtgcctgaagggtaccggcgagaactatagaggtaatgtcgctgtgaccgtgagcggtcacacatgtcagcactggagcgcgcaaactccccatacacataacagaacacctgagaatttcccatgtaagaatctggacgaaaattactgcagaaatccggacgggaaaagggcaccttggtgccacacaactaactcacaggttagatgggagtattgtaagatcccatcatgcgacagttcacccgtgagcaccgaacagctagcaccgacggcgccgcccgaactgacaccagtcgttcaggactgctaccacggcgacggccagagctaccgcggcaccagtagcaccacaacaacaggcaagaagtgtcagtcttggtcctccatgaccccacaccgacaccagaagacacccgaaaattaccctaatgccggcctgacgatgaactattgtcgcaacccggatgccgacaaaggtccttggtgctttaccacagatcctagcgttagatgggagtactgcaatttaaaaaaatgttcgggaacagaagcatcagtcgtcgccccaccacctgttgtgctgttaccggacgtggaaacaccatctgaggaggattgcatgttcggaaatggaaaaggatatcgaggcaaacgcgcaacgacagtgacaggcactccttgccaagattgggccgcccaggagccccataggcatagtatctttacccccgaaacaaacccccgcgccggtttggaaaaaaactactgcaggaaccccgatggagatgtgggagggccttggtgttacaccacaaacccacgtaaattatacgattactgcgatgtcccacagtgtgcagcgcccagcttcgactgcggcaaaccacaggtggaacccaagaaatgtccagggagggtggtaggagggtgtgtagcacatccacattcatggccctggcaggtgtctctcaggactaggttcggcatgcacttctgtggtggcaccctcatctctccggaatgggtgctcactgccgctcattgcctagaaaagagcccaaggccatcttcttataaggtcatcctcggtgcccatcaggaggtgaacctggagcctcacgtgcaggagattgaggtgtcacgtctttttctcgagcctaccaggaaggatatcgcactgctgaaactgtcatctcctgcagttattaccgacaaggtcattcctgcatgcctcccgtcacccaactatgtcgtcgcagatcggactgagtgtttcataacaggctggggcgagacccaggggacatttggcgcaggcctcttgaaagaggcccagctccccgttatcgagaacaaagtctgtaaccgctatgagtttctgaacggaagggttcagtccacggaattgtgtgcaggacatctcgccggggggacagatagctgccaaggcgacagtggggggcctctggtatgtttcgagaaggacaagtacatcctccaaggggtgacatcgtggggattgggatgtgctcggcctaataagccgggagtctacgtgagggtatctcgattcgtcacgtggatcgagggggtgatgcgtaacaac

SEQ ID NO: 18265 - DNA, 2430 bp, synthetic construct
  misc_feature 1..2430: note = source = /note="Description of Artificial Sequence: Synthetic coding sequence"
  source 1..2430: mol_type = other DNA
atggagcataaagaggtggtcctcctgctgttactcttcttgaagtctggtcagggagagcctctagatgattatgtgaatacgcaaggcgcatcccttttttcggtgaccaaaaagcagctcggcgccgggagcatcgaggaatgtgctgcgaaatgcgaagaagacgaggaattcacatgccgggcgttccagtatcattctaaggaacagcagtgcgtgatcatggcagaaaatcgcaaatcctctatcatcatccggatgagggacgtcgtactgtttgagaaaaaagtgtacctttccgagtgcaagacggggaacggtaaaaactatagagggactatgagtaaaacgaaaaacggaattacttgtcagaagtggtccagcacgtcgccccaccgaccacgatttagccctgccacacacccctccgaggggctggaagaaaactactgcagaaatcccgacaacgacccccaaggaccctggtgttataccacagatcccgagaaacggtatgattactgtgatatactggagtgtgaagaggaatgtatgcattgttccggggaaaactatgacggcaagatatcaaaaaccatgtccggactggagtgccaggcctgggattcgcagagcccgcacgcccacggttacatccctagcaaatttccaaataaaaatcttaagaagaactactgtcgtaaccctgacagagagctcagaccatggtgtttcacgaccgaccctaacaagcgatgggagctctgcgacatacctagatgcaccacacctcctccatcctctggacctacatatcaatgcttaaaggggacgggggagaattatcgcggcaacgtcgcggtcaccgtgtccggccatacttgccagcactggtctgcacagactccccacacgcacaacagaacaccagagaatttcccctgcaaaaacctggatgaaaattactgcaggaaccctgacgggaagcgtgccccttggtgtcatactaccaattcccaagtcaggtgggaatactgtaagattccaagctgtgattcctcccccgtgagcaccgagcagctggcaccaactgccccaccagagctaactccagtggtacaggactgttatcatggagacggacagtcctaccgggggaccagcagtacaacaacgacaggtaaaaagtgccaaagctggagctccatgactccacaccggcaccagaaaacccccgagaactacccaaacgccggactgaccatgaactactgcaggaaccccgatgcggacaaggggccatggtgtttcaccactgatccctctgtcaggtgggaatactgtaacctcaaaaaatgtagcgggactgaagcctcagtggtggccccacccccagttgtgcttctgcccgatgtcgagaccccctcggaggaagactgcatgtttggtaatggcaagggttatcgaggcaagagggccaccacagtaactggcacaccctgccaagattgggccgctcaggagccccacaggcactcaatctttacccccgaaacgaaccccagagccgggctggaaaaaaactactgtcgaaaccccgacggggatgtcggtggtccgtggtgttacaccaccaatcccaggaagctttacgattattgtgatgtgccacagtgcgccgccccctcttttgattgtggcaaaccgcaggtggagcccaagaagtgccccggacgcgtcgtgggaggttgtgtggcgcatccccacagttggccctggcaggtgagtctacggacgaggtttggcatgcacttttgcggcggcactctaattagcccagagtgggtgttgacagctgcccactgtctggagaaaagcccccggccttcatcttacaaggtaatactgggcgcccaccaggaagttaatcttgaacctcatgttcaggagatcgaagtctccagactcttccttgaaccaactcggaaggacatagccctcctaaaactctcctcccctgctgtaattacagacaaggtgattccggcctgcctcccaagcccaaactacgtcgtggccgataggacagagtgtttcattaccgggtggggagaaacccaggggaccttcggtgctggactgttgaaggaagcccagctccctgtaattgagaataaggtttgcaatagatacgagtttctgaacggccgagtgcagtcaacggagctgtgtgcggggcacttggcaggagggaccgactcttgccaaggagacagcggggggccactcgtctgcttcgagaaggacaagtacatactccagggcgtgacgagctgggggctaggatgcgcacggccaaataagcccggagtatacgttagggtgagtaggtttgtgacatggatcgagggggtgatgcgcaataac

SEQ ID NO: 18266 - DNA, 2430 bp, synthetic construct
  misc_feature 1..2430: note = source = /note="Description of Artificial Sequence: Synthetic coding sequence"
  source 1..2430: mol_type = other DNA
atggaacataaagaagtcgtacttctccttctcctctttctgaaatccgggcagggggaaccccttgatgattatgtgaatactcagggagctagtctgttcagtgtcacaaaaaaacagctgggggcaggatcaatagaggaatgcgctgctaagtgtgaagaagatgaagaatttacatgtcgtgcattccagtatcattcaaaagaacagcagtgtgtgattatggcagaaaatcgaaaatcctccatcataatccgaatgcgtgatgtggttctcttcgaaaaaaaagtttacctatctgaatgtaaaactgggaacggaaaaaactaccgaggaactatgtcaaagactaaaaatggaataacatgccagaaatggtcctctacatctccccatcgccctcgattttctcctgcgacacacccctcagaagggctcgaagaaaattattgtcgcaacccagataacgaccctcagggaccctggtgttatactacagatcctgaaaaaagatatgattactgtgatattctcgaatgcgaagaagaatgtatgcattgtagtggggaaaattatgatggaaaaatctctaaaactatgtccgggctagagtgtcaggcatgggattctcagtccccccatgctcatgggtatatccccagtaaatttcctaataaaaatctaaaaaaaaattattgcaggaaccctgatcgggaactcaggccctggtgctttacaactgatcctaataaacggtgggaactgtgtgatataccacggtgtactacgccgcccccctcttctggacctacatatcagtgtttgaaagggactggagagaactatcggggaaatgtggccgttactgtgtcaggacatacatgtcagcattggtctgctcagacaccccacacacataaccggacaccagaaaattttccctgcaaaaacctcgatgaaaactactgccgaaatccagatggaaagcgggccccctggtgccacacaactaattctcaggtccggtgggaatattgtaaaatcccctcctgcgatagttcgccagtgtcaactgaacagcttgcaccaacagccccaccagaactgacaccagtggtccaggattgctatcacggagacggacagtcctaccgagggacttcaagtactactacaacaggaaaaaaatgccagtcttggagttctatgactccacataggcaccaaaaaactcccgaaaactatcccaatgccgggctgactatgaattattgtcgaaatcccgatgcagacaaagggccttggtgtttcacgactgatccttcagtccgctgggaatactgtaatctgaagaagtgtagtggaactgaggcatccgtagtcgcgccccctccagtcgtcctgttacctgatgtggagactcctagtgaagaagactgcatgttcggaaacggaaaaggatatagagggaaaagagccactactgtcactgggactccctgccaggattgggcagctcaggaaccccaccgacattctatttttacaccagaaacaaaccctcgagcagggcttgaaaagaattattgcaggaatcctgatggggatgtgggagggccttggtgctacactacgaatccacgcaaattgtatgactattgtgatgtccctcagtgtgccgcccctagttttgattgtgggaaaccccaggtcgaacctaaaaagtgtcccggaagggtagtaggaggatgcgtagcgcatcctcacagttggccatggcaggtgtcactcagaactcgattcggaatgcacttctgcgggggaactctcatttcacccgaatgggtgcttacagccgctcattgcttagagaaatcccctcgtccttcttcctacaaagtgatcctcggggcccaccaggaagtcaatctggaaccccatgtgcaggaaatcgaagtgtctcgcctttttctcgaacctactagaaaggacatagcccttcttaaattaagtagtcctgctgtgatcacagataaagttatccccgcctgcctcccatcaccaaactatgtggtggccgatagaactgaatgttttattactggatggggagaaactcaggggacattcggggccggattgctcaaggaagctcaacttccagtaatcgaaaacaaagtgtgcaacaggtatgaattccttaacggacgagtgcagtccacagaattgtgtgctgggcatctcgctgggggaactgattcctgccagggagattccggaggacccttggtctgtttcgaaaaagataaatatattctacagggagtaacttcctgggggctgggatgcgctagaccaaataaacctggagtttatgtccgagtgtcaagattcgtaacatggatagaaggagtgatgcggaacaat

SEQ ID NO: 18267 - DNA, 2430 bp, synthetic construct
  misc_feature 1..2430: note = source = /note="Description of Artificial Sequence: Synthetic coding sequence"
  source 1..2430: mol_type = other DNA
atggagcacaaagaggtggtactgcttttgctgctcttccttaagtcaggccaaggggagcccctggatgactacgttaacacacaaggagcgagtctgttctctgtgactaagaaacagctcggcgctggctccattgaagaatgtgccgcgaagtgtgaagaagacgaggagtttacctgcagagcatttcagtatcatagcaaagaacagcagtgtgtgatcatggcagagaatagaaaaagttcaatcattatacgaatgagggacgttgtactttttgagaagaaagtctacctgagtgaatgcaagacaggaaatggcaagaattatagaggaaccatgagtaaaactaagaatggcatcacatgtcaaaagtggagcagtaccagcccccatagaccccggttttcacccgctacacatccttctgaagggctcgaggagaattattgcaggaacccagacaacgatccacagggcccctggtgttataccactgatcccgagaagcggtacgactactgcgatatactggaatgcgaggaggaatgtatgcactgctccggagaaaactacgatggaaaaatctccaagacaatgtccggactcgagtgtcaggcctgggattctcagagcccgcatgcccacggatacattcccagcaagtttccaaataaaaacctcaagaagaactattgtcggaacccagacagggagttgagaccttggtgcttcactaccgaccccaataaaagatgggaactgtgcgatattccccgctgtacaactcctcctccgagcagcggacctacctaccagtgccttaaaggcacgggagaaaattaccgagggaacgtagcagttacagtgtctggacacacgtgccaacattggagcgcccagaccccccatactcacaatcggacgcctgaaaatttcccgtgcaagaacctcgacgagaattattgccggaacccagacggtaagagggcaccttggtgtcacacgacaaactctcaggtccgctgggaatactgcaagatcccgtcttgtgatagttcccctgtcagtactgagcagttggctccaacggccccgccggaactgacaccagtggtgcaggactgctaccacggcgatgggcagagctacaggggcacatcttctaccacaactacaggcaaaaaatgccagagttggagttctatgactccccatagacaccagaagacacccgagaattacccaaatgcagggctgactatgaactattgccgaaatccagacgccgataagggcccttggtgttttacaactgacccttcagtcagatgggaatattgcaacctcaaaaagtgttcaggaacagaggcctctgtggtcgcccctccccctgtggtgctcctgcccgatgtcgagaccccttcagaggaagactgtatgtttggaaacggcaaaggttatagaggcaaacgagcgaccacagtcacgggaacaccctgtcaggactgggctgcacaggaaccgcaccgacactccatttttactcccgagactaatccaagggccggtctcgaaaaaaattattgcagaaatccagacggagacgtagggggcccttggtgctataccaccaatcccagaaagctttacgactattgtgatgtaccacagtgcgccgcaccatctttcgattgcggaaagcctcaggtggaacctaaaaagtgtcctgggagagtagtgggtggctgtgtcgcccatcctcatagttggccttggcaggtctcccttcgcacacgattcggaatgcatttttgcggtgggacactgatatcccctgagtgggtccttaccgcagctcattgccttgaaaaatccccgcggccatctagttataaagtaattctgggagcacaccaagaagtgaatctggaaccacacgtgcaggaaatcgaagtgtcccgactgttccttgagccgaccagaaaggacattgccctgttgaaactctccagtcccgccgtgatcacagataaggtaattcctgcctgcttgccttctcccaactacgtggtagcagacagaactgagtgtttcataacgggatggggcgaaactcaaggaaccttcggagctggactcctcaaagaggcgcagctgcctgttatagaaaataaagtgtgtaacaggtacgagttcctgaatggaagggtgcagagtactgagttgtgtgctgggcacctggcgggaggcactgattcatgtcaaggggattcagggggccccctggtttgcttcgaaaaagacaagtatatacttcagggcgtaacatcttggggtctcggttgcgcaagacccaacaaaccgggtgtgtatgttagagtcagtcggtttgtcacctggatcgagggcgttatgagaaacaat

SEQ ID NO: 18268 - DNA, 2430 bp, synthetic construct
  misc_feature 1..2430: note = source = /note="Description of Artificial Sequence: Synthetic coding sequence"
  source 1..2430: mol_type = other DNA
atggaacataaagaagtggtgctactactgctcttatttctcaaatcgggacagggggaacctctagatgattacgtgaacactcagggagcctccctcttctccgtgactaaaaaacagcttggggccggaagtatcgaagaatgtgctgcgaaatgtgaagaagatgaagaattcacttgtagggcattccagtatcattccaaggaacagcagtgcgtgattatggctgagaatcgcaaaagttcgatcataattcgaatgcgcgatgtcgtcctcttcgaaaaaaaagtatacttatctgaatgcaaaacagggaacggaaaaaactatcggggaactatgtctaaaacaaaaaatgggatcacatgccagaagtggtcttctacatctccccatcgaccccgcttctctcccgcaactcacccatccgaagggctcgaagaaaattattgcaggaatcccgacaatgatccccaggggccctggtgctacactactgaccccgagaaaagatatgattactgtgatatcttagagtgtgaggaagaatgtatgcattgctccggagaaaactatgatggaaaaatttctaaaacaatgtctgggctcgaatgccaggcatgggattcgcaatctcctcatgcacacggatatattccctcgaaattcccaaacaaaaacttaaagaagaactactgccgcaatcctgaccgcgagctcaggccatggtgtttcactactgatccaaacaaacggtgggagttatgtgatatccccaggtgcacaactccccctcccagttctgggcctacttaccagtgccttaaaggaactggggaaaactatagaggaaacgttgcagtgactgtgtctgggcacacatgccagcattggtctgctcagacaccacacactcataacaggactccagaaaacttcccctgtaaaaacctagacgagaattattgtaggaaccccgatggaaaacgtgccccctggtgccatacaacgaatagtcaggtacgctgggagtactgcaagataccttcttgtgattcctctcccgtgtctacagaacagctggctcctactgccccccctgagctgacacctgtcgttcaggattgctatcacggggacggacagagttacagagggacgtcctccactacgacaacaggaaaaaagtgccagtcttggtcatcaatgacacctcatagacaccagaaaactcctgagaattaccctaacgccgggctcacaatgaattactgtcgaaacccagatgctgataaagggccttggtgcttcactacagatccatcggttcgatgggaatactgtaatctcaagaaatgttctggaactgaggcatccgtggttgcacctcctcccgtggtcctcctcccggatgttgaaacaccttctgaagaagattgtatgtttggaaatggaaaagggtaccgaggaaaaagagccacaacagtaactgggacaccctgccaggattgggctgctcaggaaccacataggcactccatcttcacacccgagactaatcctcgggcaggactagagaaaaactattgtaggaacccagatggagatgtgggagggccgtggtgctatacaacaaatcccagaaaactctacgattattgcgatgtcccccagtgcgccgctccatcttttgattgtgggaaaccacaggtcgaacctaaaaaatgtcctggacgtgttgttggagggtgcgtcgctcacccacattcctggccctggcaggtcagtcttaggactaggttcggaatgcacttttgtggaggaacactaataagtcctgagtgggtgttgacagccgcccattgtctggaaaaaagtccaaggccctcctcctacaaagtaatacttggggctcaccaggaagtaaatctggaaccacatgtccaggaaatagaggtgtctagactcttcctagagccaacaaggaaagatatcgccctgttaaaactctcctcacccgcagtgataacagataaagtgatacctgcctgtctcccctctcccaattacgtagtcgccgataggactgaatgtttcataacagggtggggagaaacacagggaacatttggagccgggctcttaaaagaagctcagcttccagtcatagaaaacaaggtatgcaacaggtacgaattcctcaacgggagagtgcagtccacagaactttgtgcaggacacctggccggggggactgatagttgtcagggagattctggggggcctctcgtatgttttgaaaaagataaatacatacttcagggagttacgtcctggggactagggtgtgccaggcctaacaaaccaggagtgtacgtgagagtatctaggtttgtcacttggatcgaaggggttatgaggaataac

SEQ ID NO: 18269 - DNA, 2430 bp, synthetic construct
  misc_feature 1..2430: note = source = /note="Description of Artificial Sequence: Synthetic coding sequence"
  source 1..2430: mol_type = other DNA
atggaacataaagaagttgttcttcttttacttttattccttaagtctggacaaggagaaccacttgatgattatgtaaatacacaaggagcatctcttttttctgtaactaagaagcaattgggagcaggatcaatagaagaatgtgctgcaaaatgtgaagaagatgaagaatttacttgccgagcctttcaatatcattctaaagaacaacaatgtgttattatggcagaaaataggaaatcatcaattataattagaatgagagatgtagttttatttgaaaaaaaagtatatctttctgagtgtaaaacaggaaatggtaaaaattatagaggtactatgagtaagactaaaaatggaattacttgtcaaaaatggtcatcaacatcaccacacagaccacgtttttccccagcaactcatccatcagaaggattagaagaaaactattgtagaaatccagacaatgatccacaaggtccttggtgttatactacagatcctgagaaaagatatgattactgcgatattttagaatgtgaagaagaatgtatgcattgtagtggagaaaattatgatggaaaaatttcaaaaactatgtctggattagaatgtcaagcatgggattctcaatcaccacatgcacatggatatattccatcaaaatttcctaataaaaatttaaaaaaaaattattgtcgtaatcctgatcgagaattacgaccatggtgttttacaactgatccaaacaagagatgggaactttgtgacattccaagatgtactactccacctccatcaagtggtccaacatatcaatgtttgaaaggtacaggagaaaattatagaggtaatgttgcagtaacagtttcgggacatacctgtcaacattggtcagctcaaactccacatactcataatagaactcctgagaatttcccatgtaaaaatttagatgaaaattattgtagaaatccagatggaaaacgagctccttggtgtcatactactaattctcaagttagatgggaatattgtaagattccatcatgtgacagtagtccagtttctacagaacaattagcacctactgcaccaccagaattaactccagttgtacaagattgttatcatggagatgggcaatcatatcgtggaacgtctagtactactactacaggaaaaaagtgtcaaagttggagtagtatgacaccacatagacatcaaaaaacaccagaaaattatccaaatgctggattaacaatgaattattgtagaaatccagacgctgataaaggaccatggtgttttacaactgacccatcagttagatgggaatactgtaatttaaaaaagtgttcaggtactgaagcatctgttgttgctccaccaccagttgttcttttaccagatgttgaaacaccaagtgaagaagattgtatgtttggtaatggaaaaggttataggggaaaacgtgcaacaactgttacgggaacaccatgtcaagattgggcagcacaagaaccacatcgacattctatttttactccagaaacaaatccaagagcaggattagaaaaaaattattgtcgaaatcctgatggtgatgtaggaggaccttggtgttatactactaatccaagaaaactttatgattattgtgatgttcctcagtgtgcagcaccaagttttgattgcggaaaaccacaagttgaacctaaaaaatgtccaggacgagttgttggaggatgcgtagctcatccacattcatggccatggcaagtttcacttcgaacaagattcggaatgcatttttgtggaggtacattaatttcaccagaatgggttttaacagctgctcattgtcttgaaaaatcaccaagaccttcgtcttataaagttatattaggagctcatcaagaggttaatttagaaccacatgtacaagaaattgaagtatcaagactttttcttgaaccaactcgtaaagatatagccttacttaaattatcaagtcctgctgttataacagataaagttataccagcttgtttaccttctcctaattatgtagttgcagatagaactgaatgttttataactggatggggagaaacacaaggaacttttggagctggtcttttaaaagaagctcaacttccagtcatcgaaaataaggtgtgtaatagatatgaatttcttaatggaagagtacaatcaacagaactttgtgcaggtcatttagctggtggtacagattcatgtcaaggtgattcaggaggaccacttgtatgttttgaaaaggataaatatatattgcaaggagttacttcatggggattaggatgcgctagaccaaataaaccaggagtctatgttagagtttcaagatttgtaacatggatagagggggtaatgcgtaataat

SEQ ID NO: 18270 - DNA, 2430 bp, synthetic construct
  misc_feature 1..2430: note = source = /note="Description of Artificial Sequence: Synthetic coding sequence"
  source 1..2430: mol_type = other DNA
atggagcacaaggaggtggtgctcttactcctgctctttttaaagagtggccaaggagagccactagacgattatgttaatacgcagggcgcctccctattctctgtcacaaagaaacagcttggtgccggttcaatagaggagtgcgctgccaagtgtgaagaagacgaggaatttacttgccgtgcgtttcagtatcacagtaaggagcagcagtgtgttatcatggccgaaaaccggaagagctctattattatccggatgcgcgatgtcgtattgttcgagaaaaaagtgtacctgtctgaatgcaaaacaggcaatgggaagaactatcgcggaaccatgtccaagaccaaaaatggaataacatgccagaaatggagctcgacctctccccacaggccacgattttcccctgccactcatccaagcgaaggactggaagagaactactgccgtaatccagacaatgatccccagggcccctggtgttacactaccgaccccgaaaagcggtatgactactgtgacatcttagagtgtgaggaggagtgcatgcattgttccggcgagaattacgatggcaaaataagtaaaacaatgagtggtctagaatgccaggcgtgggactcccagtcaccccacgctcatggctatattccctcaaagtttccaaacaagaatttgaagaagaactattgcaggaaccccgaccgagagttacgcccttggtgcttcacaacagaccctaacaagcgctgggaactgtgcgatatcccgaggtgcaccacaccaccacctagttcaggtcctacatatcagtgcctgaaaggcacgggcgaaaattatagaggtaatgtcgccgtgaccgtctctggacacacctgccagcactggagtgctcaaacaccacacactcacaaccggacacccgagaatttcccctgcaagaatctcgatgagaattactgccgaaatccagatggcaaaagggcgccctggtgtcatactacaaatagccaggtcaggtgggagtactgcaaaatcccctcctgcgactcaagccctgtgtcgactgagcagctggccccgaccgccccaccagagttgaccccagtggttcaggattgttatcatggtgacggacagtcctacagaggaacctcctcaacaaccactaccggcaagaaatgccagtcttggtctagcatgacacctcataggcatcagaagacaccagaaaattaccctaacgccggactgacgatgaactactgccgtaacccagatgctgacaagggtccctggtgcttcaccaccgacccttcggtgaggtgggagtactgcaatctgaaaaaatgcagcgggaccgaggcgtctgttgtcgcccccccaccagtagtgctcttaccagatgtggagacaccttccgaggaggattgtatgtttggtaacgggaagggttatagaggtaagagggccactacagtaacggggaccccatgtcaggattgggccgcccaggagccccataggcactccatttttacgcctgagacaaaccctagggccggactagaaaagaactattgccgcaatcctgatggcgatgtgggtgggccctggtgctacaccaccaatcccagaaaactttatgactattgcgacgtccctcagtgtgccgctcctagcttcgattgcggcaagccgcaagttgagcccaaaaagtgccctggacgcgtagttggcggatgcgtggcgcacccgcacagctggccttggcaagtgagtctccgaacaaggttcggcatgcacttttgcggtggaacgttaatttccccagagtgggtcctgaccgccgcacattgcctcgaaaagtccccacgcccatcgagctacaaggtgatcttaggcgctcatcaagaggtcaacctagaaccgcacgtacaggaaattgaagtgagtagactcttcctggaaccaacgaggaaggacattgctcttctcaagctgagttcccccgcagtaataacagacaaagtgatccccgcttgtctgccctctcctaattacgtagttgcagaccgcacagaatgtttcatcactggttggggcgagacccagggcaccttcggggcaggacttttgaaagaggcccagctgccagtcatagaaaataaagtttgcaatcggtatgaatttctgaatggccgagtccagagtacggagctgtgcgctgggcacctggcgggagggactgatagctgtcagggggactccggggggccgttagtgtgctttgagaaagacaaatacattttacagggtgtgacgagctggggactggggtgcgcgcgccccaacaaacctggagtgtatgttcgtgtgtcgaggttcgttacatggatcgagggagtgatgaggaacaat

SEQ ID NO: 18271 - DNA, 2430 bp, synthetic construct
  misc_feature 1..2430: note = source = /note="Description of Artificial Sequence: Synthetic coding sequence"
  source 1..2430: mol_type = other DNA
atggaacacaaagaggttgtcctcctgctgctcctcttcctgaaatctggacagggagaacctctggacgattacgtcaatacccaaggggccagcctgttcagcgttacaaagaagcagcttggagccgggagtattgaggagtgcgccgctaagtgcgaggaagacgaagagttcacatgtcgcgcgttccagtaccattctaaagagcagcagtgtgtgatcatggccgaaaatcggaaaagttccatcattattagaatgagggacgtggttttgttcgagaaaaaagtctacctgtccgaatgtaagacagggaatgggaaaaactaccgcgggactatgtctaagaccaaaaacgggattacctgccagaagtggtcatctacttcccctcacaggccccgttttagccctgccacacatccctccgaaggactggaagaaaactactgccggaatccagataatgacccccagggaccctggtgttacactacagatccggaaaagcgttacgactactgtgacattctggagtgtgaggaagagtgcatgcattgcagtggcgaaaattacgacggcaaaatttccaaaacaatgtccggattggagtgccaggcctgggactctcagagcccccacgcccacggctatataccctcaaaattccccaacaagaacctgaaaaagaactactgtcgtaaccccgaccgggagcttcgcccctggtgtttcacgacagaccctaacaaaaggtgggagctgtgcgacatccccaggtgtacaacaccacccccttccagcggcccgacttatcagtgtctgaaggggaccggcgagaattatcgcggcaatgtcgccgtcacagtctcaggtcacacatgccagcactggtcagctcaaacgccccacacccataatcgcacccctgaaaatttcccctgcaagaatttggatgaaaattactgtaggaatcctgatggtaagagagcaccatggtgccacactaccaatagccaggttaggtgggagtattgtaagattccatcctgcgactcctcaccggtgtcaacagagcagctggcccccacggctccaccggaactgaccccagtcgtgcaggactgttaccatggggatggacagagttacagaggcacctcaagtaccacgacaacgggaaaaaagtgtcagagctggtcctcaatgactccccatcggcatcagaagacaccagaaaactacccaaatgcggggctcacgatgaattactgcagaaatcctgacgctgacaaaggcccttggtgtttcaccacggacccctccgttagatgggagtattgcaatttgaaaaaatgtagcggaacagaagcttctgtggttgcaccaccccccgtcgtgttactcccagacgtcgagactccttcagaggaggattgcatgtttggaaatggtaaggggtaccgaggaaagagggcgacaactgtgaccgggacaccctgtcaggactgggcagctcaggagccacatcgacattccatcttcacccctgagacaaatccaagggcagggctggagaagaattactgtaggaaccctgacggcgatgtgggcggtccctggtgctacacaaccaacccaagaaaactgtacgattactgtgacgttccccagtgtgcagcccctagttttgattgcggtaaacctcaggttgagccgaaaaagtgtcctggccgagtagtcggaggttgcgttgcccatcctcattcttggccctggcaggtgtctcttcgcaccaggtttgggatgcacttttgtggtggcaccctcatttcacctgagtgggtgctaaccgctgctcactgcctcgaaaaaagccctaggcctagctcgtataaagttatcctcggcgcacaccaagaggtgaacctggagccccatgtgcaagagatagaagtttctcgtttgtttctcgaacctactcgcaaagacatcgcactactaaagctgtcttcacccgccgtgattaccgataaggtaatcccagcttgtctccctagtcccaactatgtcgttgccgatcggaccgagtgctttataacgggatggggagaaacgcagggcactttcggcgcgggactcctgaaagaggctcagctgcctgtcattgaaaataaggtttgcaataggtacgaatttttgaatggacgcgttcagtccaccgaactctgtgcgggccacttagcaggcgggactgattcttgtcaaggcgactctggtggaccactcgtgtgcttcgagaaggataaatatatcctgcagggggttacatcttgggggctgggatgcgctcgaccaaacaaaccgggggtgtacgtgcgggttagtagatttgtcacctggatcgagggagtgatgcgtaataat

SEQ ID NO: 18272 - DNA, 1686 bp, synthetic construct
  misc_feature 1..1686: note = source = /note="Description of Artificial Sequence: Synthetic coding sequence"
  source 1..1686: mol_type = other DNA
atggacgccatgaaacgcggtctgtgctgtgttttactcctgtgcggtgcagtgttcgtgagccccagtcaggaaatacacgcacggtttaggaggggagcacggagctaccaagtgatctgtagggatgagaagacacagatgatttaccaacagcaccagtcctggctgagacccgtgctcagatcgaatcgagttgagtattgttggtgcaattccggtagggctcagtgtcacagcgtcccagtgaagtcatgttctgaacccaggtgcttcaatggtggaacttgccagcaggccctgtactttagtgattttgtttgccagtgcccggagggcttcgctgggaagtgctgtgaaatagatacaagggcaacctgctacgaagaccaggggatctcataccgcgggacttggtccaccgccgagagtggagctgagtgcactaactggaacagtagtgcgttagcgcaaaagccctatagtggtcgccgaccagatgcgatccgattgggacttgggaaccataattactgtagaaatccagaccgagattcgaaaccctggtgctacgtgtttaaggctgggaagtacagtagcgagttctgctctaccccagcttgctcggagggcaacagtgattgttactttggaaatggctcggcctaccggggcactcactcacttacggagtcaggagccagctgcttgccgtggaacagcatgattttaattggcaaggtctacaccgcccagaatccaagtgcgcaggccttaggtttggggaaacataactactgccggaatcccgacggggatgcaaaaccctggtgtcatgtgctcaagaacaggaggttaacttgggaatactgtgatgtgccatcttgcagcacatgtggattacgccagtacagtcagccgcagtttaggatcaaggggggtctgttcgccgacatagcctcacacccgtggcaggcagccattttcgccaagcatagacgcagtccaggagagcggtttctgtgtggaggcattctgatatccagttgttggatattgtccgccgcacattgctttcaggaacggttcccgccccaccacctcacagttatactggggcgcacctatcgcgtggtgccgggagaagaggaacagaagttcgaggtggaaaaatacattgtgcataaggagttcgatgatgatacttacgataacgacatcgctttactccagctcaagagcgactcttcccggtgcgctcaagaatcttcggtggtgcgaactgtctgcttgcctcccgccgacctgcagctgcccgactggacagagtgtgagctgtcaggatatggaaagcatgaagccttaagtcctttctactccgagagactaaaagaggctcacgtgcggctgtacccctcaagtaggtgtacaagccagcatctcctcaatcgtaccgtgactgataatatgctatgcgcgggagatacccggagcggggggcctcaggcaaacctgcacgacgcttgtcaaggcgattcagggggccccctcgtctgtctaaacgacggcaggatgacactcgttgggattatctcttgggggcttggctgcgggcaaaaggatgtgcctggcgtttacacaaaggtgactaattatctagattggatccgagacaacatgaggcct

SEQ ID NO: 18273 - DNA, 1686 bp, synthetic construct
  misc_feature 1..1686: note = source = /note="Description of Artificial Sequence: Synthetic coding sequence"
  source 1..1686: mol_type = other DNA
atggatgcaatgaagcggggactgtgttgcgtgcttcttctgtgtggagccgtgtttgtgtcccctagccaggaaattcatgcacgattccggagaggtgcacgctcataccaagtgatttgtagggacgagaaaactcagatgatctatcaacagcatcaatcgtggcttcggcctgtgctcagatctaatcgcgtcgaatactgctggtgcaattctggccgcgcccaatgccattcagttcctgtcaaatcctgttcggaaccgcgttgctttaatggcggcacgtgtcagcaagcgctttacttttccgatttcgtgtgtcaatgtccagaagggttcgccgggaagtgttgcgagattgacacgcgtgcaacgtgctacgaagatcagggtatttcataccgtggtacgtggagcacggctgagtcgggagcagaatgtactaactggaattcatcggcactggctcaaaagccctacagcggaagaaggccggacgcgataagacttgggctgggcaatcacaactactgcagaaaccctgatcgagatagcaagccatggtgttacgtgtttaaagcaggtaaatactcctcagagttctgttcaaccccagcatgttcggagggtaactcagactgttactttggaaacggctcggcttacagaggcactcatagccttaccgagagtggagcctcgtgtttgccttggaactcgatgatcctcattgggaaggtgtacaccgcgcagaacccatctgcacaggcactcggactcggtaagcacaactattgcagaaacccagatggggacgctaagccttggtgtcatgtccttaagaataggagactgacttgggaatactgtgatgtgccaagttgctctacttgcggcctgagacagtactcacaaccccagtttcgaatcaagggtggtctgtttgcagatatcgcaagccacccctggcaagcagcaattttcgcaaagcatagacgctcccctggagaaagatttctgtgtggtggaatcctgatatcgtcatgttggattctgtccgccgctcattgctttcaagaacggttccctccccatcaccttacggtcatacttggccgtacctacagagtagtgccgggcgaagaggaacagaagtttgaggtggagaaatacattgtccataaagaattcgacgatgatacctatgataatgacatcgcattgctgcaactcaagtcggattccagcaggtgtgcccaagaatcctcagtcgtgagaactgtgtgcctcccacctgcagatcttcaactgccagattggaccgaatgcgaactttcgggatacgggaagcatgaagcgctgtccccgttttacagcgagagactgaaagaagcccatgtgagattgtacccctcttcccgctgcactagccaacacctgcttaacagaactgtcactgataacatgttgtgtgctggtgatacccgctcgggaggaccccaggcgaatctgcacgacgcctgtcaaggcgatagcggggggccccttgtgtgtcttaacgatgggcgcatgacccttgtcgggataatctcctggggcctgggttgtggtcagaaggatgtgccaggagtgtatactaaggtaaccaattacctggactggattcgagacaacatgcgaccg

SEQ ID NO: 18274 - DNA, 1686 bp, synthetic construct
  misc_feature 1..1686: note = source = /note="Description of Artificial Sequence: Synthetic coding sequence"
  source 1..1686: mol_type = other DNA
atggatgccatgaagcgaggtctgtgctgcgtgcttctcttatgtggggcagtattcgtctcaccgagccaagagattcatgctagattccgcagaggagctcgctcatatcaagtgatctgtagagatgaaaaaacacagatgatttaccaacaacatcagtcttggctccggccagttcttagatctaaccgagtagaatattgttggtgcaattcaggacgggcgcagtgccattcagtcccggtcaaatcatgcagtgaacctaggtgttttaacgggggtacctgtcagcaggccctgtattttagtgactttgtatgtcagtgccctgagggttttgcgggcaaatgctgcgaaattgatacaagagcgacatgttatgaagaccaaggtatttcgtatcgtggcacttggagcacagcagagtctggtgctgaatgcactaattggaattctagtgcacttgctcaaaaaccctattctggccggcgcccagatgcaattcgtcttggacttgggaatcataactattgtcgtaatcccgatagagattcaaagccgtggtgctatgtattcaaggcaggcaagtatagtagcgaattctgcagcactcccgcgtgctcagaagggaactcagattgttactttggcaatgggagcgcataccggggcacgcacagcttaaccgagtctggagcgagttgcttaccctggaactccatgattctgattggcaaagtatataccgcacaaaatccttcagcgcaagcactgggtctgggcaaacataattactgccgaaaccccgatggagatgcgaaaccttggtgtcatgttctgaaaaatcgccgcttgacatgggaatattgtgacgtccctagctgttctacatgtggattgagacaatattctcaacctcagttccgcataaaaggaggcctgtttgctgatattgcgtctcacccgtggcaagccgcaatctttgctaaacatcgtcgttctccgggagaaagatttctgtgtggaggcattcttatatctagttgctggatattaagcgcggctcattgctttcaggaaagatttccgccgcatcatctgacagtcatactaggacgaacctatagagtagttccgggggaggaagaacaaaaattcgaagtagagaaatatattgtgcataaagaatttgatgacgatacttacgacaacgatattgcgcttttacaattaaaaagcgattcatctagatgtgcgcaagaatcatctgtggtacgaactgtgtgcttaccgcccgcagatctccaactgccagactggacagaatgtgaattgtctggttatggtaaacacgaggcactgtcaccgttttattcagagcgtctaaaagaggcgcatgtgcgcttatatcctagttctcgatgcacgtctcagcacctgcttaataggacagttacggataatatgttatgcgcgggcgatactcgtagcggagggcctcaggctaacctccacgacgcatgccaaggagattcgggagggccgttagtctgcttgaatgatggacgcatgacacttgtcggaattatctcttggggattggggtgtggacagaaagacgtccctggtgtgtatacgaaagtgacaaattatctggattggatccgggataatatgcgacct

SEQ ID NO: 18275 - DNA, 1686 bp, synthetic construct
  misc_feature 1..1686: note = source = /note="Description of Artificial Sequence: Synthetic coding sequence"
  source 1..1686: mol_type = other DNA
atggacgccatgaaacgtggtttgtgttgcgttctgctgctctgtggagccgtgttcgtgagtccctcccaggagatccacgcgaggttcagaagaggtgctaggagctaccaagtgatctgtagggacgagaagacgcagatgatctatcagcagcatcagtcgtggctcaggcccgtgctgcgaagtaaccgggttgaatactgctggtgcaactcaggacgggcccaatgtcattccgtgccagtgaagagctgttcagaaccaaggtgttttaacgggggtacttgtcagcaggctttgtatttctccgatttcgtctgtcagtgtcctgaagggtttgctggtaagtgttgtgagattgatacgcgggccacctgttacgaggaccagggaatcagctatcgcggcacttggtccacggcagaatcgggagcagagtgcacaaactggaattcgtcagcactggcccagaaaccctacagcggaagacgtcccgacgccattcgcctgggattgggtaatcacaactattgccgcaatcccgacagggactccaagccatggtgttacgtgtttaaggccggcaagtatagttcagagttttgttctacacccgcttgttctgagggaaactcagattgctatttcggcaacggctccgcttatcgtgggacacactcgcttacagaatccggcgcttcatgcctgccatggaactcaatgattctcatcggcaaggtgtacaccgcgcagaatcccagtgctcaggccttaggactaggcaaacacaactactgcaggaatccagacggcgatgctaagccatggtgtcacgtacttaagaatcggagattaacctgggagtactgtgacgtaccttcgtgcagcacctgcggactgcggcagtattcccagccacagttccgcatcaaaggcggactgtttgccgacatcgcctctcacccttggcaggctgccatatttgctaagcacaggaggagcccaggagagaggttcttgtgcggcgggatccttatctcctcttgttggattctctctgcagcccattgctttcaggaacgttttcctccacaccacctcacagtcatcttagggagaacataccgggtagtgcccggggaagaggagcagaaatttgaggtggagaaatatattgttcacaaagagttcgatgatgacacatatgataacgatattgccctgctgcagctgaagtcagactccagccggtgtgcgcaggaatctagcgtggtgagaacagtgtgtctgcctcccgccgacctacagctgccagattggaccgagtgcgagctttctggctatggcaaacatgaggctctgtctccgttttactctgaacgactcaaggaggcacatgttcggctgtacccgtcttctcggtgtacgagccagcacctactaaacaggacagtcaccgacaatatgttatgcgccggggacacacggtccggcggtccacaagccaatctgcacgacgcatgtcagggcgactctggaggccctctggtgtgccttaacgacggcaggatgaccctggtgggcattatcagctgggggctgggatgtggacagaaagatgtcccgggagtctataccaaagtaacaaactacttggactggatcagagacaatatgcgacca

SEQ ID NO: 18276 - DNA, 1686 bp, synthetic construct
  misc_feature 1..1686: note = source = /note="Description of Artificial Sequence: Synthetic coding sequence"
  source 1..1686: mol_type = other DNA
atggatgccatgaagcggggactgtgttgtgtgcttttgctttgcggggccgtctttgtctcaccatctcaagaaatccatgcaaggttcagaaggggcgcgaggtcctaccaggtgatctgtcgggatgagaaaacccagatgatctaccaacagcatcagtcctggctgaggccggtgcttagatccaacagggtggaatactgttggtgcaattcgggccgcgcacaatgtcattccgtccccgttaagtcgtgtagcgaaccccgttgcttcaacggaggaacctgccagcaggccctctacttttcagactttgtgtgccaatgtcctgaaggttttgcgggaaagtgctgtgaaattgacactagggcaacctgttacgaagatcagggtatctcctaccgcggtacctggagcactgcagaaagcggagcagaatgcactaactggaattcatcggccctcgcccagaagccctatagcggtaggaggccagatgcaattagactgggcctgggtaaccacaattactgcagaaatcctgatagagattccaaaccatggtgttacgtgttcaaagctggaaagtattcgtcggagttctgctcaacccctgcgtgttcggaggggaacagcgattgctattttggaaatgggagcgcataccgcgggacccactcccttactgaaagcggagcctcatgccttccgtggaactcgatgattcttattggaaaggtctacactgcccagaatccatcggcccaagcactgggactcggcaaacacaactactgtaggaaccctgatggtgatgcaaagccttggtgtcatgtgctgaaaaaccggcggctcacgtgggaatactgcgacgtgccttcctgctccacttgcggactgcggcagtactcgcagcctcaatttaggatcaagggagggctttttgctgatatcgcttcccatccatggcaggcagccatctttgcgaagcatagacgatcccctggagagcgctttctttgtggaggaatcctgatttcatcctgctggattttgtcggcagcccactgcttccaagaacgttttcctccacatcatctgaccgtgattcttggacggacttatagggtggtgcccggggaggaagaacagaaattcgaggtggagaaatacattgtccacaaggaatttgatgacgatacttacgataatgatattgcacttctgcaacttaagtcggattcatcaaggtgtgcacaggagtccagcgtcgtgaggaccgtgtgtctcccacctgccgaccttcaactgccagactggaccgagtgcgagcttagcggatacggtaagcatgaagccctctctcccttttactcggaacgcctgaaagaggctcacgtcagattgtaccccagctccagatgcacctcgcagcatcttctgaatcgtactgttacggacaatatgctgtgtgcaggtgacactcgatcgggaggaccacaagccaacctgcatgatgcatgtcaaggtgattcaggggggcccctcgtgtgccttaatgatggaaggatgactctggtcggaataatcagctgggggctgggatgtggtcaaaaggacgtcccgggagtgtacacgaaagtgaccaactacttggattggatccgggacaatatgcgtcct

SEQ ID NO: 18277 - DNA, 1686 bp, synthetic construct
  misc_feature 1..1686: note = source = /note="Description of Artificial Sequence: Synthetic coding sequence"
  source 1..1686: mol_type = other DNA
atggatgcaatgaagagaggcctgtgttgtgtcctgcttctctgtggagctgtgtttgtttcaccttcacaagagatccacgcacggtttcggagaggagcaagaagctaccaagtgatctgccgtgatgaaaagacgcaaatgatttaccaacagcatcaatcgtggcttcgacctgtgctgagaagcaaccgcgtggaatactgttggtgtaacagcggtcgcgcgcaatgccactccgtccctgtcaagagctgttccgaacctcgctgtttcaacggagggacttgtcagcaagcgctttacttctcagattttgtctgccaatgccctgagggattcgccgggaagtgctgcgagattgatactagagccacctgttacgaggaccagggaatttcctaccggggtacttggtccactgcagaaagcggtgcagaatgtaccaattggaattcgtcagcccttgcacagaagccatactcaggtagacgtccagatgccattcggctgggactcggtaaccataactactgtaggaatcctgatagggattcaaagccttggtgctacgtgtttaaggccggcaagtacagctcagagttctgctccactccagcatgtagcgagggtaatagcgattgttactttggcaatggttcagcatacaggggtacccattcactcactgaaagcggagcaagttgccttccttggaactccatgattctcatcggtaaggtctacactgcacaaaatccctcagcacaggcactcgggcttggaaaacacaactactgtagaaacccagatggtgacgctaaaccatggtgtcacgttctgaagaataggcgactcacttgggaatactgtgatgtgccgtcgtgtagcacttgcggactgagacagtactcgcaacctcagtttcgcataaagggaggccttttcgctgacatcgcatcgcatccttggcaggccgcgatattcgcaaagcacagaagaagccccggtgaaagattcctgtgtggggggatactgatatcgtcctgttggattctgagcgcggcccattgctttcaagaacggtttcctccacatcaccttaccgtcattctcggacgtacttaccgcgtggtgcctggggaagaagagcagaaatttgaggtcgaaaagtacattgtgcataaggagttcgacgatgatacttacgataatgacattgcacttctgcaattgaagtcggattcgtcgcgctgcgcacaggaatcatccgtggttcgaactgtgtgtctgccacctgcagatcttcaacttcctgactggaccgaatgtgaactctcaggatacggaaagcacgaggcactttcacctttttactctgaaagacttaaggaagcacacgtcaggctctatccttctagcagatgtacgtcccaacaccttctgaaccgcactgtgactgataacatgctctgtgcgggcgatactcggtccggaggtccacaggcaaacctccatgatgcgtgtcaaggagattcgggcggacctctcgtctgtctgaacgatggtaggatgaccctcgtgggaattatctcatgggggttgggatgcggacagaaggatgtgcctggagtgtatactaaagtaaccaactaccttgactggattagggataacatgcgtccc

SEQ ID NO: 18278 - DNA, 1686 bp, synthetic construct
  misc_feature 1..1686: note = source = /note="Description of Artificial Sequence: Synthetic coding sequence"
  source 1..1686: mol_type = other DNA
atggacgcaatgaaacgcggcttgtgctgtgtccttcttctgtgtggtgctgtgtttgtttcaccgtctcaggagatccacgcgaggtttcgtcgcggcgcgagaagttaccaggtcatttgtcgagatgaaaagacacagatgatataccagcaacatcagtcatggctccgaccagttctccggagcaatagagtggagtactgttggtgcaactctgggcgggctcaatgtcacagcgtccctgtgaaatcgtgcagcgaacctcggtgcttcaacgggggcacctgtcagcaggctttgtattttagcgattttgtctgtcaatgcccggagggcttcgcgggaaagtgctgtgaaattgataccagagcgacttgctatgaagatcagggtatatcttataggggcacctggagtacggcggaatcgggtgccgagtgtacgaattggaattctagcgcattagctcagaaaccctattccggtcgccggccggacgcaatccgcttgggcttagggaaccataattactgtcgcaatcctgatcgcgattcgaagccctggtgttatgtgttcaaagcgggtaaatatagctcagagttctgttctacccccgcctgcagtgaagggaattcggattgttattttggaaatggatccgcttaccgaggcacccactccttgactgagagtggagcatcctgcctcccatggaactctatgatcctaattggcaaggtttataccgcacaaaacccgtccgcccaagcgctgggtctgggaaagcataattactgcaggaatccggatggggatgccaagccctggtgccacgtgctgaaaaacagacgtctgacatgggagtactgcgacgtccctagttgcagtacttgtggattacggcagtacagccagccacaatttaggatcaagggaggactgtttgccgacatcgctagccacccgtggcaagctgccatctttgccaaacatcggcggtctccaggcgaacggttcctgtgcggagggatcctgatatcctcctgctggatcctgagtgctgctcattgcttccaggaacggttccctccacaccacctgactgtgattttgggccggacctacagagttgttcccggggaggaggagcagaagttcgaggtcgagaagtatattgtgcacaaagagttcgatgatgacacatatgacaacgacattgcactgctacaactgaagtccgactcttcgagatgcgcccaagagtcatcagtcgtccgcaccgtgtgcctgccccctgccgacttacagctgccagattggactgaatgtgaactgtcggggtatggaaaacacgaagccctgagcccattttatagtgagaggctgaaggaagctcacgtgcgtctgtatccctcatccagatgcaccagccaacacctgctgaaccggacagtaaccgataacatgctttgtgctggtgacacccgctcagggggcccacaagccaatttacacgacgcatgtcagggggacagtggaggacctctggtgtgtctaaatgatgggaggatgacacttgtcggaattatcagttggggactgggatgcggccagaaagacgtacccggcgtttacaccaaggtcactaactacctagactggattcgcgataacatgcgacca

SEQ ID NO: 18279 - DNA, 1686 bp, synthetic construct
  misc_feature 1..1686: note = source = /note="Description of Artificial Sequence: Synthetic coding sequence"
  source 1..1686: mol_type = other DNA
atggacgccatgaagaggggactgtgctgcgtgctgcttctgtgcggcgccgtgtttgtttcaccgagtcaagaaatacatgcacggtttagacgcggagcgcgcagctaccaggtcatctgccgcgacgagaagacccaaatgatctatcagcagcaccaatcctggcttagacctgtcctgcgaagcaaccgagtcgagtattgctggtgtaactcaggtagagcacaatgtcactcggtgcccgttaaatcctgctcagagccccgttgttttaatggtggcacttgtcagcaggctctatacttttctgacttcgtctgccagtgtccagaaggatttgcaggtaaatgctgcgagatagatacccgggcgacctgttacgaggatcagggaatttcttacagaggaacatggagcaccgccgagtcaggtgcagagtgcacaaattggaatagttctgcactggcgcagaagccttattcaggccgcagacctgacgccattagacttggcctggggaatcacaattattgtagaaatccggatagagactctaagccctggtgctatgtattcaaggccggaaagtactcttcagagttttgctcaacgcctgcctgtagcgagggaaattctgactgctactttggaaatggctctgcatatagggggacgcattccctcaccgagtctggggcttcctgtctgccttggaattctatgattttaatagggaaggtttacaccgcgcaaaatcctagtgcacaggccctgggcctaggcaagcacaactattgccgcaaccccgacggcgacgctaagccgtggtgccatgtcctcaaaaacagacggctgacttgggaatactgtgacgtcccttcatgctctacctgtggactcagacagtactcccagcctcagttccggatcaaaggagggctatttgccgacattgcttcacatccgtggcaggcggcaatttttgccaagcacaggcggagcccgggagaaagatttctgtgcggcggaatactgatttcttcttgctggatcttgagtgctgctcactgttttcaggaaagatttccaccacatcatcttaccgtaattttgggccgtacataccgcgtggttccgggagaagaagagcagaaatttgaggttgagaaatacatcgtccacaaagagttcgacgacgatacctatgacaacgatatcgccttgctgcaactgaaatcagacagcagcagatgcgcacaggagagttcagtagtgcgaacagtgtgtttgccacccgccgacttgcagctgcccgactggaccgaatgcgaactgtctggatatgggaagcacgaagctttatcacctttctattcggaaaggctgaaagaggctcacgtgcggctgtatccatcttcgcgatgtacttctcagcacctgctgaatcgcaccgtaaccgataacatgttgtgtgcaggcgataccagaagcgggggcccccaggctaacctgcacgacgcctgccagggcgatagtggtgggcctctagtctgtctgaatgacggtcgtatgacactggtggggattatctcatggggcctaggctgtggccagaaagacgtaccaggtgtctacaccaaggtgactaattacctggactggattcgagataacatgcggccc

SEQ ID NO: 18280 - DNA, 1686 bp, synthetic construct
  misc_feature 1..1686: note = source = /note="Description of Artificial Sequence: Synthetic coding sequence"
  source 1..1686: mol_type = other DNA
atggatgcgatgaaacggggtttgtgttgtgtgctcctgctgtgtggcgcggtgtttgtgtcaccatcccaggagatccatgcacgcttccggcgcggggcccgctcctaccaagtgatctgtcgggatgaaaagacccagatgatctaccagcagcaccagtcctggcttcgccctgtgctgcgctcaaacagggtcgaatactgctggtgcaattcgggacgcgcccaatgccactcagtgccagtgaagtcgtgctcagaaccgcgttgtttcaatggcggaacttgccagcaggcgctgtatttctccgatttcgtgtgccagtgtccggaagggttcgccgggaagtgctgcgaaatagacacccgggccacctgttacgaggaccaaggtatctcctaccggggaacttggagcaccgccgagtcgggagccgaatgcacgaactggaactccagcgccctcgcccagaaaccctactccggccgcagaccagacgcaatccggctgggactcggaaaccacaattactgccgtaacccggacagggacagcaaaccgtggtgttacgtgttcaaagcgggaaagtactcgagcgagttttgctcgaccccagcctgcagcgagggaaatagcgattgctactttggcaacggcagcgcttaccgcggaacgcattcgctcaccgaatccggagcctcatgcctcccgtggaactcgatgatcctcatcgggaaggtgtacaccgcacagaacccgagcgcccaggccctgggcttgggtaagcacaactactgcaggaacccggacggtgatgctaagccttggtgccacgtgctcaagaaccggcgcctgacttgggaatactgtgatgttccgagctgctcgacctgcggccttcggcaatattcgcaaccccaatttaggatcaaaggtggcctgttcgctgacatcgcctcacacccctggcaggcagccatcttcgcaaagcacagacggagcccgggagaaaggtttctttgcgggggcatactcatctcctcctgctggatcctctcggcggctcattgtttccaagaacgcttccccccgcatcacctcactgtgatccttggacggacttatcgcgtggtgcctggcgaagaggaacagaagtttgaggtggagaagtacattgttcacaaggagttcgacgacgatacgtatgacaacgacatcgctctgttgcaactgaagtccgactcctcccggtgcgctcaggagtcgtcagtcgtcagaaccgtttgcttgcctccagccgatctgcaactgcccgattggaccgaatgcgagctgtcgggctacggcaagcatgaggcactgagccctttctactcagaacggcttaaagaggctcatgtcaggctgtacccgtcgtcgagatgcacttctcagcacctcctgaatcggaccgtcactgacaatatgctgtgcgctggagatactcggagcggaggcccgcaagcgaatcttcatgacgcatgccagggagatagcggaggaccattggtttgtctgaatgacggacgaatgacgctggtcgggatcatctcatggggactgggatgcggtcagaaagacgtgcctggcgtctatactaaggtgactaattaccttgactggatccgcgacaacatgcgccct

SEQ ID NO: 18281 - DNA, 1686 bp, synthetic construct
  misc_feature 1..1686: note = source = /note="Description of Artificial Sequence: Synthetic coding sequence"
  source 1..1686: mol_type = other DNA
atggacgccatgaagaggggtctctgttgtgtgctcctgctgtgcggggcagtattcgtttcccctagccaagagatacatgcaagattccgccgcggtgcccgctcctaccaggtgatctgcagggatgaaaaaactcagatgatctatcaacagcaccagtcttggctgcgaccagtcctacggtctaaccgcgtggaatattgctggtgcaattccggcagagctcagtgccattcagtgcccgtgaaatcttgttcagagccccggtgcttcaacgggggcacgtgtcagcaggctctgtatttcagcgacttcgtgtgtcaatgcccagagggttttgcaggaaagtgttgcgaaatagacacccgcgcaacctgttacgaagatcagggcatctcttacagaggtacctggtctacagccgagtcgggagcggagtgcaccaactggaactcgtcagccttggctcagaagccgtactctggaaggcgaccggacgctattcgtctggggcttggaaatcataactattgcagaaacccagatagagattccaagccgtggtgctatgttttcaaagcggggaagtacagttcagagttttgctctacgcccgcatgttccgaaggcaatagcgactgttatttcggtaatgggtctgcttatcgtggcacccactctttaactgagagcggggcttcctgcctcccatggaacagcatgattctcattggcaaggtgtatacggctcagaacccgtctgctcaggctttgggcctgggaaaacataattattgtcgaaaccccgatggcgatgcaaagccctggtgccatgtgctgaagaatagaaggttgacttgggagtactgtgatgttcctagttgctccacttgtggtctccggcagtatagccaacctcagtttcgcatcaaaggcggactgttcgccgacatcgctagccatccttggcaagccgcgatctttgctaagcaccggcgatcaccgggggaaagattcctgtgcggagggatactcatctccagctgctggatcctgtctgccgcgcattgtttccaagagagattcccaccgcatcatctgaccgttattctgggccgaacctacagagtggtgcctggcgaggaagagcagaagttcgaggtggagaagtatatcgtgcataaagagttcgatgatgatacgtacgataatgatatcgctctgctgcagctgaagtcagattcttccaggtgcgcccaggaatcttccgtcgtccgtacggtgtgcctgcctcctgccgaccttcaactccctgattggactgagtgtgagctgagtggatacggaaagcacgaagctctgtcccccttctactccgagcggctgaaggaggctcacgtgagactgtatcctagctctcgctgcactagtcagcatctcctgaaccggacagtgacagataacatgttgtgtgctggtgacacacggagtggaggcccgcaggctaacctgcacgacgcgtgtcagggtgactcgggcgggccattggtgtgtctcaatgacggcagaatgaccctggttggtatcatttcctggggactaggatgtggccagaaagacgtcccgggggtctacacaaaagtgacaaactatttggactggataagggacaacatgaggcca

SEQ ID NO: 18282 - DNA, 1686 bp, synthetic construct
  misc_feature 1..1686: note = source = /note="Description of Artificial Sequence: Synthetic coding sequence"
  source 1..1686: mol_type = other DNA
atggatgcgatgaagagaggattgtgttgtgtacttttgttgtgcggagctgtatttgtctcgccgtcccaggaaattcacgctagattcagacgtggagcacggtcttatcaagtcatttgcagagatgagaagactcaaatgatttaccaacagcatcaaagttggctaagaccagtgctccgatccaatagagttgaatactgttggtgcaattctggacgagcacagtgtcatagtgttccagttaaatcctgctctgaaccaagatgttttaatggaggaacttgtcaacaggcgctttacttttcggactttgtatgtcaatgtccagaaggctttgctggcaaatgctgcgaaatagataccagagccacttgttatgaagatcagggaatctcttaccgcggcacatggtcaacagcggaatcgggtgcagaatgcactaattggaattcgtccgccttggcccaaaaaccttactcgggacgtcgaccagatgctataagacttggactaggaaatcacaattattgccgaaatccagatcgagattccaaaccatggtgttacgttttcaaagccggaaagtattcatctgagttctgttctacccctgcatgctcggagggaaattccgattgttacttcggaaacggatcggcttatagagggactcactcactcacagagtcgggagcatcatgccttccatggaattcaatgattttgatcggaaaagtatatacggcacagaaccccagcgctcaagccctgggcctgggaaaacataattattgtagaaatccagatggtgacgcaaaaccatggtgccacgtcctgaaaaatcgccgactcacatgggaatattgtgatgttccaagttgttcaacctgtggtttgcgtcaatactctcaaccgcagtttcggatcaagggcggattgtttgctgatattgcctctcatccttggcaagctgcaatctttgcaaaacaccgtcgctcaccaggagaacgatttctctgcggtggaattttgatctcgtcttgctggattctttcagcggctcattgctttcaggagcgattcccaccacatcatctaactgttattctgggacgtacttatagagtagtcccaggtgaagaagagcagaaattcgaagtcgagaaatacattgtccataaggaatttgacgatgatacttatgacaacgatattgctctattacagcttaaaagtgactcctcgcgatgtgcacaagagagctctgtcgtacgaaccgtttgtttacccccggcagaccttcaactgccagattggacagaatgcgaactttctggatatgggaaacatgaagcattgagtcccttctactccgaaagactgaaggaagcacacgtacgtctctacccttcttcgcgctgcacttcacagcatttgcttaaccgaacagtaactgataatatgctctgtgctggagacacgcgttcaggtggaccgcaagctaatcttcatgatgcttgccaaggcgattcaggtggtccgttggtttgtcttaatgatggacgaatgactctggtcggcatcattagttggggcctaggatgtggacaaaaggatgtgccaggagtctacactaaggttaccaactaccttgactggatacgtgataatatgcgtcca

SEQ ID NO: 18283 - DNA, 1686 bp, synthetic construct
  misc_feature 1..1686: note = source = /note="Description of Artificial Sequence: Synthetic coding sequence"
  source 1..1686: mol_type = other DNA
atggatgctatgaaaaggggactatgctgtgtgctacttctgtgcggagctgtgtttgtttctccttcacaggaaatacacgcccggttcagaagaggggcacggtcttatcaagtcatctgtcgggacgaaaaaacacagatgatttaccagcaacaccagtcctggctgcgacctgtactccgttctaaccgagtggaatattgttggtgtaattccgggcgggcgcaatgtcatagtgtcccagtaaaatcctgttccgaacctagatgttttaacggagggacttgccagcaggcactatacttctctgatttcgtgtgtcagtgtcctgaaggatttgccggaaaatgctgtgagattgatactcgggccacatgctacgaagatcagggaatctcctataggggaacttggtctacagcagaaagtggggcagaatgtactaattggaactcttctgccttggcccagaaaccatacagtgggcggaggccagatgctatccgcctcggactcggaaaccacaattattgtagaaatcccgaccgtgactcaaaaccctggtgctacgtgttcaaagccgggaaatattcttccgaattctgctccactcctgcatgcagtgaagggaactcagattgctattttgggaacgggtccgcctaccgcggaacacattccctgacagaatccggggcatcctgcctcccttggaattcaatgatcctaatcgggaaagtttacactgctcagaacccatccgcccaggcactggggctcgggaaacataactattgccggaaccctgatggggatgctaaaccctggtgccatgttctaaaaaacaggcggctgacttgggagtattgcgatgtgcctagttgttcaacttgtggacttcggcagtacagtcagccccaattcaggataaaaggggggctcttcgccgatattgcttcacacccctggcaggctgctatctttgctaagcaccggcggtctccaggggagcgctttctttgcgggggaatacttatctcttcttgttggatactatcagctgctcattgcttccaggaaagattccctccacaccaccttactgttatcctcgggaggacatatagagtcgtaccaggggaagaagagcagaaatttgaagttgaaaagtacattgtgcacaaggagttcgatgatgatacttatgataacgatattgccttactccagctcaaatccgattcttcacgttgtgctcaggaaagttcggtcgtgaggactgtctgcctgccaccggctgatctgcagttaccagattggactgaatgtgaattgagtgggtatgggaaacatgaagcactgtcccctttttatagtgaaagactcaaagaagctcacgtgaggctgtatccctcttcaaggtgcacttctcagcatcttctaaacaggacggtcacagataatatgctctgcgcaggggatacaaggtctgggggaccacaggcaaatctccacgatgcatgtcagggagattccggagggcctcttgtttgtctaaacgatggaagaatgactctggtggggattatctcatggggattaggatgcggacaaaaagatgtccccggagtatatactaaagtgacaaattatctcgattggatccgcgataatatgagaccc

SEQ ID NO: 18284 - DNA, 1686 bp, synthetic construct
  misc_feature 1..1686: note = source = /note="Description of Artificial Sequence: Synthetic coding sequence"
  source 1..1686: mol_type = other DNA
atggacgctatgaaacgagggctttgctgtgtcctgctgttgtgcggagctgtgtttgtcagcccatcacaggagatccatgcacgctttcgacggggtgctaggtcttaccaggtcatctgcagagatgaaaaaacacagatgatctatcaacagcaccagtcctggctacggcccgtgctgagatcgaaccgcgttgagtattgctggtgcaattcaggtcgagcccagtgtcactctgtgcctgtgaagagttgctctgaaccaaggtgcttcaatggtggcacctgccaacaagccctgtacttcagcgactttgtctgccagtgtccggaggggttcgcagggaaatgctgtgaaatagatacacgagccacctgctatgaggatcagggaatttcataccgcggcacttggtcaaccgccgagtctggagccgagtgtacaaactggaacagctcggcgcttgcgcagaagccttacagcgggaggagaccggacgccatccgcctggggttgggcaatcacaactattgccggaatccagaccgggacagcaagccctggtgctacgtgttcaaggcggggaagtactcatctgaattttgctccacccccgcctgctctgaaggcaactcggattgctacttcggcaacggatcagcttatagggggacccactccctcaccgagagcggcgcgagctgtctcccttggaatagcatgattcttatcggcaaagtttacacagcacaaaatccgagcgcacaggctttgggtctgggaaagcacaattactgtaggaaccccgacggagacgcgaagccctggtgtcatgtgctgaagaatagaaggctgacttgggaatactgtgacgtgccttcttgtagcacatgcgggttgaggcaatactcccagccccagttccgaattaaaggaggactgtttgcagacattgcatcacacccatggcaggctgcaatcttcgcaaagcaccggagatccccaggggagcgttttttgtgtggcgggatcctgatatcgtcctgctggatcctatctgccgctcattgcttccaagaaagattcccaccgcatcaccttacagtgatccttggacggacatacagggttgtgcccggagaggaggagcagaagttcgaagttgagaagtatattgtccataaggagtttgatgacgatacatatgataatgacatagcactacttcagctgaagtccgatagctcaaggtgtgcccaggagtctagcgtcgtaagaacagtgtgtctgccccctgcagacctccagctacccgactggactgagtgtgaactttccggctatgggaaacacgaggccctatcccctttctattcagagagactgaaggaagcccatgtgcggctttatcccagcagcaggtgtactagccaacacttgctgaatcgtacggtgacagataatatgttgtgtgctggggataccagatcaggtggtccccaggccaaccttcacgatgcctgccagggagattctggtggcccgcttgtgtgtctgaatgacgggcggatgaccctggtgggaataattagttgggggttagggtgtggacagaaggacgtgccaggagtctatacgaaagtgaccaactatttggactggatccgggacaacatgagaccc

SEQ ID NO: 18285 - DNA, 1686 bp, synthetic construct
  misc_feature 1..1686: note = source = /note="Description of Artificial Sequence: Synthetic coding sequence"
  source 1..1686: mol_type = other DNA
atggacgcgatgaaacgcggcctgtgctgcgtcctcctgctgtgcggtgccgtgtttgtgtccccttctcaggaaatccacgcacgcttccgccggggagccagatcataccaggtgatctgccgagacgaaaagacccaaatgatctaccagcagcatcagtcctggctccggccagtgctgagatcgaatcgggtggaatactgctggtgcaactccggtcgggcccagtgccactcggtgccggtgaagtcgtgctcggaaccgcggtgcttcaatggaggcacctgtcagcaagcactctacttcagcgacttcgtgtgtcagtgcccagaaggattcgcaggaaaatgctgcgagattgatacccgggccacttgctatgaggatcagggaatcagttaccggggaacctggtcaactgcggagtcgggcgcagagtgtactaactggaacagctcggcgctggcccagaagccatactccggcagacgacccgacgccatccggctgggcctcgggaatcacaactactgccggaatccagaccgggactccaagccttggtgctacgtgttcaaggccggaaaatactccagcgaattctgttccaccccggcctgttcagaaggcaactccgattgctacttcggaaacgggtccgcctatagaggcactcacagtctgaccgagtcaggagcctcgtgcctgccatggaacagcatgatcctgatcggtaaggtgtacactgctcagaatcctagcgcgcaagcactgggcctcggcaagcacaattactgccgaaatccagatggggacgcaaaaccgtggtgccatgtgctgaagaacaggcgccttacctgggagtactgcgacgtgccctcgtgctcgacctgcggcctgagacaatactcgcagccccagttccgcatcaagggcggacttttcgccgatatcgcgtcccatccgtggcaggcagccatcttcgccaagcatcgccgcagccctggagaacgctttctgtgcggaggaatcctcatctcgtcatgctggattctctccgcagctcactgcttccaggaaagatttccaccgcatcacctgacggttatcctcggccgcacttaccgggtggtgcctggagaggaagaacaaaagttcgaggtcgagaagtacatcgtccacaaggagtttgatgacgacacctacgacaacgacatcgctctgctgcagcttaagagcgattcgtcccggtgcgcccaggagtcctcggtggtgcgcaccgtgtgcttgccaccggcggatctccagctgccagattggactgagtgtgaactgtccgggtacggaaagcacgaggcgctgtcgccgttctactcggagcggctgaaggaggcccatgtgcggctgtatccgtcgtcacggtgtacctcgcagcatctcctgaacaggacggtcactgataacatgctttgcgccggagacactcgctcaggaggaccgcaggctaacctccacgatgcctgtcagggggactccggtggaccgctggtttgcctcaacgacggtcgcatgaccctcgtgggcatcatcagctgggggctgggttgcggacagaaggacgtgccgggagtgtacaccaaggtgactaactacttggactggattagagacaacatgcgcccg

SEQ ID NO: 18286 - DNA, 1686 bp, synthetic construct
  misc_feature 1..1686: note = source = /note="Description of Artificial Sequence: Synthetic coding sequence"
  source 1..1686: mol_type = other DNA
atggacgccatgaagagaggcctgtgctgcgtgctgctgctgtgtggagccgtgtttgtgtctccttcccaagaaatccatgcacgattcaggcggggcgccagaagctaccaagtgatttgtcgggatgagaagacccagatgatctatcaacagcatcagagttggctgcgaccggtgctgcgaagcaatcgcgttgagtattgctggtgtaactccgggagagctcaatgccactctgtcccagtgaaatcttgtagcgagccccgctgttttaacggaggtacttgccagcaagccctgtactttagtgactttgtgtgtcagtgcccggaaggttttgcaggaaaatgctgtgagatcgacacccgcgccacctgctacgaggatcaaggcattagttatcggggcacatggagcaccgcagagtctggtgcggagtgcacaaactggaactcaagcgcactggcacagaagccttacagcggtcgcagaccggacgcaattcgcctgggcctgggtaaccacaactactgccgcaacccagatcgggacagtaagccctggtgctatgtcttcaaggctggtaaatattcctcggagttttgcagtacccctgcttgcagcgaaggcaactcagactgctacttcggtaacggtagtgcataccggggtacccacagtcttactgagtcgggtgcgtcatgtttgccctggaacagcatgattcttatcggcaaggtctacactgctcagaatccctcggctcaggctttaggccttggaaagcacaattattgccggaatccagacggcgacgccaaaccttggtgccatgtgctgaagaatcggagactcacgtgggagtattgcgatgtgccatcttgctcaacctgcgggctgagacaatactcccagcctcagtttagaataaaaggaggtctgttcgccgacatcgcttcccacccgtggcaggctgccatcttcgcaaagcataggcgatctcctggcgagcgcttcctatgtgggggaatcctgatatcttcttgttggatcttgtccgcggcccactgttttcaggagcgcttccctccccatcacttaacagtaatcctcggcagaacttatcgcgtggtcccaggtgaagaggagcagaaatttgaagtcgagaagtatatcgtccataaagaattcgatgatgacacctatgacaacgacatagcactcctgcagttgaagtccgatagttctagatgcgcccaggaatcctcggtggtgcgcaccgtgtgtctaccacccgcggatctacagctgcctgactggactgagtgtgaactatcagggtacggaaagcacgaggccctgtctccattttacagcgagcggctcaaagaggcgcacgtccggttgtacccctcttctcgatgcacctcacagcacttgctgaatcggaccgtgactgacaacatgctctgtgcaggggatactagatccggggggccccaggcaaacctgcacgatgcttgccaaggagactccgggggcccactagtatgcctgaatgatgggcgaatgacacttgtaggaatcatttcctggggtctgggctgtggacaaaaagacgttcctggggtgtatacaaaggtcaccaactatctggactggatccgggataatatgcgtccc

SEQ ID NO: 18287 - DNA, 1686 bp, synthetic construct
  misc_feature 1..1686: note = source = /note="Description of Artificial Sequence: Synthetic coding sequence"
  source 1..1686: mol_type = other DNA
atggatgccatgaagaggggtctgtgctgcgtccttcttttgtgtggagcggtgttcgtcagtccgagtcaggaaatacatgccaggtttcgtcgcggagctcggtcttatcaggttatttgccgggacgagaagactcagatgatctatcagcaacaccagtcatggctgcggcctgttttgcgctccaacagagttgagtactgctggtgcaactcaggtcgagctcagtgtcattcagtgccagtgaagagctgctcagaaccaagatgttttaacggggggacctgtcagcaggccttgtatttcagcgactttgtgtgtcagtgcccagagggctttgcaggtaagtgctgtgaaatcgacactcgagccacttgctatgaggatcagggaatcagctaccgcggaacctggtcaaccgctgagagcggggctgaatgtacgaattggaattcgtcggccttggcccagaagccatactctggaaggagacctgatgctatccggcttgggctcgggaatcataactactgtaggaatcccgatcgtgatagtaagccatggtgctacgttttcaaagcaggcaagtactccagtgagttttgtagcacgcctgcatgttcagaggggaatagcgactgctatttcggtaacggtagcgcatatagaggcacgcactcgctcacagagtcgggagccagttgtctcccctggaatagcatgatccttatcgggaaggtatacaccgctcagaacccatccgctcaggcgctgggactggggaaacataactactgtagaaatcctgatggcgacgccaagccctggtgccatgtactgaaaaatagacggctcacctgggaatattgcgatgttcccagctgcagcacctgtggccttcgccagtacagtcagcctcaattccgcatcaaaggcggactgttcgcggacatcgccagccacccctggcaggcagcgattttcgctaagcacaggagatctcccggggaacggttcctatgcggcggtatcttaatcagcagctgctggattctgagcgctgcacattgtttccaggagagattccccccccaccacctcacagttatcctcggtcgcacctatagggtggtaccgggagaagaggaacagaagtttgaggttgagaaatacatagtccataaggagttcgacgacgacacatatgacaatgatatcgctctgttgcaactgaagtcagatagttcacgctgtgcacaggagtcatcagttgtaagaactgtgtgcctcccccccgctgacctgcagctgcctgattggaccgagtgtgagctgtctggctatgggaagcacgaggctctgtcaccgttttattcggagcggttaaaagaagcccacgtgaggctgtacccgtcgtctcggtgtacctctcagcacctgttgaatcgaacagtaacagataatatgctatgtgctggggatacccgcagcggtggcccacaggcaaacctacacgacgcctgccagggcgactccggggggcctttggtctgcctcaatgacgggcgcatgactctagtgggcattatctcttggggcttgggttgcggtcagaaggacgtaccgggggtgtatacaaaagtgacaaactatctggactggattcgggataatatgcgtcct

SEQ ID NO: 18288 - DNA, 1686 bp, synthetic construct
  misc_feature 1..1686: note = source = /note="Description of Artificial Sequence: Synthetic coding sequence"
  source 1..1686: mol_type = other DNA
atggatgccatgaaacgcgggttgtgttgcgtgctgctgctgtgcggagccgtgtttgtttcaccgtcccaagaaatacacgcccggttccggcgaggagctcgcagctaccaggtgatttgcagggacgagaaaactcagatgatctaccagcaacatcagtcctggctgcggcccgtgctgcggtcgaaccgcgtcgaatactgttggtgtaactccggaagagcccaatgtcattccgtgcctgtgaagtcctgctccgagccccgttgctttaacggtgggacttgccaacaggcactgtacttctcagactttgtgtgtcagtgcccagagggattcgctggtaaatgttgtgagattgatactagagctacgtgttacgaagatcagggcatctcgtaccgcggaacctggtccacggcggaatccggtgccgaatgcaccaactggaattcatcagcccttgcccaaaagccatactcaggccggcgccccgacgccatacgcctgggactcggaaaccataactactgccggaatccagatcgcgattcaaagccatggtgctacgtgttcaaagcaggcaagtatagctccgaattctgctcgacccctgcttgctccgagggaaacagcgattgctactttgggaatggatcagcttaccgcggcacgcactccctcactgaatccggcgcctcgtgcctgccgtggaacagcatgatccttatcggcaaggtctacaccgctcagaacccctccgctcaggccctgggacttggcaagcataactattgccgcaatccggatggagacgcgaagccctggtgtcatgtcctcaaaaaccgtaggctcacgtgggagtattgcgatgtcccgtcatgttcaacctgtggattgcgacagtactcacagccgcagtttagaatcaagggcggactgttcgcggacatcgcatcgcacccgtggcaagcggccatcttcgcgaagcatcggcgcagcccaggagaacgcttcctctgtggcggcatcctgatctcgtcctgctggatcttgtccgccgcgcattgcttccaggagcggttcccaccccatcatcttactgtgatccttggacggacttaccgcgtcgtgcctggcgaagaagagcagaagttcgaggtggagaagtacatcgtgcacaaggaatttgatgacgacacttatgacaatgatatcgccctcctgcaactgaagtcggactcctcaagatgtgcacaagagtccagcgtcgtcaggaccgtgtgtctcccacccgcagacctgcaactgccagattggaccgaatgcgagctgtcggggtacgggaagcacgaagcgctgtcaccgttttactccgagagattgaaagaagctcatgtgcgcctgtacccttcgtcgagatgtacgtcccaacacctgctcaatagaactgtgaccgacaatatgctgtgcgcaggcgacacccgctcaggaggaccgcaggcaaacctgcacgatgcatgccaaggtgattcgggaggtccgctcgtgtgcctgaacgatggccgcatgaccctcgtgggaattatctcgtgggggttgggatgtggacagaaagacgtgccgggtgtgtacactaaagttactaactacctggattggatccgggataacatgcgcccg

SEQ ID NO: 18289 - DNA, 1686 bp, synthetic construct
  misc_feature 1..1686: note = source = /note="Description of Artificial Sequence: Synthetic coding sequence"
  source 1..1686: mol_type = other DNA
atggatgccatgaagaggggcctgtgctgcgtcctgctcctatgcggagcggtgttcgtgagcccttcccaagagatacacgcaaggtttcggcgaggagcaagaagctaccaagtgatctgcagagatgagaaaacacagatgatctatcagcagcatcagagttggctgaggcctgttcttaggagtaatcgcgtagaatattgttggtgcaatagtggacgtgcacaatgccattctgtccccgtcaaatcgtgctctgaaccgcgctgttttaacggcggcacctgccagcaggcactgtatttttccgacttcgtctgccagtgccccgaagggtttgcgggcaaatgctgcgagatcgacactcgggcaacttgttacgaggatcaaggaattagctaccgaggcacctggagtaccgccgaatcaggggcagaatgtactaattggaatagttcggcactggcccagaagccatactctggtcgccgcccagacgctatccgcctgggccttggtaaccataactactgtcgtaaccccgaccgagactcgaagccatggtgctatgtgtttaaggccgggaaatattcttctgaattttgctccaccccagcctgttccgagggtaattcagattgctacttcgggaacggatcagcctatcgcggaacacactctctcacagagtcaggcgcaagttgtctgccttggaacagtatgattcttattgggaaagtttacactgctcagaacccgagtgcccaggcattagggctggggaagcacaattattgtcgaaaccccgacggcgacgcgaagccgtggtgtcacgtgttgaaaaatcgtcgtttgacctgggagtattgcgatgtcccctcctgctctacgtgtggacttaggcagtactcccaaccccagtttaggatcaaaggggggttgttcgctgatatagccagtcacccctggcaggccgcaatattcgccaagcatcggcgaagccctggtgagcggttcctatgtgggggcattctgatttctagctgttggatattgtccgccgctcattgcttccaggaacggttcccgccacaccacttaaccgtgatcctgggaagaacgtacagggtagttcctggggaagaagagcaaaaatttgaagtggaaaagtacattgtgcacaaagagtttgatgatgacacatacgacaacgacattgccctcctgcagctaaagagcgattcttcaagatgtgctcaggagagctctgtggtgagaacagtgtgcctgccaccggcagacctccaactccccgattggacagaatgcgaacttagcgggtatggaaagcacgaggccttgtcacctttttactctgaacgactgaaggaggcccacgtgaggctctatcccagctcgaggtgtactagccagcacctgctgaaccgcacagtcaccgataacatgctctgcgcaggggatacgaggagcggtggtccccaagctaacctgcacgatgcctgccagggcgattccgggggccccctagtatgcctcaatgatggccggatgaccctggtcggcataatttcctggggcctgggctgcggccagaaagacgttccgggcgtctacacaaaagtgactaactacctcgattggataagggataatatgcgacca

SEQ ID NO: 18290 - DNA, 1686 bp, synthetic construct
  misc_feature 1..1686: note = source = /note="Description of Artificial Sequence: Synthetic coding sequence"
  source 1..1686: mol_type = other DNA
atggatgctatgaaaagaggtctctgttgtgtcctcctcctttgcggggcggtattcgtgagcccctcccaggagatccatgcccgctttagacggggcgctcggagttatcaagtcatttgccgggacgagaagacgcagatgatttatcagcagcaccagtcttggctcaggccggtacttcgctctaatcgagtggagtattgctggtgtaattctgggcgcgctcagtgccacagtgtgcccgtgaaatcctgcagcgaacccaggtgttttaacggaggaacctgtcagcaggccttgtatttctccgacttcgtttgtcagtgccctgagggcttcgctggaaagtgttgtgaaatagatacccgggcgacatgttacgaagaccagggaattagttaccgaggcacctggtctaccgcagaatcaggggccgagtgtaccaactggaatagcagcgctcttgcacagaaaccatattccggaaggaggcctgacgctattcggctgggccttggtaatcacaattactgtcggaacccagatcgagattccaagccatggtgctatgtgtttaaagccgggaagtacagcagcgaattctgctctacacccgcttgttccgaaggcaactctgattgttacttcggtaacggtagtgcctacagaggaactcactctcttacggaaagtggggctagctgtttgccttggaatagcatgatactgatcggtaaggtgtacacggcccagaacccctctgcacaagccttgggcctgggcaagcataactattgcaggaatcctgatggtgacgcaaaaccttggtgccacgttcttaaaaaccgacgcctcacctgggagtactgtgatgttccgagctgtagcacatgtgggctgcggcaatattcccagccacaattcagaatcaagggcgggctgtttgccgatatcgcgagtcacccttggcaggccgccatctttgcgaaacacagacgatctcccggggagagattcttgtgtggcggaatcctcatctctagctgttggatactcagcgcggcccattgctttcaggagcgatttcctccacaccatcttacagtcatcctcggccgaacgtaccgagtggtcccaggggaggaagagcagaaatttgaggtagaaaaatacatcgtgcataaggaatttgatgacgacacctacgacaacgatatagcactgctgcaactgaagtccgactcatcccgctgcgcacaagaaagctccgtcgtgcgcacagtttgtcttcctccagccgatctgcaactgcctgactggacagaatgcgagctgagtgggtacggtaagcacgaggccctgtccccgttttacagcgagcgccttaaggaggctcacgtgagactgtatcccagcagcagatgtacaagccaacatttgcttaaccgcacagtgaccgacaatatgctttgtgctggcgacactaggtccgggggaccacaggccaatcttcatgacgcttgccagggtgattccggaggtccactcgtctgtcttaacgatggaaggatgaccctggtaggaattattagctggggcctcggctgcggtcagaaggacgtgccaggcgtgtacaccaaggtaacaaactatctggattggatcagagacaatatgcggcca

SEQ ID NO: 18291 - DNA, 1686 bp, synthetic construct
  misc_feature 1..1686: note = source = /note="Description of Artificial Sequence: Synthetic coding sequence"
  source 1..1686: mol_type = other DNA
atggacgcaatgaaaagaggattatgttgtgtattgctgctgtgcggggcagtgtttgtgtccccttctcaggagatacatgctaggttccgcagaggcgcaagatcataccaggttatctgtagggacgaaaaaacccagatgatttaccaacagcaccagagttggctgagacccgttctccggtcaaacagagtggaatattgctggtgcaactcagggcgtgcacagtgccattccgtgccggtgaaatcttgctctgagcccagatgttttaacggaggcacctgccaacaggcactgtacttttccgatttcgtgtgccagtgtcctgagggattcgctggaaagtgttgcgaaattgatacacgcgcaacctgctacgaagatcagggcatcagctacaggggcacatggagtactgcggagagcggtgctgaatgcacaaattggaactcaagcgctctcgcacaaaaaccgtactcaggaaggagacctgatgccatccgactgggactgggaaaccataattattgccggaatcccgatagagactctaaaccgtggtgttatgtgttcaaagctggtaagtatagctctgagttctgctccacccctgcctgctctgagggcaattcagattgctacttcggcaatggatcagcttatcgaggcactcacagtctgacagagtcaggagcatcgtgtctgccatggaacagcatgatcctcatcggtaaggtctacaccgcacagaacccctccgcgcaggccctgggattagggaagcacaactactgtcgcaaccctgatggcgacgcgaagccctggtgtcatgttctgaagaatagaaggctgacctgggaatactgcgatgtgccttcttgctccacctgcggcctgcggcagtatagccagccccaatttcgaattaaggggggtctgtttgccgatatcgctagccatccttggcaggccgcaatattcgctaaacaccgacgcagtccaggcgaacggttcttgtgcgggggaatcctcatttcctcctgctggatcctgagtgctgcacactgcttccaggaaagattccctccacatcatttaactgttattctcggcagaacataccgtgtggttcccggcgaagaggagcagaagttcgaagtggagaaatatatcgtgcacaaagagtttgatgacgacacctatgataacgatattgctttattgcaactgaagtcagactccagcagatgcgcacaagagagctctgtcgtgcggaccgtgtgcctccctcccgccgatctgcaactgcccgattggacagagtgcgagctcagcgggtacggcaagcacgaagcactatctcctttttactctgagcgcctgaaggaagctcacgttcgcctctaccctagctctaggtgtacgagtcagcacctcctgaaccggacagtaacagataacatgttatgtgcaggcgacacaaggagtggcgggccacaggcaaatctgcacgatgcctgccaaggagactcgggaggacctctggtttgcctgaacgacggtagaatgactctggtgggaatcataagctggggattaggctgcggccaaaaggatgtgcctggagtctacactaaagtcaccaattaccttgactggatcagggacaacatgagacct

SEQ ID NO: 18292 - DNA, 1686 bp, synthetic construct
  misc_feature 1..1686: note = source = /note="Description of Artificial Sequence: Synthetic coding sequence"
  source 1..1686: mol_type = other DNA
atggatgccatgaagcgtgggctttgctgcgtgctcctgctgtgcggtgcagtgtttgttagcccatcgcaagaaatccatgcaaggttccgcagaggcgcacgctcgtaccaagtcatttgcagggatgaaaagactcagatgatttaccagcaacatcaatcgtggctgcgccctgtccttagatcgaacagggtggaatactgctggtgcaactccggccgcgcacaatgccatagcgtgcctgtcaaatcatgttccgaaccccggtgttttaacggaggaacctgtcaacaggcactgtacttttccgattttgtgtgtcagtgccctgaagggtttgcagggaaatgttgcgaaatcgacactcgcgcgacttgttacgaagatcagggtatctcctacaggggaacctggtccactgcagaaagcggtgcagagtgtaccaattggaattcctctgcactggcccagaaaccctattcgggtcgcaggccggatgccattcgcctcggacttggaaaccacaactactgtcgtaacccagatcgggatagcaagccttggtgttacgtgtttaaagcaggaaaatactcttcggaattttgctccacccccgcatgtagcgagggtaacagcgattgttactttggaaacgggagcgcataccggggaacccacagtctgactgaatcgggggcatcttgtctcccctggaattccatgatcctgatcggaaaggtgtataccgcccagaacccttcagcacaagcactgggtctgggaaagcacaactactgcaggaatccagacggtgatgccaagccctggtgccacgtgcttaagaaccgcagattgacctgggaatactgcgacgtaccctcatgcagcacctgcggcctccggcagtactcccagccacaattcagaattaagggaggcctgttcgcagacatcgcctcgcatccttggcaggctgcaatattcgccaagcatcgccgaagccccggggagcgttttctttgtggaggaattctgattagctcatgctggatcttgtcggctgcacattgctttcaagagcggtttccgccacaccatctgaccgtgatcctggggcgcacctaccgagtggtcccaggtgaggaagaacagaagttcgaagtggagaagtacattgttcataaagaattcgatgatgatacctacgataatgatattgcactgctccaactgaagagcgacagctccagatgcgcgcaagaaagctcggtcgtgcgcaccgtctgtctccccccggccgatctgcagctccctgattggacggagtgcgaactttcaggttacgggaaacacgaagcacttagccccttctactcggaaagactcaaagaagcacatgtgcgactttacccttcatcccggtgtacctcgcaacatcttctgaatcgtaccgtgacggacaatatgctttgtgctggggatacccggtcaggcggtccacaagcgaaccttcatgatgcctgccagggtgattcaggagggccactggtgtgcctgaatgatggcagaatgactctcgtgggtatcatttcctggggtcttggttgtggtcaaaaggatgtgcccggcgtctacactaaagtgaccaattaccttgattggatccgggataacatgcgtccg

SEQ ID NO: 18293 - DNA, 1686 bp, synthetic construct
  misc_feature 1..1686: note = source = /note="Description of Artificial Sequence: Synthetic coding sequence"
  source 1..1686: mol_type = other DNA
atggacgccatgaagcgcggtttgtgttgcgtcctgctgctctgcggagccgtatttgtctcacctagccaagaaatccatgctcgcttcagacggggtgcgcgctcttaccaggtgatctgccgcgacgaaaagacccaaatgatataccagcagcaccagagctggctccgcccggtgcttcgcagcaatcgggtcgagtactgctggtgtaactccggacgggcccaatgccacagcgtgccggtgaagtcctgctcggaaccacggtgtttcaacggaggaacctgccagcaggcactttacttctcagactttgtgtgccagtgtcctgagggattcgctggaaagtgctgcgagattgacacccgcgcaacttgttacgaagatcaggggatctcctacagaggtacctggtcgacggccgagtcaggagcagagtgtaccaactggaatagcagcgcgttggcccagaagccgtattccggtcgtcgaccggacgccatcagactcggtctgggcaatcacaactactgccggaacccggatcgcgactcgaaaccttggtgctacgtctttaaggcaggaaagtactcgtcggaattctgctcgacgccggcttgttcagaaggaaattccgactgctacttcggaaatgggtccgcgtacaggggaacccactccctgaccgaaagcggagcatcgtgccttccatggaactcgatgatccttatcgggaaagtgtacactgctcagaacccttccgcgcaagccctcgggctcggcaaacataactactgccgaaacccggatggcgatgcgaagccgtggtgccatgtgctcaagaaccggagattgacttgggaatattgcgatgtccccagctgctcaacttgcggcctgcgccaatacagccaacctcagttccgtatcaaggggggcctgtttgcagacattgcgtcccacccctggcaggccgcaattttcgccaagcatagacgtagcccgggggagaggttcttgtgcggaggcatcctgatctcatcgtgctggatcttgtcagcggcacactgcttccaggaacggttcccaccccatcacctgacggtgatcctgggccgcacgtaccgggtggtgccaggcgaagaagaacagaagtttgaggtcgagaaatacatcgtccataaggaattcgacgacgacacttacgataacgatattgctcttttgcagctgaaatcagactcgtcgcggtgtgcccaggaatcatcggtggtgagaaccgtgtgcctgccgcccgcggatctgcagcttcctgactggaccgagtgcgaactgagtggctatggaaagcacgaggctctgtcgccgttctacagcgaacgcctgaaagaggcgcacgtccgtctgtacccgtcatcccggtgtacttcgcagcacctgctgaaccgcactgtgactgataacatgctctgtgccggagacacgcggtccgggggaccacaagcgaatcttcatgatgcctgccaaggagattcaggaggcccactcgtgtgtctgaatgacggtaggatgaccctcgtaggtatcatctcgtggggactcggttgtggccaaaaggacgtgccgggagtctacaccaaagttactaactacttggattggattagggacaatatgcgtccg

SEQ ID NO: 18294 - DNA, 1686 bp, synthetic construct
  misc_feature 1..1686: note = source = /note="Description of Artificial Sequence: Synthetic coding sequence"
  source 1..1686: mol_type = other DNA
atggatgccatgaagcgaggactttgttgcgtgctgctgctttgcggcgcagtgtttgtgtcaccatctcaggagattcacgcaagattcagaagaggcgcgcgctcataccaggtgatttgtagggatgaaaaaacccagatgatttaccagcagcaccaatcgtggcttaggcctgtgcttcgatctaaccgtgtggaatactgttggtgcaactcgggaagagcacaatgtcattcggtgcctgtgaagtcctgttcagaacccaggtgtttcaatggtggaacctgtcaacaggccttgtacttttcagattttgtctgccagtgccctgagggattcgccgggaagtgttgtgaaatagacacgcgcgcaacttgttacgaggaccaaggaatttcgtacaggggaacctggtcgactgctgaatcgggagccgaatgtaccaattggaactcgtcggctctggcccaaaagccatactcgggtcgacgtcctgacgcaattaggctcgggcttggtaaccacaactactgtcgcaatcccgatcgcgattctaagccttggtgttacgttttcaaagcagggaaatactcctcagaattttgttcgaccccggcttgttcggaaggtaactcggactgttactttggcaacgggagcgcgtaccggggcacccatagcttgaccgaatcaggtgcctcctgcctgccctggaattcgatgatacttatcggcaaagtgtataccgcgcaaaatcccagcgcccaggcccttggacttggcaaacataactactgcagaaaccctgacggcgacgcaaagccgtggtgtcacgtgctgaaaaatcggcggctgacctgggaatactgcgacgtcccgagctgctccacttgtggtctgaggcagtacagccagccccagtttagaatcaaaggaggtctttttgcagatattgcttcacatccatggcaagcagccatcttcgccaaacataggagatcgccgggagaacgctttctttgtggaggaattttgataagttcgtgctggattctttccgctgcgcattgttttcaagaaagatttcctcctcatcaccttactgtgattttgggtagaacctacagagtggtcccgggagaagaggagcaaaagtttgaggttgaaaagtacatcgtgcacaaagagtttgatgacgatacttacgataatgacatcgcactcctgcaactgaaatcggactcatcaagatgtgcacaagaatcgtcggtggtgcggaccgtgtgcctgccaccagcagaccttcaactccctgactggaccgagtgtgagctcagcggttatggaaagcatgaagccctcagcccattttactccgagcgattgaaagaggcccacgttcggctgtatccatcctcgagatgcactagccaacatcttctgaatcgtactgttactgataacatgctgtgtgcaggtgatacccgttccggaggaccacaggcaaacctgcatgacgcgtgccaaggggattcgggtggaccactggtgtgtctcaatgacggtcggatgactctggtggggatcatctcgtggggtcttggctgcggacaaaaagatgtgcccggagtgtacactaaggtgaccaattacctcgattggattcgagacaatatgaggcca

SEQ ID NO: 18295 - DNA, 1686 bp, synthetic construct
  misc_feature 1..1686: note = source = /note="Description of Artificial Sequence: Synthetic coding sequence"
  source 1..1686: mol_type = other DNA
atggatgcaatgaagagaggactttgctgcgtcttgctgctgtgtggggctgtgtttgtgtccccgtcccaggagatccacgcgcggttccggcggggagccagatcgtaccaggtgatctgtagagatgaaaagactcagatgatttaccagcaacaccagtcttggctgcgcccggtgctccgctccaatagggtggaatattgctggtgcaactcaggtcgagcccagtgtcactcagtgcccgtcaaatcatgcagcgagccgcggtgctttaatggcggaacttgtcagcaggccctgtacttctctgacttcgtctgccagtgtccagagggattcgcgggaaagtgctgcgaaatcgatacgagagctacttgttacgaagatcaaggaatcagctatcggggaacttggtccaccgccgaatccggggctgagtgcacgaactggaactcatccgcactcgcccaaaagccgtacagcggacggcggcctgacgcgatccggcttgggcttggcaaccacaactactgcaggaatccagaccgcgacagtaagccttggtgttacgtgttcaaggccggtaaatactcatcggaattttgctcgactcccgcttgctccgaggggaactcagactgctacttcggaaacggaagcgcgtaccgcggcacccatagcctgaccgagtcgggggccagctgtctgccgtggaatagcatgattctcatcggcaaagtctacaccgcccagaacccgtcagcgcaggcgcttggcttgggtaagcacaattactgtagaaacccggacggagacgcaaagccgtggtgccatgttctgaagaatcgccgcctgacctgggaatactgcgatgtgccctcctgctccacttgtggccttcgccagtactcgcagcctcagttccgcatcaagggcggactcttcgctgacatcgccagccacccttggcaagcagccatatttgcaaagcatcgacgctccccgggagaacggttcctctgcggaggcatcctgatttcgagctgctggattctgtcggccgcgcattgcttccaagaacgcttcccgccgcaccatttgaccgtgatcctggggagaacttatcgcgtcgtgcccggcgaggaagaacaaaaatttgaggtggagaaatacatcgtccacaaggagttcgacgacgatacctacgacaacgacatcgccctgctgcaactgaaatcagattcgtcgcgctgcgctcaagaaagctcggttgtgaggaccgtctgtctcccaccggccgacctccaactcccagattggaccgaatgcgagctctccggatacggtaagcacgaagcactcagtcctttctactccgagagactcaaggaagcccacgtgcgtctctacccatcgtcgaggtgcacttcacagcatctgctgaaccgcaccgtgactgacaacatgctgtgcgcaggagacactcggtccggtggcccgcaggcaaatctgcatgatgcgtgccagggagactcgggtggacctctggtatgcttgaacgatgggagaatgaccctggtgggcatcatcagctggggactgggatgcggacaaaaagatgtgccaggagtgtacacgaaggtcaccaactacctggactggatcagggataatatgcggcca

SEQ ID NO: 18296 - DNA, 1686 bp, synthetic construct
  misc_feature 1..1686: note = source = /note="Description of Artificial Sequence: Synthetic coding sequence"
  source 1..1686: mol_type = other DNA
atggatgcaatgaagaggggactctgttgtgtccttctcttgtgtggagcagtgtttgtgtcaccaagccaggagatccatgcaaggtttaggcgaggcgctcgctcgtaccaagtgatttgccgcgacgaaaaaacgcaaatgatttaccagcagcaccagtcgtggttgcgtcctgtcttgcgctcgaatcgggtggagtactgttggtgtaactcgggtcgcgcacagtgtcacagtgtccctgtcaagagctgttccgaacctcggtgtttcaacggtggtacttgtcaacaggccttgtactttagcgacttcgtgtgtcaatgtccagaaggatttgcgggtaaatgctgtgagatcgatacccgggctacctgttacgaggatcaaggaatatcctacagggggacttggtcaactgccgagtcgggagccgaatgtactaattggaatagctcggcactggcgcaaaagccctacagcggaaggcggccagacgcgattcggctgggcttgggtaaccataactactgtcgtaacccagatcgagactcaaaaccttggtgctatgtgtttaaggcgggtaagtactcgagcgaattttgctcgactccagcctgtagcgaagggaactcggactgttacttcggtaatggttccgcttatagaggcacgcatagcttgactgaatcgggcgcaagctgtctgccgtggaactcgatgattctcattggcaaggtctacaccgcacaaaacccttctgctcaagcacttggcctcgggaagcacaattactgcaggaacccagacggagatgcaaaaccgtggtgtcacgtgctcaaaaatcgcaggctcacctgggaatactgcgatgtgcctagttgcagcacctgcggccttagacaatactctcagccccaattccgcataaaaggtgggctctttgcagacatagcatcccacccatggcaagctgcgatctttgcaaagcataggcgttccccaggtgaaagattcctttgcggaggaatccttatttcctcgtgctggatcctttcagcagcacattgcttccaggagcgatttcccccacaccaccttaccgtcatacttggaaggacgtatagagtcgtgccgggagaagaggaacaaaagttcgaagtcgagaagtacatcgtgcataaagaatttgatgatgacacttacgataacgatattgcactgctgcagttgaagtcggattcctcgcgatgtgcgcaggaatcatcagtggtgagaactgtttgtctgcctcctgcggatctgcaacttcccgactggaccgaatgcgagctgtccggctacggaaagcatgaagctctttctccgttttactccgagcgccttaaagaagcacacgtgcgactctacccatcctcaagatgtactagccaacatcttcttaataggactgtgactgataacatgctctgtgcaggtgacactcggtcaggaggaccacaagccaatctgcatgatgcctgccagggagacagcggagggcctctcgtctgtctgaacgatggtcggatgaccttggtgggcataatcagttggggactgggttgtggccaaaaggatgttccaggcgtgtacactaaagtgaccaactaccttgattggattcgggataacatgcgcccc

SEQ ID NO: 18297 - DNA, 1686 bp, synthetic construct
  misc_feature 1..1686: note = source = /note="Description of Artificial Sequence: Synthetic coding sequence"
  source 1..1686: mol_type = other DNA
atggacgcaatgaaacgcggtctatgttgcgtcctattgctgtgtggggctgtattcgtttcccctagccaggagatccatgctcgttttaggaggggcgctaggtcctatcaagtgatttgccgtgacgagaaaacccagatgatttatcagcaacaccagtcgtggctgagaccagttctgcggtctaatagggtggagtattgttggtgcaactcaggacgtgcccagtgtcactcagttccagtcaagagctgtagcgaaccacgctgcttcaacggcggcacctgccagcaggcgctgtatttcagtgacttcgtgtgccagtgcccagaaggattcgccggtaaatgctgcgagatagacacccgggcaacctgctacgaagaccagggtattagctatcgcggtacatggtcgaccgccgaatcaggcgccgaatgtacgaattggaactcctccgcgctggcacagaagccatatagcggccgacgcccggatgcgattcgcctgggtctcggcaaccacaactactgccgcaatccggaccgcgatagcaaaccatggtgttacgtctttaaggcgggtaagtatagttccgaattctgctccactccagcttgttcggaaggcaactccgattgctacttcggtaatggaagcgcgtaccgcggcacgcacagcctgaccgagagcggcgcgtcgtgtctaccgtggaatagcatgatattgatcggtaaagtgtacaccgcgcagaatcctagcgcacaggcgctcggcctgggaaagcacaattactgcagaaatcctgacggtgatgcgaagccatggtgccatgtgctgaaaaaccgccgcctcacatgggagtactgcgatgttccgtcatgctccacctgtggccttcgccagtacagccaacctcagttccggattaagggcggtctgtttgccgatattgcatctcatccctggcaggccgcgatctttgcaaagcatcgccgcagtccgggcgagcggtttctgtgtggcggcatcctgattagctcgtgctggatcttgtctgcagcccactgcttccaggaacgcttcccgccacaccacctgaccgtgatactgggccgcacgtaccgcgtggtgcccggtgaagaagaacagaaatttgaggtggaaaaatacatcgtgcacaaggagttcgacgacgacacctatgacaacgatatcgcactcctgcaattgaagtctgacagcagcagatgtgcccaagaatccagtgtggttagaacggtgtgtctgccaccagcggacctgcagctgcccgactggaccgagtgcgagttaagcggttatggcaagcacgaagccctaagccctttctacagcgaacgcctaaaagaggcccacgtgcggctgtacccttcttcgcgctgcactagccagcatctgctcaatcgcactgttactgacaacatgctgtgcgcaggtgacacgcgtagcggtggcccacaagccaatctgcacgatgcgtgtcagggtgattccggtggcccgttggtttgtctgaatgacggccgtatgactctggtggggattatctcctggggcctgggttgcggccagaaagatgtgcccggtgtatataccaaggtgacgaattaccttgattggatccgggacaatatgcgtcca

SEQ ID NO: 18298 - DNA, 1686 bp, synthetic construct
  misc_feature 1..1686: note = source = /note="Description of Artificial Sequence: Synthetic coding sequence"
  source 1..1686: mol_type = other DNA
atggacgctatgaagaggggactctgctgcgtgcttctgctgtgcggcgctgtcttcgtgagcccctcacaggagattcacgctcggttcagacggggggctagatcataccaagtgatatgcagagacgagaagacacagatgatctaccagcaacaccagagctggctgagacctgtgctcaggtccaacagggtggaatactgctggtgtaattccggcagggcccagtgtcactcagtgccagtcaaatcctgctccgagccgagatgcttcaacggcggaacatgccagcaagccttgtacttttcagactttgtgtgtcagtgtccggaagggtttgcaggcaagtgttgtgaaatcgacactagggctacctgctacgaagaccaggggatttcctaccgcggcacatggtccactgctgaatcaggagctgaatgcaccaattggaacagctcagccttggcccagaagccctattctggcaggcggcctgacgccatccgactgggtttgggaaaccacaactattgccgcaacccagatcgagatagcaagccttggtgttacgtgtttaaagctgggaaatattcatccgaattctgttccacacccgcctgttctgaaggaaacagcgattgctactttgggaatggttctgcttaccgcgggacccatagtctcacggagagcggggcctcatgcctcccgtggaatagtatgattctgatcggcaaagtatacactgcacagaatccatccgctcaggcccttggattgggcaagcacaattattgcaggaaccctgacggcgatgctaagccatggtgtcatgtcttgaagaaccgcagattgacctgggaatactgcgatgtgccttcttgctcaacctgcggtctgcggcagtactcccagccgcagttccggatcaaagggggtctgtttgccgacatcgcctcccacccttggcaggccgccatatttgccaaacacaggcggtctccaggcgaaagattcctctgcggcgggattctcatcagcagctgttggattctgtccgccgcccattgtttccaggaaagattccccccacatcacttgactgtaattctgggcaggacatacagagtggtgccaggagaagaagaacagaaattcgaggttgaaaagtacatagtgcacaaggaatttgatgacgacacgtatgacaacgatattgccttgctgcagctgaaaagcgactcctcacggtgcgctcaggaatcctctgtggtgcgaaccgtgtgtctccctcctgctgacctccagctccccgattggaccgaatgtgaactgagtggatatggcaagcacgaggcactctcccctttctatagcgaacgactcaaggaagcgcatgtgaggctttatcccagcagtcgatgtaccagccagcacctgcttaatcgaacagtgacagacaacatgctgtgtgctggcgatacccgaagcggagggcctcaagctaacctgcatgatgcatgccagggagacagcggcggcccgttggtctgtttgaatgatggaaggatgaccctcgtagggattattagctggggtctgggatgcgggcaaaaagatgtccccggggtctacactaaagtgactaactatcttgattggatcagagataatatgagacct

SEQ ID NO: 18299 - DNA, 1686 bp, synthetic construct
  misc_feature 1..1686: note = source = /note="Description of Artificial Sequence: Synthetic coding sequence"
  source 1..1686: mol_type = other DNA
atggacgcaatgaaaaggggtttgtgttgcgtcttgttactctgtggagcagtctttgtttcgccatctcaggaaatccatgcccgattcaggcgaggtgcccggtcctatcaagttatctgccgcgacgaaaaaacacagatgatttaccagcaacaccaaagctggcttcgtccagtacttcgaagcaatcgagtagagtattgctggtgtaatagtgggagagctcagtgtcatagcgttcccgtgaagagctgtagcgaacctagatgtttcaatggtggcacgtgtcaacaagcactttactttagcgacttcgtctgccaatgtcctgaggggtttgccggaaagtgctgtgagatcgacacccgtgccacctgctatgaggaccaaggaatttcctatagaggtacgtggtccaccgcagaatcaggcgcagagtgcaccaactggaatagctccgcattggctcaaaagccttattctggaagaaggcctgatgctattaggctgggactcggtaatcataactactgtcgtaatcctgatagagactccaaaccctggtgctatgtgtttaaagcgggcaagtatagtagcgaattctgcagcactcctgcttgcagcgaggggaattccgattgctactttggaaacggaagcgcatatcgaggaacgcattccctcacagaatctggtgcttcatgtctcccatggaattcgatgatattgattggcaaggtgtataccgctcaaaatccatctgcacaagcattgggactgggtaagcacaactactgcagaaaccccgatggcgatgcaaagccttggtgccatgttcttaagaatagaagactcacttgggagtactgcgatgtgccgagttgttctacatgtggtttgagacagtactctcagcctcaattcaggattaagggtgggttgttcgcagatatcgctagtcacccatggcaagcggccatattcgctaagcatcgtaggagtccaggtgaacgattcttgtgtggtggtatcctaatctcctcatgctggattctcagtgctgctcactgctttcaagaaagatttcctccccatcatctgactgtgattcttgggaggacctatagagttgtacctggagaagaggaacaaaagtttgaagttgagaaatacatcgttcataaggagtttgatgatgatacctatgacaacgacattgcacttcttcagctaaagtctgattcatccagatgcgctcaagagagtagcgtggttaggactgtttgtctaccaccagcagacctacagctgcctgattggactgaatgcgaactatctggatacggaaagcatgaagctctgtctccattttattctgaacggctgaaggaagctcatgttaggctctatccttcgtcccgttgcacttcgcaacatctattaaatcgtactgttaccgataacatgttatgtgcgggagacactcgttcgggggggccccaagcaaaccttcatgatgcttgccaaggtgatagtggtggccctttggtatgtttaaatgacggtcgtatgacccttgttggaataatttcatggggattagggtgcggacaaaaagatgtgccaggtgtttatacaaaggtcacaaactatctagattggatccgtgacaatatgcgaccg

SEQ ID NO: 18300 - DNA, 1686 bp, synthetic construct
  misc_feature 1..1686: note = source = /note="Description of Artificial Sequence: Synthetic coding sequence"
  source 1..1686: mol_type = other DNA
atggacgcaatgaaacgcggactgtgctgcgtcttgcttctgtgcggagcagtgtttgtgtccccgtcgcaggaaattcacgcaagattccgacgaggagctaggtcataccaggtcatatgtcgggacgaaaagactcagatgatttaccagcagcatcaatcatggctccggcccgtgttgaggtcgaatagggtggaatactgctggtgcaactcggggagagcacaatgtcactcggtgccggtcaagagctgctcggagcctcggtgttttaacgggggtacttgtcagcaagcattgtacttttcggattttgtgtgtcaatgccccgaagggtttgccggcaagtgctgtgagattgacactagggcaacttgctacgaagatcagggaatttcgtacagaggaacttggtcgaccgcagaatctggagcagaatgtactaattggaattcgtcagccctcgcgcagaagccctactccggccgccgtccagacgccatacggctggggctgggaaatcataactactgtagaaacccagatagagattccaagccttggtgctatgtgttcaaagcagggaagtacagctcggaattctgctctacgccagcctgttcagaaggtaactccgactgttactttggtaatggttcggcataccgaggaacgcattcactgactgagagcggagcatcatgccttccgtggaactcaatgatcctgatcggtaaagtctacactgcacaaaacccctccgcacaggcgctcggactgggtaagcacaactactgccggaaccctgatggcgatgcgaagccgtggtgtcatgtccttaagaacagacgtcttacttgggaatactgcgacgtgccctcgtgtagcacctgcggtctgcgtcaatactcgcagccacagttccggatcaagggtggactttttgccgacatcgcgtcgcatccatggcaggcagctatattcgctaagcacagaagatcacctggggagaggtttctttgcggaggtatactgattagctcatgttggattctgtcggccgcccactgttttcaagaaaggtttcctcctcatcacctgaccgtgattcttgggcgcacttaccgggtcgttcctggtgaggaagaacaaaagttcgaagtggagaagtatattgtgcataaagaatttgatgatgatacctacgataatgatattgcacttctgcaactgaagtctgattcatccaggtgcgcccaggagagttccgtggtgcgcacggtttgtttgccacccgcagacctgcaactccccgattggacggaatgtgagctgtccggatacggaaaacatgaggcactgagtcctttctactcagaaagacttaaggaagcacatgtgcggctctacccttccagcaggtgcactagccaacatctcctgaatcgtaccgtgaccgacaatatgctgtgcgcaggggatactcgttcagggggcccacaagcaaatctgcatgatgcgtgccaaggggatagcggaggcccgcttgtgtgtctcaacgacggtcgtatgacccttgtgggtataatctcgtgggggctgggttgcggacagaaggacgtgccaggagtctataccaaggtcaccaattatcttgactggattagggataacatgaggccg

SEQ ID NO: 18301 - DNA, 1686 bp, synthetic construct
  misc_feature 1..1686: note = source = /note="Description of Artificial Sequence: Synthetic coding sequence"
  source 1..1686: mol_type = other DNA
atggacgcaatgaaaagagggctttgctgcgtgttgctcctgtgcggagcagttttcgtgtcaccctcccaagaaatccatgccagatttaggaggggggctcggtcataccaggtgatttgcagggacgaaaagactcaaatgatttatcagcagcaccaatcttggctccgcccggtgttgcgctcaaacagagtagagtactgttggtgcaattccggacgggctcaatgccactccgtgccagtgaagagctgctcggagccacgatgtttcaacggcggaacctgccaacaagccctgtatttctcggatttcgtgtgccagtgcccagaagggttcgctggcaaatgttgcgagattgacacccgcgcgacctgctatgaggaccagggaatctcgtaccgggggacttggtcgaccgccgaatccggagcggagtgcaccaactggaatagctccgccctggcgcagaagccttactccggccgcagaccggatgccatccgacttggattgggaaatcacaattactgcaggaacccggaccgggactcgaagccgtggtgctacgtgttcaaggcgggaaagtattcgtcagagttctgctcaacgcccgcgtgctcagagggcaattcggactgctactttgggaatggatcggcataccggggtactcactccctgactgaatcgggcgcctcgtgtctgccgtggaactctatgatcctgatcggaaaagtgtatactgctcaaaatccttcagcccaagccttgggactcggaaaacataactactgtcgcaacccggacggagacgccaagccttggtgtcatgtgctgaaaaaccgcagactgacttgggaatactgtgatgtgccgtcttgctctacctgcggcctgcggcaatactcgcagccgcaatttcggatcaagggaggactgttcgcagacatcgcgagccatccctggcaggcggcgatcttcgctaaacacaggcggtcgccaggcgaacggttcctgtgtggcggcatcctgatctcctcgtgctggatcttgtcggctgcgcactgcttccaggagcgcttcccgccgcatcatctgaccgtcatcctgggacgaacttatagagtcgtcccgggtgaggaagaacagaaattcgaagtggagaagtacatcgtacacaaggagtttgatgacgatacctacgataatgatattgcgctcctgcagctgaagagcgacagctcgcgctgcgcacaggaaagctccgtggtcagaaccgtctgcctgccgccagccgacctgcagctgccggactggaccgaatgcgaactgtccggatacgggaaacacgaagcgctgtcgcccttttactccgaacggctgaaggaagcacacgtccggctgtaccctagcagccgatgcacctcacagcatctgctgaaccgtaccgtgacggataacatgctgtgcgctggagacacccgctcagggggaccacaggcaaatctgcacgatgcctgtcagggtgattccggaggaccgctcgtgtgcctcaatgacggacgcatgactctggttggtataatcagctggggcctcggatgcgggcagaaggatgtccctggggtctacaccaaagtgaccaattacctggattggattcgcgacaacatgcgcccg

SEQ ID NO: 18302 - DNA, 1686 bp, synthetic construct
  misc_feature 1..1686: note = source = /note="Description of Artificial Sequence: Synthetic coding sequence"
  source 1..1686: mol_type = other DNA
atggacgccatgaagagaggcctctgctgtgtgctccttctgtgcggagcggtgttcgtgtccccgagccaagaaatccacgctcggtttcgcagaggcgctcggtcctaccaggtcatctgtcgggatgaaaaaacccagatgatctaccaacaacaccagtcatggctccggcctgtcctgaggagcaaccgcgtggagtactgctggtgcaattccggaagggctcaatgccatagcgtcccggtgaaatcatgctcggaaccccgctgcttcaacggaggcacctgccagcaagccctgtacttctcggacttcgtctgccagtgcccagaaggattcgcaggaaaatgctgcgagatcgacacccgcgcgacctgttacgaggaccagggcatctcgtacaggggcacttggtctactgcggaaagcggagcagaatgcactaactggaactcaagcgccttggcccagaagccgtactcgggacgccggcccgacgcgatccgcctcggcctcggaaaccataactactgtcgtaaccccgaccgggacagtaagccttggtgttacgtgtttaaagccggcaagtactcgtcggagttctgcagcaccccagcgtgctcagaaggaaactcggactgttacttcggcaacggaagcgcgtaccggggaactcattccctgaccgagtccggcgcctcgtgcctgccgtggaactccatgatcttgatcggcaaggtctacaccgctcagaacccgtcggcccaagcgctggggctgggaaaacacaattactgtcgcaatccagatggagatgctaaaccgtggtgtcatgtgctgaaaaatcgacgcttgacctgggagtactgtgacgtcccgagctgtagcacctgtggactgcgccagtattcccaaccacagtttcgcatcaaggggggcctcttcgccgacattgcgtcacatccgtggcaggcggccatcttcgcgaaacaccgccgctcaccgggagagaggttcctgtgtgggggtattctcatctcatcctgctggatattgtccgcggcacattgcttccaggaaagattcccgccgcatcacctgactgttattctcggaagaacttaccgggtggtcccgggtgaggaagaacagaagttcgaggtggaaaagtacattgtgcataaggagttcgacgacgacacttacgacaatgatatcgccctccttcagttgaagtcggactcgtctcggtgcgcacaagaatcatcagtcgtccggaccgtttgcctgcctccagccgacctccagctgcctgactggactgaatgtgagctgtcgggttacggtaagcacgaggcactcagcccattttacagcgaacgcctgaaagaagctcacgtccggctgtacccgtcgagccgctgcacttcgcagcacctgttgaaccggactgtgactgacaatatgctctgcgctggggacactcgctcgggcggcccccaggccaacttgcacgatgcatgccagggggactccggaggaccgctggtatgtctgaatgacggccggatgactctcgtgggcatcatctcatggggcttgggctgtggccaaaaggatgtgccgggagtctacactaaagtgaccaactacctggactggatccgcgacaacatgcgccca

SEQ ID NO: 18303 - DNA, 1686 bp, synthetic construct
  misc_feature 1..1686: note = source = /note="Description of Artificial Sequence: Synthetic coding sequence"
  source 1..1686: mol_type = other DNA
atggatgccatgaaacgtggactctgctgcgtgctcctcctgtgcggggctgtgttcgtgtctccctctcaggagatacacgctcgcttccgtcgaggcgctcgctcatatcaagtcatttgccgtgacgagaagactcagatgatctaccagcagcaccagagctggctccgcccagtcctccgctctaacagggtcgagtattgctggtgcaatagcggccgagcccagtgccattcggtccctgtcaagtcctgctctgagcctcgctgcttcaatgggggtacctgccaacaggcactctacttttctgacttcgtctgccagtgccccgaaggctttgccggtaagtgttgtgaaatcgatactagggcaacatgctacgaggaccaggggatttcatatcgcggcacctggtccaccgccgaatctggtgccgaatgcaccaactggaactcatctgcccttgcccaaaaaccttactctgggcggcggcctgacgccattcgcttgggactcggtaaccacaactactgccgtaatcccgaccgagactccaaaccgtggtgctacgtcttcaaggccggtaagtactctagtgagttctgctccacacccgcatgcagcgagggaaactcggactgctattttggtaacggcagcgcgtaccgtggcacccactcccttaccgaaagcggcgcttcctgcttgccttggaacagcatgatcctcatcggcaaggtctataccgcccaaaacccgagtgcccaagctttgggcctcggtaagcacaactactgtcgcaaccccgatggagacgctaagccctggtgccacgtactaaagaatcgtcgtcttacctgggagtactgcgacgtcccctcctgttccacctgcggcttgcgtcagtattcgcaaccccagttccggattaaagggggactgttcgccgacatcgcttctcacccttggcaggctgccatctttgctaagcaccgtaggtccccgggcgaacgtttcttatgtggtggcatcctcatctcgagttgttggattctcagcgctgcccattgctttcaggagaggttcccgcctcaccacctcaccgtcatcctggggcgtacctacagggttgttccaggtgaggaggagcagaagttcgaggttgagaagtatatcgtgcacaaggaattcgatgacgacacatacgacaacgacatcgctttgctccagctcaagtccgactcgtcacgatgcgcccaagagtcctctgttgtacgcacagtctgtttgcctcctgctgatctccagctcccagattggactgagtgtgagctttccggctacggtaagcatgaagccttgtccccattctatagcgagcgccttaaagaggcgcacgtgcgcctctaccccagctcgcgctgcaccagtcagcatctgcttaaccggactgtcaccgacaacatgctctgtgctggtgatacccggtctggaggcccccaggccaacttgcatgacgcctgccagggcgactccggcggccccctggtttgcctcaacgacggacgtatgacactagttggcattatctcttggggactcggttgtggtcagaaggacgtccccggcgtgtacacgaaagtcaccaattatctggattggatacgggataacatgcgtccc

SEQ ID NO: 18304 - DNA, 1686 bp, synthetic construct
  misc_feature 1..1686: note = source = /note="Description of Artificial Sequence: Synthetic coding sequence"
  source 1..1686: mol_type = other DNA
atggacgcaatgaagagaggactttgctgtgtgcttctactctgtggtgccgtgtttgtgagcccgagccaggagatccatgctcgcttccggcgaggagctagatcctaccaggtgatttgccgcgacgaaaagactcagatgatatatcaacaacatcagagttggctgagacctgtgttgcgaagcaatcgagtggaatattgttggtgtaacagtggcagggcccagtgtcacagcgtgcccgtgaaaagctgcagtgaacctcgttgttttaacggcggcacgtgccagcaggctctgtacttttccgattttgtgtgtcagtgtcctgaaggctttgctgggaaatgttgcgagatagacactagggccacctgctacgaagaccaggggatatcctaccgcggaacgtggagcacggccgaaagcggtgccgagtgtacaaattggaacagtagtgcacttgcccaaaaaccttatagtgggcggcgcccagacgccatccgcctagggttgggcaaccacaactattgccggaatccagacagggactccaaaccatggtgctacgtctttaaggcagggaaatacagtagcgaattttgcagcactcccgcttgctccgagggcaattctgactgctactttgggaacggttcagcctaccggggcactcactcgctgaccgagtctggagcttcctgtcttccatggaatagcatgattcttataggcaaagtctacaccgcccagaacccttcagcccaagcgctcgggctaggaaagcacaactattgccggaatccggatggtgacgcgaaaccgtggtgtcacgttttgaagaaccgacgactcacatgggaatactgcgatgtgcctagctgcagtacttgcggactacggcagtacagtcagccccagtttagaattaaaggcggactcttcgcggacatcgccagtcacccctggcaggcggccatcttcgcgaaacatcggagatccccgggcgagaggttcctctgcggtggcatcctgatcagctcctgttggattctgtcggccgcccactgttttcaggagagatttccacctcatcacctgacagtgattctcggcaggacctaccgggtagtgccaggggaggaagaacagaagttcgaagtggagaaatacatcgttcacaaggaattcgacgatgacacctacgacaacgacatcgccctgctacagcttaagtctgattcaagccgctgcgcccaggaatcctcagtcgtgcggacagtttgtcttcccccagccgatctacagctacctgattggacggaatgtgagctgtctggctatggaaagcacgaggcactgagcccattttacagcgagagactcaaagaggcacacgttcggctgtatcctagctctcggtgtacatctcagcatctgttgaaccggaccgtaacggacaatatgctctgcgccggtgatacaagatctgggggccctcaggccaatcttcatgacgcctgtcagggagattctggaggtccattagtatgcctgaacgacggcagaatgacgttggtggggattatatcatggggcctcgggtgcggccagaaggatgtccctggggtgtatacaaaggtcacaaattatctcgattggatccgagacaacatgagacct

SEQ ID NO: 18305 - DNA, 1686 bp, synthetic construct
  misc_feature 1..1686: note = source = /note="Description of Artificial Sequence: Synthetic coding sequence"
  source 1..1686: mol_type = other DNA
atggatgcaatgaaacgcgggttgtgctgcgtactactgctgtgtggagccgtgttcgtatcgccgagccaggagatccacgcgagatttcgccggggggccagatcctaccaggtgatctgtcgggacgaaaagacccaaatgatttaccagcagcaccagtcatggctgaggcctgtgcttaggagcaaccgggtggaatattgctggtgcaatagcggaagggcccagtgtcatagtgtgcctgtcaaatcctgctctgaaccacgttgcttcaacggagggacgtgccagcaggccttgtatttttcagactttgtgtgtcagtgtcccgaaggctttgccggaaagtgttgcgagatcgacacccgagccacctgttatgaggaccagggaatctcctatcggggtacatggagcaccgccgagagcggcgccgagtgtaccaactggaattccagcgctcttgctcagaaaccttacagcgggaggaggccagacgccatccgcctgggattgggcaaccataactactgtcggaacccagatcgggactcaaaaccctggtgctacgtcttcaaagccggcaaatacagctcagaattttgttcaactcccgcgtgcagtgaaggcaactcggactgctactttggcaatggaagcgcctacaggggaacccacagcttaaccgagagcggagcctcctgcctgccctggaacagcatgatcctgatcggtaaagtctatactgctcagaacccgtccgctcaggcgctgggtctaggaaaacataactactgtcgcaatcctgatggcgatgccaagccttggtgtcacgtcctcaagaaccgacgtctgacctgggaatactgcgatgtgccatcctgcagtacttgtggtctgcgccaatattcacagccacagttccgtatcaaggggggattattcgctgatatagcaagtcacccctggcaggctgctatatttgctaagcaccggcgcagccccggcgagcggttcctatgtgggggcatcctcataagttcctgctggatattaagcgcggcgcattgcttccaagagcgatttccccctcatcacctcacagtgatattgggaagaacataccgggtggtgcccggcgaagaggaacagaaattcgaggtggagaaatatatcgtgcacaaggagttcgacgacgatacctatgacaatgacatcgccttgttgcagctgaagagtgactcaagtaggtgtgcgcaggagtccagcgtggtcagaacagtatgcctgcctcccgcagacttgcagcttccagattggactgagtgtgaactgtctgggtatgggaaacatgaggctcttagccccttctactccgagcggctcaaagaagcacatgttcgactgtatccgtctagccgctgcacctcccagcatctgctcaaccgcacggttactgataatatgctgtgtgccggcgatacccgaagcggggggccacaggctaaccttcatgacgcctgccagggagactccggtggcccgctggtgtgcctgaacgatggccgcatgacgctagtgggcattatcagctggggactcggctgcggccagaaggacgttcctggtgtatacaccaaggtcacaaattatctggattggatcagggacaacatgagacca

SEQ ID NO: 18306 - DNA, 1686 bp, synthetic construct
  misc_feature 1..1686: note = source = /note="Description of Artificial Sequence: Synthetic coding sequence"
  source 1..1686: mol_type = other DNA
atggacgctatgaaacgcgggctgtgctgcgtcctgctcctttgcggcgctgtctttgtgagcccgtcacaggagatccacgcgagattccgccggggagcacgctcataccaggtgatctgtcgggacgaaaaaactcaaatgatctaccagcagcatcaatcgtggctcaggccggtgctgcggtccaaccgcgtcgagtactgctggtgcaactcaggacgggcacagtgtcactccgtcccggtgaagtcatgctccgagccgcgctgctttaatggaggaacctgccaacaggccctctacttttcggatttcgtgtgccaatgccctgaaggattcgccggaaaatgctgcgaaatcgatacccgagcaacctgctacgaggaccagggcatttcctatcggggaacttggtcaaccgcagaatccggagctgaatgtactaattggaattcgtcagccctcgcccaaaagccgtactccggccgccgccctgacgctatccgcctgggcctggggaaccacaactattgtcgcaaccccgatagggattcgaaaccatggtgctacgtgttcaaagccggaaaatacagctcagaattctgcagcaccccagcatgctcggaaggcaactccgactgctacttcggaaacggatcggcctaccggggaactcactcgttgacggagtcgggtgccagctgcctcccctggaacagtatgatcctgatcggaaaggtgtacaccgctcagaacccgtccgcccaagcactggggctgggaaagcacaattactgccgcaatccagacggcgatgccaagccttggtgccacgtgctgaagaaccgcagactgacttgggaatattgtgacgtccctagctgctcgacctgcggactccgacagtactcgcaaccgcagttccggatcaaagggggcctgttcgccgacatcgcgagtcacccgtggcaagctgccatttttgcaaaacaccgccggagcccaggcgagaggttcctttgcggtggtattctgatttcgagctgctggatcctttctgcggcgcattgtttccaggagagattcccgccacaccatttgactgtgatcctgggtcggacctacagagtcgtgccgggcgaagaagagcaaaagtttgaagtggagaagtacatcgtgcacaaggaattcgatgacgatacttacgataatgatatcgccctgcttcagctcaaaagcgactcgtcaagatgcgcccaggaatcttccgtcgtcagaaccgtgtgcctgccgcccgctgaccttcagctgccggattggactgagtgcgaactgtccggctacggtaagcacgaagccctgtcgccattctactccgaacggctcaaggaagcgcatgtccgcctgtacccctcgagccggtgcacttcccagcatctcttgaacagaactgtgacggacaacatgctgtgcgccggagatactcggtcgggaggcccacaagcaaacctgcatgatgcctgccagggagattcaggtggcccattggtgtgtttgaacgacggccgcatgaccttggtggggatcatctcgtgggggctgggttgcggccaaaaagatgtgccaggcgtgtacactaaagtcacgaattacctcgactggatcagggacaatatgcgcccg

SEQ ID NO: 18307 - DNA, 1686 bp, synthetic construct
  misc_feature 1..1686: note = source = /note="Description of Artificial Sequence: Synthetic coding sequence"
  source 1..1686: mol_type = other DNA
atggacgcaatgaaacggggtctgtgttgcgttctgctgctttgtggcgcagtctttgtctccccctcgcaagagatacatgcacgttttcgcaggggtgcccgctcataccaagtcatttgtagagatgaaaaaacccagatgatataccagcaacaccaatcgtggttgaggcctgtgcttaggagcaacagggtggagtactgttggtgcaattcgggccgtgcgcagtgccatagcgtcccagtgaaatcctgctccgaacctcggtgctttaacggcgggacctgccaacaagcactctatttctcagattttgtgtgtcagtgccccgaagggttcgcaggaaaatgttgtgaaatcgacactcgagcaacttgttatgaagatcaagggattagctataggggcacctggtccaccgcggaatccggagcagaatgcaccaattggaactcctccgcccttgctcaaaagccctactcggggcgccggcctgatgctattcggcttggcctcggtaaccataactactgtaggaatcccgatcgcgattcgaaaccttggtgttatgtgtttaaagcaggaaagtactcgtcggaattctgttcaacccccgcatgtagcgagggcaacagcgattgctatttcgggaacggtagcgcgtacaggggaacccatagcctcaccgagtcgggtgcgagctgtctgccatggaactcaatgattcttatcggaaaggtgtacactgcacagaatccctcggcccaggcgctcggtttgggaaaacacaattactgtcgtaacccggatggcgatgcaaagccctggtgtcatgtgctgaaaaacagacggcttacttgggagtactgcgacgtcccttcgtgttcgacgtgtggtctgagacaatactcacagccacaatttcgcatcaagggcggtttgtttgcagacattgcgtcacacccatggcaggcagcaattttcgcaaaacataggagaagccctggagagcgttttctctgtggcggtattctgatctcctcatgttggattctgagcgcagcgcattgctttcaagaaagatttccaccacatcacctgaccgtgatcctgggtaggacttaccgggtggtgccaggagaggaggaacagaagttcgaagttgagaagtacattgtgcataaggagttcgatgacgatacttacgataacgacatagcacttctccagcttaagtcggattccagtcggtgtgcacaagagtcatcagtggtgcgaactgtgtgtctccctcccgcagacctgcaactgcccgactggactgagtgcgagctctccggctacggaaaacacgaagccctttctcctttttacagcgaacggctgaaggaggcacatgtccggctttacccctcctcacggtgcactagccagcaccttttgaatcggactgtcaccgataacatgctctgtgccggagatacgagatcaggaggaccacaagcaaaccttcatgatgcatgtcagggagattcaggtggtccgcttgtctgcctgaatgatggtagaatgacgcttgtgggaattatctcctggggacttggttgtggtcaaaaagacgtgcccggcgtgtacactaaagtgaccaattacttggattggattcgtgataacatgcgccca

SEQ ID NO: 18308 - DNA, 1686 bp, synthetic construct
  misc_feature 1..1686: note = source = /note="Description of Artificial Sequence: Synthetic coding sequence"
  source 1..1686: mol_type = other DNA
atggacgcaatgaagagagggctctgttgcgtcttgcttctgtgtggtgcagtgttcgtcagcccctcgcaggaaatccacgcaaggttccgcaggggcgccagaagctaccaggttatttgtcgggatgaaaagacccagatgatatatcagcagcatcaatcctggcttagacctgtcttgagatcaaaccgggtggaatactgttggtgtaattccggacgagcccagtgccacagcgtgcccgttaaatcttgctctgaaccacgttgctttaacggtgggacgtgtcagcaggcactgtatttcagcgattttgtttgccaatgtccggaaggttttgctggtaagtgctgcgagatagacaccagggcaacttgctacgaggatcagggtatttcttatcggggaacttggtccaccgctgaatctggggccgagtgcactaattggaactcctccgccctagctcagaagccgtatagcggtcgaagacctgatgccataaggctgggtctgggtaatcataattactgtcgtaaccccgacagggatagtaagccctggtgttacgtattcaaggccgggaagtacagcagcgagttctgctccaccccagcctgtagcgagggcaattctgactgctacttcggcaatggcagcgcctatcggggcacccactccctgaccgagtctggcgctagctgtcttccgtggaattccatgatcctgatcgggaaggtgtatactgcacaaaacccctcagcacaggccttgggcctagggaaacacaattattgccggaatccagacggagatgcaaaaccatggtgccacgtcttgaaaaaccgccggttgacttgggagtactgcgacgttccctcctgtagtacctgcggactgaggcagtattcacagccccagtttagaatcaaaggcggactgttcgctgacattgcctcccacccctggcaggccgctattttcgcaaaacatcgtagatctccaggtgagcgattcctgtgtggaggaatacttatctcttcatgctggattctatctgcagcccattgcttccaggaaagattccccccacaccatctgaccgtgatccttgggaggacctatagagtggtccccggggaggaggagcaaaagttcgaggtggagaagtatatagtccacaaagagtttgatgatgatacatacgacaacgacatcgccttgctccaactcaaaagtgatagcagccgttgtgcccaggagagtagcgtggtgaggactgtttgccttcctcccgcagatctgcagcttcctgattggactgaatgtgagttaagcggctacggcaagcatgaggccctgtcaccattttacagcgaaagactgaaggaggctcacgtacggctttaccccagctctcgctgcacctcacaacatctattaaacagaacggtcaccgataatatgctgtgcgcaggtgacaccagatccggagggccacaggccaacctgcacgacgcctgtcagggagattctggcggtccgctggtatgtctaaacgatggacggatgactctggtggggattattagttggggcctcgggtgcggacagaaggatgttccaggtgtttacacaaaggttacaaattacttggattggataagagataacatgaggcct

SEQ ID NO: 18309 - DNA, 1686 bp, synthetic construct
  misc_feature 1..1686: note = source = /note="Description of Artificial Sequence: Synthetic coding sequence"
  source 1..1686: mol_type = other DNA
atggacgccatgaaaagaggactctgctgtgtgttgctcctgtgcggcgcggtgttcgtctcgccgtcacaggagatccacgcccggttcagacggggagcccgcagctaccaggtgatttgcagagacgaaaagactcagatgatctaccagcaacaccagtcctggctgaggcccgtcctgcgatcgaatcgcgttgagtactgttggtgcaactcaggcagagcccagtgccattccgtgccggtcaaatcatgctcggagcctcggtgcttcaacggtggaacttgtcaacaagccctgtacttctcggatttcgtgtgtcagtgccccgagggattcgcagggaaatgctgcgaaatcgacaccagagcgacttgttacgaggaccaaggaatctcctaccggggaacctggtcgactgcggaaagcggtgcagagtgcaccaactggaactcgtcagcgctcgcccaaaagccctactccgggcggcggccagacgcaatccggctggggctggggaatcataactactgtagaaatcctgaccgggacagcaaaccttggtgctacgtgttcaaggccggaaagtactcatcggagttttgctcgaccccggcctgtagcgaaggaaactcggattgctacttcggtaacggaagcgcctaccgcggcactcactcgctgactgaaagcggtgcttcctgcctcccatggaactcaatgatcctgataggtaaagtgtacactgcccagaacccgtccgcgcaggccctgggactcggcaagcacaactactgcagaaatccagatggtgacgcgaagccttggtgccatgtcctgaagaatcggcgcctgacctgggagtactgcgacgtgccgtcgtgctcaacctgtggacttcgacagtacagccagccgcagttccggatcaagggcgggctgttcgccgacatcgcctcccacccttggcaggccgctatctttgccaaacatcggcgctcgcctggggagcgcttcctgtgcgggggaatcctcatcagctcgtgctggatcctctccgcggcgcactgtttccaagaaaggttccctccacatcacctgactgtgatcctcggacggacttaccgcgtggtccctggagaagaagagcagaagttcgaagtggagaagtacattgtccacaaggagttcgacgacgatacgtacgataacgatatcgccctgttgcagctgaagtccgacagctcaaggtgtgctcaggagtcatccgtggtgaggaccgtctgcctcccgccggcggatctgcagctgcctgactggactgaatgtgaactgagcggatacggcaaacacgaggccctcagcccgttttactcagagcgcctgaaggaagcacacgtcagactctacccgtcatcgcgctgcaccagccagcacctcctgaaccgcaccgttaccgacaacatgctgtgcgcaggagacactcgctccggaggcccgcaggccaacctgcacgacgcatgccaaggggattcgggcggacccctggtctgcctgaacgatgggagaatgactctcgtgggaatcatctcctggggacttggctgcggacaaaaggatgtcccaggagtctacaccaaggtgaccaattacctcgattggatccgcgacaacatgcgcccg

SEQ ID NO: 18310 - DNA, 1686 bp, synthetic construct
  misc_feature 1..1686: note = source = /note="Description of Artificial Sequence: Synthetic coding sequence"
  source 1..1686: mol_type = other DNA
atggacgccatgaagagagggctttgctgtgtgctccttctgtgtggtgctgtttttgtaagtcctagccaggagatacatgctcgatttcgtcggggcgcacgaagttaccaggtgatctgtagagatgagaaaactcaaatgatctatcagcagcatcagagctggcttcgcccggtgctccgctccaacagagtggaatactgttggtgtaactccggaagggctcagtgccactctgtgccggtcaagtcctgcagtgaaccccgctgtttcaacggaggcacctgccaacaagccctgtacttttctgattttgtgtgtcagtgccccgagggcttcgcagggaagtgctgcgagatagacacccgggctacctgctatgaggatcagggcattagctatcgcggaacatggtcgacagctgagagtggagccgaatgcacaaactggaattcctctgccttggcccagaaaccttacagcggcagacggccagacgccatcaggctggggctcggaaatcacaattactgcaggaaccctgaccgggacagcaagccttggtgctatgtttttaaggctggtaagtacagctcagagttttgctctacccctgcctgttccgaaggcaattcagattgctactttggaaatggcagcgcctatagaggtacccatagcttgacggaatctggcgcgtcgtgccttccttggaatagtatgatcctcatcggaaaagtgtataccgctcagaaccctagcgcccaagccttgggactgggaaagcacaactattgtaggaatcctgacggtgacgcgaagccatggtgtcatgtccttaaaaaccggaggctaacatgggagtactgtgacgttccaagctgttctacgtgtggattaagacagtactcccagccacaatttcgcatcaagggagggctgttcgccgacattgcttcccacccttggcaggccgctatctttgccaaacacaggaggtcacctggggagagatttctatgcggcggtatactgattagctcctgttggatcctgagcgccgcccactgttttcaggagagattcccgcctcaccatctgacggtgatccttggaagaacctatcgcgtggttcctggggaagaggagcaaaagttcgaggtggaaaaatatattgtccacaaggagttcgacgatgatacttatgataacgacatcgcgctgcttcagttgaagtccgatagcagcagatgtgcccaggagtcttccgtggtgcggacagtctgcctgccaccagccgacctgcagctgcctgattggactgaatgcgagctctctgggtatggcaagcacgaggctctttctcctttttattctgaacggttgaaggaagcccacgttcgtctgtaccccagttcgcggtgcactagtcagcacctcctgaataggacagttactgataatatgctgtgcgcgggagacacacgctccgggggaccacaagcgaatctgcatgacgcttgccaaggggactccggtggtcctctagtatgcttgaacgacggcaggatgaccctcgtgggaataatatcgtggggcttaggctgcggccagaaggatgttcccggagtgtacactaaagtcaccaattatttagactggatcagggataacatgcgccct

SEQ ID NO: 18311 - DNA, 1686 bp, synthetic construct
  misc_feature 1..1686: note = source = /note="Description of Artificial Sequence: Synthetic coding sequence"
  source 1..1686: mol_type = other DNA
atggatgccatgaagcggggtctgtgctgtgtccttctcctttgtggagctgtgttcgtctcgcctagccaagagattcatgcaaggttcaggagaggtgcacgctcctaccaagtgatctgtcgggatgaaaagacccagatgatataccagcaacaccagagctggctccggcctgtgctgagatccaacagggtggagtactgttggtgtaattccggtcgtgcacaatgtcatagcgtcccagtcaagtcatgtagcgagccacggtgttttaacggaggaacttgtcagcaggcactgtacttcagcgacttcgtctgccaatgtccagaaggttttgctggtaagtgttgcgagatcgatacccgtgcgacttgttacgaggaccaaggaatctcgtacagaggaacttggtccactgcagaatccggagcggaatgtaccaactggaattcaagcgcccttgcacaaaagccttacagcgggcgtcgacctgatgcaattcgcctgggtctgggcaaccacaactactgtcgcaaccctgacagagattcgaagccgtggtgctacgtgtttaaagcaggtaaatacagcagcgagttttgttcgactcctgcatgttccgagggaaattccgactgctactttggaaatgggtccgcataccgtggtacccactcccttactgagtcgggagcaagctgcctgccttggaattcgatgatcctgatcggtaaggtgtacaccgcgcaaaacccttcggcacaagcccttggactcggaaagcataactactgcagaaaccctgatggtgacgcgaagccatggtgtcacgtcctcaaaaaccggagactgacttgggagtactgtgacgtgccctcgtgtagcacctgcggtctgaggcaatactcgcagccacaatttcgcattaaagggggactttttgcagatatagcatcccatccttggcaagccgctattttcgcgaaacatcgacggtcccccggagaacgatttctttgtgggggtatacttatctcgagctgttggattctgtccgcagcacactgctttcaggaacgatttcctcctcatcatctcaccgtgattcttgggcgcacctacagagtggtgccaggagaagaagaacagaagttcgaagtcgagaagtacattgtgcacaaggaattcgacgatgatacctatgacaacgacatcgcactcctgcagcttaaaagcgactcatcccgatgcgcacaggagagctccgtggtgcgtaccgtctgtctgccccctgcagatctccaacttccagattggaccgaatgcgaactgtccggatacggaaagcatgaggcactttccccattctactcggaacgcctgaaagaggcgcacgtgagactctacccatcgagccgatgtacctcgcaacacctgcttaacaggacggtcacggacaatatgctttgcgcgggcgataccaggtcaggtggtcctcaggcaaatctccacgatgcatgccaaggcgacagcggcggcccgctggtgtgtctcaatgatggtagaatgactcttgtgggcattatctcctggggactgggttgtggacagaaggatgtcccaggtgtctacactaaagtgaccaattaccttgattggataagagacaatatgcgcccg

SEQ ID NO: 18312 - DNA, 1686 bp, synthetic construct
  misc_feature 1..1686: note = source = /note="Description of Artificial Sequence: Synthetic coding sequence"
  source 1..1686: mol_type = other DNA
atggatgccatgaagagggggctctgttgtgtcctgttgctttgtggtgcagtcttcgtctccccatcacaggagatccacgcacgcttcaggcggggagcgcggtcctatcaggttatctgcagagatgagaagacccagatgatctaccagcagcatcaatcctggttgcgccctgttctgcgaagtaatcgcgtggagtactgttggtgcaactctgggagagcgcagtgtcactccgtcccagtgaagtcctgctctgagccacgatgctttaatggtggcacctgccagcaggccttgtatttttcagatttcgtctgccagtgccccgaaggcttcgccggcaagtgctgtgagatcgacacacgcgcgacttgttatgaagaccagggcatatcatacaggggtacatggtccacagccgagtcgggagcggagtgcaccaactggaactcttcagccttggctcaaaaaccctactcgggacgacgcccagacgcgataagactggggttgggcaaccataactactgtagaaatcctgacagggacagcaagccgtggtgctacgtgtttaaggccggaaagtactcttccgagttctgttccactcccgcatgttccgaagggaatagcgactgttacttcgggaatggttccgcctaccggggtacccactcactgactgaaagtggtgcttcttgtctgccttggaactcaatgattctgattggtaaggtctacacggcccagaatcccagcgcgcaggcgctggggctgggaaaacataactattgtcgcaatccagacggcgatgcaaagccctggtgccacgttttaaaaaatcggaggctgacttgggaatactgtgacgtgccttcctgctcaacctgtggattgaggcaatactcccagcctcaatttcgtataaaggggggactgttcgccgatatcgcgagtcacccttggcaggcggccatttttgcgaaacacagaagaagcccaggcgaacggttcctttgtggaggcatcctgatctcctcctgctggatcctcagcgctgcccattgcttccaggagagattcccaccacatcatctgactgttattcttgggcgcacgtatcgagtcgtgccaggtgaggaggagcaaaaattcgaggtggagaagtatatcgttcacaaggaatttgacgatgatacctatgacaatgacattgctctgttacagctgaaatccgactcctctaggtgcgcgcaggagtcatcggttgttcggacagtgtgcctgccccccgccgacctgcaactgcctgattggacggagtgtgaacttagcggctatggcaaacacgaggctttaagccctttttattccgaacgtttgaaagaggcccacgtcagactgtacccgtccagccgctgcaccagccagcatctgcttaatcggaccgtaacagacaacatgttgtgcgcaggcgatacaagatccggaggccctcaggctaacctccatgatgcttgccagggagatagtggggggcccctggtctgtctgaatgacggacgaatgacgctggtggggattatctcttggggtttagggtgtggccagaaagacgtgcccggcgtgtataccaaagtgacgaattacttagactggattcgggataatatgagaccc

SEQ ID NO: 18313 - DNA, 1686 bp, synthetic construct
  misc_feature 1..1686: note = source = /note="Description of Artificial Sequence: Synthetic coding sequence"
  source 1..1686: mol_type = other DNA
atggatgcgatgaaacgtggtttatgttgtgtattactattatgtggtgcggtttttgtttcgccgtcgcaagaaatacatgcgcgttttcgtcgtggtgcgcgttcgtatcaagtaatatgtcgtgatgaaaaaacgcaaatgatatatcaacaacatcaatcgtggttacgtccggttttacgatcgaatcgtgttgaatattgttggtgtaattcgggtcgtgcgcaatgtcattcggttccggtaaaatcgtgttcggaaccgcgatgttttaatggtggtacgtgtcaacaagcgctatatttttcggattttgtatgtcaatgtccggaaggttttgcgggtaaatgttgtgaaatagatacgcgtgcgacgtgttatgaagatcaaggtatatcgtatcgaggtacgtggtcgacggcggaatcgggtgcggaatgtacgaattggaattcgtcggcgttagcgcaaaaaccgtattcgggtcgacgtccggatgcgatacgtctaggtctaggtaatcataattattgtcgaaatccggatcgtgattcgaaaccgtggtgttatgtttttaaagcgggtaaatattcgtcggaattttgttcgacgccggcgtgttcggaaggtaattcggattgttattttggtaatggttcggcgtatcgtggtacgcattcgttaacggaatcgggtgcgtcgtgtttaccgtggaattcgatgatattaataggtaaagtatatacggcgcaaaatccgtcggcgcaagcgttaggtttaggtaaacataattattgtcgtaatccggatggtgatgcgaaaccgtggtgtcatgtattaaaaaatcgtcgtttaacgtgggaatattgtgatgttccgtcgtgttcgacgtgtggtctacgtcaatattcgcaaccgcaatttcgtataaaaggtggtctatttgcggatatagcgtcgcatccgtggcaagcggcgatatttgcgaaacatcgtcgttcgccgggtgaacgttttttatgtggtggtatactaatatcgtcgtgttggatattatcggcggcgcattgttttcaagaacgttttccgccgcatcatctaacggtaatactaggtcgtacgtatcgtgtagtaccgggtgaagaagaacaaaaatttgaagtagaaaaatatatagtacataaagaatttgatgatgatacgtatgataatgatatagcgttactacaactaaaatcggattcgtcgcgatgtgcgcaagaatcgtcggtagtacgaacggtatgtttaccgccggcggatttacaactaccggattggacggaatgtgaattatcgggttatggtaaacatgaagcgttatcgccgttttattcggaacgtttaaaagaagcgcatgttcgattatatccgtcgtcgcgatgtacgtcgcaacatttattaaatcgtacggtaacggataatatgttatgtgcgggtgatacgcgttcgggtggtccgcaagcgaatctacatgatgcgtgtcaaggtgattcgggtggtccgctagtttgtctaaatgatggtcgtatgacgttagttggtataatatcgtggggtctaggttgtggtcaaaaagatgtaccgggtgtatatacgaaagttacgaattatctagattggatacgtgataatatgcgtccg

SEQ ID NO: 18314 - DNA, 1686 bp, synthetic construct
  misc_feature 1..1686: note = source = /note="Description of Artificial Sequence: Synthetic coding sequence"
  source 1..1686: mol_type = other DNA
atggatgccatgaagagaggcctgtgttgcgttcttctgctgtgcggtgctgtgttcgtttccccgagccaggaaatacatgctagattcaggagaggagccagatcctatcaggttatctgcagggacgaaaagacacagatgatttatcagcaacaccagtcatggctcagaccagtgctgagaagcaacagggtcgagtactgttggtgcaactctggacgcgcccagtgccattcagtacctgttaagtcatgttccgagccaagatgttttaatggcggcacctgccagcaggcgctgtatttctccgacttcgtatgtcagtgtcctgagggcttcgcgggaaaatgctgtgagatcgacaccagggccacatgttacgaagaccaaggcatttcttatcgcggaacctggagtacggctgagtctggcgcggaatgtacaaactggaactcttctgccttggcgcaaaagccatatagcggccgccgccccgacgccataaggttgggcttgggcaaccataattattgtagaaatcccgatcgcgactctaagccgtggtgttatgtgtttaaggcgggtaagtatagttcagagttctgctctacaccagcatgctccgagggtaacagtgattgctacttcggcaacggttctgcctacaggggcacgcattctttgaccgaatcaggagcgtcctgcctgccttggaatagcatgatccttattggcaaggtgtacactgctcagaacccctccgctcaagcactgggactgggtaagcataattattgcaggaatccggatggtgacgccaagccttggtgccatgtactgaaaaacaggcgcctcacctgggaatactgtgacgtgccctcctgcagtacctgtggactgcgccagtacagtcagccccagttcagaattaagggcggcctgttcgccgatattgccagtcacccctggcaggctgctatctttgccaaacaccgccgcagtccgggcgagaggttcctttgcggcggtatcctcatctcatcctgttggatcttgagcgcggcccattgtttccaggagaggttcccaccccatcacctgactgtcatccttggaagaacatatagggtcgtgcctggtgaggaggagcagaagttcgaagtagagaagtatatcgtgcacaaggaattcgatgatgacacctacgacaatgatatagcacttctgcagctgaagtctgactcttctcgctgcgcccaagaaagctccgtcgttcgcaccgtctgcttgcctcctgcggatctgcagctgcccgactggaccgagtgtgaactgagcggatacggcaaacacgaggcgctgtcccccttttacagtgaacgccttaaggaagcccacgttagattgtatccttctagtcgctgcacaagtcaacatttgcttaaccgcaccgtgaccgataatatgctgtgtgccggtgacacgcgctcaggcggacctcaagccaacctgcacgacgcctgccagggtgattcaggaggccctctggtctgtctgaacgatggaaggatgactttggtgggcatcatttcctggggactgggatgcggacaaaaggatgttcctggtgtgtacacaaaggtgaccaactacctggattggatcagggataacatgagacct

SEQ ID NO: 18315 - DNA, 1686 bp, synthetic construct
  misc_feature 1..1686: note = source = /note="Description of Artificial Sequence: Synthetic coding sequence"
  source 1..1686: mol_type = other DNA
atggacgccatgaagagaggcctgtgctgcgtactactgctgtgtggggccgtgttcgtatccccaagtcaagagattcatgcccgatttcggcgaggagcccggagctatcaggtgatttgtcgggacgaaaagacccagatgatctatcaacaacaccagagctggctacgacccgtcctgcggagcaaccgtgtggagtactgctggtgtaactctggccgagcacagtgccactccgtaccggtgaagagctgtagtgaaccaagatgttttaatggagggacttgtcagcaggccctctacttttcagacttcgtgtgccaatgcccagaaggattcgccggaaaatgttgtgagattgacacacgggcaacctgctacgaggatcaaggtatttcatatcgcggtacgtggtctactgcagaaagcggtgcggaatgcactaattggaatagcagcgccctcgctcagaaaccttattctggaaggaggcccgacgccatcaggcttgggctgggaaatcacaattactgtaggaatccggatcgggattctaagccctggtgttatgtttttaaagccgggaagtatagcagtgagttttgcagcacccctgcctgttccgagggcaactctgactgttactttggaaacggttcagcctatcgaggcacacattctcttaccgaatccggtgctagctgcctcccctggaattctatgattctgatcgggaaggtatatacggcccaaaatccttctgctcaggcactgggactgggaaagcataattattgcagaaatcctgacggtgacgcaaaaccctggtgtcatgtgctgaagaaccggaggctgacctgggagtactgtgacgtaccttcatgttctacgtgcgggctgcggcagtacagccagccccagttccggattaaaggcggtctgttcgctgatatcgcatcccatccctggcaagccgccatcttcgcaaagcatcgtagaagtcccggagaacgcttcctgtgtggaggtatcttgatttcttcttgctggatactcagcgccgcccactgttttcaggagcgttttcccccacaccacttgacagttattctcggaaggacctaccgggtagttccaggtgaggaagaacaaaagttcgaggtcgagaagtacatagttcacaaggagtttgacgacgacacctacgacaacgacatagccttattgcaactcaagtctgattcttccaggtgcgctcaggagtcatcagtcgtgcgtaccgtctgtttgccccccgcagacctgcagctccctgactggactgagtgtgaactctccgggtacggaaagcatgaagccctgtcacccttctattcagaacggttgaaggaagcccacgtccggctgtacccctcaagcagatgcacgagccaacatctactgaaccgaacagttacggataacatgctttgcgccggagacacaaggagtggcggacctcaggccaacctgcacgatgcctgtcagggagactcaggaggcccactcgtgtgtttaaatgatggtcgcatgacacttgtgggcatcatttcatgggggctgggctgcgggcagaaggatgtgcccggcgtatacaccaaggttacaaactatctcgattggatccgcgataacatgaggcct

SEQ ID NO: 18316 - DNA, 1686 bp, synthetic construct
  misc_feature 1..1686: note = source = /note="Description of Artificial Sequence: Synthetic coding sequence"
  source 1..1686: mol_type = other DNA
atggatgctatgaagaggggcctctgttgcgtgctgctgctgtgcggggccgtgttcgtgagcccatcacaagaaatccatgcacgctttaggaggggcgctcggtcctaccaggttatctgccgggacgagaaaacgcagatgatttaccaacagcaccagagctggctgcgtccagttctcagaagcaatagggtggagtactgttggtgtaactcgggacgggcacagtgccatagcgtgccggtgaagtcttgcagcgagcctagatgcttcaatggtggaacttgccagcaggctctctatttctcagatttcgtgtgccaatgtcccgaaggattcgcgggaaagtgttgcgaaatcgacactcgcgccacctgttacgaggatcagggaatatcgtacagaggtacttggagcaccgcggagagcggcgccgagtgtacgaactggaattcatccgctctggcacagaagccgtactcggggcggcgccctgatgctattagattgggactcggtaatcacaactactgccgaaacccggatcgcgattcgaagccatggtgctacgtgttcaaggcaggaaagtacagctcagagttctgcagcactccagcctgctccgaaggcaattcagactgctactttggcaacggatcggcctacagaggtacccattcacttactgaatcgggagcctcctgcctcccttggaattccatgattctgatcgggaaggtgtacaccgcacaaaatccgtccgctcaggcactggggctgggtaaacataactactgccgcaacccggacggagacgccaagccctggtgccatgtgctgaagaaccggcgcctgacctgggaatactgcgacgtcccgagctgctcaacttgcggactccggcaatactcccagccgcaattccgcatcaagggcggattgttcgccgacatcgcttcacacccgtggcaggccgccatctttgctaagcatcgtcgaagcccaggcgaacgcttcctgtgcggcggcatcctcatctctagctgctggatcctgtccgctgctcactgcttccaagaacggtttcctccccaccacttgaccgttatcctgggaaggacctacagagtcgtgcctggagaagaggaacagaaattcgaagtggaaaagtacatcgtgcataaggaattcgatgacgatacctacgacaacgacatcgctctcttgcagctgaaatcggactcgtcgcgctgcgcacaagagtcctcggtggtgcgcaccgtgtgcttgccaccggccgacctccagctgcctgattggaccgagtgcgaactgtcaggttacggaaaacatgaagcgctgagcccgttttactccgagagactgaaggaggctcatgtcagactgtatccgagctcacggtgcacttcacagcatctgctcaacagaaccgtcacggacaatatgctgtgtgccggagataccagatcaggagggccgcaggccaacttgcacgatgcctgtcagggcgattctggtggaccgctcgtgtgcctcaatgacggccgcatgactctcgtgggaatcatcagctgggggttgggatgtggacagaaggacgtgccgggagtgtacactaaggtgaccaattacctggactggatcagagataacatgcgcccg

SEQ ID NO: 18317 - DNA, 1686 bp, synthetic construct
  misc_feature 1..1686: note = source = /note="Description of Artificial Sequence: Synthetic coding sequence"
  source 1..1686: mol_type = other DNA
atggacgccatgaaaaggggactttgctgtgtgttgctgctctgcggagcagttttcgtttccccctcacaggagatccatgcacggtttcgcagaggagcaagaagctaccaggtcatctgcagggatgaaaagactcaaatgatctaccagcaacaccagtcctggctgcgtccagtgctccggtcaaaccgtgtggagtactgctggtgtaactcggggcgtgcacaatgtcactcggtgccggtgaagtcctgtagcgaacctagatgtttcaacgggggtacctgccaacaggcactctacttttctgattttgtctgtcaatgtcccgaagggttcgccggaaaatgttgcgagatcgacacgagggcaacctgctacgaggatcaagggatctcgtaccgcgggacttggtccactgcagagtcgggagcagaatgtaccaattggaactcgtccgcactcgcacagaagccatactcgggacgaaggccagatgcgatccgactgggcctcgggaatcacaactactgtcgtaaccctgaccgcgattcgaagccttggtgttacgtgttcaaagccggtaaatacagctccgagttctgttccactcctgcgtgctccgagggcaactcagactgctattttggaaatggaagcgcataccgtggcacgcattcacttaccgaatccggcgcatcgtgccttccttggaatagcatgatactgattggcaaggtgtacactgcgcagaacccttcagcacaggcccttgggctggggaagcataactattgccgaaaccctgacggtgatgccaaaccatggtgccatgtcttgaagaaccgtagactgacttgggagtactgtgacgtcccctcatgttcgacctgtggtctgcgccaatattcacagccacagtttagaattaagggaggactttttgcagacattgcctcgcatccttggcaagcagccatctttgcaaagcacagaaggtccccaggagagagatttctctgcggaggaattctgatttcctcatgttggattctttctgcagcacactgcttccaggaacgctttccaccacatcacctgaccgtgatcctcggcagaacgtacagagtggtaccaggagaggaagaacaaaagtttgaagtggaaaagtacatcgtccataaggagtttgacgatgacacttacgacaacgacatcgctcttctgcaacttaagtccgacagctctaggtgtgcccaagaatcgtccgtggtgcggaccgtgtgccttcctcctgccgacttgcaacttccagactggacggaatgtgagcttagcggctacggaaaacacgaagccctttccccattctactcggagagacttaaggaggcacacgtccgcctctatccttcgagccgctgtacttcgcagcacttgcttaatcggaccgtgactgacaacatgctctgcgcgggagacactaggtcgggaggacctcaagcaaacctgcatgatgcttgccagggtgattccggcgggccacttgtgtgcctgaatgacggacgcatgactctggtcggaattatctcgtggggtcttggctgtggccagaaggatgtgccgggagtgtacaccaaggtgaccaactacctggattggattagggataacatgcggcca

SEQ ID NO: 18318 - DNA, 1686 bp, synthetic construct; identical to SEQ ID NO: 18279
  misc_feature 1..1686: note = source = /note="Description of Artificial Sequence: Synthetic coding sequence"
  source 1..1686: mol_type = other DNA

SEQ ID NO: 18319 - DNA, 1686 bp, synthetic construct
  misc_feature 1..1686: note = source = /note="Description of Artificial Sequence: Synthetic coding sequence"
  source 1..1686: mol_type = other DNA
atggacgcaatgaagaggggactgtgctgtgtgctgcttttgtgtggagccgtcttcgtttccccttcgcaagagatccacgctcgtttccgccggggagcacgcagctatcaggtgatttgcagagatgaaaaaacacagatgatctatcagcagcatcagtcgtggttgcggccagtcctgagaagcaaccgcgtcgagtattgctggtgcaacagtggcagggcccagtgccactctgtcccggtgaaatcttgttctgagcctcgctgcttcaatggcgggacatgccagcaggcactgtacttcagtgactttgtctgtcagtgtcccgagggatttgccggcaagtgttgtgaaattgatacacgagccacttgctatgaggaccagggaatttcgtatcgcgggacctggagcacagccgagtccggagccgagtgtacaaactggaacagcagcgccctcgcccagaaaccctatagcggtcggcgccctgacgcaattaggctcggcctcggtaatcacaattattgccgcaatcccgaccgggattctaagccgtggtgttacgtgtttaaggctgggaagtacagctcagagttctgctcaacgcctgcatgcagtgaaggcaactccgattgttactttgggaacggaagcgcttataggggtacacattcccttacagaatcgggcgcatcatgcctaccctggaactccatgatcctgataggcaaggtttacactgcacagaacccctcagcccaggcactgggtttaggaaagcacaattattgcagaaatcccgatggggacgccaaaccatggtgccatgtgttgaagaataggcggctgacatgggaatactgcgatgtaccttcatgcagtacgtgcggactaagacagtactcacagcctcagttccgcattaagggggggttgttcgccgatatcgcttctcacccgtggcaggctgccatattcgcaaagcatcgcagatcaccaggcgaacggttcctgtgtgggggcatcctcatctcctcctgttggatcctctcggcagcccactgttttcaagagagattccctccgcaccatcttacagttatcctggggagaacatacagagtggtgcctggcgaggaggagcaaaagtttgaggtggagaaatacatagtacataaggaattcgatgacgacacctacgataatgatatagctctgctgcagctaaagagcgattcttcccggtgcgcccaggagtcttccgtggtccggaccgtgtgtctacctcccgcggatttgcagctgcccgattggaccgagtgcgaacttagtgggtacggtaaacacgaggctctcagtcctttctattccgagaggttaaaggaagctcacgtccgcctgtacccatcaagtaggtgtacatcacagcacctgctgaatcgtaccgtgaccgacaatatgctctgcgcaggcgacacaagatctggcgggcctcaagctaatctgcatgatgcatgccagggggactccggaggccctctcgtttgtcttaacgatggacggatgacgctggtggggattatctcctgggggctcggatgtggacaaaaagacgtgcctggtgtctataccaaggtgaccaactacctggactggatccgcgataacatgagacca

SEQ ID NO: 18320 - DNA, 1686 bp, synthetic construct
  misc_feature 1..1686: note = source = /note="Description of Artificial Sequence: Synthetic coding sequence"
  source 1..1686: mol_type = other DNA
atggacgcgatgaagaggggcctttgctgtgtgctgctgctgtgcggtgccgtctttgtcagcccgtcgcaggagattcacgctcgctttcggcgtggcgcccgttcctaccaggtgatatgccgagatgagaagacccaaatgatttatcaacagcatcagtcctggttaaggccagtgttgcgctccaaccgggtcgagtactgttggtgcaacagcggacgtgctcagtgccacagtgtgccagttaagtcctgcagtgaaccccgctgcttcaacggcggaacatgccagcaagctctgtatttcagcgacttcgtgtgccagtgcccggagggcttcgctggcaagtgttgcgaaatagacacccgggcaacctgctacgaggaccagggtataagctacaggggtacctggtctactgcggaatccggtgctgagtgtactaactggaattcctcggctctggcacagaaaccatatagcggaaggcgtcctgacgctattcgcttgggactgggtaatcataattactgccgaaacccagaccgcgatagcaagccttggtgctacgtattcaaggccggcaaatatagtagtgagttctgtagcacaccagcctgcagtgaaggaaactccgattgttatttcggcaatggctcggcttatcgaggcacccactctttaacggagtccggcgccagctgcctgccatggaattcaatgatattgattggcaaggtgtatacggcgcaaaacccatcggcgcaggctctgggactgggtaagcacaactactgccgcaacccggacggcgatgcgaagccctggtgccatgtcttgaaaaaccggcgattgacttgggagtactgcgatgttcccagctgttccacatgcggccttcggcagtatagccagcctcagttccgaattaagggggggctatttgcagacattgccagccatccctggcaggcagccatttttgccaagcaccgtcgtagccctggcgagcggttcctgtgcggtggaatcctgatttcgagttgctggatcctatcggcggcccactgtttccaagagcgattcccaccacatcatttaacagtcattctgggacggacctatcgggtggtaccgggagaggaggagcagaagttcgaggttgagaagtacattgtgcataaggagttcgacgacgacacgtatgacaatgacatcgcgctgctgcagctgaagtcggattcgagccggtgcgcgcaagagtcctcagtggtccgaacggtctgcctccctcctgccgacctgcaactgcctgattggactgaatgcgaattgagcggatatggaaagcacgaggccctaagccccttctactccgagcggctcaaggaagcccacgtgcgcctgtaccccagcagtcgttgcacgtcccagcatttgttgaaccgcacagtcacagataacatgctgtgtgcaggagatacgaggtccggcggcccgcaggccaacctgcacgatgcctgccaaggcgattccggaggtccgctagtatgcctaaacgatggaaggatgacacttgttggcattatcagttggggcctgggctgtggtcagaaggacgttccaggagtctacacaaaagtaacgaattacttggactggatccgcgacaatatgcgtcct

SEQ ID NO: 18321 - DNA, 1686 bp, synthetic construct
  misc_feature 1..1686: note = source = /note="Description of Artificial Sequence: Synthetic coding sequence"
  source 1..1686: mol_type = other DNA
atggatgcgatgaagaggggattgtgttgcgtactactcctctgtggagcagtttttgtgtcaccaagccaggaaattcacgcgagattccgacgcggagcccggtcctaccaggtaatctgcagggacgaaaaaactcaaatgatatatcaacagcaccaatcctggctcagacctgtccttcggtcaaaccgcgttgaatattgctggtgcaattcagggcgcgcacaatgccactccgttcccgtaaagagctgttccgaaccccggtgcttcaatggcggtacctgtcagcaggcgttatatttctctgatttcgtgtgtcagtgcccagagggctttgctggcaaatgttgtgaaattgatacgagagccacatgttatgaagaccagggtatcagctatcggggaacctggtccacagcggaaagcggtgccgaatgtaccaattggaactcttccgcccttgctcagaagccctacagcgggcgtaggccagacgccatacgactggggttgggcaatcacaactattgcagaaatcctgatcgcgactccaaaccttggtgttacgtgttcaaagctggcaaatactcctcagaattttgttctactcctgcctgtagcgaaggcaacagcgattgctacttcggcaatgggtccgcatacagaggcactcattctctcactgagtccggagcctcttgtctgccctggaattcaatgatcctaatcggtaaggtgtacaccgcgcaaaacccttcagctcaggctctaggactcgggaagcataattactgtcggaacccggatggagatgcgaagccatggtgtcacgtgctcaagaatcgacgactgacatgggaatactgcgatgtgccgagctgctccacatgtgggcttagacagtatagccaaccccaattcagaatcaagggcgggctctttgctgatatagcttctcatccgtggcaggcagctatctttgcaaagcatcgccgaagtccaggagaacggtttctgtgtggaggaattttgatctcttcatgttggattctgagtgcagcgcactgcttccaggaacgatttcccccccatcacctcaccgtcatcctcggaaggacctacagagtcgtgcccggtgaagaggagcaaaaattcgaagtagaaaaatacattgtccataaggagtttgacgacgacacttacgataatgacattgcccttctgcagctgaagagcgactcttctaggtgtgcccaagaaagcagtgtagtccgtactgtgtgtctgccacctgcggaccttcagctgccagattggacggaatgcgaattgtcaggatacggtaagcacgaagctctgagtccattttacagcgagagactgaaggaggcacatgtcagattatatcccagttcaagatgcaccagtcagcaccttctcaaccggacagtgacagataacatgctgtgcgctggggacacaaggtctggtggccctcaggccaatctgcacgacgcctgccagggagattcaggcggtcctctggtctgcctaaacgacggccggatgacgttggtggggatcatctcttgggggctgggctgtggccaaaaagacgtgcctggtgtgtataccaaggttactaactatttggattggatccgggacaatatgcgtccc

SEQ ID NO: 18322 - DNA, 1686 bp, synthetic construct
  misc_feature 1..1686: note = source = /note="Description of Artificial Sequence: Synthetic coding sequence"
  source 1..1686: mol_type = other DNA
atggatgcaatgaaacggggtctttgttgcgtgcttcttctttgcggagccgtgttcgtgtccccctcgcaggaaattcacgcgcgcttccgtcgcggcgctaggtcttaccaagtgatctgtcgcgatgaaaagacgcaaatgatttaccaacagcatcagagctggctgcggcctgtgctcagatcgaatagagtggagtactgttggtgtaattccggacgtgctcagtgccatagcgtgcccgtgaaatcctgtagcgaaccgcgctgtttcaatggagggacgtgtcaacaggcactgtactttagcgatttcgtctgtcagtgccccgaaggattcgccggcaagtgttgcgaaattgatacccgggctacttgttacgaagatcagggaatttcctacaggggaacttggtcaactgcagaatccggcgcagagtgtaccaattggaatagctcggccctcgctcagaagccttacagcggacgtcgaccggacgcaatccggcttgggctcggcaatcataactactgtagaaaccccgaccgggattcgaaaccatggtgttacgtgtttaaggcaggcaagtactcaagcgaattctgttcgacccccgcatgctccgagggaaactcagattgctattttggtaatgggtcggcttaccgcggaacgcattcccttactgaatcaggagccagctgcctgccctggaatagcatgatattgattggtaaggtgtataccgcacaaaacccttctgctcaggcacttggactgggtaaacacaattactgtaggaacccggacggagatgcaaagccttggtgtcacgtcctcaagaaccgcaggcttacgtgggaatattgtgacgtgccaagctgctcgacttgcggacttcgtcaatactctcagccccaattcagaatcaaaggcggtctgttcgccgatatcgcgtcgcatccatggcaagcggcaatctttgccaagcatagacggagccctggagaacgattcctttgtggtgggattctgatctcgtcctgctggattttgtccgccgctcactgttttcaggaacggtttcctcctcaccaccttactgtgatacttggacgcacttacagggtggtccctggagaggaagaacaaaagttcgaagtggagaagtacattgtccacaaagaattcgacgatgatacctacgacaatgacattgcccttctgcagcttaaatcggactccagcagatgcgcacaggaatcatccgtggtgagaacggtgtgtctgccacctgctgatcttcaactgcctgactggactgagtgtgagctttcaggttacgggaagcatgaagcactgtccccattttactccgaacgcttgaaggaggcacatgtgaggttgtacccttcctccaggtgtaccagccagcatctcctgaaccgaactgtgaccgataacatgctttgtgcaggagacacgagatcaggtgggccacaggcgaaccttcacgatgcatgtcaaggtgactcaggtgggcctcttgtctgccttaacgatggtcgaatgactttggtcggtatcatttcctggggccttggatgtggtcaaaaggatgtgcctggtgtctacactaaggttaccaattatcttgattggattagagacaatatgcggcca

SEQ ID NO: 18323 - DNA, 1686 bp, synthetic construct
  misc_feature 1..1686: note = source = /note="Description of Artificial Sequence: Synthetic coding sequence"
  source 1..1686: mol_type = other DNA
atggatgcaatgaagcggggactctgctgcgtgcttctgttatgtggagcagtgtttgtgtctcccagtcaggaaattcatgccaggttccgccgcggcgccagatcgtatcaggttatctgccgggacgaaaaaacccaaatgatttatcagcaacatcagagctggctgagacccgtcttgaggagcaatagagtcgaatactgctggtgtaattccggtcgggcacaatgccattctgtgccagtgaaatcctgtagcgagcctagatgctttaacggagggacttgtcaacaggcgctgtacttttcggacttcgtgtgccagtgccctgagggtttcgctggtaagtgttgcgaaatcgacacaagggctacctgctacgaggaccagggcatctcctacagaggtacctggtccaccgccgagagcggtgccgagtgcaccaactggaatagctccgctctggcccagaaaccttactccggtaggcgccctgatgcaatacgtctgggcttgggtaaccataattattgtagaaaccccgatagagacagcaagccctggtgctacgtcttcaaagctggaaaatactccagtgaattctgctccactcccgcctgttctgagggcaacagcgactgctatttcggcaacggctcagcttaccgggggacgcattcattgaccgaaagcggagcaagctgcctcccttggaacagcatgattctcattggaaaggtttacacagcccaaaacccctctgctcaagccctggggctcggaaagcacaactattgcagaaacccagacggagatgcaaagccatggtgtcacgtgctgaagaacagacgcctgacctgggaatattgcgacgtgcctagttgcagcacctgcgggctcaggcaatatagccagccacaatttcggatcaagggagggttgttcgcagatattgcatcccatccttggcaggcagctatttttgcaaaacacagaagatcacctggcgaaagatttctgtgtggagggatcctgatcagctcctgttggatcctctctgctgcacactgctttcaggaacgctttcctccgcaccatcttaccgtgatcctgggccgcacctatagggtggtgcccggcgaggaagaacaaaaatttgaagtggaaaagtacattgtgcacaaagaatttgatgatgatacttacgataatgatatcgcactgctgcagctgaaatctgatagcagcaggtgcgctcaggagagctccgtggtgcgtactgtgtgcctccctcctgctgacctgcagttgcccgactggaccgagtgcgaattgagtggatatgggaaacatgaggcactgagccccttttactcagaacggctgaaggaagcccacgtgaggttgtacccttcaagtagatgcactagccaacatttactgaacaggaccgtaaccgataatatgctgtgtgctggagatacgcggagcggaggaccccaagccaatctgcacgacgcttgtcagggggacagcggcggccccctggtttgtctcaatgacggaaggatgaccctggtaggcataatcagctggggactcggttgcggccagaaggatgtgcctggagtctacaccaaggtgaccaactaccttgactggattagagacaacatgagacct

SEQ ID NO: 18324 - DNA, 1686 bp, synthetic construct
  misc_feature 1..1686: note = source = /note="Description of Artificial Sequence: Synthetic coding sequence"
  source 1..1686: mol_type = other DNA
atggacgctatgaaaaggggcttgtgttgcgtattgctactatgcggcgccgtcttcgtatccccctctcaggaaatacatgctcggttccgccgaggggcacgatcataccaggtgatttgtagggacgagaaaacgcagatgatttatcagcagcaccagagttggctcagacctgtgctcaggagcaaccgtgttgaatattgctggtgtaattccgggcgggctcaatgtcattccgtgcccgttaagtcttgcagtgagccgcgatgctttaacggagggacctgccagcaggcactttacttttctgacttcgtatgtcaatgccctgaagggtttgccggcaaatgttgtgaaatcgacacccgggctacgtgttatgaggaccagggaatatcttatcgcggaacttggtctaccgccgagtcgggtgccgagtgcaccaactggaacagtagcgcactggcacaaaaaccctactccggacgaaggcccgacgcgatccgactgggtctgggtaatcacaattattgccgaaaccccgacagagacagtaagccatggtgctacgttttcaaagctggcaagtatagctccgagttctgtagcactcccgcgtgcagtgagggcaactccgattgctacttcggcaatggctccgcctacaggggcacccattcacttactgagtccggagcctcatgtctgccgtggaattcaatgatcctgattggcaaagtgtacaccgcccagaacccatcagcgcaggcactgggcttaggtaagcacaattactgtagaaatcctgatggcgatgctaaaccttggtgccacgtgcttaaaaatcgccggctgacatgggaatattgcgatgtgccatcctgctcaacatgcgggctaaggcagtactcccagccacagtttcgtatcaaaggtggtctcttcgccgacatcgcaagtcacccctggcaagcagcaatctttgccaagcatagacgttcccccggggagcgcttcctgtgcggagggattctgatcagttcatgctggatactgtccgccgctcattgctttcaggagcgcttccccccccatcatttgactgttattctaggccgaacctatcgggtggtcccgggggaggaagagcagaaattcgaagttgaaaagtatattgtgcataaagagtttgatgacgatacttacgataacgacatcgctttattgcagctaaagtctgacagctctcgctgtgcacaggaaagtagtgtagtcaggacagtatgcctgcctcctgccgatttgcagctacctgactggaccgagtgtgagttgagtgggtacggcaaacacgaggctctgtctcccttctattccgagagactgaaggaagcccacgtgagactatatccatcttcaaggtgcacaagccagcacctgctcaacaggaccgtaaccgacaacatgctgtgcgctggtgacacccgatccggggggccacaggcaaatttgcacgacgcttgtcagggcgacagtgggggccctctggtctgcctcaatgatgggagaatgaccttggtgggcattatcagctggggtctcggttgcgggcagaaggacgtgccaggcgtctacacaaaagtgactaattatctggactggattcgggacaatatgagacca

SEQ ID NO: 18325 - DNA, 1686 bp, synthetic construct
  misc_feature 1..1686: note = source = /note="Description of Artificial Sequence: Synthetic coding sequence"
  source 1..1686: mol_type = other DNA
atggatgcaatgaaacgagggctgtgctgtgttttgcttctgtgcggggcagtgtttgtgtctcctagccaggagattcacgcaagattccgaaggggagctaggtcataccaagtaatatgtcgagatgaaaagacgcagatgatctatcagcagcatcaatcatggctgcgacccgtgctgagatcgaaccgggtagaatactgttggtgcaactccggaagggcccaatgccactctgtccccgtgaaaagttgcagcgagcctcgatgctttaacggcggcacctgtcagcaagccctctatttcagcgacttcgtctgtcaatgtcccgagggctttgcaggcaagtgttgtgagattgataccagggcaacatgctacgaagatcagggcatctcgtacagagggacctggagtactgctgagagcggcgctgaatgcacgaactggaattcctcggctttggctcagaagccctattccggacggaggcctgacgcgatccgactaggactcggaaaccacaattactgcaggaaccccgatagggatagcaagccctggtgttacgtcttcaaagccggcaaatattcgtccgagttttgctctacgcccgcttgttccgagggcaatagtgattgttacttcgggaatggaagcgcctatcgtggaacgcactcccttactgaatctggagccagttgtttgccctggaacagtatgatcctgatcggaaaggtctatactgctcagaatccatcagcacaggccctgggactcggcaaacacaactattgtcgaaatcctgatggtgatgccaaaccctggtgccacgttttaaaaaatcgaaggctaacctgggaatactgcgacgtgccctcctgctctacctgcgggctcaggcaatacagccagccacaattcagaattaagggaggtctgtttgccgatatcgcatcacatccatggcaggctgcaatttttgcaaagcacagaaggagccccggagagcgattcctgtgtggtggcatactgatttcatcctgttggattctctcggctgcacactgtttccaagagcgtttccctccccatcatcttaccgtgattctcggcagaacttatcgagttgtgcctggtgaggaagaacagaagtttgaggtcgaaaagtacatcgtgcataaggaatttgatgacgatacttacgacaacgatatcgcgctactgcagttaaaatctgactcgtccagatgtgcacaagaatcttccgttgtgcgcaccgtgtgtctcccccctgcagacctccagctgcctgactggactgagtgcgaactcagcggttacggaaaacacgaagccctctcgcctttctactctgaacgcctgaaagaggctcatgttcgactctacccttccagcaggtgcacatcacagcacctgttgaacaggactgtcaccgataatatgctatgcgccggcgatactcgatctggtggaccacaagcaaatctgcacgacgcctgccagggtgattcgggcggccccctggtgtgccttaatgacgggaggatgacccttgtcggcatcatcagctggggcttgggctgtggccagaaagatgtgcccggagtgtataccaaggtaaccaattatctggactggataagagataacatgcgacca

SEQ ID NO: 18326 - DNA, 1686 bp, synthetic construct
  misc_feature 1..1686: note = source = /note="Description of Artificial Sequence: Synthetic coding sequence"
  source 1..1686: mol_type = other DNA
atggacgccatgaagagagggctttgttgcgtgctgctgctctgtggggccgtgtttgtgtctccaagccaggagattcatgcacgtttcagacggggtgcacgctcttaccaagtcatttgtcgcgacgagaaaactcagatgatctatcagcagcaccagtcctggctgagacccgtgttacgttctaacagagtggagtattgctggtgcaactctggcagggcccagtgtcactctgttcccgttaaatcatgtagcgagcctcggtgttttaacggaggcacctgccagcaggctctgtacttttctgattttgtctgccagtgccctgaggggttcgcgggaaaatgttgtgaaatcgatacgcgcgccacatgttacgaagaccagggtatttcttaccgtggcacatggtccaccgccgaaagcggcgctgagtgcactaattggaactcgagtgctctggcccagaagccatactcagggaggaggcccgacgcaatccgcttggggttaggtaatcacaactattgcagaaacccggaccgtgatagcaagccgtggtgttatgtctttaaggccgggaaatacagcagcgagttttgctccacccctgcatgtagcgagggcaactctgactgctactttggtaatggatcagcttataggggaacacattccctgactgagtcgggggcgtcttgtctgccctggaattccatgattctcataggtaaggtgtatactgcccagaatcccagtgcccaggcacttggactagggaagcataattactgccggaaccctgacggagacgccaagccatggtgccacgttctgaaaaacagaaggctcacatgggaatattgtgacgtcccttcttgctctacttgtggtttaaggcagtactcacagcctcagtttcggataaagggcgggctgttcgcggacattgcctcgcatccttggcaggcggctatttttgccaaacatagaagatcccctggtgaacgctttttgtgtggtggcatcctgatttccagctgttggatattgagcgccgcacactgctttcaggagagatttccaccacatcatttgaccgtgattctgggaaggacctatagagtggtacctggagaggaggaacaaaaatttgaggtcgagaaatacatagtgcacaaggaattcgacgacgatacctacgacaacgacattgcgcttctgcagctgaagtccgattcctcccgctgcgcccaggaaagctctgtggtccgtactgtttgcctgcccccggccgatttacagctgccagattggaccgagtgcgaattgtctggatatggtaagcatgaggctttgtcacccttttatagcgagcgcttgaaagaggcccacgtgcgtctataccccagttcacgttgtaccagccagcacctgttgaaccggacagtcactgataacatgttgtgtgccggcgatacccggtccggcggcccccaggctaacttacatgacgcttgtcagggagatagcggtggacccctcgtatgcttaaacgacgggcgtatgaccctggtcggcatcataagctgggggctgggatgcggacagaaggatgtgcctggggtgtacaccaaggtgactaactacctggattggattcgcgacaatatgaggcct

SEQ ID NO: 18327 - DNA, 1686 bp, synthetic construct
  misc_feature 1..1686: note = source = /note="Description of Artificial Sequence: Synthetic coding sequence"
  source 1..1686: mol_type = other DNA
atggatgctatgaagcgcggactttgctgtgtccttctgctctgtggtgcagtctttgtctccccttcccaggagatccacgccagattcaggcgtggtgcacgttcctaccaggtgatctgcagggatgaaaagacccagatgatctaccagcaacatcagtcctggctcaggcccgtgctgcgcagcaaccgtgtggaatactgctggtgcaactctggtagagctcagtgtcactccgttcctgtcaagagttgcagcgagcctcgctgctttaacggtggcacttgtcagcaggccctctacttcagcgactttgtgtgccagtgccccgagggcttcgcaggtaagtgttgcgagatcgatactagggctacctgttatgaggatcagggcattagttataggggcacctggtccactgctgagtccggtgctgagtgcaccaattggaatagttccgccctggcccagaagccctactccggtcgtagacctgacgcaatcaggcttggtttgggtaatcataattattgccgtaaccccgatcgtgattccaagccctggtgctacgtgttcaaagctggaaaatactcttccgagttttgcagcacacccgcatgcagcgaaggtaactccgattgctactttggaaacggatcagcctacagaggtactcactctctcacagagagcggcgcatcctgtctcccctggaactctatgattctgatcggtaaagtgtacactgcacagaacccctctgctcaggccttgggcttgggaaagcataactactgccgcaacccagatggagatgccaaaccctggtgccacgttctgaagaatagacgtctgacctgggagtattgcgatgtaccttcttgcagtacttgtggtcttcgccaatacagccagccacagtttcgtataaagggaggtctgtttgccgatatcgcttctcacccttggcaggctgctatctttgctaaacacaggaggtcacctggcgaaagattcctgtgtggtggaattttgatctcttcttgttggatcctgtcagctgcccattgtttccaggagcgtttccccccacaccatctgaccgtgatccttggaagaacttacagggtggtgccaggtgaagaagaacaaaagtttgaggtcgaaaaatacattgtgcacaaggaattcgatgacgatacctatgacaatgatattgccctgttgcagctgaaatcagattcttctcgctgcgcccaggagtctagtgtggtgcgcacagtttgtctgcccccagccgatctgcagctccccgattggactgagtgcgaactcagcggatacggcaaacacgaggcattgtcccccttttattctgagcgtctgaaggaggctcacgtgcgtctgtatcccagctcacgttgcacctcacagcaccttctgaaccgtactgtgacagacaatatgttgtgtgctggagacaccagatcaggcggacctcaggcaaatctgcacgatgcctgtcagggcgattctggaggccctttggtttgcctgaacgacggtcgtatgacccttgtgggtataatctcatggggcctgggctgcggccagaaggatgttcctggtgtttacaccaaggtgaccaattacctcgattggatccgcgataatatgagaccc

SEQ ID NO: 18328 - DNA, 1686 bp, synthetic construct
  misc_feature 1..1686: note = source = /note="Description of Artificial Sequence: Synthetic coding sequence"
  source 1..1686: mol_type = other DNA
atggatgccatgaagcgtggcctctgctgcgtcctcctgctctgtggagccgtgtttgtgtcgccgtcccaggagattcacgcaagatttcggaggggcgctaggtcctaccaagtgatctgccgagacgagaaaacccagatgatctaccaacagcaccagtcatggcttcggccggtgctgaggtccaatcgcgtggaatactgctggtgtaacagcgggcgggcacagtgtcattccgttcccgtgaagtcgtgcagcgaaccacggtgtttcaacggcgggacttgccagcaagccctctatttcagcgatttcgtttgtcagtgcccagagggcttcgctggtaaatgctgtgagattgatacccgcgcgacctgctacgaggaccagggaatctcataccgcggaacttggtccaccgcggaatcgggcgccgaatgcactaactggaactcctcggctctggctcagaaaccgtacagcggcaggcggccagacgctatcagacttgggcttggaaatcacaactactgtaggaacccggaccgcgactccaagccgtggtgctacgtgtttaaagcaggaaagtactcgtcggagttctgcagcacccctgcttgctccgaaggcaactctgattgctacttcggtaatggctctgcctaccgcggaacccattccctgactgaatcaggcgcgtcgtgccttccgtggaacagcatgattctcattggaaaggtctacactgcccaaaacccgtcagcccaggcgcttggattgggtaaacacaactactgccgcaatcctgatggagacgcgaagccgtggtgtcacgtgctgaaaaatcggcggctcacgtgggagtactgcgacgtcccttcatgctccacgtgtgggctcagacaatacagccaaccccagtttcgaatcaagggcggcctcttcgccgatatcgcgtcacacccttggcaggcggctatcttcgcgaaacatcgcagaagccctggcgaacgctttctgtgcggaggcatcctgatctcgtcatgctggatcctgtcggccgcccactgctttcaagagcggtttccaccgcaccacctcactgtcatcctcggacgcacttatcgagtggtcccaggagaagaggagcagaagttcgaggtggagaaatacatagtgcacaaagagttcgacgacgatacctatgacaacgacatcgccctgctgcagctcaagtcggactcgtcgcgatgtgcacaggaatcatctgtggtgcgaactgtgtgcctgccaccggcagatctccagcttccagactggaccgaatgcgaactgagcggatacggaaagcacgaagcgctgtccccattctactctgaacgcctcaaggaagcgcatgtgcgcctctacccgtcatcgcggtgcacttcccagcacttgctcaacagaactgtcaccgacaatatgctgtgtgcaggggacacccggtcaggtggcccacaagccaatctgcacgacgcctgtcaaggtgattcaggagggccgctcgtctgcctcaacgatggacgcatgaccctggtgggaatcatctcctggggcttgggatgcgggcagaaggacgtcccgggcgtgtacactaaggtgaccaactacctggactggatccgcgacaatatgaggcct

SEQ ID NO: 18329 - DNA, 1686 bp, synthetic construct
  misc_feature 1..1686: note = source = /note="Description of Artificial Sequence: Synthetic coding sequence"
  source 1..1686: mol_type = other DNA
atggatgctatgaagaggggtttatgttgcgttttgcttttgtgtggagccgtcttcgtctccccatcccaagaaattcacgcccgattccgaaggggcgctagaagttatcaagtcatctgtagggacgagaagacccagatgatatatcaacaacaccagtcctggctccgacctgtgctgcgaagtaacagagttgagtattgttggtgcaactctggacgagcccagtgccatagtgttccagtgaagagttgtagcgagccccggtgctttaacggggggacatgtcagcaggccctctactttagcgacttcgtgtgccagtgtccggaggggtttgcaggtaagtgctgcgaaatagatactcgggcaacatgttatgaagatcagggcattagctaccgaggtacctggagtactgctgagagtggcgccgaatgtacaaactggaacagctccgctttggcccagaaaccctattcgggtcgtaggcctgatgctatcagactggggctggggaaccataactactgtaggaaccctgacagggactcaaagccatggtgttacgtgttcaaggctggtaagtactcttcggaattctgttcgacacctgcctgctcagagggtaactcggactgttattttggtaatggcagtgcatacagaggcacccactctctgaccgagtctggggcttcatgtttaccctggaacagcatgattctgatcggcaaagtatacacagcccagaacccctctgcacaggcactcggactcggtaagcacaattattgtaggaaccctgacggggacgctaaaccttggtgtcatgtgctgaagaataggcgcttgacgtgggagtattgtgacgttccctcatgctcaacatgtgggctcaggcagtactctcagccccaatttagaataaagggagggctctttgctgacattgcctcacacccctggcaggctgccatctttgcaaaacatcgacgatcacccggcgaacgatttttgtgcggtggcatattgatctcttcctgctggatcctctctgctgcacattgcttccaggaacgattcccgccccatcatttgacggtcattctggggcggacgtacagagtggtgcctggagaggaggagcagaagttcgaagttgaaaagtacatagttcataaagagtttgatgatgacacctacgacaatgatatcgcgctcctccagttaaagagcgacagctctcgttgtgctcaagaaagctctgtggtaaggaccgtgtgcctgccccctgcagatttgcagttgcccgattggactgaatgcgaactttccggttatggaaagcacgaagcactatctccattttactcggagagactcaaggaagctcacgttcggttgtatccatcctctcgatgtactagtcagcacctgctaaaccgaaccgtaacagacaatatgctgtgcgccggcgatacacggtcaggcggtccacaagccaacttgcacgacgcttgtcagggcgattccgggggtccgctggtgtgtctgaacgatgggagaatgaccctggtgggcattatttcttggggactcggctgtggacaaaaagatgtgcccggggtgtataccaaagttaccaattatctggattggattcgtgataacatgcgtcca

SEQ ID NO: 18330 - DNA, 1686 bp, synthetic construct
  misc_feature 1..1686: note = source = /note="Description of Artificial Sequence: Synthetic coding sequence"
  source 1..1686: mol_type = other DNA
atggatgccatgaagagaggcctgtgttgtgtcttgctactctgtggggcagtgtttgtaagcccgtcccaagaaattcatgcgcgcttccgtcgcggggcccgcagttatcaggttatttgtagagatgagaaaacccagatgatctatcagcaacatcagtcctggctaagacccgtccttagatcaaatcgcgtggaatactgctggtgcaactcgggcagagctcagtgccactcagtgccagtaaagagctgctccgagcctagatgcttcaatgggggcacctgccagcaggccctatatttttccgatttcgtctgtcagtgccctgaggggtttgctggaaaatgctgtgaaatagacactagagcaacatgttacgaagaccaaggtatcagctatcgtggaacatggtccaccgcggaatccggggccgagtgcacgaattggaactcatctgcccttgcgcagaaaccctactcggggagacgaccagatgccatccgattgggtctaggcaatcataactactgccgcaaccccgatcgggactctaaaccctggtgctacgtgtttaaggccggcaagtactcctcggagttctgcagcacccccgcctgttcggagggcaacagcgactgttattttgggaatggctccgcataccgcggtacgcactcattgacagagtctggagccagttgtctgccatggaactcaatgatactaatcgggaaggtgtacaccgcccagaacccctcagcccaggccctaggattggggaagcataattattgcaggaatcccgatggcgacgccaagccatggtgccacgtgctgaagaatcggcggctgacgtgggagtactgcgatgttccaagttgttcaacttgtggcctgagacagtattcccaacctcagttcagaattaagggaggccttttcgccgacattgcgtcccatccctggcaggcagctattttcgcaaaacaccgtcggtcccccggtgaacgctttctgtgtggaggcatcctgatctcatcatgctggatcctcagcgccgctcactgctttcaggaacggttcccacctcatcacctcaccgtgattttgggccgtacttacagggtggtgcctggtgaggaggaacagaagttcgaggtagagaagtacatcgtgcataaggagtttgatgatgatacgtacgataacgacattgctctcctgcaattgaagtcagattcttctagatgtgctcaagaaagctcagtcgttagaacagtctgcctgccccctgccgacctgcagttacctgattggaccgaatgtgagctttccggatatggcaaacatgaagcgctctcccccttttactcagagcgtctaaaggaagcccacgtgaggttgtacccttcctctaggtgcacatctcagcaccttctcaacaggactgtaacagataacatgctgtgcgctggagatacccggtcaggaggccctcaggccaacttgcacgatgcttgtcaaggggacagtggcgggcctcttgtgtgtctcaatgacggccgcatgacactggtagggatcatcagctggggccttggatgcggtcagaaggatgttccaggagtgtatacaaaggtgacgaattacctggactggatcagagacaatatgcgacca

SEQ ID NO: 18331 - DNA, 1686 bp, synthetic construct
  misc_feature 1..1686: note = source = /note="Description of Artificial Sequence: Synthetic coding sequence"
  source 1..1686: mol_type = other DNA
atggacgccatgaagcgcggactgtgctgcgtgttgctcctgtgcggcgccgtctttgtgtcaccctcgcaggagattcatgccagatttaggcggggcgcgcggtcatatcaggtcatctgtcgggatgaaaagacccagatgatctaccaacaacatcagtcgtggctgcgacctgtcctgcgttcgaaccgggtggaatactgctggtgcaactccgggcgggcacagtgccacagcgtgcctgtcaagtcatgctcagagccgaggtgctttaacggaggaacgtgccagcaggcactgtacttctctgacttcgtctgccaatgcccagaaggattcgcaggaaagtgctgtgaaatcgacacccgagcgacgtgctacgaggaccaaggaatcagctaccgcggcacctggagcaccgccgaatcaggagctgagtgcacgaactggaattcgtcagcgctggctcaaaagccatactcagggcgcagaccggacgcgatcaggctgggactggggaaccataactactgtaggaaccccgatcgcgactcaaagccctggtgctacgtctttaaggcaggtaaatactcgtccgaattctgctcaaccccagcctgttccgagggaaactcagactgttacttcggaaatggttccgcatacagaggaacccactcgctgaccgagtcgggagcgtcgtgtctgccgtggaactcgatgatccttattggcaaagtctacacggcacaaaacccgagcgcccaggctctgggccttggaaaacacaactactgccgcaacccagacggggacgccaagccatggtgccatgtgctgaagaatcgccgcctgacctgggagtactgcgacgtgccaagctgttctacctgcggtttgagacagtactcacagccgcaattccgaatcaaaggtggactgttcgcggatatcgcgtcccacccgtggcaagccgctatctttgccaagcatcgcagatcccctggcgaaagatttctgtgtggaggaatcctgatctcttcatgttggatcctttccgcagctcactgcttccaggagagattccctccccatcatctcactgtcatccttggccgcacctaccgcgtggtaccgggcgaggaggaacagaaatttgaggtcgaaaagtatattgtgcacaaggagttcgacgatgatacttatgacaatgatatcgcgctgctgcagttgaagtcggattcgagcaggtgtgcccaggaaagcagcgtggtgcgcaccgtgtgcttgcccccggcagacctccaactgccagattggaccgagtgtgaattgtcgggatatggaaaacatgaagcgctttcaccgttctactcggaaagactgaaggaagcacacgtccgcctctaccccagctcgcgctgtacttcgcaacacctcctgaacagaaccgtcactgataacatgctgtgcgccggagacacccgcagcggaggaccccaggcaaatctccacgacgcttgtcaaggtgattcaggcggaccattggtctgcctgaacgatggtcggatgaccctggtggggatcataagctggggacttggttgcggccagaaagatgtgcctggagtgtacactaaggtgaccaattacctcgattggatcagagacaatatgaggcca

SEQ ID NO: 18332 - DNA, 1686 bp, synthetic construct
  misc_feature 1..1686: note = source = /note="Description of Artificial Sequence: Synthetic coding sequence"
  source 1..1686: mol_type = other DNA
atggatgcgatgaaaaggggcctgtgttgtgtccttctcctgtgtggggccgtgtttgtgagccctagccaagaaatacatgctcggttccgcagaggggcacgatcataccaggttatctgtcgagatgagaagacccagatgatttatcagcagcatcagagttggctgcgtccagtactgcggagtaacagggtcgagtattgctggtgcaattccggaagggcccagtgtcactctgtacctgtgaagtcatgctccgaacccaggtgttttaacggcggaacatgtcagcaggccctgtacttctccgatttcgtctgtcagtgccctgagggattcgcaggaaaatgctgcgaaatagacacaagagccacctgctacgaagaccagggtatctcgtatagagggacatggtcaacagcagaatccggggcggagtgcactaattggaactcatccgccctcgcgcagaagccttactcagggcgtagacctgacgctatcaggttgggtcttggaaatcacaattactgccgaaatcccgatcgggactccaagccctggtgttacgtctttaaagccggcaagtactccagcgaattttgttctacccctgcctgttccgaaggcaattcagactgttattttggcaacgggtccgcatatcgcggtacccactcattgaccgaatccggggcctcatgtttgccctggaatagcatgatcctgatcggaaaggtctacaccgcccagaatccttcagctcaggccctggggctgggaaaacacaattactgccggaatcctgacggcgacgccaagccatggtgccatgtgctgaaaaatcggagattaacgtgggagtattgcgacgttcccagctgtagcacatgtggactaaggcagtacagccagcctcaatttcggataaaagggggactgttcgctgacattgcatcgcatccatggcaggccgccattttcgccaaacataggagatccccaggggagcgttttctctgcgggggaattctgatctcaagctgctggatcctctctgctgcccattgctttcaggagcgcttcccccctcaccacctcacagtcattcttggtcgcacttaccgggtggtgccaggggaagaagaacagaaattcgaagtggagaagtacattgtacacaaagaatttgacgacgacacctacgacaacgatatcgcacttctccagctgaaaagtgatagctccagatgcgcccaggagtcctctgtagtgaggaccgtctgcttgcctcctgcagacctgcaactgcctgactggactgagtgcgagttatccgggtacggcaagcatgaggctctctcccccttttactccgagcgactgaaggaggcgcacgtgagactctacccatcttcacgctgtacctcccaacatcttctcaacagaaccgtgaccgacaatatgctgtgcgccggagacactagaagtgggggcccccaggccaatctacacgacgcttgtcagggcgattctgggggccctctcgtgtgcttgaacgacggacgaatgacactagtggggatcatttcctggggactcggatgtggacagaaagatgtaccgggtgtctacactaaggtcaccaattatctagactggattcgggataacatgcgccct

SEQ ID NO: 18333 - DNA, 1686 bp, synthetic construct
  misc_feature 1..1686: note = source = /note="Description of Artificial Sequence: Synthetic coding sequence"
  source 1..1686: mol_type = other DNA
atggacgccatgaagcgagggttatgctgtgtcctgctcctttgtggcgccgtatttgtcagtccctctcaggagatacatgctcggttcagacggggggctcgcagctaccaggtgatctgccgcgatgaaaagactcagatgatctaccagcagcatcagtcttggctgagacctgtccttcggtctaatagagttgaatactgctggtgtaatagcggacgggcccagtgccacagcgtgccagttaagagttgcagtgagccacgctgcttcaatggtggaacctgtcagcaggccctctacttttccgattttgtgtgtcagtgccccgagggcttcgcaggcaagtgctgcgagatcgatactagggcaacttgctacgaggatcaggggatttcatacagaggcacatggtctaccgccgaatctggggcagaatgcaccaactggaattcaagtgccctggctcagaaaccatacagtggccgtaggccagacgcaattcgactgggcttaggcaatcataactattgtcgaaaccctgatagggacagtaaaccgtggtgctatgttttcaaagcaggtaaatacagctctgagttttgctccactccagcttgtagtgaaggcaattccgactgctatttcggcaacggcagtgcctaccgtggcacccactctctgacagaaagtggagctagctgtctgccctggaatagtatgattctgatcggaaaggtatataccgcccaaaacccgtctgcccaagcgcttgggctggggaagcataattattgccggaacccggacggcgatgctaaaccctggtgccacgtgctgaagaatcggcgcctgacctgggagtattgcgacgtgccctcttgctcaacatgtggtctcaggcagtactcccagcctcagtttcgaatcaagggagggctgttcgccgacatcgcttcacatccgtggcaggctgccatatttgcaaagcaccgccgcagtccgggggagaggttcctgtgcggcgggatactgatttcatcatgttggatcctttcggctgcacattgcttccaggagcgattcccaccacaccatttgactgtgatcttaggtcggacctaccgagtcgtccccggagaggaggaacaaaagttcgaagtagagaagtatattgtccataaggagtttgacgatgatacgtatgacaatgatatcgccctgctacagctgaagagtgacagtagcaggtgtgcacaggaatcctcagtggtcagaactgtctgcctccccccggcggacctgcagcttccagactggaccgagtgtgaactctctggatatggcaaacacgaggctctgtctcctttttatagcgaacgcctgaaggaagctcatgtgaggctgtacccatcatcccgatgtacatcacaacatctcttgaatcgaactgtgacagacaacatgctctgtgccggcgacacccgatcgggcggtccacaagctaaccttcatgacgcatgccagggagactccggagggcccctggtatgccttaacgatggacgcatgactctcgtggggataatctcgtgggggctggggtgtggtcaaaaggatgtccctggggtgtataccaaagtaaccaattacctcgattggatacgcgacaacatgcgacct

SEQ ID NO: 18334 - DNA, 1686 bp, synthetic construct
  misc_feature 1..1686: note = source = /note="Description of Artificial Sequence: Synthetic coding sequence"
  source 1..1686: mol_type = other DNA
atggatgctatgaagagggggctgtgttgcgtgctcctcttgtgtggggccgtcttcgtaagcccaagccaagaaatacatgcacgtttcagacgaggcgctcgcagttaccaggtgatttgtagggacgaaaaaacacaaatgatataccaacagcaccaaagctggctgagacctgtgcttcgctctaatcgcgtagagtattgctggtgcaactccgggcgcgcccagtgtcatagtgtcccagttaagtcctgttctgagccacgctgcttcaacggcggcacatgccagcaggcactctacttttctgacttcgtctgtcagtgtccagaaggcttcgccgggaaatgctgcgagatagataccagagccacctgttacgaggatcagggaatttcgtaccgaggcacatggagcactgctgagtctggggccgaatgcacaaattggaatagctcagcattggcgcagaaaccctactctggccgccgaccggatgccatccgcctgggactgggaaaccacaattattgtaggaacccagacagagactctaaaccatggtgttacgtcttcaaggcggggaagtactccagcgagttctgctctaccccagcctgctccgaagggaattcagattgctacttcggcaatgggtcagcataccgggggacccactccttaactgagtcgggcgcttcatgcttgccttggaacagcatgatcctgatagggaaagtctataccgctcagaatccaagcgcccaggccctgggtctgggcaagcacaattactgcagaaaccccgatggcgacgccaaaccttggtgccacgtgttgaaaaacagaaggcttacatgggaatattgtgacgtacctagttgttccacctgcggcctgcgccagtattcccagccccagttccggattaaaggagggctctttgctgatatcgcctctcatccttggcaggcagctatcttcgcaaaacaccgcagatctccaggggagagatttctatgtgggggcatcctgatttcctcctgctggatcttgagcgccgcccactgttttcaggagcgtttccctccgcaccacctgactgtaattctcgggaggacctaccgagtggtacccggggaagaggagcagaaatttgaggtggaaaagtatattgtgcacaaggagtttgacgacgatacatacgacaatgatatagccttgctgcagttgaaaagcgattccagccgctgcgctcaggaaagcagtgtcgtgaggactgtctgtctccccccagcggacctccagctgcctgactggacagagtgcgagctgtcggggtacggaaagcatgaggccttgagccccttctacagtgagcgtctcaaagaggcgcatgttagactttaccctagctcacggtgtactagccaacatttgttgaaccgaactgtgaccgataatatgctttgtgctggggatacccgctccggcgggccccaggctaacctccacgacgcatgccagggggattctgggggcccactagtatgcttgaatgatggtaggatgactttggtgggaataatctcatggggcttaggttgcggacagaaggacgtgcccggggtatataccaaagttactaattacctcgactggattagagataatatgagaccc

SEQ ID NO: 18335 - DNA, 1686 bp, synthetic construct
  misc_feature 1..1686: note = source = /note="Description of Artificial Sequence: Synthetic coding sequence"
  source 1..1686: mol_type = other DNA
atggatgcaatgaaaagaggactttgttgcgtgctgctgctctgtggcgcggtctttgtttctccgtcccaagagatccacgcccggtttagacgtggtgctaggtcctaccaggtaatttgtagggatgagaaaacacagatgatctatcagcagcatcagagctggctccgcccagtattaaggagcaatcgggttgaatattgttggtgcaattcaggccgcgcccagtgccattccgtgcccgtcaaatcctgctctgagccccggtgcttcaatggcggaacctgtcaacaggcgctgtacttctccgacttcgtgtgtcagtgtcccgagggcttcgccggcaaatgttgcgaaatagatacgcgcgccacttgttatgaagaccaaggtatttcctaccggggcacatggagtaccgcagagtctggggcagaatgcaccaattggaacagcagtgccctcgcacagaagccttacagtgggcgacggccagatgccatccgcctgggccttggcaaccacaattattgtagaaatccagatcgcgatagcaagccctggtgttatgtcttcaaggcgggaaagtattcaagcgagttctgcagcaccccagcttgctctgagggaaattctgactgttatttcggaaacggtagtgcatacaggggaactcacagcctaacagaatccggcgcttcatgtttgccctggaacagtatgatcctaataggcaaggtgtacacagctcaaaacccttccgcccaggcccttggcctagggaaacataactattgtaggaaccctgatggagatgcaaaaccatggtgccacgtgctgaagaaccggaggctgacttgggagtactgtgacgtgcctagttgtagcacatgtgggctgaggcagtacagtcagccacaattcaggataaagggtggcctgtttgctgatattgcctcacatccttggcaggctgccatttttgccaagcatcgtagatcaccaggcgagagattcttgtgtggcggcatcctgataagctcctgctggatcctttccgcggctcactgctttcaggaacggtttcccccacaccatctcaccgttatactaggacgcacatatagagtggtgcccggcgaggaggagcagaagtttgaagtggaaaagtacatagtccataaggagtttgatgatgatacctacgacaatgacatcgctttactacaactcaaaagtgattcttcccgctgtgcgcaagaatcttctgtggtcagaacagtatgccttccccctgctgacctgcagctccctgattggaccgagtgcgagctgtctgggtacggcaaacacgaagctctctctccattctactcagagcgtctgaaagaggcccatgtgcggctgtacccctcttccagatgcacctctcagcacctgttgaaccgcacagttactgataatatgttgtgtgccggtgacacccgtagcggcggtccacaggcaaacctccacgatgcatgccagggcgactcgggcggtcccttggtgtgcttaaatgacgggcgcatgaccttggtgggcatcatatcttgggggctaggctgtggtcagaaggacgtccctggagtttatactaaggtcactaattatcttgattggatcagggataatatgcggccc

SEQ ID NO: 18336 - DNA, 1686 bp, synthetic construct
  misc_feature 1..1686: note = source = /note="Description of Artificial Sequence: Synthetic coding sequence"
  source 1..1686: mol_type = other DNA
atggatgcaatgaaaagaggtttgtgctgtgttcttttactttgtggagctgtttttgtttctccaagtcaagaaatacatgcaagattcagaagaggagctagatcataccaagttatttgtcgagatgaaaaaacacaaatgatatatcaacaacatcaatcttggcttcgacctgtattaagatctaacagagtagaatattgttggtgtaattctggtagagctcaatgtcatagtgttccagttaaatcatgttcagagccaagatgttttaatgggggaacatgtcaacaagctctttattttagtgatttcgtttgtcaatgtccagaaggattcgctggtaagtgttgtgaaattgatactagagcaacttgttatgaagatcaaggaatttcttatcgagggacatggtcaactgctgaatcaggagcagaatgtactaattggaactcatcagctcttgcacaaaaaccatactcaggacgtagacctgatgctattagactaggtttaggaaatcataactactgtagaaatccagatagagactctaaaccttggtgttatgttttcaaggcaggaaaatattcatcagaattttgcagcactcctgcttgtagtgaaggtaattctgattgttatttcggtaatggaagtgcttatagaggtacacattcattaacagagtcaggtgcaagttgtttaccatggaattcaatgattttaattggtaaagtttatactgcacaaaatccatcagcacaagcacttggattgggaaaacataattattgccgtaatccagatggtgatgcaaaaccatggtgtcatgttcttaaaaatcgtagattaacttgggaatattgtgatgttccaagttgttctacatgtggattaaggcaatattctcaaccacaattcagaattaaaggaggacttttcgctgatattgcttctcatccatggcaagcagctatttttgcaaaacatcgtagatctccaggagaacgattcttatgcggaggtattttaatttcatcttgttggattttatcagcagcacactgttttcaagaaaggtttccaccacatcatttaactgtaattttaggtcgtacatatagagttgtacctggtgaagaagaacaaaaatttgaagtcgaaaaatatatagtacataaagaatttgatgatgatacgtatgataatgatattgctcttttacaacttaaatcagattctagtcgttgtgctcaagaatcttcagttgttagaactgtttgcttaccaccagctgatcttcaattacctgattggacagaatgtgaactttcaggatacggaaaacatgaagctttaagtccattttattcagaaagattaaaagaagctcatgttagattatatccttcttctcgatgtactagtcaacatcttttaaatagaacagttacagataatatgctttgtgcaggtgatacaagatctggtggaccacaagctaatttacatgacgcatgtcaaggagattcaggaggtccacttgtttgtcttaatgacggaagaatgacacttgttggaataatttcatggggattagggtgtggacaaaaagatgtcccaggagtttatactaaagtaacaaattatttagattggattagagataatatgagacca

SEQ ID NO: 18337 - DNA, 1686 bp, synthetic construct
  misc_feature 1..1686: note = source = /note="Description of Artificial Sequence: Synthetic coding sequence"
  source 1..1686: mol_type = other DNA
atggatgccatgaagaggggcctgtgctgcgtacttctactgtgtggggctgtgttcgtgtcaccatcacaggaaatccacgcccgattcagaagaggggcccgctcgtaccaggtcatctgtcgagatgaaaagacgcaaatgatttaccagcagcatcagagttggcttcgccctgtcctcaggtccaacagagtggagtattgctggtgtaatagcgggcgtgcccagtgccactcggtgccggtcaagtcttgcagtgaaccaaggtgctttaacggcggcacatgccagcaagctttgtacttctctgattttgtttgtcaatgtcctgaaggattcgctggaaagtgctgtgaaattgacactcgagcgacatgttatgaggaccagggcatatcctaccgggggacatggtctacagcagagtccggagcagaatgtaccaattggaacagtagtgctttagcacagaagccatactccgggcgcaggcctgacgcaattcgccttggactcggcaaccataactactgcagaaaccccgatcgggactccaaaccttggtgctatgtcttcaaagcaggcaagtatagcagtgagttttgcagtacgcctgcatgtagcgagggcaacagcgattgttatttcgggaatgggagcgcatacagaggaactcacagtcttactgagtcgggcgctagctgtcttccgtggaactccatgatcctgattgggaaggtgtacaccgcccaaaatccctcagcccaggcactgggactcggcaaacataactattgccgaaacccagatggggatgccaagccttggtgccatgtgctgaagaaccgtcgcctgacatgggagtactgtgatgtaccgagctgtagtacgtgcggactgcggcagtacagccagcctcagtttcggataaaggggggcttatttgcagatatagcctctcatccatggcaggctgcgatcttcgccaaacataggcgtagtccaggcgagagatttttatgcggcggcatcctaatatcttcatgctggatcctatcagccgctcactgtttccaggaaagatttcccccacatcaccttacagtcatcctgggcaggacctatcgggtagtacccggggaagaagagcagaagttcgaagtagagaagtatatcgtgcacaaggagtttgacgacgatacgtacgacaatgacatcgcacttcttcagctgaaaagtgattcttcaagatgtgcacaggagtcctctgtggtaaggacagtgtgtctaccgcctgcagatctacagctacccgattggaccgagtgcgaactgtccggatacggaaagcacgaggctctatcacccttttacagtgagagattgaaggaagctcacgtgaggttgtacccttcttcacgatgcacctctcagcatcttctaaaccggaccgtgactgacaacatgctgtgcgctggggacacccgctccggggggccccaggcaaacttgcacgatgcatgtcagggcgatagcgggggcccactggtatgtctgaatgatggccgaatgacgctcgtgggcattatatcatggggcctaggctgcggacagaaggatgtccctggcgtgtatacaaaagttacgaactacctggactggataagagataatatgcgtccg

SEQ ID NO: 18338 - DNA, 1686 bp, synthetic construct
  misc_feature 1..1686: note = source = /note="Description of Artificial Sequence: Synthetic coding sequence"
  source 1..1686: mol_type = other DNA
atggacgccatgaaaagaggactgtgttgtgtgctgctgctgtgcggagccgtgttcgtgagcccgtcacaggagatccacgcaagattccggcggggggcccgctcataccaggttatctgccgcgatgagaaaacccaaatgatctaccagcagcaccaatcgtggcttagaccggtgttgaggtccaatagagtggaatactgctggtgtaactcgggacgcgcacagtgccactccgtcccagtgaaaagctgctcggagccacgttgtttcaatggaggcacctgtcaacaggcactctacttctcggacttcgtctgccagtgtccagagggcttcgctggaaaatgttgcgaaatcgacacccgggctacttgctacgaagatcagggaatctcgtaccggggcacttggtcaactgcagaatccggagctgaatgcaccaactggaactcctccgccttggcccagaagccttactccggtcgtagacctgacgcgatccgcctgggactcggaaaccacaattactgcaggaatccggatcgggactcaaagccgtggtgctacgtgttcaaggctggtaagtactcatcggagttttgctcaactcctgcatgcagcgaagggaacagcgattgctatttcggaaatgggtcggcctaccggggaactcattcccttaccgagtcaggcgcctcctgcctgccatggaacagcatgatcctgatcggaaaggtgtatactgcacagaaccctagcgcacaggcattgggactgggaaagcacaactactgcaggaacccggacggagatgcaaagccctggtgccatgtgctgaagaaccggcggttgacctgggaatactgcgacgtgccctcctgctctacctgcggactcaggcagtactctcagccacagttccggattaaaggaggattgttcgccgatatcgcttcgcacccatggcaggccgctatcttcgcgaagcacagaaggagcccaggggaacgtttcctgtgtggaggcattcttatttcgtcgtgctggattctcagtgccgctcattgttttcaggaacgcttcccgccacatcatctgaccgtgatcttgggacgcacctaccgggtcgtcccaggagaggaagaacaaaagtttgaggtggaaaagtatatcgtccataaagagtttgatgatgatacctacgacaatgatatcgctcttctccagctgaagtcggactcaagccggtgcgcccaagaatcctcggtggtccgcactgtctgtttgccgccggccgacctgcagctgccggactggaccgagtgtgaactgtccggatacggaaagcatgaagcactgagcccgttctattccgaacggctgaaagaggcccacgtgcgcttgtacccgtcgagccgatgtacttcgcagcacctcctgaaccgaacggtcaccgataacatgctttgcgccggagataccaggtcaggaggtccccaggccaacctgcacgatgcgtgccagggagactcaggaggcccgcttgtctgcctgaatgacggccgcatgactctggtcggaatcatctcgtggggactgggctgcggtcaaaaggacgtaccgggagtgtacaccaaggtgaccaattacctggactggatcagagataacatgcgcccg

SEQ ID NO: 18339 - DNA, 1686 bp, synthetic construct
  misc_feature 1..1686: note = source = /note="Description of Artificial Sequence: Synthetic coding sequence"
  source 1..1686: mol_type = other DNA
atggacgcgatgaaacgcgggctctgttgcgtgctgctgctctgtggagcagtgtttgtgtccccatcccaggaaatacacgctcgctttcggagaggggcacgttcctaccaggtcatttgtagggacgaaaaaacccagatgatctaccagcagcatcagtcctggctgcgtcctgtgctcagatcgaatagagtggagtactgttggtgtaattcggggcgagcacagtgccattcggtgccggtgaagagctgttcagaaccacggtgttttaacggaggtacttgtcaacaagcactttacttctcggatttcgtgtgtcaatgccccgagggatttgccgggaaatgctgtgagattgatacccgagctacctgctacgaagatcaaggaatctcgtaccgaggaacttggtcgaccgccgaatcgggggcagaatgtaccaactggaactcttcagcactcgcccaaaagccatacagcgggagacgacctgatgcgatacgtctcggccttggtaaccacaattactgcagaaacccagacagagattcaaaaccttggtgctacgtgttcaaggcaggaaagtattcgtcagaattttgttcgactccagcatgttccgagggaaactcagattgctactttggtaatggttcagcgtaccgtggaacccatagcctgactgaatccggggcaagctgcctcccgtggaactccatgatccttattggtaaggtgtatactgcacagaacccctccgcccaggcacttggactgggtaagcacaactattgtagaaatcctgatggcgacgcgaagccttggtgtcatgtgcttaagaatcgacggctgacgtgggagtactgtgatgtgccctcctgctccacttgcggactgaggcaatactcgcagccccagtttcggattaagggaggcctctttgctgatatcgcatcacacccttggcaagcagcaatcttcgcaaagcaccgcaggtcgcccggagagagattcctgtgtgggggcattctcatctcctcctgctggattttgtcagccgcacactgttttcaagaacggttcccgccacatcatcttactgtcatactgggtcgcacctacagagtggtcccgggggaggaggaacagaagttcgaggtcgaaaagtatattgtgcataaagagttcgatgacgatacctacgacaacgatattgcgctgctgcaacttaagtcggactcctcccgctgcgcccaagaatcctcagttgtgagaactgtgtgtctgcctcctgccgatctgcaactgcctgattggactgaatgtgagctgtcggggtatgggaagcatgaagccctcagcccattttactccgagaggcttaaagaagcccatgtgaggctctacccatcaagccggtgtacttctcaacatcttcttaacagaacggttaccgacaatatgctttgcgcgggtgatactcgctcgggagggccacaggccaatctccatgatgcctgccaaggagattcggggggaccccttgtgtgcctgaacgacggccggatgaccctcgtcggtatcatttcctggggtcttggatgtggacaaaaagatgtgcccggcgtttacaccaaggtgaccaattaccttgattggattagggataacatgcgccca

SEQ ID NO: 18340 - DNA, 1686 bp, synthetic construct
  misc_feature 1..1686: note = source = /note="Description of Artificial Sequence: Synthetic coding sequence"
  source 1..1686: mol_type = other DNA
atggatgccatgaagagggggctgtgctgcgtgcttttgctgtgcggcgcagtgtttgtgagccccagtcaggagatccacgcccgctttcggcgcggcgcaaggagttaccaggtcatatgcagggacgagaagacccagatgatctaccagcagcaccaatcttggctacgccccgtccttcgttccaacagggtagagtattgctggtgtaattccggcagagcgcagtgtcactccgtacccgtcaagtcctgctcagaacctcgctgtttcaacggcggtacgtgccaacaggcgctttatttctccgattttgtatgccagtgcccagagggattcgcagggaaatgctgcgagattgatacaagagccacatgctatgaggatcagggcattagttacaggggcacatggagtaccgctgagtcaggagctgaatgcacaaactggaattcttccgcgttggctcaaaaaccttattcgggtcgtaggcccgatgccattcgcctgggtctaggtaatcataactattgccggaaccccgatagagactccaagccctggtgctacgttttcaaagccggtaaatactccagcgagttttgttcaacccctgcctgttccgagggcaatagcgattgttactttggcaacggctccgcctacagggggactcacagcctgaccgagtctggcgcctcctgccttccatggaatagtatgatcctcataggcaaagtctacaccgcgcagaatccttccgcccaggctctgggcctcgggaagcataattattgtagaaatcccgatggtgacgcaaaaccatggtgtcatgtgctgaagaataggcgcctgacatgggaatactgcgacgtcccctcttgctcaacctgcggactgcggcagtatagtcagccccaattccgcataaaaggcgggctgtttgctgacatcgcttcccacccttggcaagccgctatctttgcaaagcatagacgcagccccggggagcggtttctttgtggcggcattctgatttcttcttgttggatcctctctgccgcccactgcttccaggaacggtttccaccacatcaccttacagtgatcctaggtagaacgtaccgcgtggtaccaggcgaggaagagcaaaaattcgaggttgagaaatacatcgtccacaaggaatttgacgacgatacctatgacaatgatatcgctctgctgcagctgaagagcgactcaagccgctgtgcccaggaaagcagcgtggtgcgtacagtgtgcctccctccagctgacctgcaactgcctgattggacagaatgcgaactgtcgggatatgggaaacacgaagctttgtctcccttttactctgagaggctgaaagaagcccacgttagactgtacccttcaagccggtgcacatcccagcacctccttaacagaaccgtcacagacaacatgctgtgcgccggggacacgcgttcaggcggaccacaggccaatttgcatgatgcttgtcagggcgattctggaggcccgcttgtgtgccttaatgatggccgtatgactctggtgggaataatctcttggggactcggatgcgggcaaaaggacgttcccggggtgtataccaaagtgaccaattatttggattggattcgcgacaatatgcgcccg

SEQ ID NO: 18341 - DNA, 1686 bp, synthetic construct
  misc_feature 1..1686: note = source = /note="Description of Artificial Sequence: Synthetic coding sequence"
  source 1..1686: mol_type = other DNA
atggatgcaatgaagcggggcctttgttgtgtgctccttctgtgtggggcagtctttgtctccccttcccaagaaatccatgcacgcttcagacgcggagcccggtcataccaagtgatttgccgcgacgaaaagacgcagatgatctatcagcaacaccaaagctggctgcgcccggtgctgagatcgaacagagtggaatactgctggtgcaactcgggtcgtgcgcagtgtcattccgtacccgtcaagtcatgctcggaacctcgctgctttaacggaggtacttgccagcaagctctctactttagcgactttgtgtgtcagtgtcccgagggcttcgccggtaaatgctgcgaaatagatacgcgagccacttgttacgaagatcaaggcatctcatacagaggaacgtggtcaacggcggaaagcggtgctgagtgtaccaactggaactcaagcgcacttgcacaaaagccctactccggtaggcgcccagacgccatcagactgggactgggaaaccacaactattgtcggaatcctgatcgtgactcgaagccgtggtgttacgtgttcaaggcaggcaagtacagctccgagttttgttccaccccagcatgttccgaaggtaattccgattgttacttcgggaacggcagcgcctaccgcggaacccattcacttactgaatccggtgcatcttgtctcccatggaactcgatgattttgataggaaaggtctacaccgcacaaaacccttcggcgcaggcactgggtctgggaaagcacaattactgccgtaatcctgatggcgatgcaaagccctggtgccatgttttgaagaatagacgtcttacctgggaatactgcgatgttccttcgtgctccacctgtggtctgagacagtactcgcagccccaatttcggattaagggaggtctgttcgctgatattgcctcccatccttggcaagcagcaatcttcgccaagcatagacgcagccctggcgaaagatttctctgtggagggattcttatttcttcctgttggatcctgagcgcagcacactgctttcaagaacgttttcccccacaccaccttacggtgattctgggtcgaacctacagggttgtgcctggcgaagaagaacaaaagttcgaggtcgaaaagtacattgtccataaagagttcgatgatgatacctatgacaatgacatagctctcctgcagctgaaatcggatagcagccgctgcgcgcaagaaagctcggttgtgcgcaccgtgtgtctgccgcctgcagatttgcaacttccggactggactgaatgtgagcttagcggatacggaaaacatgaggcgctttcccccttttacagcgaacgcctgaaagaggcgcacgtgcgtctgtatccttcttcgcgatgtacgtcacaacatctcctgaaccgaaccgtgaccgataacatgctgtgcgccggagacactcggtctggtgggcctcaggctaatcttcacgacgcgtgtcaaggagactcgggtggaccgctggtgtgcctcaatgatggacggatgactcttgtgggtatcatctcgtggggactgggctgcgggcagaaggatgtgcctggtgtgtacaccaaggtgactaattacctcgattggatccgcgacaacatgcgacct

SEQ ID NO: 18342 - DNA, 1686 bp, synthetic construct
  misc_feature 1..1686: note = source = /note="Description of Artificial Sequence: Synthetic coding sequence"
  source 1..1686: mol_type = other DNA
atggatgccatgaagcgggggctgtgttgcgttctgctcctgtgcggagcagtatttgtctcaccgtcacaagaaatccatgcaagattccgcaggggtgcgcggtcataccaggtgatctgtcgagacgaaaagacccagatgatctatcagcagcaccagagctggctccgacctgtgctccggtctaaccgggtcgaatactgttggtgcaattcgggtagagcccagtgccacagcgtgccggtgaaatcatgctcggagccacgctgcttcaacggcggaacctgccaacaggccctttactttagcgacttcgtctgtcaatgccctgagggatttgctggcaagtgttgtgagatcgatacccgcgctacctgctacgaggaccagggcatttcctacaggggtacctggtccaccgcagaatcaggcgcggagtgtaccaactggaactcctcagcgttggctcagaagccgtacagcggacgacgtcctgatgccatcagacttggactggggaaccacaattactgtcgaaacccagacagagatagcaagccatggtgctacgtctttaaggctggaaagtattcatccgaattctgctctacccctgcgtgctcagaaggaaactcagactgctactttggtaacggttccgcctaccgcgggacccacagcctgactgaaagcggcgccagctgcctcccgtggaactcgatgatcctgattggtaaggtgtacaccgcgcagaacccatcagcacaagcattgggcctcggcaagcacaattactgccggaaccctgacggagacgcgaaaccatggtgccacgtgctcaaaaatcggcgcctgacttgggaatactgtgatgtgccgtcgtgttcgacctgcggtctgcgccagtactcacaacctcagttccgaatcaagggtggcctcttcgcagatatcgcatcgcacccatggcaggcagctattttcgctaagcatagacggtcgcccggtgagcggttcctctgcggaggaattctgatctcatcgtgttggatcttgagcgccgcccattgcttccaagagcgcttcccgcctcaccatctcacggtgatcctggggcggacctacagagtggtgcctggagaagaagaacaaaagtttgaagtcgagaagtacatcgttcacaaggagttcgatgacgatacttacgataacgacattgccctgctgcaactgaagtccgatagctcgcgctgcgcgcaggaatcatccgtggtgagaacggtctgcctcccgccggccgacctccagttgcccgactggaccgaatgtgagctcagcggctacggaaaacatgaagcgctctcccccttctactccgagcgcctcaaggaagcccacgtccggctgtacccatcatccaggtgcacttcacagcacctgttgaaccggactgtcactgacaacatgctgtgtgctggagacacccggtcgggaggaccgcaggcgaatctgcatgacgcttgccaaggcgattccggcggtcctctcgtctgcctgaatgatggccggatgactctggtgggtatcatctcttggggcctggggtgcggacaaaaagatgtgccgggagtgtacacgaaagtcactaattacctggactggatccgcgacaatatgcgcccc

SEQ ID NO: 18343 - DNA, 1686 bp, synthetic construct
  misc_feature 1..1686: note = source = /note="Description of Artificial Sequence: Synthetic coding sequence"
  source 1..1686: mol_type = other DNA
atggatgctatgaaaagggggttgtgttgtgtcctcctgctgtgtggagcagtgtttgtgagcccatcacaggagattcatgctcggtttcgccgaggtgcccggtcttaccaggtgatttgcagagatgaaaagacccaaatgatttaccagcagcatcaatcctggcttcgtccggtgctccgcagcaatcgggtcgaatactgttggtgcaattccggtcgcgcgcagtgccacagcgtccctgttaagtcgtgttccgagccgcggtgcttcaatggaggcacctgtcagcaggcactttacttttcagacttcgtgtgccaatgtcccgaagggtttgccggcaagtgctgtgaaattgacactagggccacctgctacgaagatcagggtatctcgtatagggggacttggtcgaccgctgagagcggagccgaatgtacgaattggaacagcagcgcacttgcacaaaagccctactcgggtaggcggcctgatgccatccgacttgggctcggcaaccataactactgcaggaatcctgaccgggatagcaagccctggtgctacgtctttaaggcgggtaaatactcgtcggaattttgctcgactcctgcctgttccgaaggaaactcggattgttactttgggaacggttcagcatatcgcggtacccattccttgactgagtcaggagcatcgtgtctgccttggaactctatgatactgattgggaaggtgtacactgcacaaaatccaagcgcgcaagcactcggactggggaaacataactactgtcgcaacccagatggtgacgcgaaaccttggtgtcatgtgcttaagaaccgacgcctgacttgggaatactgtgacgttccatcctgtagcacttgcggacttcggcaatactcccagcctcaattccggattaagggcgggctgttcgcggatattgcgtcgcatccttggcaagccgcaatctttgcaaaacaccggcgttcccctggcgagcgatttctctgcggaggtattctgatttcatcctgctggatcctgtccgcagcacattgtttccaagaaaggtttcctccccatcatctgaccgtcatcctgggccgcacgtatcgcgtggttccaggggaggaagaacaaaagttcgaagtggagaaatacatcgtccacaaggaatttgatgatgatacctacgataacgacattgctctgctgcaacttaagtcggactcttcaagatgcgcacaagagagctcggttgtgaggactgtgtgtctcccacccgccgatctgcagctgcctgactggaccgaatgtgaacttagcggctacggcaagcatgaagccctttcccctttctactcggaaagacttaaggaagcgcacgtgaggctctacccttcttcccgctgtacttcccaacacctcctcaaccggacggtgaccgacaatatgctttgtgcaggagatacccgctccggtggacctcaggcgaatcttcatgatgcatgtcaaggtgactccggaggtccactggtctgtcttaatgacggtcgtatgactctggtcggaatcatctcatggggacttggatgtggacagaaggatgtgccaggagtctacaccaaagtgaccaactacctggattggatccgcgacaacatgcgccca

SEQ ID NO: 18344 - DNA, 1686 bp, synthetic construct
  misc_feature 1..1686: note = source = /note="Description of Artificial Sequence: Synthetic coding sequence"
  source 1..1686: mol_type = other DNA
atggatgccatgaaaaggggactgtgctgcgttctgctcctatgtggagctgttttcgtgagtcccagccaggagatacacgcccgctttcgaagaggggcaaggtcttaccaggtgatctgcagagacgagaagacacaaatgatctatcagcagcaccagtcctggctgcggcccgttctacggagtaatcgtgtggaatattgctggtgcaattccgggagagcccaatgtcacagtgtccctgtgaagtcctgtagcgaaccacggtgtttcaatgggggcacctgtcagcaggccctctatttcagcgatttcgtctgtcagtgtcctgagggctttgccggcaagtgctgtgaaattgacacacgagctacttgttatgaagaccagggaatcagctaccgcggcacttggagtactgcagagtcaggagctgaatgcaccaattggaattccagcgctctagcccagaagccatactccgggcgccgtcctgacgctattaggctgggattggggaaccataactactgcagaaacccagatagagattctaaaccctggtgctacgtgttcaaggccgggaagtactcatccgagttctgcagtacaccagcttgcagcgaagggaactctgactgctactttgggaatggcagtgcatatcggggcactcactctttgactgagagtggcgcctcttgcttgccctggaactctatgatattaatagggaaagtctacaccgctcaaaacccttccgcccaggcactggggctgggcaaacataattactgccggaaccccgacggagacgcaaagccctggtgtcacgtcctgaagaaccgacggctcacatgggagtactgcgatgtgccctcttgtagtacctgcggtttacggcagtatagtcagccccagttcaggatcaaaggaggcttgttcgccgacatcgctagccacccttggcaggccgctatctttgcaaagcaccgacggagccccggggaacggttcttgtgtggcggcatactgattagttcctgctggatactgtcagcagcccactgtttccaggaacgattcccaccccatcacttaacagtcattctggggaggacttatagagtcgtcccaggagaagaggaacagaagttcgaggtcgaaaaatacatagtgcacaaggagttcgacgacgacacctatgataacgacatcgcattgctgcagctgaaatctgattcctccaggtgcgcccaagagtctagtgtcgtaagaacagtttgtctaccacccgccgacctccaactacccgattggactgaatgtgaattgagcggctatgggaaacacgaggccctgagccccttctactctgagcgtctgaaagaagctcacgttcggctgtacccctcatctaggtgcacttctcagcacctgctaaatcggactgtgactgacaacatgctgtgtgcaggggataccagaagtggcggcccgcaggccaacctgcacgacgcttgccagggcgattctggcggtcctctggtgtgcctgaatgacggtaggatgacacttgttggcataataagctggggcctgggctgcggacagaaagacgtcccaggagtgtatactaaagtgaccaattacctggactggataagggataacatgcgccct

SEQ ID NO: 18345 - DNA, 1686 bp, synthetic construct
  misc_feature 1..1686: note = source = /note="Description of Artificial Sequence: Synthetic coding sequence"
  source 1..1686: mol_type = other DNA
atggatgcaatgaaacgaggtctttgttgcgtgcttctcctgtgcggagccgtattcgtctcccccagccaggagatccacgcgcgtttcagaagaggagcccgatcctaccaggtgatttgccgagacgagaaaacgcaaatgatttatcaacagcaccagtcttggctcaggcccgtgctacgctccaacagagtggaatattgctggtgcaactccggcagggcccagtgccacagtgtgcctgtgaaaagctgcagcgagcccagatgcttcaatggcggcacttgtcaacaggcattgtacttttccgacttcgtgtgtcagtgccccgagggctttgctggaaagtgctgcgagatcgataccagggccacatgctatgaagaccagggaatttcttataggggcacatggtcaacagcagaatcaggcgctgagtgtactaactggaattcatcagcacttgctcaaaagccctactccgggcgtagaccagatgcaataaggctcggtctcggcaatcacaattactgtcgaaacccagacagagattccaagccatggtgctacgtgttcaaggccggaaaatactcttccgagttttgtagtacccctgcatgcagtgagggtaatagcgactgctacttcggcaacggctccgcataccgtggcacacactcactcactgagtccggcgcctcatgcctaccatggaatagcatgattctgatcggtaaagtgtatactgcacagaaccccagcgcacaggccttggggctgggaaagcataactactgcaggaaccctgacggcgatgcaaagccctggtgccatgttctgaagaaccggaggttgacttgggagtactgcgatgtgcccagctgctcaacttgtgggctaagacagtacagccagccacagttccgtatcaagggagggctattcgctgatatcgcatcccacccttggcaggcagcgatctttgccaagcaccgcagatctccgggagagcgctttctgtgtggtggcatcctgatttcctcctgttggatattatctgcggctcactgttttcaggagagatttcccccacaccacctcacagtcatcttgggccggacgtaccgagtcgtccccggtgaagaggaacaaaagttcgaggtcgaaaagtacatcgtacataaggagtttgacgatgatacctatgataacgatatcgcactacttcaactcaaatctgattctagccggtgtgcacaggaaagctcagttgtcagaacagtttgcctccccccagcagatctccaactgcctgattggaccgaatgtgagttaagcggatacggcaagcacgaagctctctcccccttctacagcgaacgcttaaaagaggcccatgtgaggctctatccttcctctcggtgtacttcccagcacctgctgaatagaacagtgaccgacaatatgctttgcgcaggggatacccggtcgggaggtcctcaggctaacttgcacgatgcatgtcagggcgactccggaggaccgctcgtttgcctgaatgacggtaggatgacactggttggtatcatttcttggggtctcggctgcggccaaaaggatgtgcctggtgtttacacaaaagtgaccaactacctggactggatccgggataacatgcggccc

SEQ ID NO: 18346 - DNA, 1686 bp, synthetic construct
  misc_feature 1..1686: note = source = /note="Description of Artificial Sequence: Synthetic coding sequence"
  source 1..1686: mol_type = other DNA
atggatgccatgaagagggggctgtgctgcgtgctcttgttgtgtggagccgtttttgtctccccgtcccaagagattcacgctcggttccgtcgcggcgctcgctcctaccaagtgatttgcagggacgagaaaactcagatgatctatcagcaacatcaatcttggttacggcctgttcttcgatcgaatcgtgtcgaatattgttggtgtaactcgggccgtgcacaatgccactctgtcccagttaagtcgtgctccgagccccgctgcttcaacggggggacctgccagcaagctctttacttttcggactttgtctgccagtgtccggagggtttcgcgggcaagtgctgcgagattgataccagggcaacctgctatgaagatcagggtatcagttataggggcacgtggagtactgcagaatcgggagctgaatgtacaaattggaactcatccgccttggcgcaaaagccttattcgggaagacggcccgacgctataaggctgggtcttggcaaccataactactgtaggaaccctgatagggatagcaaaccctggtgttatgtattcaaggcaggcaagtacagttctgagttctgtagcactccggcgtgcagcgagggcaacagtgactgctacttcggaaacggttcagcgtatcgcggtactcattcgttaacagagtcaggtgcttcgtgcttgccctggaattccatgatattaatcggcaaagtctacactgctcagaatccttccgctcaagcgttgggtttgggtaagcacaactactgtcgaaacccggacggcgatgcgaagccatggtgtcatgtactcaagaaccgcaggctcacctgggaatattgcgacgtgccatcatgcagcacatgcggcctccgtcagtattcacaaccgcagttccgcattaaaggagggctattcgctgatatcgcaagtcacccctggcaagcggccatcttcgcaaagcatcgtcgtagtcctggagagaggtttctgtgtggcggaatcttaatctcctcatgttggatcctgagtgctgctcactgttttcaagagaggtttcctcctcatcacttgaccgtcatcttgggccgcacatacagagtagttcctggagaggaagaacaaaagttcgaggtggaaaagtatattgtgcataaggagttcgatgacgatacttatgataacgatatcgcgttgttacagctgaaaagcgactcgtctaggtgtgcccaagaatccagcgttgttcgtacagtttgtctcccccctgctgatttacagctgccagactggacagagtgtgaactgagtgggtatggaaagcacgaggcgttgagcccgttctatagcgagcgtctaaaggaagcacacgttcggctctacccaagcagtcggtgtaccagtcagcaccttctcaaccgtactgtcactgacaacatgttgtgtgccggggacacccgaagtggcggtccacaagcgaacctccatgatgcctgccagggcgacagcggcggtcctttagtctgtttgaatgatggccgcatgactctggtaggaattattagctgggggttaggttgcggtcaaaaggatgtgccaggggtctataccaaggttacgaactaccttgactggattcgcgataacatgcgtccg

SEQ ID NO: 18347 - DNA, 1686 bp, synthetic construct
  misc_feature 1..1686: note = source = /note="Description of Artificial Sequence: Synthetic coding sequence"
  source 1..1686: mol_type = other DNA
atggatgccatgaagcgggggctgtgctgtgtgctcctgctgtgcggggcagtgttcgtgtctccaagccaggagatccatgcacggtttcggagaggtgctagatcatatcaggtgatctgtcgggatgaaaaaacccaaatgatctaccaacagcaccagtcctggctgagaccagtcttgaggtccaatcgcgtggaatattgttggtgcaattctggccgcgcccagtgccattctgtgccagtcaagtcatgttccgagcctcgatgctttaatggtgggacgtgtcagcaggctctgtacttttctgacttcgtttgtcagtgccctgaggggtttgccgggaaatgctgcgaaatagataccagagccacgtgctatgaagatcagggcatttcctaccggggcacatggagcaccgccgaatccggggctgaatgtacaaactggaattcctctgccctggcacagaagccctattcaggacgcaggcctgatgcaatcagactcggactgggaaaccacaattattgcaggaatccagatagagactccaaaccttggtgctacgtcttcaaggctgggaaatacagctcagaattttgtagcaccccagcttgcagtgaagggaacagcgactgttatttcggcaatggtagcgcctatcgagggacgcacagcctgacggaatccggtgcctcctgtctgccctggaacagcatgatcctcattggcaaagtctacactgcccagaacccgagcgcccaagccttgggcttgggcaagcacaactattgtcgcaacccagacggcgatgccaaaccctggtgccacgtgttgaagaacagaaggctgacctgggaatactgcgatgtgccctcctgcagcacatgcggccttaggcagtatagccagccacaatttcgaatcaaggggggactcttcgccgacatcgccagccatccctggcaagccgccattttcgcgaaacaccgacgctctccaggagagagattcctttgtgggggaattctgatcagcagctgttggatcctgagtgcggcccactgtttccaggaaagattccctccacatcatctgacagttattttgggaagaacatacagagtggtgccgggcgaagaggagcagaagtttgaggtagaaaagtacattgtgcacaaagaattcgatgatgatacctacgacaacgacatagccctcttgcaattgaaaagtgatagctctaggtgtgcccaggagtctagcgtggttaggaccgtgtgccttcctcccgccgatttgcagctcccagactggaccgagtgtgagctttccggctatgggaagcatgaggccctgtcccctttttattccgaaaggcttaaggaagcccatgtgagactctacccctccagcaggtgtacaagtcagcacctgttgaaccggacggttacagataatatgctttgcgcgggtgacacccgctctggtgggccacaagcaaaccttcatgacgcgtgccagggcgatagcggtggtcctctggtctgtctcaacgacggcaggatgactctggtgggaatcataagttggggactggggtgcggccagaaggacgttcccggggtctacacaaaggttaccaattacctggactggattcgcgataacatgaggcct

SEQ ID NO: 18348 - DNA, 1686 bp, synthetic construct
  misc_feature 1..1686: note = source = /note="Description of Artificial Sequence: Synthetic coding sequence"
  source 1..1686: mol_type = other DNA
atggatgcgatgaaaagaggtctttgctgtgtgcttctgctgtgtggtgctgtgttcgtctccccctctcaagaaatccacgcacggttccggcggggagcacgctcctaccaggtcatctgcagagacgaaaagacccagatgatctaccagcagcaccagtcgtggctgcggccggtgttgagatcgaaccgagtggaatactgctggtgcaattcaggacgggcacagtgccactccgtacccgttaagtcatgttctgaaccaaggtgctttaacggtggaacttgtcaacaagcactctatttctccgatttcgtctgccaatgcccagaaggattcgccggaaaatgttgtgaaatcgatactcgcgcgacctgctacgaagatcagggcatcagctaccggggaacctggtccactgcggaatcgggagccgagtgtacgaattggaactcgtcggctctcgcgcagaagccgtacagcggccgtagacccgacgcgatccgccttgggctgggcaatcataactactgcagaaatcccgatcgcgacagcaagccctggtgctacgtgttcaaggccggtaaatacagcagcgagttctgctccacccccgcctgcagcgaaggcaacagtgactgctactttggcaacgggtccgcttacaggggcactcattccctcaccgaaagcggagcatcgtgcctgccgtggaactcgatgatcctcattggaaaggtctacacggcacagaatccgagcgctcaagcgctcgggttggggaagcacaactactgccgcaatcccgatggagatgcaaaaccgtggtgccatgtcctgaagaaccggaggctgacttgggaatactgcgacgtcccgtcgtgctcgacttgcggattgagacaatactcgcaaccgcagttcaggatcaagggaggactctttgcagacattgcgtcacatccgtggcaggcggcaatcttcgccaagcaccgccgctcgccaggggagagatttttgtgcggcggtatcctcatctcaagctgttggatcctctcggccgcacactgtttccaggagcgctttccgcctcatcatctgacggtcatcctgggccggacctaccgcgtggtgccgggagaggaagagcagaagtttgaagtggaaaagtacattgtgcacaaggaattcgatgacgatacttacgacaacgatattgccctcctccagttgaaaagcgactcctcgcgatgcgctcaagaatcatctgtcgtgcgcactgtgtgcctcccgccagcagacttgcagctccccgattggaccgagtgcgagctgtctgggtacggaaaacacgaagcactgtcccccttctattccgaaagacttaaggaagctcacgtccgcctgtacccatcctcgcggtgcacctcgcagcacctgttgaatcgcactgtgactgacaacatgctgtgtgcaggggacactcggtcgggagggcctcaggcaaacctgcacgatgcctgtcaaggagatagcggtggcccgctggtgtgccttaacgacggacgcatgaccctcgtgggaattatcagctggggcctgggatgcggacagaaggacgtgccgggagtgtacactaaggtcaccaactacctggattggatccgggacaatatgcggccg

SEQ ID NO: 18349 - DNA, 1686 bp, synthetic construct
  misc_feature 1..1686: note = source = /note="Description of Artificial Sequence: Synthetic coding sequence"
  source 1..1686: mol_type = other DNA
atggatgctatgaagcgcggactctgctgtgtgctgctgctgtgcggcgcggtgttcgtgtcaccgtcccaggaaatacacgcccgcttccgccgaggagctcggtcttaccaagtcatatgccgggatgaaaaaacgcagatgatctaccaacagcaccagtcatggctgcgcccggtgttgcgcagcaatagagtcgagtactgttggtgcaattccggccgcgctcagtgccactccgtgccagtcaagtcctgttcggaaccgcgctgcttcaatggaggaacttgccagcaggccctctactttagcgattttgtgtgccagtgcccggaagggttcgctggaaaatgttgcgaaatcgatacccgtgccacctgctacgaggaccaaggaatctcataccgcggaacctggagcaccgcagagtcaggcgcggagtgcactaactggaactcctcggccctggcacagaagccatactccggtaggcggccagatgcaatcaggctcggcctgggaaatcacaactattgtcgcaaccctgaccgcgactcgaaaccatggtgctacgttttcaaggcaggaaagtactcgtccgagttctgctccaccccagcttgctcagaaggcaatagcgattgttacttcggtaacggatcggcataccggggaacccattcgttgacggaatccggagccagctgtctcccctggaactcgatgatcctgatcggtaaagtctataccgcacaaaatccatccgcgcaggccctcggactcggcaaacataactactgccgcaatccggacggcgatgctaagccttggtgccacgtgctgaagaaccgccgcttgacgtgggagtactgcgatgtcccatcctgttcgacttgcggcctgcgccagtatagtcaacctcaattcaggatcaagggtggactgtttgcggacatcgcctcgcacccatggcaggcggccatcttcgcaaagcacaggcggtccccgggcgagcgatttttgtgcggaggaattttgatctcatcttgttggatcctgagcgccgctcactgttttcaagagcgcttccccccacatcacctgactgtgatcctcggtagaacctaccgcgtggtgccaggagaagaggaacaaaagttcgaagtggagaaatacatcgtccacaaagaattcgacgacgatacttacgataacgacatcgcgctgctccagctgaagtcagattcttcgagatgtgcacaggaatcctccgttgtccggactgtctgcctgcccccggcggacctccaacttcccgactggactgaatgcgagctgtcaggctacgggaagcatgaggcgctctccccattctactccgaacggctcaaggaggctcacgtgcggctctacccaagctccagatgcactagccagcacttgctcaatcgcactgtgaccgataacatgctgtgcgccggagatactcggtcgggaggtccgcaagcaaacctgcacgacgcctgccagggcgactccggcggacccctggtgtgcctcaacgacggacgcatgaccctcgtggggattatcagctggggcttgggttgcggtcagaaggacgtgccaggggtctacaccaaagtgaccaactacctcgactggatccgggataacatgcggccc

SEQ ID NO: 18350 - DNA, 1686 bp, synthetic construct
  misc_feature 1..1686: note = source = /note="Description of Artificial Sequence: Synthetic coding sequence"
  source 1..1686: mol_type = other DNA
atggacgcaatgaagcgcggcctctgttgtgtgcttttgctttgcggcgccgtgttcgtctcaccgtcgcaagagattcacgcacgctttcgccgcggggcacgcagctaccaagtgatctgccgggacgaaaagactcagatgatctaccagcagcatcagtcgtggctgcggccggtgctgcgctctaaccgcgtggagtactgctggtgtaatagcggcagagcccaatgccatagcgttcctgtcaaatcatgctcggaaccccggtgctttaacggcgggacttgtcaacaggccctctacttctccgacttcgtgtgccaatgcccagaaggcttcgccggaaagtgttgcgaaatcgacacccgcgccacttgctacgaagatcagggcatctcctaccgcgggacttggtcgactgcggagtccggagctgagtgcaccaattggaactcaagcgcattggcacaaaagccctactcgggacgccggccagatgcgatccgcctcggactgggaaatcacaactactgcaggaacccggacagagactcaaaaccctggtgctacgtgttcaaggcaggtaaatacagctcggaattctgctcaaccccggcatgttcagaaggcaacagtgactgctacttcgggaatggatccgcataccgcggaacccactcgctcactgagtccggcgcttcctgcctgccatggaattcgatgatcctgatcggaaaggtgtacaccgcgcagaacccgtcagcgcaggccctgggactgggaaagcacaattactgtcggaatcccgacggcgatgcaaagccgtggtgtcacgtcctgaagaaccggcgactgacctgggaatactgtgatgtcccttcatgctcaacctgcgggcttcgccagtactcccagccgcagtttcggatcaaggggggactctttgccgatatagcatcccacccgtggcaggccgcaatcttcgccaagcacagacgctccccaggagaacggttcctctgcggaggtatcttgatcagctcgtgctggatactgagcgcggcgcactgttttcaggagcgattcccgccccatcacctgactgtgatcctgggccgcacctacagggtcgtcccgggcgaagaagagcaaaagttcgaggtcgagaagtacatcgtgcataaggagttcgatgacgatacctacgacaatgacatcgcattgttgcaactgaagtcagactcctcccggtgtgcccaggaatcgtcggtggtgagaaccgtgtgcctcccgccagccgacctgcagctgcctgattggaccgaatgcgaactcagcggctacggaaagcacgaggcgctgtcaccgttttactcggaacgcctgaaagaggcgcacgtgcgactttacccgtcgagccggtgcacctcccaacatctgctgaaccggaccgtgacggacaacatgctgtgtgctggagatactaggtctggggggccccaagccaacctccacgacgcgtgccagggagactccggaggaccactggtgtgcctcaacgatggacgcatgactctcgtgggaattatctcgtggggcctggggtgcggccaaaaggacgtgccgggggtgtacaccaaagtgacgaattacctggactggatccgcgataacatgcggcca

SEQ ID NO: 18351 - DNA, 1686 bp, synthetic construct
  misc_feature 1..1686: note = source = /note="Description of Artificial Sequence: Synthetic coding sequence"
  source 1..1686: mol_type = other DNA
atggacgccatgaagcgaggcctttgttgtgtgctgctactgtgtggagcggtcttcgtatcacctagccaggagatccacgcccgatttcgccgaggtgctaggtcataccaggtgatctgcagagatgagaagacccaaatgatctatcaacagcaccagtcatggttacgcccagtccttagatccaaccgcgtagagtattgttggtgtaattcggggagggcgcagtgtcattcagtgcctgtgaaatcttgctctgagccgcgatgcttcaacggcggcacctgccagcaagctctgtacttctcggacttcgtctgtcagtgcccagaggggttcgctggaaagtgttgtgagatagacactcgagcaacttgctatgaggaccaggggatctcatatcgcggcacatggagtacagccgagtcaggggccgagtgtacaaactggaactcatctgctcttgctcaaaaaccttactcaggccgccgccccgatgccatccggctgggactgggcaaccataactactgtcgaaaccccgatagagatagtaagccctggtgctatgtgtttaaggccgggaagtattcttcggagttctgttctactccggcttgttccgaggggaacagcgactgctatttcggcaatgggagcgcttaccggggaacacatagcctcaccgagagcggagcctcatgcctaccatggaatagcatgatcctcattgggaaggtttacacagctcaaaatccttctgctcaggcgctcgggctcgggaaacacaattattgtagaaatccggacggcgacgcaaagccatggtgccacgtgctgaagaaccggagactgacctgggagtactgcgacgttcctagctgctccacgtgtggtctgcggcagtactcccagccacagttccggataaagggaggcctattcgccgatatagcctcccatccttggcaggctgccatcttcgctaagcaccggcgttcccctggtgaacgtttcttgtgtgggggaatactcataagttcctgctggattttgagcgccgcccactgttttcaggagcggttcccgcctcaccaccttacagtgatcttagggaggacctaccgagtcgtgcctggtgaggaggagcagaaatttgaggttgaaaaatatatcgtgcacaaagaatttgatgatgacacatacgacaatgacattgctctgttgcagctgaagagcgactccagtagatgcgcccaagagtccagcgttgtccgcaccgtctgtctgccacccgcagatctgcagttgcccgattggaccgaatgcgaactgtcgggctatggcaaacatgaggcactctctcccttctactccgaacgcttaaaggaggcgcacgtgcgcctataccccagcagcagatgcacctcccagcacttgcttaacaggacagtgaccgacaacatgctgtgtgctggcgatacaagatccgggggtccccaggccaaccttcacgacgcatgccagggtgattcaggtggaccactggtgtgtctgaatgacggacgaatgaccctggtgggcataatttcctggggactgggctgcggtcagaaagatgttcctggggtgtatactaaggtgaccaattacttggattggattcgcgacaacatgcggcca

SEQ ID NO: 18352 - DNA, 1686 bp, synthetic construct
  misc_feature 1..1686: note = source = /note="Description of Artificial Sequence: Synthetic coding sequence"
  source 1..1686: mol_type = other DNA
atggacgcaatgaaacggggactttgttgtgtgctgctgctttgtggagccgtgttcgtctccccgagccaggagattcatgctagattcagaagaggtgcaagatcgtaccaggtgatttgtagagacgaaaagacccaaatgatttaccaacagcaccagtcctggctgaggcctgtgctcagatccaatcgcgtggaatactgttggtgtaactccggtcgcgcacaatgtcattccgtgcccgtcaagagctgtagcgaacctcggtgttttaacggtggaacttgtcagcaagcactttactttagcgatttcgtgtgccagtgtcctgaagggtttgccggtaagtgttgcgaaatagacactcgagcaacctgctacgaggatcagggaatctcataccgcggtacgtggagcactgcagaaagtggagcagaatgtactaactggaattcctccgcgcttgctcagaagccctactctggaaggaggccagatgcaatccgtcttgggctgggaaaccataactactgtcggaatccagatcgagactccaagccttggtgttatgtattcaaagctggtaaatactcctcggagttttgttcaactcctgcatgtagcgaaggtaattcagattgctactttggtaatgggtcagcatatagaggaacccattcccttaccgaatccggcgccagctgtctcccctggaacagcatgatccttattggtaaagtctacaccgcgcagaacccatcagcacaggccctgggactgggtaagcataactactgccggaatcctgacggggatgcaaagccatggtgtcatgtgctgaagaaccggcggctgacctgggaatactgtgacgtgccatcgtgttcgacttgtggattgaggcagtactcccaaccccaatttcgaataaagggtggcctttttgcagatattgcctcacacccctggcaagccgccatttttgccaagcataggagatccccgggagaaaggtttctgtgcggaggtattctgattagctcgtgttggattctgagcgcagcccattgctttcaggagcgcttcccaccgcaccatctcacggtgattcttgggagaacttatcgcgtggtccctggagaagaggaacaaaagttcgaagtggaaaagtacatagtccataaagaattcgacgacgatacttacgataatgacatcgcccttctgcagctgaagtcagactcctcgcgatgcgcgcaggaatcgagcgtcgtgagaaccgtgtgcctgcctccagcagatctgcaactgcctgattggactgagtgcgaattgtccgggtacgggaaacacgaggctcttagccctttttactcagaacggctcaaggaagcacatgtgcgactttaccccagctcaaggtgtacttcgcagcaccttctcaacagaaccgtgactgacaacatgctttgtgctggagataccagaagcggcggcccccaagcgaaccttcatgatgcatgccaaggggattccggaggacctcttgtgtgtctcaatgatgggcgaatgaccctggtagggataatctcatgggggctggggtgtggtcaaaaagatgtgcccggcgtctacactaaagttactaactacttggactggattagggataacatgcgccca

SEQ ID NO: 18353 - DNA, 1686 bp, synthetic construct
  misc_feature 1..1686: note = source = /note="Description of Artificial Sequence: Synthetic coding sequence"
  source 1..1686: mol_type = other DNA
atggacgcgatgaagcgggggctgtgttgcgtgctgctcctgtgtggtgcggtgttcgtgtctccttcccaggagatacacgcaagattccgcaggggcgcccggagctatcaggtgatctgtcgcgatgaaaagacccagatgatctaccaacagcaccagagctggctgaggccagtcctgcgtagtaaccgcgtggaatactgttggtgcaattcgggacgggctcaatgtcattccgttccagtgaagagctgctccgaaccacgctgcttcaacggcggcacgtgccaacaggccctgtacttttcggattttgtctgccagtgcccagaggggttcgctggcaaatgctgcgagatcgatactcgggccacgtgctacgaagatcaggggatcagctacagaggcacttggtctactgcagagtctggagccgaatgcaccaactggaattcttcagccttggcccaaaagccgtactccggacggcggccggatgctatccggctgggtctgggtaatcacaactactgccggaatccggaccgcgacagtaaaccgtggtgctacgtctttaaagccggaaagtacagctccgaattctgcagcacccccgcatgctcggaaggaaattccgactgttatttcggaaacgggagcgcctacaggggaacgcactcgctcaccgaatcaggagcgagctgcctgccgtggaacagtatgatcctgatcggcaaagtatacactgcccagaatccaagcgcgcaagccctcggactgggcaagcacaactactgtagaaacccggatggtgatgcgaagccgtggtgccacgtgctcaaaaacagacgcttgacctgggaatactgcgacgtaccgtcctgttccacctgtggactgcggcaatactcgcaaccgcagttcagaatcaagggagggctgttcgccgatatcgctagccatccttggcaggcagccatcttcgcaaagcaccgccgctctcctggagaaagattcttgtgcggtggcatcctcattagttcatgctggatcctttcggcggcgcattgctttcaggagcggttcccacctcaccacctgaccgtgattctcggccgaacttaccgtgtcgtcccgggagaggaagagcagaaatttgaagtggaaaagtatatcgtccacaaggagttcgacgacgatacttacgataacgacattgctctcctgcaactgaagtccgactcctcgagatgcgctcaggagtcaagcgttgtgcgaactgtctgtttgccccctgccgacctccaacttcccgactggactgagtgcgagctgtcaggctacggaaagcatgaagcgttgtcgcctttctactcggagcggcttaaggaagcccatgtgaggctgtacccgtcctcacggtgtacctcgcagcatcttctgaatagaactgtgaccgacaatatgctgtgcgccggcgatactcgctcgggtggaccgcaggctaacctccatgacgcatgccagggagactccggcgggccactcgtgtgcttgaacgacggacgcatgaccctcgtgggcatcatttcttggggactgggatgcggacagaaagatgtgccgggagtctacacgaaggtgaccaactaccttgactggatcagggacaacatgcgccca

SEQ ID NO: 18354 - DNA, 1686 bp, synthetic construct
  misc_feature 1..1686: note = source = /note="Description of Artificial Sequence: Synthetic coding sequence"
  source 1..1686: mol_type = other DNA
atggatgccatgaagagagggctctgttgtgtgcttcttctttgtggagcagtgtttgtgagcccaagccaagagattcatgcaaggtttagaaggggagcgaggtcataccaagtcatttgcagagacgaaaaaacccagatgatataccaacagcatcaatcctggctcagacccgtgcttagaagcaaccgcgtggaatactgttggtgtaattcggggcgggcacaatgtcattccgtccccgtgaagtcatgtagcgaacctcggtgtttcaatggcggcacctgccagcaagccctgtacttttcggatttcgtgtgtcaatgtcccgagggctttgcaggaaaatgttgcgaaattgatactcgcgcaacttgttacgaagatcaggggatatcttacagaggaacttggtcaactgctgagagcggtgcagaatgcactaattggaactccagcgcacttgcacaaaagccatactccggacgtagaccagatgcaatcaggcttggacttggtaaccacaattactgcagaaacccagacagagattcaaaaccttggtgttacgtgtttaaggcaggaaagtatagctcagagttttgctccacccctgcctgctccgaaggcaacagcgattgctactttggtaatgggagcgcgtacagaggtactcacagcctgactgaatccggagccagctgtctgccttggaactcgatgattctgatcggtaaggtgtacaccgcgcagaatccttcggcgcaggcgcttgggctcggtaagcacaactactgtagaaatcctgatggtgacgccaaaccttggtgccatgtgttgaagaaccgccggctgacttgggaatactgtgacgtccctagctgctccacttgtggcctgagacaatattctcagccacagtttcgaatcaagggtggactgtttgcggatattgcaagccatccctggcaagcggctattttcgcgaagcatcgacgttcacctggggaaagattcctgtgtggtggtattcttatatcgtcatgttggatactttccgccgcacactgcttccaagagcgttttccaccacatcacctgaccgtcattctgggacggacttaccgagtcgtgcccggagaggaagaacagaagtttgaggtggaaaagtacatcgtccacaaggaatttgatgatgacacttacgataatgacattgcgcttctgcagctcaaatccgattcatcaagatgcgctcaggagagctcggtggtcaggactgtctgcctccctcccgcagaccttcagctccctgactggacggaatgtgaattgagcggctacggcaagcacgaggcattgtcccctttttactccgagagacttaaagaagcgcatgtgaggctgtacccttcgtcgcgttgtacttcccaacatctgctgaatcgaaccgtgacggacaacatgctttgtgcaggtgatactcgctccggggggccgcaggcaaacctccacgacgcctgtcaaggagatagcgggggacctctggtgtgtctgaatgatggtcggatgactctcgtgggtatcatttcttggggccttggttgtggacagaaagatgtgcctggagtctacactaaggtgactaactacctggactggattagggacaacatgcggccc

SEQ ID NO: 18355 - DNA, 1686 bp, synthetic construct
  misc_feature 1..1686: note = source = /note="Description of Artificial Sequence: Synthetic coding sequence"
  source 1..1686: mol_type = other DNA
atggatgcaatgaaacgcggcctgtgttgcgtcttgctcctctgtggggccgtcttcgtgtcgccatcccaagagattcatgcacggttccgacgcggggcccggtcataccaagtcatttgtcgcgatgaaaagactcagatgatatatcagcagcatcaatcctggctgcggccagtgctgcggtcaaatagagttgaatactgctggtgcaactcaggccgcgctcagtgccacagcgtcccagtgaagagctgctcagaacctagatgctttaacggaggaacctgccagcaggcgctctacttctcggactttgtctgtcaatgtccagaaggatttgcaggaaagtgctgcgaaatcgacactcgagctacctgctacgaggaccagggaatcagctacagaggtacctggagcactgcggagtcaggtgcagaatgcactaattggaattcctccgcactggctcaaaaaccatactccggccggcgtcctgacgccattcgcctggggctcggcaaccataactactgtcggaatccggacagagatagcaagccgtggtgctacgtgttcaaagctggaaagtatagctccgagttctgctccaccccagcgtgctcggaagggaactcagactgctactttgggaatggctccgcctaccgaggaactcattccctcaccgaatcaggcgcatcatgcttgccttggaactctatgatcctgatcggcaaagtgtacactgcccaaaacccgtccgcgcaggcacttggactcggtaagcataattactgcaggaacccggacggtgacgccaaaccatggtgtcacgtgctcaagaacaggaggctcacttgggagtactgcgacgtgcccagctgctccacgtgtggtctgcgacagtacagccagcctcagttcagaatcaagggcggcctctttgcggatatcgcgagccacccctggcaagccgcaatcttcgcgaagcatcgccgctccccgggggaacgattcctgtgtggagggatcctgatctcgagctgctggatcttgtccgcagcccactgcttccaggaacggttcccgccccatcacctgaccgttatcctgggtcgcacttaccgcgtggtgccgggtgaggaggaacagaagttcgaggtcgagaaatacattgtgcacaaggagttcgatgacgacacctacgacaatgacatcgccctgctgcagctgaagagcgacagctcacggtgcgcacaggagagctcagtggtgcgcactgtctgcttgcccccggccgacctgcaattgccggactggactgagtgcgaattgtcaggatacggaaagcacgaagctctctcaccattctactccgaacgtctcaaggaagcccacgttcgcctgtacccgagcagcaggtgcacttctcagcaccttttgaacaggaccgtgaccgataacatgctgtgtgcaggagatactcgctcaggcggtcctcaagctaacctgcacgatgcttgtcagggtgattcgggaggaccgcttgtctgtcttaacgatggaaggatgactctcgtgggcatcatctcatggggacttggatgcgggcaaaaagatgtcccgggagtgtatacgaaggtcactaactacctggactggatccgcgacaacatgcgacct

SEQ ID NO: 18356 - DNA, 1686 bp, synthetic construct
  misc_feature 1..1686: note = source = /note="Description of Artificial Sequence: Synthetic coding sequence"
  source 1..1686: mol_type = other DNA
atggatgccatgaagagagggttatgctgcgtccttttactctgcggagcagtctttgtaagtccatctcaggaaattcacgcccggtttaggcggggagcaaggtcctatcaggttatatgcagagatgaaaaaactcagatgatataccagcaacatcagtcatggctaaggcccgtcctccgctctaatagggtagaatactgttggtgtaacagtggaagggcccagtgtcactctgtccctgttaaaagttgttcagaaccccgctgcttcaatggaggaacatgtcagcaggccctctattttagtgattttgtctgtcagtgtcccgaagggtttgcaggaaaatgctgtgagatagatactcgcgctacttgctacgaagatcaggggatatcttatagaggaacatggtccacagcagaatccggagccgaatgcactaattggaattcgtctgctcttgcccagaaaccttattccggacggaggcctgatgctattcgccttggactcgggaatcacaattattgcagaaacccagatagagattcaaagccctggtgctacgtttttaaagcagggaaatattcttccgaattctgttctacacccgcatgctccgaaggaaactccgattgctattttggaaacggatctgcgtatagaggaactcattccctaacagaaagtggggcttcgtgcctgccttggaattctatgatccttatcggaaaagtgtatacagcacagaatccatccgcacaggccctcgggctggggaaacacaattattgccggaatccggatggggatgcaaaaccttggtgccacgttttaaaaaatcgacgcttaacatgggagtattgtgatgtgccctcttgctcgacttgcgggctcaggcagtattcacagccacagttcagaataaaagggggactttttgccgacatagcttcgcacccctggcaggcagctatattcgcaaaacacaggcggtcaccaggagaacggttcctatgtggaggaatcctgatctcctcatgttggatcctttctgcagctcactgttttcaggaacgctttcctccccatcacctcacagtgatattaggacgcacatatagggtcgtgcctggagaggaggagcagaagtttgaagtcgaaaagtatattgtacacaaagaatttgatgatgatacatatgataacgatattgccctgcttcagctcaaatcagattcgtcccgatgtgcgcaggaatcttctgtggtccggactgtgtgcttaccccccgcagatcttcagctccccgattggactgaatgtgaactctcaggatacggaaagcatgaagcactgtctcctttctattctgaacgacttaaagaagcccatgtcagactctatccctccagtaggtgcacttcacagcacttgcttaataggactgttacagataacatgctctgtgctggggatactcgatccggagggccacaggccaacttacacgatgcatgccagggggattccggaggacccctcgtgtgcctaaatgatgggcgcatgacattagtgggaatcatatcgtggggactagggtgtgggcagaaggatgtacccggagtctatacaaaagtgacaaattatctcgattggatcagagataacatgaggccc

SEQ ID NO: 18357 - DNA, 1686 bp, synthetic construct
  misc_feature 1..1686: note = source = /note="Description of Artificial Sequence: Synthetic coding sequence"
  source 1..1686: mol_type = other DNA
atggatgcaatgaaaagagggttgtgctgtgtgcttctgctctgcggggcagtgtttgtgtcaccaagccaggaaatacacgcccggttcagacgcggagcaaggtcgtatcaggtgatctgtcgggatgaaaagactcagatgatttaccaacaacatcaatcctggttgcgtcccgtgctccgctcgaaccgtgtggaatactgttggtgtaactcaggacgcgcacaatgtcattcggtgcctgtgaaatcatgttccgaaccgcgttgctttaatggcgggacttgccagcaggctctctacttttcggatttcgtgtgccaatgcccagagggattcgcaggcaagtgttgtgaaatagacaccagagcaacctgttatgaggaccaaggaatttcataccgtggtacctggagcaccgctgagtcgggggcagagtgtactaattggaactcgtcggcactggcgcaaaagccctacagcgggagacgcccggatgcgatacgacttggccttggcaaccacaattactgccgaaaccccgaccgggattccaagccatggtgttacgtctttaaagcaggtaaatacagctccgaattttgttccactccggcatgctccgaaggaaattcggattgctacttcgggaacgggtcagcctaccgcggcacccattccctgactgagtctggtgcttcttgtctgccgtggaattcgatgattcttataggtaaggtgtacaccgcccagaacccttcggcgcaggcactggggctcggaaaacataactactgtcgcaaccctgacggagatgcaaaaccatggtgccatgtgcttaagaatcgtcggcttacctgggaatactgtgacgtcccgtcctgttccacttgcggacttcgccaatacagccagccacaatttaggattaaaggaggactctttgccgatatagcaagccatccctggcaggcagctattttcgcaaagcatcgacggtcccctggagaacgatttctttgtgggggaattctcatctcgtcctgttggatcctgtcggctgcacattgctttcaggaaagatttcccccacaccacttgaccgtgatcttgggccgcacgtaccgggtagtccctggcgaggaagaacagaagttcgaggtggagaagtacatagttcacaaggaatttgacgatgacacctacgataacgacattgcacttctgcaactgaagagcgattcatcccgttgcgctcaagagagctcagttgttcggaccgtgtgtctccctccagcagatttgcaactcccagactggactgaatgtgaacttagcggttacggaaagcacgaagccttgtcgccattctattcggagcggcttaaggaggcacatgtcagattgtacccgagcagtcggtgtaccagccagcacttgctgaacaggaccgtgaccgataacatgctgtgcgcaggtgatactcgatcgggtggacctcaagcgaatcttcatgacgcctgtcaaggtgattctggtggtcccctggtctgtctgaatgacgggcgtatgactctggtgggcatcatttcgtggggacttggttgtggccaaaaagatgtcccgggtgtgtacaccaaggtcactaactacctggattggattagggacaacatgcgccct

SEQ ID NO: 18358 - DNA, 1686 bp, synthetic construct
  misc_feature 1..1686: note = source = /note="Description of Artificial Sequence: Synthetic coding sequence"
  source 1..1686: mol_type = other DNA
atggatgcgatgaaaagggggttatgctgtgtgctgctcttgtgtggagcagtatttgttagcccatcgcaggagattcacgctcggttccggaggggcgcgagatcttatcaggtcatttgtcgagatgagaaaacacaaatgatctaccagcagcatcagagctggctgagacccgttctgcgctctaatagggtggagtactgctggtgtaattccggacgcgcccagtgtcacagcgtgcccgtgaaaagctgttcggagccaaggtgctttaatggagggacatgccagcaggcactgtacttctcagacttcgtgtgccaatgtcctgaggggttcgctggcaagtgctgcgaaatcgacacacgggctacatgttatgaggatcaggggatcagttatagagggacctggagtacggcggaatccggcgctgaatgtactaattggaactcaagtgccttggcacagaagccttactctggccggcgcccggatgcaataagactggggctaggaaatcataattactgtagaaatcccgacagagatagcaaaccctggtgttatgtgtttaaagccggtaagtactcatccgagttctgctccactcccgcatgtagcgaaggtaattccgactgctacttcggcaatggatccgcgtacagaggcactcactctctgactgagagtggcgcgagctgcctgccatggaacagtatgattttgattggaaaggtgtacacggcacagaatccaagtgcccaggcactgggactcggtaaacacaattactgtagaaatccggacggcgatgccaagccttggtgtcatgtattgaaaaatcggcgccttacctgggaatattgtgatgtccctagctgctcgacctgcggactcagacagtattctcagccccagttccgtattaagggagggctgttcgctgacatcgcttcccatccatggcaggctgcaattttcgctaagcataggcgttcccctggtgaacggttcctttgtggggggattttgatcagttcctgctggattctgagtgctgcccactgctttcaggaacgctttcctccacatcatctgacagtcattctgggaagaacgtaccgcgtagtgcctggcgaggaggagcagaaatttgaagtggaaaaatatatagtgcacaaggaattcgatgacgacacttatgacaacgacatcgcattgcttcaactaaagtccgactcatccaggtgtgctcaggagagtagcgtggtgcgcacagtgtgtcttccacctgccgacttacagctacccgactggacagaatgtgaattatctgggtacggaaaacatgaagctctgagtccattctattccgagcggctgaaggaagcccatgtcagactgtatcccagttcgagatgcactagtcagcatctcctaaaccgcaccgtgacagataacatgctgtgcgccggggatactcggtccggtggaccacaagcgaacctgcatgatgcttgccagggagacagtggcgggccactcgtctgtctgaatgatgggaggatgaccctggtgggtataatctcgtggggactcgggtgtggacagaaggacgtgcccggtgtctacaccaaggtgacgaattaccttgattggatcagggataacatgaggcct

SEQ ID NO: 18359 - DNA, 1080 bp, synthetic construct
  misc_feature 1..1080: note = source = /note="Description of Artificial Sequence: Synthetic coding sequence"
  source 1..1080: mol_type = other DNA
atggctggccacctggcctctgacttcgcattctcacctccacctgggggcgggggcgacggtccaggcgggccagagcccggctgggtggatcccaggacttggctctctttccagggcccaccaggtggacccgggataggtcccggagtgggaccaggcagcgaggtgtgggggatcccaccatgccctccaccttatgagttctgcggtggcatggcctattgtggacctcaagttggcgtgggtctggttccccagggcggcctcgagactagtcagcccgagggcgaagcaggcgtcggggtagaaagcaacagtgacggcgccagcccagagccttgcacagtaacccccggtgctgtgaagctggaaaaagaaaagttggagcagaaccccgaggagtcccaggatataaaagcattacaaaaggagctggaacagttcgccaaactgctgaagcagaaacgcatcacacttggatacacccaggctgatgtcggcttgaccctgggagtgctgtttgggaaagtcttttcccagacaactatttgccgttttgaggcactgcagttaagctttaagaacatgtgtaaactgcgacctttactgcagaagtgggtcgaagaggccgacaataatgaaaatttacaagagatctgcaaggccgagaccctggtgcaggcccggaaacgcaaaagaacatctattgagaaccgggtgagaggcaacctggaaaatctgtttctgcagtgtcccaaacccactctgcagcagatttcccacattgcacaacagttggggctggagaaggatgtggtgagagtttggttttgcaaccggaggcagaaaggcaaacgctccagttcagattacgctcaacgagaagacttcgaagccgccggctctcctttttctggtggccctgtgagttttcctctcgcccctgggccacacttcgggactcccggctatggctctccccatttcaccgccctttatagcagcgtgccattccctgagggtgaagcattccctccagtgtccgtaacaacactgggcagtccaatgcacagcaac

SEQ ID NO: 18360 - DNA, 1080 bp, synthetic construct
  misc_feature 1..1080: note = source = /note="Description of Artificial Sequence: Synthetic coding sequence"
  source 1..1080: mol_type = other DNA
atggccggacacctggcttccgatttcgcattcagtccccctcctgggggtggaggggacggccccggcggcccagagcccgggtgggttgacccccggacatggttgtcgtttcagggccccccagggggacctggcataggacctggggtgggtccaggctccgaggtctggggtattccaccatgccccccaccatacgagttctgcgggggtatggcatactgcgggccacaagtgggcgtcggcctggtacctcagggtgggttggagacatcccaaccagagggtgaagccggtgtgggggtcgagagcaatagcgacggagcctcccctgagccctgcaccgtgacccccggcgcagtgaaactagagaaagaaaaactcgagcaaaatcccgaggaaagccaggatatcaaagcattgcagaaggagctggaacagtttgcaaaactgcttaaacagaagcggattactctcgggtacacccaagctgatgtgggattgacactgggcgtgctgttcggaaaggtgtttagtcagaccactatatgtcggtttgaggccttgcaactgagttttaagaatatgtgcaagttaaggccattactgcagaagtgggtggaggaggcagacaacaatgaaaatcttcaggagatctgcaaagcagaaaccctcgtgcaagcccgcaagcgcaaaaggacttcaatcgagaaccgagtcagaggaaacttggagaacctttttttgcagtgcccaaaacccactcttcagcagataagtcacattgcccagcagctgggactcgaaaaggacgtggtgcgagtttggttttgcaaccggcggcagaagggaaagaggagcagtagcgactacgctcaaagagaggactttgaggcagccgggagtccttttagtggtggccctgtgagcttcccacttgcccctggacctcattttggcacacccggctatgggagtcctcactttactgctctctattctagcgtgccatttcccgagggggaggctttccccccagtgagcgtcacgacactgggaagcccgatgcatagtaat

SEQ ID NO: 18361 - DNA, 1080 bp, synthetic construct
  misc_feature 1..1080: note = source = /note="Description of Artificial Sequence: Synthetic coding sequence"
  source 1..1080: mol_type = other DNA
atggcgggacacctcgcttctgatttcgcatttagccctccaccaggcggtgggggagacgggcctggaggccccgagcccgggtgggttgatccccgaacttggctttcgtttcaaggacctcccggagggcctggtatcggaccaggcgtgggccctgggtcagaagtatggggaataccgccatgtcctcctccatacgagttttgcgggggcatggcctattgtggaccgcaagtgggggtagggctcgtgccccagggagggcttgaaactagtcagcccgaaggcgaggcaggggtcggcgtcgagagtaactccgacggcgccagtccagaaccttgcaccgtcactccaggcgcggtcaaattggaaaaagagaaactcgagcagaatcccgaggagagccaggatatcaaggcgctccagaaagaactcgaacagtttgccaagctgttaaagcagaagagaatcacactcggctatacccaggcagacgttggcctgactctaggggtgctgtttggcaaagtgttctcccagacaaccatttgccggtttgaagccttacagctgtcgttcaagaatatgtgcaagcttagacctctcctccaaaagtgggttgaggaggctgacaacaacgagaacctgcaagaaatctgtaaagccgaaacattagtgcaggccaggaaaagaaagagaacttccattgagaatagagtgcggggtaacctggaaaacctgttccttcagtgtcctaagcctaccttacagcagataagccacatcgcccagcagttgggactggaaaaagacgtcgttagggtctggttctgcaataggcgacagaaggggaagcgctccagttccgactacgcacagcgagaggattttgaggcggcaggctcccctttcagtggcggaccagtgagctttcctctcgcccccggtccccattttggtacccctggttacggctcgccacactttaccgcactctatagcagtgttccttttcccgaaggtgaagcctttcccccagtctccgtaaccacactcggaagtccaatgcactccaac

SEQ ID NO: 18362 - DNA, 1080 bp, synthetic construct
  misc_feature 1..1080: note = source = /note="Description of Artificial Sequence: Synthetic coding sequence"
  source 1..1080: mol_type = other DNA
atggctgggcacctagctagtgactttgcgttcagccctccaccagggggggggggggatggtcccgggggccccgagcctggatgggtggatccgagaacatggttgtctttccagggacccccagggggcccagggataggcccaggcgtggggcccggaagtgaagtgtggggcattcccccctgccccccgccctacgaattttgcggcggaatggcttactgtggcccacaagttggcgtggggctcgtgcctcagggggggcttgaaacatctcagcctgagggagaggctggagtgggagtggagtccaattcagatggcgctagccccgagccatgtaccgtgacccccggagctgtgaagttagaaaaagaaaagctggagcagaaccctgaagaaagtcaggatatcaaagcgttacagaaggagcttgagcagttcgccaagctcctgaaacagaagcgaattactctgggctacacacaggcagacgtgggcctcaccctcggggtgctgtttgggaaagtgttttcgcaaactacaatctgcagattcgaggccctgcagttgtccttcaagaacatgtgtaaactgaggcctttgttgcaaaaatgggtggaggaagccgacaacaatgagaatctgcaggagatctgtaaggctgagacgctcgttcaggccagaaaaaggaagcgcacttccatcgaaaaccgcgtccgagggaatttagagaatttgttccttcagtgtccaaaacccactcttcagcagatttcacatatcgcccagcagctgggcttggaaaaagatgtagtcagagtgtggttctgcaatcgcaggcagaagggcaaacgaagcagctccgattacgcacaacgcgaagatttcgaggccgcaggttctcctttttcgggcggccctgtcagcttccctctcgcccctgggccccattttggaacccccggctatgggtcccctcacttcaccgcactatattcaagcgtgcccttccccgagggcgaggcatttccgcccgtctctgtcactactctcgggagcccaatgcactcaaat

SEQ ID NO: 18363 - DNA, 1080 bp, synthetic construct
  misc_feature 1..1080: note = source = /note="Description of Artificial Sequence: Synthetic coding sequence"
  source 1..1080: mol_type = other DNA
atggccggacacctcgcctctgatttcgccttctcgcccccgccaggcgggggaggagatggccccggaggtccggaaccaggctgggtggacccacgaacctggctgagcttccaaggtccgccgggaggcccgggaatcggaccaggagttggtccgggatcggaagtgtggggcatcccaccgtgcccaccgccgtacgagttctgcggagggatggcttactgtggaccccaggtgggtgtgggactggtgcctcaaggcggactggagactagccagccggaaggagaggccggagtgggcgtcgaaagcaactcagacggagcatcgcctgaaccatgtaccgtgactccgggagccgtcaaactggagaaggagaaattggagcaaaaccctgaggagtcgcaggatatcaaggcgcttcaaaaggagctggagcagttcgcaaaacttctgaagcagaagcgcatcactctgggctacacccaagcagacgtgggcctgactctcggcgtgctctttgggaaagtctttagccagactaccatttgcagatttgaagctctccaactctcatttaaaaacatgtgcaaactgcggccgctgctccagaagtgggtggaagaggcggacaacaacgagaatctccaggaaatttgcaaggccgaaaccctggtgcaagcacggaagagaaagcggaccagcatcgagaatcgcgtgaggggaaacttggaaaatctgttccttcagtgtccgaagcctacgctgcaacagatcagccatatcgcgcagcagctgggcctggaaaaggacgtcgttagggtctggttctgcaatcgccggcagaagggaaagagatcctcctcagactatgcccagcgcgaagatttcgaagccgctggatccccgttctcgggtgggcctgtctcgttcccattggcgcctggtccgcactttgggacccccgggtacgggtcgcctcatttcacggctctgtactcctccgtgcctttccccgaaggagaagcgttcccgccagtctccgtgactaccctcggatcaccaatgcactcaaac

SEQ ID NO: 18364 - DNA, 1080 bp, synthetic construct
  misc_feature 1..1080: note = source = /note="Description of Artificial Sequence: Synthetic coding sequence"
  source 1..1080: mol_type = other DNA
atggcaggccacctcgcgagcgacttcgctttcagcccgcctcccggtggtggcggcgacggcccgggcgggccggagcctggttgggttgacccccggacttggctttcgttccagggccctccgggtggcccaggtattggccctggggtcggacctggttccgaggtctggggtattcccccttgccctccaccctatgaattctgcggtggtatggcctactgcggtcctcaagtcggcgtcggcttggtcccacagggtgggctggagacctcccaacccgagggtgaggccggtgtgggtgtcgaatccaactccgatggagcttcacccgaaccttgtactgtcacccccggcgccgtcaagctggagaaggagaagctcgaacagaatcccgaagagtcccaggacatcaaggcgctgcagaaagagcttgagcagttcgccaagctgctcaagcagaagcgtatcacactgggatacacccaggccgacgtcggactgaccttgggagtgctctttggcaaggtcttctctcaaaccacaatctgcagattcgaagccttgcagctctcattcaagaacatgtgcaagctccgccccttgcttcagaagtgggtggaggaggccgacaacaacgagaatttacaagagatctgtaaggcggaaaccttggttcaggcccgcaaaagaaagcgaacatccatcgagaacagagtgcgcggcaacctggagaacctgttcttacagtgccctaagcccaccctgcagcagatctcgcatatcgcgcagcagttgggactggaaaaggatgtcgtgcgtgtgtggttctgtaaccggcgtcagaagggtaaacgctcgtcttctgattacgctcagcgagaggatttcgaggctgcgggctcgcccttttccggcggtccagtctctttccccctggcgcccggcccgcacttcggcaccccgggatatggcagtcctcatttcacagccctctactcgagcgtcccgttcccggagggcgaggccttcccccccgtttccgtcacaactctcggttcccctatgcattcgaac

SEQ ID NO: 18365 - DNA, 1080 bp, synthetic construct
  misc_feature 1..1080: note = source = /note="Description of Artificial Sequence: Synthetic coding sequence"
  source 1..1080: mol_type = other DNA
atggcagggcacctggcatcggacttcgcgtttagccctccgccgggaggcggcggagatgggccgggcggccctgaaccgggttgggtcgatccacggacttggctttcttttcaggggccgcctggcggaccgggaatcggaccaggggtggggccgggatccgaggtgtggggaatccccccgtgcccacccccgtacgaattctgcgggggaatggcctactgcgggccccaggtgggagtgggcttggtcccgcaaggaggcctggaaacttcccagccggagggcgaggctggcgtcggagtggaaagcaactcagatggcgcttcaccagagccctgcactgtgactcctggagccgtgaagctggaaaaggaaaagctcgagcagaatccggaagaaagccaggatatcaaggcactgcagaaggagttggagcagttcgccaaactgctgaagcagaaaagaatcactctgggatacactcaggcggacgtgggactgacccttggagtgctgtttggaaaggtgttctcgcaaaccactatctgcagattcgaggccctccagctgtcgttcaaaaacatgtgtaagctgcggccgctcctgcaaaagtgggtggaagaagcggataacaacgaaaatctccaggaaatttgtaaggccgaaactcttgtgcaggcacgcaagagaaaacggacgagcatcgaaaaccgggtgcgcggcaacctcgagaacctgttcctccaatgcccgaagccgacgctccagcaaattagccacatcgcgcaacagctgggccttgaaaaggatgtcgtccgtgtgtggttctgtaataggagacagaagggcaagaggtcatcctccgattacgcccagcgcgaagattttgaggcggccgggtcgcctttctctggagggccggtgtcttttccgctcgctccgggaccacatttcggaactccaggatacggatcacctcacttcaccgccctgtattcctccgtgccgttccccgaaggagaggccttcccgccagtgtcggtcacgactctgggttccccgatgcattccaat

SEQ ID NO: 18366 - DNA, 1080 bp, synthetic construct
  misc_feature 1..1080: note = source = /note="Description of Artificial Sequence: Synthetic coding sequence"
  source 1..1080: mol_type = other DNA
atggctgggcatctcgcgagcgatttcgcattctccccgccaccgggtggagggggagatggccctggaggaccagaaccaggatgggtggatccgcgcacttggctctctttccagggaccgccgggagggccggggatcggaccaggagtgggaccgggatcagaggtatggggcatcccgccatgcccgccaccgtacgagttctgtggaggaatggcttactgcggacctcaggtgggagtcggtctggtgccccagggagggctggagacgtcccagccagaaggagaggcgggagtgggagtggagagcaactcggacggagcaagcccggagccctgcaccgtgactccgggagccgttaagctcgaaaaagagaagttggagcaaaaccctgaggaatcacaggacatcaaggccctgcagaaggagctggaacagttcgcaaagctgctgaaacaaaagaggatcacccttggatacacccaggcagatgtcggactgactctgggcgtgctgtttgggaaggtgttctcccaaactactatctgcagattcgaggcgctccaactctcgttcaagaacatgtgcaagctcagaccactgctccagaagtgggtggaagaagccgacaacaatgaaaaccttcaagaaatctgcaaggctgaaaccctggtccaagcaagaaagcggaaacgcacttcgatcgaaaaccgcgtgagaggaaacctcgaaaatctgttcctgcagtgcccaaagcctaccctccagcagattagccacatcgcccaacaactgggtctggagaaggacgtcgtgagggtgtggttttgcaatagacgccagaagggcaagcgttcctcgagcgactacgcccagcgcgaggatttcgaagccgcgggatccccattctcaggcgggccggtgtcattcccccttgccccaggcccgcacttcggaactccgggttatggctcccctcacttcaccgctctgtactcgtcggtgccattcccggagggagaagcattcccacctgtgagcgtgactaccctggggtcacctatgcactccaac

SEQ ID NO: 18367 - DNA, 1080 bp, synthetic construct
  misc_feature 1..1080: note = source = /note="Description of Artificial Sequence: Synthetic coding sequence"
  source 1..1080: mol_type = other DNA
atggctggccacctggcctctgacttcgctttttctcccccgccagggggtggcggggacgggcccggaggtcccgagccaggctgggtcgaccctcgcacctggttaagtttccaaggcccaccaggtggccctggtatcggccctggtgtggggcctggctccgaggtgtgggggatccccccctgcccgcctccctatgagttttgtggaggtatggcatattgtgggccccaggtgggggttgggctggttccccagggagggctcgaaacctctcagcccgagggagaggcaggcgtgggggtcgagtccaattccgacggggcctcacccgaaccatgtacagttacccccggcgccgtgaaactggagaaagaaaaactcgaacagaaccccgaagaaagtcaggacattaaggccctgcaaaaagagctggaacagttcgccaaactcctgaagcagaagcgcatcactctcggttacacgcaggctgatgtgggattgactctcggagtcctgttcgggaaggtatttagtcaaaccaccatttgccgattcgaggcattacagctgagcttcaaaaacatgtgcaagctgagaccactgctacaaaaatgggtggaagaagcggacaataatgaaaatctgcaagagatctgcaaggcagagacccttgtgcaggctcggaaaagaaaacgtacaagcatcgagaaccgggtccgtggtaacttggagaatctgttcctgcagtgccccaaaccaaccctgcagcagataagtcatatcgcacagcagctaggcctagaaaaggatgtggtgcgagtgtggttctgcaaccggagacagaaggggaaacggtcatcctctgactacgctcagcgcgaagactttgaggccgcagggagtccttttagtgggggcccggtgagttttccactcgcgcccgggccacacttcggaaccccagggtacggcagccctcacttcaccgccctgtacagcagtgtgccatttcccgaaggagaagcttttcctccagtgtctgtaaccaccctcggcagtcctatgcactctaat

SEQ ID NO: 18368 - DNA, 1080 bp, synthetic construct
  misc_feature 1..1080: note = source = /note="Description of Artificial Sequence: Synthetic coding sequence"
  source 1..1080: mol_type = other DNA
atggccggtcacctcgctagcgattttgctttctcacctccccctggcgggggtggcgatggcccggggggtccagaacctggatgggtggacccaaggacttggctcagttttcagggcccacccggaggacccggcatcggcccaggcgtgggtcctgggtccgaggtgtgggggatccctccttgtcctcctccgtacgaattctgtggggggatggcatattgtgggccacaggtgggggtgggattggtgcctcaggggggcctagaaacttcccagcctgagggcgaggcgggagttggagttgagagcaattctgacggagcgagtccagagccttgcacagtcaccccaggggctgtgaagttggagaaggagaagctggagcaaaatcccgaggaaagccaggatatcaaggccctgcagaaggagctcgagcagtttgccaagctgctgaaacaaaaacgaattacactagggtacacccaagccgatgtgggtctaactctgggcgtgctgtttggtaaagtgttcagccaaactacgatttgtagattcgaggcgttgcaactgtctttcaaaaacatgtgtaagctgcggcccttactacagaaatgggtggaggaggctgataataatgaaaatctacaagaaatctgtaaagcagaaacgttggttcaagcaaggaagagaaagaggacaagcatcgaaaaccgcgtcagggggaatctggaaaacttattccttcaatgcccaaaacctaccctgcaacagattagtcacatcgcgcagcaattaggcctcgagaaggatgtggtcagagtgtggttctgcaacaggcgccaaaagggtaaacggagctcctctgattatgcacagcgggaagattttgaagctgccggatctccgttcagtgggggacccgtcagttttccgttggcccccggcccgcatttcggcactcccggctatggtagcccacatttcacggctctctactctagcgtgcccttccctgagggcgaagcgtttcctccagtctcagtaaccacccttgggagtccaatgcactcgaat

SEQ ID NO: 18369 - DNA, 1080 bp, synthetic construct
  misc_feature 1..1080: note = source = /note="Description of Artificial Sequence: Synthetic coding sequence"
  source 1..1080: mol_type = other DNA
atggcgggccatcttgcttccgacttcgctttcagcccgccgccaggaggagggggcgatggacctgggggaccagaacctggatgggtggacccgagaacctggctctccttccagggacctccgggcgggccaggaatcggaccaggagtgggaccgggctcagaagtctggggaatcccgccgtgccctccaccttatgagttttgtggtggaatggcttactgtggaccccaggtcggcgtcggccttgtgccacagggaggcctggaaacttcccaacctgagggtgaagcgggcgtgggggtggagagcaactcggacggtgcctcccccgaaccgtgcaccgtgactccgggagccgtgaagctggaaaaagaaaagctcgagcaaaacccggaagaatcccaagatatcaaggctctgcagaaggagttggagcagtttgccaagctcctcaagcaaaaacggatcactctgggctacacccaggccgatgtcgggttgacgcttggagtccttttcggcaaggtgttcagccaaaccacgatctgcagattcgaagccctccaactgtctttcaaaaacatgtgcaagctgcgtcccctgctgcagaagtgggtggaggaagccgacaataacgaaaacctgcaggaaatctgtaaggccgagactctcgtccaggcacggaagcgcaagagaaccagcatcgaaaatcgcgtgagggggaacctcgaaaacctgttccttcaatgcccgaagcctactcttcagcagatctcgcatatcgcccaacaactgggactggaaaaggacgtggtgcgggtctggttctgcaaccggaggcagaagggcaaacggtcaagctccgattacgcgcagcgcgaggacttcgaagcagcgggcagccctttcagcggcggacccgtcagcttcccgctggctccaggaccgcatttcggaactccaggctacggatcgccgcattttactgcgctgtactcatccgttccttttccggaaggggaagcattccctccagtgagcgtgaccactctgggctcccctatgcacagcaat

SEQ ID NO: 18370 - DNA, 1080 bp, synthetic construct
  misc_feature 1..1080: note = source = /note="Description of Artificial Sequence: Synthetic coding sequence"
  source 1..1080: mol_type = other DNA
atggccggacatcttgcatcggattttgccttttctcccccaccaggaggaggcggagatggtcccggtggacctgaaccaggttgggtggatcctcgaacttggctctcgttccaaggacccccgggcggacctggaattggaccaggcgtgggtcctggctccgaagtatggggtatcccaccatgtcctcctccttatgagttttgtggtggaatggcatactgcgggcctcaagtgggtgttggcctcgttccacaaggtgggttggaaacgagccaaccggaaggtgaagcaggcgtcggagtcgaatccaactcggatggagcgagtcctgagccatgcaccgtgaccccaggagccgtaaaactggaaaaggaaaagttggagcagaacccagaagaaagccaagacattaaagcccttcaaaaggaactggagcaatttgctaagctcctcaaacagaaaagaataactctggggtacactcaggcagatgtgggtctgactcttggggtgctctttgggaaggtgttctcgcagaccactatctgtaggtttgaggcattgcaactttccttcaaaaacatgtgcaagctcagaccattgctgcagaagtgggtggaggaggccgacaataatgaaaaccttcaagagatctgtaaggcagaaaccctggttcaagcacggaagagaaaacgcacttcgattgaaaacagagtgcggggtaacctcgaaaaccttttcctccagtgtcccaagccgaccctgcagcaaatttcgcatattgctcagcagctgggtcttgagaaggatgtggtccgcgtgtggttttgtaatcgtaggcagaagggtaaacgatcttcgagtgactacgcgcagcgcgaggactttgaggcagcagggtccccgttctccggaggacccgtcagctttccactggcgcccggtcctcacttcggcacccccggctacggatcccctcattttacggcactgtactcatccgtccccttccctgaaggagaagcgtttccgcccgtgtcagtgacgacccttgggagccctatgcacagtaat

SEQ ID NO: 18371 - DNA, 1080 bp, synthetic construct
  misc_feature 1..1080: note = source = /note="Description of Artificial Sequence: Synthetic coding sequence"
  source 1..1080: mol_type = other DNA
atggctggacatctggccagtgatttcgccttcagtccaccaccgggaggggggggagacggaccaggggggcccgaacctggttgggtcgatcctcgaacctggctttcattccagggaccacctgggggacccggtatcggccccggagttggacctggctccgaagtgtgggggattcctccatgccctccaccatacgagttctgtggtgggatggcctattgcggacctcaagtcggagtgggcctagtgccccagggggggttagagacatctcagcctgagggagaagcgggcgtgggagtggaatccaactctgacggagcatcacctgagccttgcactgtgacgcccggagccgtcaagctggagaaagaaaaactggagcagaatcccgaagagtcacaggacattaaggccctacaaaaagaactcgagcagttcgccaagctgctaaagcaaaaacgcatcactcttgggtatactcaggccgacgtgggactgacactaggtgtgctcttcggcaaggtgtttagccagaccacgatttgcaggtttgaggccttgcaacttagtttcaaaaacatgtgtaagttgagaccacttctgcagaagtgggttgaagaggccgataataatgaaaacctccaagagatttgtaaagctgaaaccctggtgcaggccagaaagagaaaaagaactagcattgaaaacagagtgcgagggaatctagaaaacctttttttacaatgtcccaagcctaccctccagcagataagccacattgcacaacaactggggctggagaaggacgtggtgcgagtatggttctgcaacagaaggcagaagggtaagcgaagctctagtgattacgcacagcgagaggactttgaagctgctggctcacccttctcaggcggacccgtgagctttccactggccccgggcccccacttcgggacaccaggatatgggtcccctcactttacagctttgtactctagtgtgccttttccagagggtgaagcctttccccccgtgtcagttaccacgctcggatccccaatgcactcaaac

SEQ ID NO: 18372 - DNA, 1080 bp, synthetic construct
  misc_feature 1..1080: note = source = /note="Description of Artificial Sequence: Synthetic coding sequence"
  source 1..1080: mol_type = other DNA
atggccggccatttggccagtgatttcgcttttagtcccccccctggtggggggggcgatggtcccggagggcccgaaccaggatgggtcgatccacgcacctggctctcttttcaaggaccccccggagggccaggaatagggccaggcgtaggaccaggctccgaggtttggggtattccaccgtgcccacccccgtacgagttctgcggagggatggcatattgcggaccgcaagtcggagtgggacttgtccctcaaggtggactcgaaactagccagccagagggagaagcgggggtaggcgtggaatccaactcagacggcgcctcacctgaaccatgtaccgtcacacccggtgccgtgaagcttgagaaagagaagctggaacagaatccagaggaatcccaggatattaaagcactccagaaagagctggagcagtttgcgaagctgctcaagcagaagcggatcaccctcggctacacccaggcggatgtgggtcttacccttggggtgctgtttggcaaggtgtttagccagacaacgatttgtaggtttgaggccttgcagctctcctttaaaaacatgtgtaagcttcgccccttgctgcagaaatgggtcgaggaagccgacaataatgagaacctgcaggagatttgcaaggccgaaactctggtccaagccaggaagagaaagcggactagcatcgaaaatagagtacgaggcaacctcgaaaatcttttcctgcagtgcccgaaaccaactttgcagcagatcagtcacattgcccagcagctgggcttggaaaaggacgtcgttagagtctggttttgcaatcgccggcagaaagggaagaggtcttcctcagactatgctcagcgcgaagacttcgaagccgccggctctccgttttccggcggcccagtgagtttcccactcgcgcccggtcctcactttggaacgccaggatatggctcaccacatttcacggcgttgtactcctcagtaccctttccggagggagaagcctttccgcctgtgagtgtcaccacactcgggtctcctatgcattctaac

SEQ ID NO: 18373 - DNA, 1080 bp, synthetic construct
  misc_feature 1..1080: note = source = /note="Description of Artificial Sequence: Synthetic coding sequence"
  source 1..1080: mol_type = other DNA
atggccggacatctcgcatctgactttgcattctctcctccaccgggaggtggaggggacggaccaggaggtccagaacctggttgggtggaccccaggacctggctgagctttcaaggtcccccagggggtccagggattggaccgggcgtgggccctggatctgaagtctggggcattcccccgtgtcccccaccttacgaattttgtggaggcatggcttactgcggtccgcaagtgggcgttggcctggtcccacaaggaggtcttgaaaccagtcagccagagggagaggctggtgtgggtgtcgaatccaatagcgacggtgcctcgccagagccttgcactgtgacccctggggcagtgaaacttgagaaggaaaagctggaacaaaaccccgaagaatcccaggacataaaggcactccagaaggaactggagcaatttgcaaaattgctgaaacagaagcgtattaccctgggttacactcaggcagacgtaggtcttaccctgggtgtgcttttcggaaaggtgttttcccaaactaccatctgtcggtttgaagcgctgcaattgtcgttcaagaacatgtgcaaactcaggccactgctccaaaagtgggtggaggaagctgacaataacgaaaatcttcaagagatttgtaaggcggaaaccctcgtccaggcaagaaagagaaaacgaacgtccattgaaaacagagtccggggcaatctggagaacctgttccttcagtgtcctaaacctaccttgcagcagatttcacacatcgcccagcagctgggactcgagaaggatgtcgtgcgagtgtggttttgcaatcgtcggcaaaagggcaagagaagctcctcggactatgcccagcgcgaagattttgaagcagcgggttccccattttcggggggtcctgtttccttccccctggcaccagggccgcactttggtactcccggttacgggagcccccatttcacggctctctactcatcggtcccatttccagaaggtgaggcatttcctccagtgtccgtcaccactcttgggagccccatgcactcgaat

SEQ ID NO: 18374 - DNA, 1080 bp, synthetic construct
  misc_feature 1..1080: note = source = /note="Description of Artificial Sequence: Synthetic coding sequence"
  source 1..1080: mol_type = other DNA
atggctggacatctggcatctgatttcgctttcagtccaccacctggcggtggcggggacggtccaggtggacccgagcctggctgggtggacccgagaacctggttgtcttttcaaggcccccccgggggccctggaatcggcccgggagtcggacccggatcggaggtatgggggatcccaccctgcccccccccctacgagttctgtggaggtatggcttactgcggaccacaggtgggcgtcggccttgtgccccagggcggtctggaaacaagtcagccagagggcgaagcaggggtgggcgtggagagcaactccgatggcgctagccccgagccatgcactgtaacccccggcgccgtgaaactggaaaaagaaaaactagagcaaaacccagaagagtcccaagacataaaagctctgcagaaagaactcgagcagtttgctaagctgctgaaacagaaacgcatcacattgggttacacccaggccgatgttggcctcactctgggggtgctgttcggcaaggtcttttcacagacaacaatctgccgattcgaggctctgcagttatcattcaagaatatgtgtaagctgcgaccactcttgcagaagtgggtggaagaagccgataacaacgaaaaccttcaagagatatgcaaagctgagacactcgtgcaggctcgcaaacgcaagcgtaccagtatagagaatagggtgcgggggaaccttgagaacctctttcttcaatgccccaaacctactctgcagcagatttcacacatagcacagcagctcggactggaaaaagatgtagtgagggtgtggttttgtaatcggagacagaaagggaagaggtcttctagcgactacgcccagagggaagattttgaagccgccgggagtccattttccgggggccccgtttctttccccctggcaccaggacctcatttcgggacccccggctacggatcccctcacttcacggcactgtatagctccgtcccttttcctgagggcgaggcttttccgcctgtctcagtgacaactcttggttcccccatgcacagcaac

SEQ ID NO: 18375 - DNA, 1080 bp, synthetic construct
  misc_feature 1..1080: note = source = /note="Description of Artificial Sequence: Synthetic coding sequence"
  source 1..1080: mol_type = other DNA
atggcaggtcatcttgcatccgattttgcgtttagcccacctcccggaggtggcggggatggaccgggaggaccagagcctggttgggtggacccaagaacctggctctcatttcaaggtcctcctggcgggccgggtatcggacctggcgtggggccggggagcgaagtgtggggcatcccgccttgccccccaccttacgaattttgtggagggatggcatactgtggaccacaagtcggagtgggacttgtgccacaaggcggactcgaaacctcgcagcccgagggcgaagcgggtgtgggagtggagtcaaacagcgatggggcatcaccagaaccctgtactgttacgcctggagccgtgaaacttgaaaaggagaaacttgagcagaaccccgaggaatcccaggacataaaggcactgcagaaggagctggaacagtttgccaaattgctcaaacaaaagcggattacgctcgggtacactcaggcagatgtgggacttactctgggcgtgctgtttggtaaggttttcagccagacgactatttgtcgatttgaggcactgcaactctcgttcaagaacatgtgcaaacttcgaccacttcttcagaaatgggtggaagaagctgataacaatgagaatctgcaagaaatctgcaaggccgaaactctcgtgcaagcccgcaagcggaagagaacttcaatcgaaaacagggtcaggggaaacctcgagaatcttttccttcagtgtccaaagcctactctgcagcaaatttcgcatatcgcacaacagttgggccttgaaaaggacgtcgttagggtgtggttttgtaatcgccgccaaaagggtaagcgctcatcgtccgactacgcgcagcgggaggatttcgaggctgccggctcgcccttttccggcgggcctgtgtcctttccgcttgcacccgggccgcatttcgggactccaggttacggatccccccattttaccgcactctactcgtcggtgccgttcccagaaggtgaagcgtttccaccagtctcagtcactaccctcggtagccctatgcactccaac

SEQ ID NO: 18376 - DNA, 1080 bp, synthetic construct
  misc_feature 1..1080: note = source = /note="Description of Artificial Sequence: Synthetic coding sequence"
  source 1..1080: mol_type = other DNA
atggctggacacctggcatccgatttcgcattcagcccgcccccgggcggcggaggagacggacctggcggaccggagccgggatgggtggatccccggacttggctgtcgttccagggacctccaggaggccctggaattggtcctggagtgggacctgggagcgaggtgtggggaatcccgccttgcccgccgccttacgaattttgcggggggatggcctattgcggaccccaggtgggagtgggactcgtccctcagggagggcttgagacttcgcagccggagggggaagcgggagtcggagtcgaatcgaactcagatggagccagcccagaaccgtgtacggtgactccaggggctgtcaaacttgaaaaggagaaactcgaacagaacccagaagaatcccaggacatcaaagccttgcagaaggagcttgaacaattcgcgaagctcttgaagcaaaaaaggatcacgttgggctacacccaagccgacgtgggactgaccctgggagtgctctttgggaaggtgttctcccagactactatctgccggtttgaggcactccagctgtcgtttaagaacatgtgcaaactgcggccactcctgcagaagtgggtggaagaggccgacaataacgaaaatctccaggagatctgtaaagctgaaaccttggtgcaagctagaaagagaaaacgaacctcaatcgagaaccgggtgaggggaaatctcgaaaatcttttcctgcagtgccctaaaccgaccctccaacaaatttcacatatcgcacaacaactgggtctggagaaggacgtagtgagagtgtggttttgcaaccgccgccagaaggggaagagatcaagctcagactatgcccaaagagaggatttcgaagccgcaggttcgcctttctccggtgggccggtcagtttcccattggccccgggtccgcattttggcaccccgggatatggcagccctcacttcactgccttgtactcctctgtccccttcccggaaggagaagccttcccgccggtgtcagttaccacgttgggctcgccgatgcactcaaac

SEQ ID NO: 18377 - DNA, 1080 bp, synthetic construct
  misc_feature 1..1080: note = source = /note="Description of Artificial Sequence: Synthetic coding sequence"
  source 1..1080: mol_type = other DNA
atggctggacatcttgctagtgattttgctttctcaccaccacctggaggaggcggtgatggaccaggtggtccagaaccaggatgggtagatccaagaacttggctttcattccaaggaccgccaggaggaccgggtattggaccaggcgtaggtccgggatctgaagtttggggtattccaccatgcccacctccgtacgagttttgcggaggaatggcttattgtggcccacaagtgggcgtcggacttgtgccacaaggaggcttagaaactagtcaaccagagggagaagctggagttggagtggagtcaaattctgacggtgcctctccagagccatgtactgttacgccaggggcagttaagcttgaaaaagaaaaattggaacaaaatccagaggaatcccaagatataaaggctcttcaaaaagaattagagcaatttgccaaattgctcaagcaaaaaagaattacacttggttatacacaagctgacgtaggactaactctgggcgtgctctttggaaaagtcttctctcaaacaacgatctgcagattcgaagcactccagctttctttcaaaaacatgtgtaaacttcggcccctgttgcaaaaatgggtggaggaagcagataataacgaaaatcttcaggaaatctgtaaagcagaaacgctggtgcaggctagaaaacgaaagcgaacatccatcgaaaatagggttagaggaaacctcgagaatctgttcttgcagtgccctaaacccacactgcaacagattagtcacattgctcaacagttgggacttgaaaaggacgttgttagagtctggttctgcaatcggcgacaaaaaggcaaaagatcttcctctgattatgctcaaagggaggattttgaggctgctggttcgccattcagtggagggccggtttcgttcccactggcgccaggaccgcatttcggtacgcctgggtatgggtcgccacacttcacggcgctatactcctctgttccattcccggaaggagaggctttcccgccagtgtcagtgacaactctcggaagtccgatgcacagcaac

SEQ ID NO: 18378 - DNA, 1080 bp, synthetic construct
  misc_feature 1..1080: note = source = /note="Description of Artificial Sequence: Synthetic coding sequence"
  source 1..1080: mol_type = other DNA
atggctggacacttggcttctgactttgcattctcgccaccaccaggcgggggcggagacgggcctggaggccccgaacctggctgggtagatccgaggacttggctcagcttccagggaccaccaggtggccccggaattggacctggagtagggcccggctctgaagtgtggggcatcccaccctgtcctcccccttacgaattctgcggaggaatggcctactgtggccctcaggtgggagtgggcctggtgcctcagggtggactggaaacttctcaacccgagggcgaggcaggcgttggagttgagagcaactctgatggagccagtcccgagccatgtacagtcactcctggagctgtcaagctcgagaaagaaaagctggaacagaatcctgaagaatcccaggacatcaaagcattacagaaagaactagaacaatttgctaagctcctcaagcaaaagagaatcactcttggctatacccaggcggatgttggactgactctgggcgtattgtttggaaaagtgttcagccagacaacaatctgcagatttgaagctcttcagctgagtttcaagaacatgtgtaagttacggccgctgctgcagaaatgggttgaggaagctgacaacaacgaaaacctgcaggagatctgtaaggctgaaactttagttcaggctcgcaagaggaagaggacaagcatagaaaacagggtgaggggcaacctcgaaaacctgttcctgcaatgtcctaaacccacattgcaacagatctcacatatcgcgcagcagctgggactggagaaagatgtcgtgcgcgtttggttctgcaaccgccgtcaaaagggcaaacggtctagctctgattacgcccaaagggaggacttcgaagctgccgggagtccattttccggaggacccgtttcctttcccctggcccctgggccacacttcggcacccccggatatgggagtcctcacttcactgccctgtatagctccgtgccctttccggagggagaggcttttcctcccgtgtcagtgacaacgttgggcagccctatgcactctaat

SEQ ID NO: 18379 - DNA, 1080 bp, synthetic construct
  misc_feature 1..1080: note = source = /note="Description of Artificial Sequence: Synthetic coding sequence"
  source 1..1080: mol_type = other DNA
atggctgggcatctcgcttcggacttcgccttttccccgccaccaggaggaggcggagacggcccagggggcccagaaccggggtgggtggaccctagaacgtggctgtccttccaaggacccccgggtggccctgggatcggacctggagtgggaccgggatctgaagtctggggaatccctccctgcccgcctccttacgaattctgcggtggtatggcgtactgtggaccgcaggttggggtgggcctggtgccacagggcggactggaaacctcccagccggaaggcgaagccggcgtgggggtggaatctaactccgatggcgccagcccggagccgtgtaccgtcactccaggggcagtgaagttggagaaagagaagctggagcagaatccggaggagtcacaggacatcaaggcgcttcaaaaagaactggagcaattcgctaagctgctcaaacagaaacgaatcactctgggttacactcaggccgatgtgggactgaccctgggcgtgctgtttggaaaggtgttctcacaaaccactatttgccgcttcgaagctctccaactcagctttaagaatatgtgcaagctgcgtccgctgttgcagaagtgggtggaagaagctgacaacaatgagaaccttcaagagatctgtaaggcggagactctggtgcaagcgaggaagcggaagaggacctccatcgaaaaccgggtgagaggcaatctggaaaacttgtttcttcagtgcccaaaaccgaccctccaacagattagccacatcgctcagcaattgggactggaaaaagatgttgtccgggtttggttctgtaaccgccgccaaaagggaaagcgctcgtcgtcagactacgcccagagagaagatttcgaagccgccggtagccccttctccggagggccagtgtccttcccgcttgccccgggaccccatttcgggaccccgggttatgggtcgccacacttcacggcgttgtactcatctgtgccatttcccgagggtgaggcgttccctcccgtctccgttactactctgggtagcccgatgcactcgaac

SEQ ID NO: 18380 - DNA, 1080 bp, synthetic construct
  misc_feature 1..1080: note = source = /note="Description of Artificial Sequence: Synthetic coding sequence"
  source 1..1080: mol_type = other DNA
atggcgggccatctggctagcgactttgcgttctcaccgccaccaggaggtggcggggacgggccgggcggaccggagccagggtgggtggacccacgtacctggctgtccttccaaggaccgccaggaggaccgggtattggcccgggtgtgggtccggggtcggaagtgtgggggatcccaccgtgcccgcctccttacgaattttgtggaggcatggcatattgcggaccgcaggtgggagtgggattggtaccgcagggaggcttggaaactagccagccagagggtgaagcgggagtgggtgtagaatccaattccgacggagcttccccagaaccctgcaccgtgacgccaggtgccgtgaagctggaaaaggaaaaactcgaacaaaatcccgaggaatcacaagatatcaaagcgctccagaaggaactcgaacaattcgctaaacttctgaagcagaagcggatcacccttggctacacccaagcggatgttggccttactctgggggtgctgttcggaaaggtgttttcgcagaccaccatttgccgcttcgaggccctgcagttgtcgtttaagaatatgtgcaagctgcgcccgctgcttcagaaatgggtcgaggaagcggataacaatgaaaacttgcaagagatttgtaaggccgagactctggtgcaggctcggaagcggaagagaacttccatcgaaaacagagtgagaggaaacctggagaacctgttcctccagtgtccgaagccgaccctccaacaaatcagccacatcgcacagcagctgggactggagaaagacgtcgtgagagtgtggttttgcaatcgccgacagaagggaaaacggtcctccagcgactacgcacagcgcgaggatttcgaggctgccggaagcccgttcagcggcggaccggttagcttcccgctggccccgggaccccatttcggaaccccaggatacggatctccccactttacggccctgtactcgagcgttccattcccggagggagaagcctttccacccgtctcggtcactaccctcgggtccccgatgcacagcaac

SEQ ID NO: 18381 - DNA, 1080 bp, synthetic construct
  misc_feature 1..1080: note = source = /note="Description of Artificial Sequence: Synthetic coding sequence"
  source 1..1080: mol_type = other DNA
atggccgggcatctcgcgagcgattttgccttctctccaccaccagggggtggaggagatggtcctggaggtccggaaccgggatgggtcgatccacgtacctggctctccttccagggtccacccggaggtcccggaattgggccaggggtgggacctggatcggaagtgtggggaatacctccatgtccaccaccgtacgaattttgtggcggcatggcttactgtggaccacaagtgggagtgggcttggtgccacaaggaggactggaaacctcgcaacctgaaggcgaggcaggagtgggagtcgaatccaatagcgacggtgcatcccctgagccatgcacggtgaccccaggtgcggtgaaacttgaaaaagagaagctggaacagaatccagaagagagtcaggatatcaaggcacttcaaaaagaactcgaacagtttgcaaagttgctcaagcaaaaaagaatcacgctgggatacactcaggcagatgtgggtctgactctcggagtcctgtttggtaaagtgttctcacagaccaccatttgtagatttgaggcattgcagctgagctttaagaatatgtgcaagctcaggcccctgcttcagaagtgggtggaagaagctgacaacaacgaaaacctgcaggagatttgtaaagctgaaaccctggtccaagcacgcaagcgcaaaaggacttcaattgagaaccgggtcagagggaatctggagaacctctttctccagtgccctaagcctaccttgcaacaaatttcccatatcgcacaacagctggggttggaaaaggatgtggtgcgtgtctggttctgtaaccgccgtcagaaggggaagcgatcgtcatccgactacgcacaacgggaagattttgaggcggcaggatcaccattttcgggtggcccagtgagcttcccattggcgcctggacctcactttggcaccccaggctatggctcgcctcatttcaccgctctgtactcgtcagtcccatttcctgagggcgaggcctttcctcccgtgtccgtgacgaccctcggatccccgatgcattcgaac

SEQ ID NO: 18382 - DNA, 1080 bp, synthetic construct
  misc_feature 1..1080: note = source = /note="Description of Artificial Sequence: Synthetic coding sequence"
  source 1..1080: mol_type = other DNA
atggcaggacacctggccagcgacttcgcctttagccctcctccgggagggggaggagatgggcccggagggccggagccaggttgggtggacccgagaacttggctgtccttccagggcccaccgggcggacctgggatcggccctggagtcggcccgggatcggaagtgtggggaattccgccatgtccgccaccgtatgaattctgcgggggaatggcttactgcggcccgcaagtcggtgtgggcctggtcccgcagggaggactggaaacctctcagcctgaaggggaggcgggagtgggagtggaatcgaactcggacggagcatcgccagaaccctgcaccgtcactccgggcgccgtgaaactggaaaaggagaagctcgagcagaacccggaagaatcacaggatatcaaggcccttcaaaaggagctggaacaatttgcgaaactgttgaagcagaaaagaatcaccctgggttacacccaggccgacgtcggactgactctgggggtgctgttcggaaaagtgttttcgcagaccacgatctgccgattcgaagcactgcaactctcttttaagaatatgtgcaaactgcgcccgctgctgcaaaagtgggtggaggaggccgacaacaatgagaacctgcaggagatttgtaaggcggaaaccctggtgcaagcacgcaagagaaagcggactagtatcgagaaccgggtgagaggaaacttggaaaacctgttcttgcagtgccctaaaccaactctccagcaaatcagccacatcgcccagcagctcggcctggaaaaagacgtggtgagagtctggttttgcaatcgacgccagaaggggaagaggtccagctcagactatgcgcagcgtgaggacttcgaggccgccgggtcgccattctcaggtggcccggtgtcattcccactcgccccaggaccgcacttcggcacccccggctacgggtcaccgcatttcactgctctgtacagctcggtgcccttccctgaaggagaagcgtttccgcccgtgtccgtgactactttgggatctccaatgcattcgaat

SEQ ID NO: 18383 - DNA, 1080 bp, synthetic construct
  misc_feature 1..1080: note = source = /note="Description of Artificial Sequence: Synthetic coding sequence"
  source 1..1080: mol_type = other DNA
atggcggggcacctggcttccgacttcgctttttcgcctcctccgggtggcgggggcgacggccccggtggaccggaacctggttgggtcgacccaagaacctggctgtcattccaaggaccaccgggcggtccaggaatcggcccgggtgttgggccgggtagcgaggtttggggcattcctccgtgccctccaccatacgagttctgtggcggcatggcttactgcggacctcaggtaggcgtgggcttggttccgcaaggtggcctggagacttcacagccggaaggggaagcgggcgtcggtgtggagagcaacagcgacggagcctctccagagccgtgcacggttacgccgggtgccgttaagttggagaaagaaaagttggaacaaaatcctgaggaaagccaggacattaaagcacttcaaaaggaactagaacagttcgcgaagttgctgaagcagaaacgcatcacattggggtacactcaagcagacgtcggcctgactctcggcgtgttgtttgggaaagtgttttcccaaactaccatttgtcgcttcgaagcgctgcaactgtctttcaagaatatgtgcaagctgcgtcctctgcttcagaaatgggttgaagaagcggacaacaacgagaacctgcaggaaatttgtaaagccgagactctggtgcaggcccggaaacggaaacgcacctcaattgagaaccgcgttagggggaacctggagaacctgttcctgcaatgtcccaagccaaccctgcagcagatttcacatatcgcccagcagcttggcctggagaaggatgtggtgagagtgtggttctgtaaccggaggcaaaaaggcaaaaggagctctagcgactacgctcagcgagaagattttgaagccgctggaagcccgttcagcgggggcccagtaagcttccctctagcccctggtcctcacttcggtacgcctggttatggttcaccacactttaccgctctgtacagttcggtccctttccctgaaggtgaagcctttccaccagtcagcgtgacaacccttggtagtcccatgcatagcaat

SEQ ID NO: 18384 - DNA, 1080 bp, synthetic construct
  misc_feature 1..1080: note = source = /note="Description of Artificial Sequence: Synthetic coding sequence"
  source 1..1080: mol_type = other DNA
atggccggtcatctggcgagcgacttcgcatttagcccacctcctggcgggggcggggacggccccggcggccctgaaccgggatgggtcgatcctaggacctggttgtcgttccagggaccacccgggggccctggcatcggccccggggtcgggccaggtagtgaggtctgggggatcccaccctgccctcctccatatgaattctgcggaggaatggcatattgcggcccacaggtgggggtcggactggtaccccagggcggcctcgaaacaagtcagcctgagggcgaggccggcgttggcgtcgagagcaacagcgacggcgcttctccagaaccctgcaccgtgacgccgggggccgtgaagctggagaaggagaaacttgaacagaatccggaagaatcccaggatataaaggctctccaaaaggaactggagcaatttgcaaaactactgaaacagaagcggattactctgggttacacccaagccgacgtggggttaaccttgggtgtcttgtttggtaaagtgtttagtcaaacgacgatctgtcggtttgaagctttacagcttagtttcaagaatatgtgcaagctccggccactgcttcagaagtgggtggaagaagccgataataatgagaatctgcaggagatttgtaaggccgaaacactcgtgcaagctcggaaacgtaagcgtacctccatagaaaacagggttaggggtaacttggaaaatctgtttctgcagtgccccaagccaactctgcagcagatatctcatatcgcacagcagcttgggcttgagaaggacgtggtgagggtatggttctgcaatagacggcagaagggtaaacggagttcgagcgactatgctcagcgcgaggattttgaggcagccggaagtccctttagcggaggacccgtatctttccctctcgcacctggaccccatttcgggacccctggctacgggagtcctcattttacagctttgtatagcagtgtcccttttccggaaggtgaagcgttccctcccgtttcggtaaccacactgggaagccccatgcattcgaat

SEQ ID NO: 18385 - DNA, 1080 bp, synthetic construct
  misc_feature 1..1080: note = source = /note="Description of Artificial Sequence: Synthetic coding sequence"
  source 1..1080: mol_type = other DNA
atggcaggccacctggcatccgactttgctttctcccccccccctggcggaggaggagatggtccaggggggccagagcccggctgggtggacccacggacctggctctcgtttcaaggcccccctggcggaccaggtattggaccaggggtgggcccgggctccgaagtctggggaatcccaccatgccctcccccttacgagttctgcggaggtatggcctattgcggtccgcaggtgggcgtaggtctagtgccacagggcggtctggagacatctcagccggaaggggaggcaggtgttggtgtagagagcaacagcgatggagcgagccccgaaccttgcaccgtgacacccggggctgttaaactcgaaaaggagaaattggaacagaaccctgaggagtctcaagacattaaggccctgcagaaggagttggagcagttcgctaaactgttgaaacagaagcgtatcaccctggggtatacccaggctgatgtcggccttacactgggagtgctattcggcaaagtgttctcccaaacaaccatctgccgatttgaggctcttcagctttcctttaagaatatgtgcaagctgaggccccttctacagaaatgggtggaagaggccgataataatgaaaaccttcaagagatctgtaaggccgagactctcgtccaggcccgcaaacgcaaacgcacctctatcgaaaatagggtgcgaggcaacctggagaatttatttctgcagtgcccaaagcctacactgcaacaaattagccacatagctcagcaactcggcctcgaaaaggacgttgtgcgcgtttggttttgcaaccggcgccagaagggaaaacggtcttcctctgactatgcccagagggaagacttcgaggccgctggctcgcccttctccgggggacctgtgtcattccccctggcccctggcccgcatttcgggactcccggctatggcagcccccactttactgccctatatagtagtgtcccttttcctgaaggcgaagctttccctccagtctccgtgacaactctggggtcacctatgcattctaat

SEQ ID NO: 18386 - DNA, 1080 bp, synthetic construct
  misc_feature 1..1080: note = source = /note="Description of Artificial Sequence: Synthetic coding sequence"
  source 1..1080: mol_type = other DNA
atggcgggacatctcgcatcagatttcgccttttcgccgcctccaggaggaggaggagacggccctggagggccggaacctggctgggtggacccacgcacgtggctgagcttccagggaccccctggaggaccggggatcggccctggtgtcggaccgggatcagaggtctggggtatccctccatgcccgcctccttacgaattctgcggaggaatggcgtactgcgggcctcaggtgggggtcggactcgtcccccaaggaggccttgaaacgtcgcaaccggaaggtgaggcaggggtcggggtggagagcaattccgacggggcgtcaccggagccatgcactgtgactccgggggccgtcaagctcgaaaaagagaagctggagcagaacccggaagagagccaagatatcaaggccctgcagaaggaactggaacagttcgctaagttgcttaagcagaaaaggataactctcggatacactcaggctgatgtgggtctgactctcggagtgctcttcggaaaggtgttctcccagaccactatctgtaggtttgaggctctccaactgtcgttcaaaaacatgtgtaaactgaggcccctgctgcagaaatgggtcgaggaggccgacaacaacgagaaccttcaagaaatttgcaaggcagaaacgttggtgcaagccagaaaacgcaagcggaccagtatcgagaaccgagtgaggggcaacctggaaaacctgttcctgcagtgcccgaagcccaccctccagcaaatttcacatatcgcccagcaacttggattggagaaggacgtggtccgcgtatggttctgtaaccgcagacagaagggcaagcggtcgtcatccgactatgcccagcgagaggattttgaagctgcaggcagccctttctcaggggggccggtgtcattcccgctggccccgggtccacactttggcacccctggatatggtagcccgcactttactgccctgtactcgagcgtgccttttcctgaaggcgaggcgttccccccagtcagcgtgaccaccctgggttcgccgatgcactccaat

SEQ ID NO: 18387 - DNA, 1080 bp, synthetic construct
  misc_feature 1..1080: note = source = /note="Description of Artificial Sequence: Synthetic coding sequence"
  source 1..1080: mol_type = other DNA
atggccggacatctcgcttccgacttcgctttctctccccctcccgggggggggggggatgggcccggaggacctgaacctggatgggtggaccccaggacatggctttcctttcagggacctcctgggggacccggaatagggccaggagtggggccaggatctgaagtttggggaatacccccttgtcctccaccctatgaattctgcggagggatggcctattgcgggcctcaggtgggagtagggctagtccctcagggaggacttgagacaagtcagcctgaaggggaagccggagtaggggtggaatcaaatagtgatggagcctcacccgagccttgtacagtcactcctggagccgttaaactggaaaaagaaaaactggaacagaatccagaagaatcacaagacataaaggcacttcagaaagaattggaacagttcgccaagctgctgaaacagaaacgaataacattagggtatacacaggccgatgtggggctaacattgggggtgttatttggaaaagtgttttcacaaactactatctgtcgattcgaggctctccagttatcattcaaaaacatgtgtaagctaagaccactattacagaaatgggtggaagaagctgataataatgaaaatctccaggaaatctgtaaagcagaaacactcgtgcaggccagaaaacggaaacgcacttctatcgaaaatcgagtacgcggaaacctggaaaacctctttctgcaatgcccaaaaccaacactccagcagatttctcatatcgcacagcagcttggactggagaaagatgtggtcagagtgtggttctgtaaccgcaggcagaagggaaaaaggtcttcttccgattatgcgcagcgcgaagattttgaggctgcagggtcccctttcagtggggggcctgtatccttccctctagcaccagggccgcattttggaactcccgggtatgggtccccacattttacagcactatacagttcagtgccttttccagaaggggaagcttttccccctgtttctgtcacaacactggggtctcccatgcactccaat

SEQ ID NO: 18388 - DNA, 1080 bp, synthetic construct
  misc_feature 1..1080: note = source = /note="Description of Artificial Sequence: Synthetic coding sequence"
  source 1..1080: mol_type = other DNA
atggctggccacctggcctccgactttgcgttttccccgccacctggcggagggggagatggtccggggggccctgagcccggttgggtggatccccgaacttggctttcgtttcagggacccccgggcggacctggaatcggcccaggtgtaggacccggatccgaagtgtggggaatccccccttgtcctccgccgtatgaattctgcggaggtatggcctactgcggtcctcaggtgggtgttggacttgttccacaaggtggcctggaaaccagccagccggagggagaagcgggcgtgggagtcgagagcaatagtgacggagcaagccctgaaccatgcaccgtgaccccgggagctgtcaagctggaaaaagagaagttggagcagaacccggaagagtcccaggacataaaggccctgcaaaaagagttggaacaattcgccaagctcctcaagcaaaagagaatcaccctgggctacactcaggcggacgtgggactgacccttggcgtactgttcggaaaggtcttttcgcagaccacgatctgtcggttcgaggctttgcagctgtcatttaagaacatgtgcaaattgcggcctcttcttcaaaagtgggtggaggaagcggacaataacgagaacctccaggaaatctgcaaggctgagacgctggtgcaagctcgcaagcggaaaagaacttcaatcgaaaaccgcgtgaggggtaatctcgagaatctgttcctgcagtgcccgaagccgactctccaacagatttcccatatcgcacaacaactgggactggagaaagacgtggtccgggtgtggttctgcaacagacgccagaaggggaagcgctcgtcgagcgattacgcgcagagagaagatttcgaggccgcaggatcgccattctcgggagggccggtcagctttcccctggcacctggaccacatttcgggactccaggctatggctcgccgcacttcaccgccttgtactcgtcagtgccgttccccgaaggcgaggccttcccaccagtgtccgtgacgactctgggctcaccgatgcactcaaac

SEQ ID NO: 18389 - DNA, 1080 bp, synthetic construct
  misc_feature 1..1080: note = source = /note="Description of Artificial Sequence: Synthetic coding sequence"
  source 1..1080: mol_type = other DNA
atggccggccatctcgccagcgattttgcgttctctcccccaccagggggaggtggtgacggccccggcgggccggagccaggatgggttgatcctcgaacttggctttcgttccagggaccacccggtgggccggggattggccccggagtgggccctggctccgaggtgtggggtatacctccctgccctcccccatacgagttctgcggaggtatggcctactgtggaccgcaggtcggcgttggtctggtaccacagggcggactggagacatcccagcctgaaggagaagcaggcgtaggcgtggagtctaatagcgacggagcctcgccggagccctgtacagtcacccccggcgctgtaaaactagaaaaggaaaaactcgaacaaaatcccgaggaaagtcaagacattaaggcattacagaaagaactcgagcagttcgctaagctcttgaaacagaaaaggatcacactcggctacacccaagctgacgtaggcctgaccctgggcgttttgttcgggaaagttttttcccaaacgactatatgcagattcgaagccctgcagctgagcttcaaaaacatgtgcaaacttcgacccctgctgcagaaatgggtggaggaggcggataacaatgaaaatctgcaggaaatttgcaaggcggaaacactggtgcaagccagaaaacgaaaacggacatcaattgaaaacagagtcaggggaaacctcgagaacctgttcttgcagtgtcccaaaccaaccctgcagcaaatctcacacattgcacagcagttagggctggagaaggatgttgtccgggtgtggttctgtaaccggagacagaaggggaaaaggtctagctccgattatgctcagagagaggattttgaagccgcgggctcccctttttcgggcggcccagtctcttttcctctagcgcccgggccccactttggaacccctggatacggatcccctcactttactgctctgtattcttccgtgcccttccccgaaggagaagcttttccccccgtgtctgtaacaacactcgggagtcccatgcatagcaac

SEQ ID NO: 18390 - DNA, 1080 bp, synthetic construct
  misc_feature 1..1080: note = source = /note="Description of Artificial Sequence: Synthetic coding sequence"
  source 1..1080: mol_type = other DNA
atggcgggccacctggcatcagacttcgctttctcgcccccacctggtgggggcggcgatggccccggtggtcctgaacctgggtgggtagaccctaggacctggctcagcttccaaggtcctcctgggggcccgggaattggcccgggggtcggccccgggtccgaggtgtggggcatcccaccttgccctcccccctatgagttctgcggaggtatggcctactgcggcccacaagtcggggtggggctggttccgcagggcggcctagaaacgtcccagcccgagggggaagctggcgtcggagtcgagtctaattctgatggggcctctccggaaccctgcacagtcacccctggagccgtgaagctggaaaaggaaaagctcgagcaaaaccccgaggagagtcaggacatcaaggcactgcagaaagagttagagcagttcgctaagctgcttaaacagaagcgtataaccttggggtacacccaggccgatgtgggtttgaccctgggcgtcctatttggcaaggttttctctcagaccaccatttgtaggttcgaagctcttcaactctcatttaaaaatatgtgtaaattgaggcccctcctacagaagtgggtggaggaggccgacaataatgagaatctccaagagatctgtaaagctgaaacattggtgcaggctaggaaaagaaaaaggacgtcgatagagaatagggtaagaggcaatcttgagaatctgtttcttcagtgtcctaagcctacactgcagcagatcagtcatattgcccagcagctcggcttggagaaggatgtggttagggtctggttttgtaacagacgccagaaggggaagagatcctcttctgactacgctcagcgcgaagatttcgaagctgccggatcaccattttccggtggccccgtgagctttcccttggcccctgggccacacttcggcacacctggatacggcagcccacacttcaccgccttgtacagtagtgtcccattccctgagggcgaagctttccccccagtatctgtgaccacgctggggtctccaatgcacagcaac

SEQ ID NO: 18391 - DNA, 1080 bp, synthetic construct
  misc_feature 1..1080: note = source = /note="Description of Artificial Sequence: Synthetic coding sequence"
  source 1..1080: mol_type = other DNA
atggcaggacatttagcctcagactttgctttttcgccaccacccggcggaggcggagatggcccagggggtcccgaacccggttgggtggatccccgcacttggcttagtttccaaggccctcccggcggccctggtatcggcccaggggtaggcccgggcagtgaggtctggggaattccaccctgccccccaccttatgaattttgtgggggtatggcgtactgcggccctcaggtgggagtcggcctcgtcccgcagggtggtctggaaacctcgcagcccgaaggggaggccggagttggagtggaaagcaacagcgacggtgcatcccctgagccttgtactgtcacacctggggcagttaagctagagaaggagaagctcgaacagaatcccgaggagagtcaagacatcaaggcattgcagaaggaactcgaacagttcgccaaactgctcaaacagaagcgaatcacgttgggatacactcaggcagatgtggggctgactctaggggtcctgtttggcaaggtattttctcaaaccacaatctgtagattcgaggccctccagctgtctttcaaaaacatgtgtaagcttcgcccccttctacagaagtgggtggaagaggcagacaacaacgagaacctccaagagatctgcaaggcggagacattggtgcaggctcggaaacgcaagcggacatccatcgagaaccgggtgcgggggaaccttgagaatctatttcttcagtgtccaaaacccactctacagcagatttcccacatcgcccaacagcttggtctggagaaagacgttgtgcgggtgtggttctgcaaccgccggcagaagggcaaaaggtcctcttcagattacgcccaaagagaagactttgaagccgccggctcaccgtttagtggcgggccagtctcctttccattagctccggggccccacttcgggactccgggatatgggagtccccatttcaccgcactgtactcttcagttccctttcctgaaggagaggcgttcccccctgtatcggtgaccactctcggctcaccaatgcattctaat

SEQ ID NO: 18392 - DNA, 1080 bp, synthetic construct
  misc_feature 1..1080: note = source = /note="Description of Artificial Sequence: Synthetic coding sequence"
  source 1..1080: mol_type = other DNA
atggccgggcatttggcgtcggattttgcttttagtccgccgcctggtggcggaggcgatggaccgggtggtccggagcctggctgggttgatcctcgaacgtggttatcttttcagggaccccccggtggtcctggtattgggccgggagtcgggccgggctcggaagtctggggcatcccaccttgtccgccaccttatgaattttgtggaggtatggcttattgtgggccgcaagttggtgttggacttgtgccacaaggtggcttagaaacatctcaaccagaaggagaagctggagtcggagtagaatcaaatagcgatggtgcgtcgccagagccctgtaccgttacaccgggagcagttaaactggagaaggaaaagcttgaacaaaaccctgaagaaagccaagatatcaaagccttgcaaaaagaactcgagcaatttgctaaattgcttaaacaaaaaaggattactttgggctacacgcaagcggacgttggattaactctcggtgttttgtttgggaaagttttttcacagacaacgatttgtagatttgaggcattgcaactttcctttaaaaatatgtgtaaactccggcccttgttacagaaatgggtggaagaagcagataataacgaaaacttgcaggaaatatgcaaagcggaaacactggttcaagcccgcaagagaaagcggacatcaattgagaatcgagtccggggtaatctggaaaacctttttctgcaatgcccaaagccgaccttacaacagatttcccatattgcgcagcagctgggtctcgaaaaagacgtcgttcgtgtgtggttttgcaatcgtcggcagaaaggaaaacgttcaagctctgactatgctcaacgtgaggattttgaagctgctggatcaccattctcaggtggtccggtgtcattccctttagcaccggggccgcattttggcacaccaggttacggttcaccgcattttaccgcactatatagctcggtaccgtttcctgaaggagaagcatttccgccggtttccgtgacaacgctggggtcacctatgcacagtaat

SEQ ID NO: 18393 - DNA, 1080 bp, synthetic construct
  misc_feature 1..1080: note = source = /note="Description of Artificial Sequence: Synthetic coding sequence"
  source 1..1080: mol_type = other DNA
atggccggccaccttgcatccgatttcgccttctcccctcccccgggggggggcggagacggcccaggcggccctgagcccgggtgggttgacccgagaacttggctatcgttccaggggcccccaggcgggccaggaatcggccccggggtagggcccggttctgaggtttggggaatcccaccttgcccccctccttatgagttctgcggtggcatggcctactgtggtccccaggtcggcgtgggtctcgtccctcaaggtggcctcgagacctctcagccagagggggaggccggagttggagtggagagcaatagtgacggtgcctcccctgaaccgtgcacggtgacccctggagccgtgaaactggagaaggagaagctcgagcagaaccctgaggagtcccaagatatcaaagccctccagaaggaactcgagcagtttgcgaaactcctaaagcagaaacggattactctcggttatactcaagccgatgttgggctcactctaggcgtgcttttcggcaaagtcttcagtcagactacaatctgtcgtttcgaggctctgcaattgagctttaaaaatatgtgcaagttaagacccctcctacagaaatgggtagaggaggctgataacaatgaaaacctgcaggagatctgcaaggccgagaccctggtacaggcaaggaaacgcaagcgcaccagtatcgagaacagagttagaggaaaccttgagaatctgtttctgcagtgtcccaagcctacgctacagcagatctcccacattgcacaacagctaggcctggagaaagatgtagtaagggtgtggttctgcaaccgtcggcagaagggcaagcgctcctcctctgactacgctcagagggaggacttcgaagctgctgggtctccctttagtggcggtccagtgtcattccccctggcaccgggcccacatttcggaaccccgggctacggcagtcctcacttcacagcgctttattcaagcgtgccgtttccagagggcgaagcctttccgccagtcagtgtgaccactctcggatcgcctatgcattctaac

SEQ ID NO: 18394 - DNA, 1080 bp, synthetic construct
  misc_feature 1..1080: note = source = /note="Description of Artificial Sequence: Synthetic coding sequence"
  source 1..1080: mol_type = other DNA
atggccggacacctggcctctgattttgcttttagcccacccccgggaggcggaggtgacggacccggcggccccgaaccaggttgggtggatcctcggacctggctgtctttccaaggaccacctgggggacctgggataggccccggtgtaggaccaggatccgaggtgtggggcattccaccatgtcctcctccttatgaattttgcgggggcatggcttactgcgggccacaggtcggcgtaggactcgtgccccaaggcgggcttgagaccagtcagcctgagggggaggcaggtgtgggggtggaatccaactcagacggggcttcgcctgagccatgcacagtaactcctggggctgtgaagctggaaaaggagaagttggaacagaaccctgaagaatcacaggatatcaaagccctgcagaaggagctggaacagttcgcaaagctgctgaaacagaagagaatcacactggggtacacgcaagccgacgtcggattgaccctgggcgtcttgttcggaaaggtgttctcccagaccaccatctgcaggttcgaggctctgcaattgagtttcaagaacatgtgcaaactgaggccgctgctgcagaaatgggttgaggaagcagataataacgaaaacctccaggagatttgcaaggctgagacccttgttcaggcccgcaagcgcaaaagaacaagtatcgaaaatagagtgagaggcaacctggagaacctgttcctgcaatgcccaaagccgacactgcagcaaatctcgcacatcgcacaacagctgggcttggaaaaggacgtggtaagagtgtggttttgcaaccgccgccaaaaaggcaagaggtcgagcagtgattacgcacagcgggaagatttcgaagcagctggcagtccattcagtggcggcccagtttcctttccactggcaccaggcccccactttggcaccccaggctatggttccccccacttcacagctctctactcttctgtgccatttccagaaggcgaggctttcccccccgtctcagtgacaacattaggctctccaatgcacagcaac

SEQ ID NO: 18395 - DNA, 1080 bp, synthetic construct
  misc_feature 1..1080: note = source = /note="Description of Artificial Sequence: Synthetic coding sequence"
  source 1..1080: mol_type = other DNA
atggccgggcacctcgcctcagattttgcgtttagccctccaccggggggcggaggtgatggaccaggtgggcctgaacctggttgggttgatcctagaacctggctttcctttcaaggtcctcctggtggtccaggaattggaccaggcgtgggacctggctccgaagtgtggggcattccgccttgcccccctccctacgaattctgtggaggtatggcatactgtggacctcaagtgggcgtcggcctggtgcctcagggaggccttgaaaccagccagccagaaggagaagctggtgtgggtgtggaatcaaacagcgatggcgcatcccccgaaccttgtactgtgacccctggagcagtgaagctcgaaaaggaaaaacttgagcagaatccagaagaatcccaagatatcaaggccctgcagaaggaactggagcagtttgcgaagctgctgaaacaaaaacggattacccttggctacactcaagcggacgtgggacttacccttggtgtcctgtttgggaaggttttttcacaaaccaccatttgccgtttcgaagcacttcagctttccttcaagaatatgtgtaagctgaggcccctcctgcaaaagtgggtggaggaagcagataacaatgagaacctgcaagaaatctgcaaggcggaaacccttgtgcaggccagaaagcggaagagaacgtccatcgagaatagagtgcgcggcaacctggagaacctgttccttcagtgtcctaaaccgactctgcaacaaattagccacatcgctcaacaattgggactggagaaggacgtggtgagggtctggttttgtaataggaggcagaaggggaaaaggagttcttccgactacgcgcaacgagaggacttcgaggcagcgggttccccatttagcgggggcccagtgagcttccctctcgcaccaggacctcattttggtaccccagggtacggatcgccacattttactgcgctgtattctagcgttccctttcccgagggtgaggcctttccacccgtcagtgtaaccactctggggtcgccgatgcattccaac

SEQ ID NO: 18396 - DNA, 1080 bp, synthetic construct
  misc_feature 1..1080: note = source = /note="Description of Artificial Sequence: Synthetic coding sequence"
  source 1..1080: mol_type = other DNA
atggcggggcacctcgctagcgattttgcatttagccctccccctggcgggggaggggatggccccggtgggcctgagccgggttgggtggatccaagaacctggctcagctttcaaggacctccaggaggccctggcatcggacctggagtcggccccggatcggaagtttggggtatccctccctgtcctccaccatacgaattctgcggaggaatggcctactgcgggcctcaagtgggcgtcggtctggtccctcagggtgggctggaaactagccagcccgagggtgaggctggagtgggcgtggagtctaactccgacggtgcatcgccggagccatgtaccgtgactcctggagcagtcaaactggagaaggagaagctcgagcaaaaccccgaggagtcccaagatatcaaagcactgcagaaggaacttgaacagttcgcaaaactcctgaagcagaagaggataacccttgggtacacccaagcagacgtggggcttacgttgggcgtcctcttcggaaaggtcttttcccaaactaccatctgccggtttgaagcacttcagctcagctttaagaatatgtgtaagctgcgtcctcttcttcaaaaatgggtggaggaggcagataacaatgagaatctccaagaaatttgtaaggcagaaactcttgtgcaggcgaggaagcgcaagcggacctccatcgaaaaccgggttagagggaaccttgagaacctttttctgcaatgtccaaagcctactttgcaacaaattagccacattgcccagcagctcggtcttgaaaaggacgtggtgcgagtgtggttttgcaatagacggcagaaagggaaaagatcatcctcggattacgcacaaagagaggacttcgaagcagccggctctcctttttccggtggtcccgtctcctttcctcttgccccggggcctcatttcggcactcccggctacgggtcgccgcactttactgctctctactcctcggtgccatttcctgaaggtgaagcatttccacctgtctcagtgactaccttgggatcgcctatgcatagcaat

SEQ ID NO: 18397 - DNA, 1080 bp, synthetic construct
  misc_feature 1..1080: note = source = /note="Description of Artificial Sequence: Synthetic coding sequence"
  source 1..1080: mol_type = other DNA
atggccggacacttggcgtcggattttgcttttagcccaccgcctggaggagggggcgatggcccaggcgggcctgagcctggctgggtggatcccagaacttggctctccttccagggccccccaggagggcctgggataggcccgggagtcggaccaggaagtgaggtttggggcatccccccgtgccctcccccgtatgaattttgcgggggcatggcctattgcgggccgcaggtcggggttggcctggtgccacaaggtgggctggagacatcacagccggaaggcgaagcaggggtaggggtggagtccaattctgacggcgcgtctccagaaccctgcaccgtcacacccggtgctgtaaaactcgaaaaagagaagctggagcaaaatcccgaggagtctcaagatatcaaggcattacagaaggagcttgagcaatttgctaaattactgaagcagaagcggatcaccttggggtatactcaggctgacgtcggcctgactctgggagtactcttcggcaaagtgttctcacagaccaccatctgtcgtttcgaagcactacaattgtcgtttaagaatatgtgtaagctcagacccctgctccagaagtgggtcgaggaagctgataataatgagaatttacaggaaatctgcaaagcagagactctcgtacaagcccggaagcgaaaaaggacaagcatcgaaaatagggtccgaggcaacctagaaaacctttttttacaatgtcctaagcctactctgcagcagatcagtcacattgcacagcagcttggcctggaaaaagacgtcgtacgggtctggttttgcaatcgccggcagaaaggaaagaggtcttctagcgactatgcccagagggaggactttgaagctgctgggagcccattctccggaggtccggtttcattcccactcgccccgggcccccacttcgggacacctggatatggctctcctcacttcacagcactttactcctcagttcccttccccgagggtgaggcctttccccccgtgagcgtcactacactgggtagtccaatgcacagtaac

SEQ ID NO: 18398 - DNA, 1080 bp, synthetic construct
  misc_feature 1..1080: note = source = /note="Description of Artificial Sequence: Synthetic coding sequence"
  source 1..1080: mol_type = other DNA
atggctgggcatctggcctcagactttgccttctcaccccctccaggagggggcggagatggacctggcggaccggagcccggctgggtcgacccgcggacttggctgtccttccaaggcccgccaggcggtccaggtatcgggccgggcgtgggtcccggctccgaagtctggggcatcccgccctgcccaccaccgtacgaattctgcggaggcatggcctactgcggaccacaggtcggggtggggttggtgccacaaggcggtctggaaacctcgcagccggagggagaggcaggtgtgggcgtggaatccaactcagacggagcgtcgccggaaccctgcactgtaaccccaggtgccgtgaaactggagaaggaaaagctcgaacaaaacccagaggaatcacaggacattaaagcgctgcaaaaggaacttgaacaattcgcgaagctgctgaaacagaagaggatcacgctcggatacacccaagcagacgtcggtctgactctcggagtgcttttcggaaaagtgttctcgcaaaccaccatttgtagattcgaagctctgcagctttcgtttaagaatatgtgtaagctgcgcccgctcctgcaaaaatgggtcgaagaggccgataacaatgagaacctgcaggagatctgcaaggctgaaactctcgtgcaagcgcgcaagcgcaaaagaacctcaatcgagaatcgggttcggggcaatctcgaaaatctgtttctgcaatgcccgaagccgaccctgcagcagattagtcatatcgcacaacaactcggactcgaaaaagatgtggtgagagtgtggttctgcaaccgccggcaaaagggtaaaagaagctcatccgactacgcacagcgggaggacttcgaggccgccggatcgccattttcgggtgggccggtgtcattcccgctcgcgccgggacctcacttcggcacccccggatatgggagcccacactttactgcactctacagctcagttccgttccccgaaggagaggcgtttccgccggtgtcagtgaccactctgggttcaccgatgcactctaac

SEQ ID NO: 18399 - DNA, 1080 bp, synthetic construct
  misc_feature 1..1080: note = source = /note="Description of Artificial Sequence: Synthetic coding sequence"
  source 1..1080: mol_type = other DNA
atggcaggtcatctcgcatctgatttcgcgttttcccctcctccaggaggtggtggagatggaccaggagggcctgaacccggatgggtggaccctaggacttggctgtcgtttcaaggaccaccaggcgggcctggcattggccctggggtgggtcctggctccgaagtgtggggaattccaccatgtccaccaccatacgagttttgcggaggtatggcttactgtggaccccaagtgggagtcggtctggtgcctcaaggaggacttgaaaccagccagcctgagggagaagcaggagtcggagtggaatccaactcggatggagcatcgccagagccctgtaccgtgacgccgggggccgtgaaacttgagaaggaaaagttggaacagaaccccgaagaatcacaagatatcaaagcactgcaaaaggaactcgagcagttcgcaaagctgctcaagcagaagcgcatcaccctcggatacactcaagcagatgtgggtctgacgcttggtgtgctctttggaaaagtgttttcacaaactaccatttgccgcttcgaagcactgcaactgtcattcaaaaacatgtgtaagctccggccacttctccaaaagtgggtggaagaagcagacaataacgagaaccttcaggaaatttgtaaggcagaaactcttgtgcaggcaagaaagcgaaagcgcacctccatagaaaacagagtgaggggcaatctcgaaaatctcttcctgcagtgccctaagccgacccttcaacagatttcccatatagctcaacagcttgggctcgaaaaagacgttgtgcgggtgtggttttgtaaccggcgacaaaaagggaagcggagcagctcggactacgcacaacgtgaggactttgaagcagcaggatcgccttttagcggtggaccggtcagctttccacttgcacctggtccacactttggtactcccggatacggttcaccacacttcactgcattgtactcgagcgtgcccttccctgaaggtgaggcattcccgcctgtgtcggtcaccacccttggatcgcctatgcattccaat

SEQ ID NO: 18400 - DNA, 1080 bp, synthetic construct
  misc_feature 1..1080: note = source = /note="Description of Artificial Sequence: Synthetic coding sequence"
  source 1..1080: mol_type = other DNA
atggccggacacctggcgtcagattttgctttctccccacctcccggtggaggcggcgatggcccaggagggccggaaccaggttgggttgaccctcgaacttggttgagcttccaggggccacccggtggccctggaataggccctggtgtcggccccggcagcgaagtgtggggcattcctccctgcccaccaccttacgaattctgcggaggcatggcctattgcgggcctcaggtaggtgtgggcttagtgcctcaaggaggattggaaacctcacaacctgagggagaggccggcgtgggagtggaaagcaattctgacggtgcatcaccggagccttgcactgttacgccaggtgccgtgaagctggagaaggaaaagctcgagcagaatcccgaagaaagccaggatattaaggcactgcagaaagaactggagcagttcgcaaagcttcttaagcagaagaggattaccctgggctatactcaggcagacgtgggactgacactgggggtgctcttcggtaaggtttttagccaaacaaccatctgtcgttttgaagcactccagctatcattcaagaacatgtgtaagctgaggcctcttttgcagaaatgggtagaggaagctgacaacaatgaaaacctgcaggagatttgcaaggcagagacattggtgcaggcgaggaagcggaagcgcacttcaattgagaatagagtcagaggaaacctcgagaatctgtttttgcaatgcccaaagccaacgctgcagcagatcagtcacattgcgcagcagttgggtttggaaaaagatgtcgtccgggtgtggttttgtaatagaagacagaaggggaagcgaagctcaagtgactatgcccagcgagaggatttcgaagctgccggaagcccattcagcggcggtccagtaagtttcccgctcgcaccagggccgcattttgggaccccagggtacggctcccctcacttcacagcgctttactcatcggtgccattccccgagggagaagccttccctcccgtgagcgtaaccacgctgggctccccaatgcattccaac

SEQ ID NO: 18401 - DNA, 1080 bp, synthetic construct
  misc_feature 1..1080: note = source = /note="Description of Artificial Sequence: Synthetic coding sequence"
  source 1..1080: mol_type = other DNA
atggccggacacctcgcctcggattttgccttctcgcccccacctggcggaggtggggacggccccggaggtcccgagccaggatgggtggacccacgaacttggctcagctttcagggtccgccagggggacccggaattggtccaggggtgggaccggggtccgaagtgtggggaatcccaccgtgtccgccgccgtacgaattctgcggcggaatggcgtactgcggcccccaagtcggagtgggcctggttccgcaagggggattggaaacttcccagcctgaaggcgaggccggcgtcggagtggaatccaactcggatggggcctcgccagagccgtgcactgtgacgccgggagccgtgaagctggagaaggagaaacttgaacagaacccagaagagtcgcaggacatcaaggctctccaaaaagaactcgagcagttcgcgaagctcctgaagcaaaagcgcatcacgctggggtacactcaggccgatgtcggcttgactctgggagtcttgttcggcaaagtcttttcgcagaccaccatctgcaggttcgaggcacttcaactgtcgttcaagaatatgtgtaagctgcggccactgctgcaaaaatgggtagaagaagctgacaacaacgaaaacctgcaggagatctgcaaggctgaaaccctggtgcaggcacgcaagcgcaaacgtacctcgatagagaatagggtaaggggcaaccttgaaaatcttttcctgcaatgcccgaagcccactctgcagcaaatctcgcatattgcccaacagctcggcctcgaaaaggacgtggtgagagtctggttctgtaaccggcgccaaaagggcaagcgctcctcaagcgactacgcacagcgggaggattttgaagccgccggctcgccgttctcaggaggcccggtgtcgtttccgctcgcgccgggtccgcacttcggaacccctggatatggttccccgcatttcaccgccctctactcctcagttccgttcccggagggagaagcattcccaccagtttcagtgactaccctgggatcaccgatgcactccaac

SEQ ID NO: 18402 - DNA, 1080 bp, synthetic construct
  misc_feature 1..1080: note = source = /note="Description of Artificial Sequence: Synthetic coding sequence"
  source 1..1080: mol_type = other DNA
atggcaggacacttggcgtccgacttcgctttctccccaccgccgggaggtggtggggatggaccaggaggaccggagccgggctgggtggaccctagaacctggctgtccttccaagggcctccgggagggccgggaatcgggcccggcgtcggcccaggttccgaggtgtgggggattcctccatgccctcctccctacgaattttgtggcggtatggcctattgcgggccacaggtcggtgtgggactggttcctcagggaggactggaaacctcacagcctgaaggcgaagcgggagtgggagtggagtccaatagcgatggagcttcgcctgaaccctgcactgtgactcctggggcggtgaagctggagaaggaaaagctcgagcagaatccggaagagtcccaggatatcaaggcccttcaaaaggaacttgagcagtttgctaagttgctgaagcagaaaaggatcacccttggctacacgcaggcagatgttggactcactctgggcgtgctctttggaaaggtattctcacagacgaccatctgtcgcttcgaagccttgcagctttcttttaagaacatgtgcaagctgcgcccgctgctgcagaagtgggtggaggaagcagacaacaacgagaacctgcaggaaatctgcaaggccgagactctggtccaagctcgcaagcggaagaggacctccattgagaaccgggtgcgcggcaacctggagaacctgttcctccagtgccctaaacctactctccagcagatatcgcatatcgcccagcaactcggcctggaaaaggacgttgtgcgggtgtggttctgcaacagacggcaaaaaggaaagagatccagctcagattacgctcaacgggaggacttcgaggcggccggctcaccgttcagcggaggaccggtgtccttcccgcttgcaccgggcccacacttcggcaccccaggatacgggtccccccattttaccgccctttactccagcgtgccctttccggaaggagaggcgttccctccagtgtcagtgaccactctgggatcaccaatgcactccaac

SEQ ID NO: 18403 - DNA, 1080 bp, synthetic construct
  misc_feature 1..1080: note = source = /note="Description of Artificial Sequence: Synthetic coding sequence"
  source 1..1080: mol_type = other DNA
atggctggacacctggcaagtgacttcgctttcagtcctcccccaggcggcgggggggacggccccggcggtccagaacctggctgggtagatcctcggacatggctgagcttccagggaccacccggcggccctggaattgggccaggcgttgggcccggctctgaggtctggggtatccctccatgtcccccgccttacgagttttgtgggggaatggcttactgcgggcctcaagttggagtcggacttgtaccccagggtggcttggagacaagtcagcccgaaggcgaagccggtgtgggagttgagtctaatagcgatggcgctagtcccgaaccgtgcacagtgacgcccggcgctgtgaagctagaaaaagagaagctggagcagaacccagaggagtcgcaggatatcaaggccctgcaaaaggaattagaacagttcgctaaattattgaagcagaaacggatcactttaggatatacccaggctgacgttggtctcacgttgggcgtcttgtttggcaaggtgttctcacaaactaccatctgcaggttcgaggcacttcagctgtcctttaaaaacatgtgcaaactccgccccctgctgcagaagtgggtcgaggaagcggataataacgagaatctgcaggaaatttgtaaagccgagaccctcgtgcaggcaagaaaacggaagaggacgagtattgaaaacagagtgcgtgggaacttggagaacttgttcctccagtgcccaaaaccaactcttcagcagatctcgcatattgcccagcagttggggttagaaaaggacgttgtccgggtgtggttttgtaaccggcgccagaagggcaagcggtcatcgtccgattatgcacagcgagaggacttcgaagctgctggatcccctttcagtgggggaccggtgagcttccctcttgccccggggcctcattttgggactcctggctacggatccccccacttcactgctctgtactcttctgtaccattcccggagggggaggccttcccacccgtttctgtgacgacactcggttcccctatgcacagcaac

SEQ ID NO: 18404 - DNA, 1080 bp, synthetic construct
  misc_feature 1..1080: note = source = /note="Description of Artificial Sequence: Synthetic coding sequence"
  source 1..1080: mol_type = other DNA
atggccgggcatcttgcttcggatttcgccttctcccctcctcctggaggaggaggagatggccccggcgggcccgagcccggatgggtggaccctaggacctggctctcctttcaggggccacctggtggtcccggtattggccccggagtcggccctggaagcgaagtctgggggatcccaccttgtccgccaccatatgagttctgcggcgggatggcctactgcggaccccaggtgggcgtgggactagtgccacaggggggactggagacatcccaacctgagggagaggcaggagtgggggtggaatctaactccgacggtgctagtcccgaaccttgcactgttactcctggggcagtcaagctcgagaaggagaagcttgaacagaatcccgaagagagccaggacatcaaggctctgcagaaggaactggagcagttcgccaaactgctgaagcagaagcgcattacactggggtacacacaggctgacgtgggtctgaccctgggtgtgctgtttggaaaggtctttagccagacaacgatctgtcgctttgaggctttgcaactctcgtttaagaatatgtgcaagctcaggccattattgcaaaaatgggtggaggaggcggataacaatgagaatctacaggagatctgcaaggcggagactctggtgcaggcccggaaacgcaaaagaacttccatcgaaaaccgcgtgcgtggtaatctagagaacctgtttcttcagtgtcctaagcccaccctgcagcagataagtcacattgcccagcagctggggctggagaaggatgtcgtgcgagtctggttttgcaaccggagacagaagggcaaacgttctagcagcgattatgctcaacgggaggactttgaagccgcaggcagccccttctccggtgggcccgtgtcttttccattggcgcctggtccccacttcggtactccaggatacggctcacctcacttcaccgcattgtattccagcgtaccgtttcccgagggcgaggcatttccaccagtcagtgtgaccactttagggtctcccatgcacagtaat

SEQ ID NO: 18405 - DNA, 1080 bp, synthetic construct
  misc_feature 1..1080: note = source = /note="Description of Artificial Sequence: Synthetic coding sequence"
  source 1..1080: mol_type = other DNA
atggccggacacttagccagcgacttcgccttctctccgccccctggcggcgggggtgacggaccagggggacctgaacctggatgggttgatccacgtacttggctgagttttcaggggccaccaggcggcccagggatcggccccggggtggggcccggctctgaggtttggggaattcctccgtgcccacccccttacgaattctgcggaggtatggcctactgcggtccgcaggtgggcgtgggcctggtccctcaaggtgggttggagacctcacaacctgagggtgaagctggagtgggagtagagtccaatagtgacggcgcttcaccagaaccgtgtacggtgacccccggcgcagtgaagctagaaaaagagaagctggaacagaatcccgaggagagtcaggacatcaaagcccttcaaaaagagctggaacaattcgccaaactgctgaagcagaaacgcattactttgggttacacgcaggccgatgtcggcctcacgctcggcgtcctctttgggaaggtgttctcgcagactaccatctgtagattcgaagcgctgcaactgtcattcaagaatatgtgtaagctgagacccctgctccagaagtgggtggaggaggcagataacaacgagaacctccaagaaatatgcaaggctgagacccttgtgcaagcacgcaaacgcaagcgtacttctatcgagaatcgggtgcggggcaatctggaaaacctctttttacagtgtccaaagcccactttgcaacagatctctcacatagcccagcaacttggtctagaaaaagacgtggtgagagtctggttttgcaatagacgccagaaggggaagcgttcttcttcggactacgcccagagggaggattttgaggccgcgggctcaccattctctggcgggcccgtgtctttccctctcgcccccggcccgcactttgggaccccaggatacggtagcccacacttcaccgcgctttactcctcagtcccgttccccgaaggagaagccttcccacctgtgtcagttactactctgggctcccccatgcactctaat

SEQ ID NO: 18406 - DNA, 1080 bp, synthetic construct
  misc_feature 1..1080: note = source = /note="Description of Artificial Sequence: Synthetic coding sequence"
  source 1..1080: mol_type = other DNA
atggccgggcacctggcgtccgattttgcattctcaccccctcctggaggagggggagatgggccaggggggcctgaacccgggtgggtagatcccaggacttggctctccttccaggggccccctggagggcctggaatagggcctggggtgggacctggatctgaagtctgggggatacctccatgcccacccccctatgagttctgcggggggatggcctattgtggaccccaggtcggggtcgggttggtaccacaagggggacttgagacttcccagcctgaaggggaagctggggtgggggtagaatcaaactccgatggggcctcccccgaaccatgcacagtgactcctggagcagttaaactcgaaaaagagaaactagaacagaatcccgaagaatcacaggatatcaaagccctccagaaggaactagaacagtttgcaaaattgctcaaacagaaaaggatcactcttgggtatactcaggccgacgtgggactcacattgggagtgctctttgggaaggtgttttcacaaacaactatctgtagattcgaagccctgcaactttcttttaaaaatatgtgcaaacttaggccccttctacaaaaatgggttgaagaagccgacaacaacgaaaacttacaggaaatatgcaaagcagaaacactagtccaggcaaggaaaaggaaacgaacttctattgagaatcgggtccgcggaaacctggaaaatttatttctacagtgccccaaacccacactgcaacagattagtcatatcgcacagcagcttgggttggaaaaagatgtagtgcgcgtttggttttgcaacagacgacagaaagggaagcgctcgtcttccgattatgcacagcgcgaggatttcgaagcagctgggagtcctttttcaggagggcccgtgtcatttcccctagctcccggaccacatttcgggactcctggatatggatcaccccacttcactgctctttattcttccgtcccattcccagagggggaagcctttcctccagtctctgtaactactctggggtctcctatgcacagtaat

SEQ ID NO: 18407 - DNA, 1080 bp, synthetic construct
  misc_feature 1..1080: note = source = /note="Description of Artificial Sequence: Synthetic coding sequence"
  source 1..1080: mol_type = other DNA
atggctggccacctggcatccgacttcgcgtttagcccccctcctggaggaggaggagacggcccgggaggacctgagccaggttgggtggatccaaggacttggctgtcgtttcaaggaccccctggcgggcctggtatcggaccaggagtgggtcctggatcagaggtctggggaattccaccttgccctcctccatacgaattctgtggcggaatggcctactgtgggccgcaagtgggtgtgggacttgtgccgcaaggaggtcttgagacttcccagccagaaggtgaggcaggtgtgggtgtggaatcaaattccgacggcgcaagccccgaaccatgtactgtgacccctggagccgtgaaactcgaaaaggagaagctcgaacagaatccggaggagagccaggatatcaaggcactgcagaaagagcttgagcagtttgcgaagctcctgaagcagaagagaattacgctcggatacactcaagcagatgtcggacttaccctgggtgttctgttcggtaaagtattcagccaaactaccatctgtcgtttcgaagcgttgcaactcagctttaagaacatgtgtaaactgcggccactgctgcaaaagtgggtggaagaagcagacaataacgagaatctgcaagaaatttgcaaagccgaaactttggtgcaagcacggaaacgtaagcgtacttcgatagaaaacagggtgcgaggcaacctggaaaacctttttcttcaatgtcctaagcctaccctccagcaaatttcacatatcgctcagcagctcggtctggaaaaggatgtggtgcgggtgtggttctgtaatagacggcaaaagggtaagcgttcaagctcggactatgcccagcgtgaagattttgaagcagcgggatcgccattcagcggagggcctgtgtcgtttcctctcgcaccaggaccccattttgggacccctggttacggaagcccacattttaccgcactttactcctccgtcccattcccagaaggtgaagccttccctccagtgtccgtgaccaccctcggatcacctatgcactctaat

SEQ ID NO: 18408 - DNA, 1080 bp, synthetic construct
  misc_feature 1..1080: note = source = /note="Description of Artificial Sequence: Synthetic coding sequence"
  source 1..1080: mol_type = other DNA
atggccggacatctggcatcagattttgcgttcagcccacctcccggtggaggcggtgacgggcctggcggcccagaaccaggatgggtggatccgaggacttggttgagctttcaaggaccaccaggagggcctggaattggtccaggtgtcggaccaggatcggaagtctggggaattcctccctgccccccaccttacgaattctgcggtggtatggcatactgtggaccccaggtgggagtgggactcgtgccacagggtggtctggaaacctcccaaccagaaggtgaggctggagtgggcgtggaatcgaattccgatggtgcgagccctgagccctgtaccgtcacccccggtgcggtgaagttggagaaggagaagctggagcaaaatcccgaagagtctcaagacataaaggcgctgcaaaaggagctcgaacaattcgcaaagctgctcaaacaaaagcggatcactctcggatacactcaggcagatgtaggactcaccctgggagtgttgttcggcaaagtctttagccagaccaccatttgtaggtttgaggcactgcagctgtcgtttaagaacatgtgtaagctcagaccactgcttcaaaagtgggtggaagaagcagacaacaatgaaaatcttcaagaaatttgtaaggcggaaactctggtgcaggcgcgcaagagaaagcgaacctcaatcgagaacagagtccggggaaacctggaaaatctgttccttcaatgtccaaaaccaactctgcaacagatttcacatattgcacaacaacttgggctcgaaaaggacgtggtccgggtgtggttttgtaataggagacaaaagggaaagaggtcctcaagcgattacgcacaacgggaagatttcgaggccgcaggatcaccgttttccggcggacctgtcagctttccgctcgcccctggcccacatttcggcacccccggctacggttcccctcactttactgcactttactcctccgtccctttcccggagggagaagcatttcctcctgtctccgtgaccactcttgggtcacctatgcactcaaac

SEQ ID NO: 18409 - DNA, 1080 bp, synthetic construct
  misc_feature 1..1080: note = source = /note="Description of Artificial Sequence: Synthetic coding sequence"
  source 1..1080: mol_type = other DNA
atggccgggcacttggccagtgacttcgccttcagcccacctcctggaggggggggggacggccccggaggtcctgagccgggctgggtcgacccccgaacatggctgtctttccaagggccacccggtggcccagggatcggcccgggtgtgggacccggatctgaggtatggggcatacccccatgtcccccaccttatgagttttgtggaggcatggcctactgcggcccgcaggtgggcgttgggctggtgccacagggcggactggaaacttcccagccagagggagaagccggggttggtgttgaatctaacagtgatggtgcatcgcctgaaccttgcacggtcacccccggtgccgtcaaactagaaaaagaaaagctggagcagaatcctgaggagagccaggatatcaaggccctccagaaagaattggaacaatttgccaagttattgaagcagaagaggataactcttgggtacacacaggctgacgtgggtctgactctaggcgtgctttttggtaaggttttctcacagaccactatctgtaggttcgaggccctgcagctttcctttaaaaacatgtgcaaactgcggcccctgttacagaaatgggttgaggaggcggataataatgagaatctgcaggagatctgcaaggccgaaacactcgtccaggctaggaagaggaaacgcacatctattgaaaaccgggtcagaggcaatctggaaaatctgtttctccagtgccccaagccaacccttcagcagatcagtcacatcgcgcagcagcttggcttggagaaggacgttgtaagggtgtggttctgcaaccggagacagaagggaaaacgcagttctagcgattacgctcaacgagaggatttcgaggcggctggatcgcccttttctggtggtccagtgtcatttcctctcgcccctggccctcattttggcactccaggctacggtagtccccattttaccgctttgtattcttccgtgcctttcccagaaggagaggcatttcctcctgtctcggtgacaactctaggttcccctatgcacagtaat

SEQ ID NO: 18410 - DNA, 1080 bp, synthetic construct
  misc_feature 1..1080: note = source = /note="Description of Artificial Sequence: Synthetic coding sequence"
  source 1..1080: mol_type = other DNA
atggccggtcaccttgctagcgattttgcgttctcccctccaccaggcgggggaggagacggacccggcgggcccgagccaggatgggtcgatcccaggacctggttaagcttccagggtccgccagggggacccggaatcggccccggcgtgggccctgggagcgaagtctggggaatccccccgtgccctcctccttacgagttctgtggtggaatggcgtattgcggcccccaggtgggggtcgggctcgtaccccaaggagggctggagacaagccagcccgaaggtgaagcaggggttggagtggagagcaactctgatggagcttctcctgaaccttgcacagttacccccggtgccgtgaagctggagaaagagaagctggagcagaaccccgaagaatcgcaggacattaaggcgctacagaaggaactggaacagttcgccaaacttctgaagcaaaaaagaattaccttggggtatacacaagctgacgtgggcctgactctgggagtgctgttcggtaaagttttttcacagacaaccatttgtaggttcgaagccctgcagttgagttttaagaacatgtgtaaactccgccctctcctacaaaagtgggtcgaagaggccgacaataacgaaaacctacaggagatctgtaaggccgaaacgctagtgcaggcacggaaacgcaaacgaacaagcattgaaaatcgcgtgcgcggtaacctggaaaacctgtttctccaatgccctaaacctacactccaacaaatcagccatatagctcagcagctggggctagaaaaagacgtagtgcgcgtctggttttgcaatcgccgacagaagggcaaaaggagtagttctgactacgcacagcgtgaagactttgaagcagcgggcagcccctttagtggtggtcccgtgtccttccctctcgctcccggcccacatttcggaacacccggctacgggagccctcactttaccgctctgtacagctccgtgccatttcccgagggcgaggcctttccccccgttagcgttactaccctcggtagccccatgcattccaat

SEQ ID NO: 18411 - DNA, 1080 bp, synthetic construct
  misc_feature 1..1080: note = source = /note="Description of Artificial Sequence: Synthetic coding sequence"
  source 1..1080: mol_type = other DNA
atggcaggacacctggcatctgacttcgctttttccccccctcccggcggcggtggcgatggacctgggggaccggagccagggtgggtggaccctcgaacttggctgagttttcaaggacctcctggaggcccaggtatcggcccaggtgtggggccaggctcggaggtttgggggatccctccatgcccgcctccctatgaattctgtgggggcatggcctactgcggtccccaggttggagttgggcttgtgccacagggcgggctggagacgagccagccggagggcgaggctggagtgggagtggagtctaacagtgatggggcttcccccgagccgtgtaccgtgacacccggcgcagtgaaactcgagaaggagaaactggaacagaatcccgaggaatcccaggacataaaggccctgcagaaggagttggagcagttcgcaaagctgctgaaacagaaaaggataaccctcgggtacactcaggctgatgtcggcctgaccctgggcgtcctgtttgggaaggtattctcccagacaaccatctgcagattcgaagcactccagctgtcttttaagaacatgtgcaaactccgcccactgctccagaagtgggttgaagaagccgataacaacgaaaaccttcaggagatctgtaaagctgaaactctcgttcaagccaggaagagaaagcgtacatcgatcgaaaacagggtcagggggaatctggagaacctcttccttcagtgtcccaagcccacgctgcagcagattagtcatatcgcacaacagttaggtctcgagaaagatgtagtgagggtgtggttctgtaaccgtcgtcagaaaggcaagagatctagctccgattacgcgcagagagaagacttcgaggccgcgggatcacccttctccggaggtccagtgtctttccccttggcccccggtccccactttggaactcccgggtatggttccccccactttacggccctgtactcaagtgtcccgtttcccgagggcgaagcttttccaccggtgtcggtgaccaccctcggatcacctatgcattctaac

SEQ ID NO: 18412 - DNA, 1080 bp, synthetic construct
  misc_feature 1..1080: note = source = /note="Description of Artificial Sequence: Synthetic coding sequence"
  source 1..1080: mol_type = other DNA
atggctgggcacctggcatctgatttcgcattctcaccaccacccgggggtgggggtgacggcccagggggccctgaaccaggctgggtggacccgaggacatggctgtcgttccagggcccgccaggaggacccgggattgggccaggcgtgggcccaggatctgaggtatggggcatcccaccttgcccccccccctacgagttctgcgggggaatggcctactgcggacctcaagtcggcgtaggtctcgtcccccaggggggcttggagacctctcagccggagggtgaagcgggcgtgggggtggaaagtaatagtgacggcgctagtcccgagccctgcacagttacacccggtgccgtgaagttggagaaagaaaagttagaacaaaatccggaggagagccaggacatcaaggctttacagaaagaactggaacagtttgcaaaacttttgaaacagaagcgcatcaccctggggtatacccaggcggacgtcggcctgaccctcggggtgctgtttggcaaggttttttctcagacaaccatctgcaggttcgaggccttgcagctctcctttaagaacatgtgcaaactgcggccactgctccagaagtgggtggaagaagcagataataatgagaatttgcaggaaatttgcaaagcagaaaccctggttcaggcgaggaagcggaagagaacctcaatcgaaaatcgagttagaggaaaccttgaaaacttatttctgcagtgcccgaagcccaccttacagcaaattagtcacatcgctcaacagcttggtctcgagaaagacgttgtgcgggtgtggttttgtaatcgccggcaaaaaggaaagcggagcagttctgactacgcccaaagggaagacttcgaggccgctggttcaccatttagcggaggaccagtgtcattcccgctcgcacccggccctcactttggcacccctggatatggaagtcctcactttaccgccctctacagctcggtgccttttcccgaaggagaggcgtttccccctgtttccgttacgacattaggttctcctatgcacagtaac

SEQ ID NO: 18413 - DNA, 1080 bp, synthetic construct
  misc_feature 1..1080: note = source = /note="Description of Artificial Sequence: Synthetic coding sequence"
  source 1..1080: mol_type = other DNA
atggccggtcacctggcctccgactttgcattctctccgccaccgggtggaggaggcgatggccctggcgggcctgaaccgggatgggtggatccgcgcacgtggctgtcgtttcaagggccccccggtggcccaggtatcggtcccggagtggggccgggttccgaagtgtggggaatcccgccatgtccgccgccatatgaattctgcggggggatggcatactgcggcccacaagtgggagtgggcctggtcccccaaggaggtctggagacttcgcagccggagggtgaagcgggggtcggcgtggaatccaacagcgatggcgctagcccggagccatgcaccgtcacgccgggagcagtgaagttggagaaggagaagctcgaacagaacccggaagagtctcaagacattaaggctctccagaaggagctggaacagttcgctaaactgctgaagcagaaacgcattaccttgggatacacgcaggccgacgttggcttgacccttggagttctcttcggcaaggtcttttcccagaccactatttgccgcttcgaggctctgcagctctcgttcaagaacatgtgtaaactccggccgctgcttcagaaatgggtggaggaagctgacaataacgagaatctgcaagaaatctgcaaggccgaaaccttggtccaggcgagaaaacggaagaggactagcatcgaaaaccgagtgcgcggaaatcttgaaaatctgtttctgcaatgcccgaaaccaacgctccaacagatctcccacatcgctcaacaactgggacttgagaaggacgttgtgcgggtgtggttctgcaaccgccgtcaaaaaggaaagagatccagctccgactacgcgcagagagaagattttgaggccgcgggcagcccgttctccggaggcccagtgagcttcccactggccccaggaccgcattttggcactccgggttacggctcacctcacttcaccgccctttactcgtcagtgccattccccgagggcgaagcgttccctcctgtttcagtgaccactctcgggagcccaatgcattcgaac

SEQ ID NO: 18414 - DNA, 1080 bp, synthetic construct
  misc_feature 1..1080: note = source = /note="Description of Artificial Sequence: Synthetic coding sequence"
  source 1..1080: mol_type = other DNA
atggccggccacctggcctcagattttgcattctcaccaccccccggcggggggggagacggtccaggtgggccagagcctgggtgggttgaccctagaacgtggctgtcctttcagggacctcccgggggaccgggtattggaccaggtgttggccccgggtccgaggtgtggggcataccaccctgcccacctccttacgaattttgcgggggcatggcatattgcggccctcaggtcggagtcggactcgtcccccaaggcggccttgaaacaagtcagccagagggtgaggctggcgtgggggtggagagtaacagcgacggcgcaagtccagaaccttgcactgtgaccccaggagcggtcaagctggaaaaggagaaactggaacagaatcctgaagagagtcaggacatcaaggctctccaaaaagaacttgagcagttcgccaaattgctgaagcaaaagaggataacccttggatacacacaggccgacgtaggactaactctgggcgtcctattcgggaaagtgttttcccagactacaatctgtaggttcgaggcactgcaactctcctttaagaacatgtgtaagttgagaccgttgctccagaagtgggtcgaagaagcagataacaatgaaaatctccaagagatctgcaaggcggagacactggtgcaggccagaaagcgcaaaaggacctctatcgaaaatagggtgagaggcaacctggaaaacttgttcctacagtgtcctaaaccaacactgcagcaaatttcccacatcgctcagcagttgggacttgaaaaggacgtggttcgtgtatggttctgcaaccgcaggcaaaaaggcaagcggtcctccagtgactacgctcagagagaggatttcgaggcggctggcagccccttctctggaggccctgtatcatttcccctggcacccgggcctcacttcggtacccctggatatgggagtcctcactttactgcactgtatagttctgttccctttccagaaggggaagcattccccccagtttctgtaacaaccctgggctcccctatgcacagtaat

SEQ ID NO: 18415 - DNA, 1080 bp, synthetic construct
  misc_feature 1..1080: note = source = /note="Description of Artificial Sequence: Synthetic coding sequence"
  source 1..1080: mol_type = other DNA
atggctggtcatttagctagtgattttgcttttagtccaccaccaggaggaggaggagacggaccaggaggtccagaacctggatgggttgatccaagaacttggctttctttccaaggaccaccaggaggtcctggtattggaccaggtgttggtccaggatcagaagtttggggaattccaccatgccctccaccatatgaattttgtggtggaatggcatattgtggtccacaagtcggtgttggtttagttccacaaggagggttagaaacaagtcaaccagaaggtgaagcaggagtaggagttgaatctaatagtgatggagcatctccagaaccatgtactgtaactccaggagctgttaaattagaaaaagaaaaattagaacaaaatccagaagaatctcaagatattaaagctttacaaaaagaacttgaacaatttgcaaaattactaaaacaaaaaagaataactcttggatatactcaagcagatgttggattaacgctaggagttttatttggaaaggttttctctcaaactactatttgtagatttgaagctttacaacttagtttcaaaaatatgtgtaaacttagaccattgttacaaaaatgggtagaagaagcagataataacgaaaatttacaagaaatttgtaaagcagaaactttagttcaggcaagaaaaagaaagcgaacttccattgaaaatagggtaagaggaaatcttgaaaatttattcttacaatgtccaaaacctactttacaacaaatttctcatattgcacaacaattaggtcttgaaaaagacgtagttagggtatggttctgtaatagacgtcaaaaaggtaagagatcatcatcagattatgctcaaagagaagactttgaagctgcaggatctcctttttctggaggaccagttagtttcccattagcacctggaccacattttggaacacctggatatggttcaccacattttacagcattatattctagtgtaccattcccagaaggagaagcatttccaccagtttccgttactactttaggatcaccaatgcattcaaat

SEQ ID NO: 18416 - DNA, 1080 bp, synthetic construct
  misc_feature 1..1080: note = source = /note="Description of Artificial Sequence: Synthetic coding sequence"
  source 1..1080: mol_type = other DNA
atggcgggacatctggcatctgacttcgcattctcgcctccgccaggaggaggtggagatggacctggagggccagaacctggatgggttgatccccgcacgtggctcagcttccaaggaccacctggaggaccgggcatcggaccgggtgtgggacccgggagcgaggtgtggggcattccgccttgtcctcccccgtacgagttttgtggcggcatggcctattgcggcccccaggtgggagtgggactggtgccgcaaggaggactcgaaacttcgcagccggagggtgaagctggcgtcggcgtggagtcgaactccgacggggcttccccggaaccgtgtaccgtgactccgggagccgtgaagctggaaaaagagaagctggaacagaaccctgaggagtctcaggatatcaaggccctccagaaagaactggaacaattcgcgaagctgctcaagcagaaacgcatcaccctcggatacacccaggccgatgtgggactcaccctgggagtgctgttcggaaaagttttctcgcagaccactatctgtagatttgaagcgctgcagcttagctttaagaatatgtgcaaactgcgccctctgctccaaaaatgggtggaagaggccgataacaatgaaaacctgcaagagatctgcaaggccgagactctggtgcaggcacggaagcggaaacggactagcattgagaatagggtcaggggaaatctggaaaatctcttcctgcagtgtccgaaacccacccttcagcaaatcagccacattgcgcaacagctcgggctggaaaaggacgtcgtgcgcgtctggttctgcaaccgcagacagaaagggaagcgctcctccagcgactacgctcagcgcgaggatttcgaagcggcgggatcgcctttctcaggcggacctgtcagcttccctctcgcgccaggccctcactttggtaccccgggatatggatcgccgcattttacggctctctactcatccgtgccgttcccggaaggggaggctttcccccctgtgtctgtcaccactttgggcagcccgatgcactcaaac

SEQ ID NO: 18417 - DNA, 1080 bp, synthetic construct
  misc_feature 1..1080: note = source = /note="Description of Artificial Sequence: Synthetic coding sequence"
  source 1..1080: mol_type = other DNA
atggccggtcatctggcctctgatttcgcttttagccctccacctggtggtggtggggatgggccaggcggaccagagcccggttgggtcgatccgcgcacatggctctctttccaggggcctcccgggggacctgggattggtcctggcgttgggccggggagcgaagtttggggaatacccccttgcccgccaccatacgaattctgtggcggtatggcttattgcggaccacaagtcggtgttggattggtcccacaaggtggtttggaaacttcacagcctgagggcgaagccggagtgggcgtcgaatccaatagtgatggtgcctctccggagccatgtacagttacacctggtgcagtaaaactggaaaaggagaagctagagcaaaatccagaggaatctcaagacatcaaagctttgcagaaggagttggagcaatttgctaagttgcttaagcagaaacgaataacgttggggtacacccaggcggatgtgggactcacgctcggagtccttttcgggaaggttttttcacagaccactatctgtagattcgaagcactccagttatcatttaagaatatgtgcaagctgaggccactgcttcaaaagtgggtggaggaagcagacaacaatgagaatctacaggaaatctgcaaggctgagactttagttcaggcacgtaaacgaaagcgaacctctatcgagaacagagttagagggaatcttgagaatctcttccttcagtgccctaagcctactttacaacagataagtcatatcgctcaacaattaggacttgagaaggatgttgtgagggtgtggttctgtaatcgtagacaaaaaggtaaaagatcaagctcagattacgctcagagagaggatttcgaggctgccggtagtcctttctcaggtggcccagtttcattcccgctggcccctggccctcacttcggcaccccagggtatggtagtccacacttcacggctctctattcatctgtgcccttccccgaaggcgaggcgtttcctcctgtcagcgttaccacacttggatctcctatgcactctaac

SEQ ID NO: 18418 - DNA, 1080 bp, synthetic construct
  misc_feature 1..1080: note = source = /note="Description of Artificial Sequence: Synthetic coding sequence"
  source 1..1080: mol_type = other DNA
atggccggacacctggcaagcgacttcgcattttccccaccaccgggtggcggaggcgacggaccaggaggaccggagccaggatgggtggaccctcggacctggctctcctttcaaggccctccaggcggacctggaattggaccaggtgtcggtccaggaagcgaagtctgggggatacctccctgccctccaccttatgaattctgcggcgggatggcctactgtggtccacaagtcggcgtgggccttgtcccccagggtggactggaaaccagccaaccagaaggtgaggcgggcgtgggagtggaatccaacagtgacggcgcgtcccccgaaccttgcacggtgactccaggagcggtcaaacttgagaaggagaagttggaacagaaccccgaagaaagccaagacattaaggccctgcagaaggaactggaacagtttgcaaagctgttgaagcaaaagcggattacgctgggttacacgcaagcagacgtcgggctgacgctcggtgttctgtttggtaaggtgtttagccaaaccaccatctgtagatttgaagcacttcaattgtcgttcaagaatatgtgcaagctccgaccacttctccagaagtgggtggaagaggccgacaataatgagaatctgcaagaaatttgtaaagcagaaaccctggtccaggcacggaagaggaaaagaactagcatcgaaaatcgggtgcgggggaacttggaaaacctgtttctgcagtgcccaaagccgaccctgcaacagatttcacatatcgcacaacagctcggactggaaaaagatgtggtgagagtgtggttttgcaacagacgccagaagggtaaaaggtcatcgagcgattacgcacagagagaggattttgaagcggcaggctccccgttctcaggaggcccagtttcatttcctcttgcacccggaccccatttcggtactcccggatacggatcgcctcatttcactgctctgtactcctcagtgcccttcccggaaggagaagcattccctcccgtgtccgtgaccacgcttggatcgcctatgcactcaaac

SEQ ID NO: 18419 - DNA, 1080 bp, synthetic construct
  misc_feature 1..1080: note = source = /note="Description of Artificial Sequence: Synthetic coding sequence"
  source 1..1080: mol_type = other DNA
atggcaggccatttggcatccgactttgcctttagccccccacctggtggtggaggggacggacctgggggccctgaaccaggttgggtggacccacgaacctggctttcctttcagggtccaccgggtggaccggggattggaccaggtgtgggtcctggatccgaggtgtggggtattcccccctgtcctcctccatatgagttctgcggtggtatggcgtactgtggacctcaagtcggtgtcggcctcgtgccgcaaggcggactggagacttcgcaacctgaaggggaagccggagtgggtgtagaatccaactccgatggagcatcgcccgagccttgcactgtcactcctggggccgtcaaacttgaaaaggaaaagctggagcaaaaccccgaggagtcgcaagatatcaaggcattgcagaaggagcttgagcagtttgcaaagttgctgaagcaaaaaaggattacccttggatacacgcaagcagatgtgggtctgacccttggcgttcttttcgggaaagtcttttcgcaaaccacgatttgtcgttttgaagcgttgcaactttcctttaagaacatgtgtaagctgcgcccccttctgcaaaaatgggtggaggaagccgacaataacgaaaacctccaggaaatatgcaaggcagaaaccctggtccaggcccggaagcgtaaaagaacctcaatagagaatcgggtgcgcggcaatcttgagaatcttttccttcaatgtccaaagccgactctccagcagatctcgcatatcgctcagcagctgggactggaaaaagatgtcgtgagggtgtggttttgcaaccgcagacaaaagggcaaacgttccagctcagattatgcacaacgggaagatttcgaagcggcaggcagtcccttcagcggtggtccagtctcatttccactggcgccagggccacacttcggcaccccgggatacggctcacctcactttactgccctctactcgagtgtgcctttcccggagggagaggcctttcctcctgtctcggtgactactctgggttcacccatgcattccaat

SEQ ID NO: 18420 - DNA, 1080 bp, synthetic construct
  misc_feature 1..1080: note = source = /note="Description of Artificial Sequence: Synthetic coding sequence"
  source 1..1080: mol_type = other DNA
atggctggtcaccttgccagcgacttcgcattttcgccgccgccaggaggcgggggcgacggacctggcggcccggagcccggctgggttgacccgcgaacatggttaagcttccagggcccccctggtggtcccgggattggtcctggtgtaggacctggatcagaagtttggggtatcccaccctgcccccccccatacgagttctgtggaggcatggcctactgcggcccacaagtaggcgttggcctggtgccacaaggcggtttggaaacatcccagccagaaggtgaggctggagtgggcgtcgagtcgaatagtgatggagccagtcccgagccctgcacagtcacgccaggggcagtcaagctggagaaagagaagctggagcagaaccctgaggagtcccaggacattaaagcgctgcaaaaggagttggagcagttcgctaagctgctgaagcagaagagaatcacccttgggtatacgcaggccgatgtgggactaacacttggcgtgctattcggcaaggtattcagccagacgacaatttgccgttttgaggctttgcagctctcattcaaaaacatgtgcaagcttcgccctttgctccagaagtgggttgaggaggccgacaacaacgagaacctgcaggaaatctgcaaggccgagactctggtgcaggcgcgaaaaaggaaacgcacctcgattgagaatcgcgtcaggggaaatctagagaacctgttcttgcaatgcccgaaaccaaccttgcagcagatctcgcacatagcacagcagttgggactggagaaggacgtggttcgagtgtggttttgcaaccgtcgccagaagggcaagcgatccagctcggactatgcccagcgagaggacttcgaggcagcaggatcgccattcagtggcggtcccgtgtcattccccttagcccccggtccacactttggaaccccgggctacggctcgccgcactttaccgccttgtactctagcgtccctttccccgaaggagaggccttcccaccggtgtcggttaccaccttgggatcgcccatgcactctaac

SEQ ID NO: 18421 - DNA, 1080 bp, synthetic construct
  misc_feature 1..1080: note = source = /note="Description of Artificial Sequence: Synthetic coding sequence"
  source 1..1080: mol_type = other DNA
atggccgggcacctggcctcagattttgccttctctccaccgccagggggcggtggtgatggacctggagggccagagccaggttgggtggacccgagaacatggctttccttccaggggccgccagggggtccaggtatcggtcccggggtgggaccagggagtgaggtctggggcattccaccctgtccaccaccgtacgaattttgtggcggaatggcctattgcggtccccaggttggagttggcctggttccccagggagggcttgaaacttcacaaccagaaggagaggcgggggtaggcgttgagagtaattccgacggtgcaagtcccgagccatgcaccgtgacccctggggctgtaaaactcgaaaaagaaaaacttgagcagaaccccgaagagagccaggacattaaggccctgcaaaaggagttggagcaatttgccaaacttctgaaacaaaaacggattaccctgggctacactcaggcagacgtcggacttaccttgggtgttctgtttggtaaggtgttttcacagaccaccatttgccgattcgaagcactgcaacttagcttcaagaacatgtgcaagctccgcccactgctccagaagtgggttgaggaggctgataataatgaaaatctccaggagatctgcaaagccgagactctggtgcaagctcggaagaggaagaggacgtctattgaaaacagagttcgagggaatctggagaacctgtttcttcagtgcccaaagcctaccctccagcagatttctcatatcgcccagcagctggggttggaaaaagatgtggtgcgcgtctggttttgcaacaggcgacaaaaagggaaaagaagctcttccgactacgcgcaaagagaggactttgaggctgctgggagccctttcagcgggggccccgtttcctttcctttggcccctggacctcactttggtacacccggctatgggagccctcacttcacggcgctgtactctagtgtgccattccctgaaggagaggcattcccaccagtctctgtgacgacactcggctctcccatgcactccaac

SEQ ID NO: 18422 - DNA, 1080 bp, synthetic construct
  misc_feature 1..1080: note = source = /note="Description of Artificial Sequence: Synthetic coding sequence"
  source 1..1080: mol_type = other DNA
atggccggtcacctggctagcgatttcgcgtttagcccgccacctgggggcggcggcgacggacctggcggcccggaacccggatgggttgacccaagaacttggttgtcctttcaaggaccgcccgggggtcctggtattggtccgggcgtgggacctggctcagaagtctggggaatccccccatgcccacccccgtatgaattctgtggaggcatggcatactgcgggccacaggtgggagtcggactggtgccacaggggggactcgagacttcgcagccagaaggagaagccggagtgggtgtcgagtccaatagcgatggcgcatcgcctgaaccgtgcaccgtgacgccaggcgcggtcaagctcgaaaaggaaaaactggaacaaaacccggaggaatcccaggatatcaaggcacttcagaaggagcttgagcagttcgcaaagctgctgaagcaaaaaaggatcaccctcggatacacccaagcggacgtgggcctgacgctgggggttctgttcgggaaggtgttcagccagaccactatttgccggtttgaggcccttcaactgtcgttcaaaaacatgtgtaaactcagaccgcttctccagaaatgggtagaagaagccgacaataatgagaacctccaggaaatttgcaaggcagagactctggtccaagctcgtaagcgcaagcggaccagcatcgagaaccgggtgcgcggaaatctcgagaacctctttctgcaatgcccgaagccaactctccaacagatctcgcatatcgcccaacagctgggactggagaaagacgttgtgagggtgtggttttgtaaccgcagacagaaagggaagcgctcttcgtcggactacgcccagcgggaagatttcgaggcggctggatccccgttctcggggggacctgtgtcattccccctcgcgcccggcccacatttcgggactccaggatacggttcccctcacttcacggcactgtactcttccgtacccttccccgagggcgaagccttcccgccagtctccgtgaccaccctgggtagtcctatgcactctaac

SEQ ID NO: 18423 - DNA, 1080 bp, synthetic construct
  misc_feature 1..1080: note = source = /note="Description of Artificial Sequence: Synthetic coding sequence"
  source 1..1080: mol_type = other DNA
atggctggacatttggcttctgactttgccttctcaccccctccaggaggcggcggagatggccccgggggaccagaaccaggctgggtggacccccgaacatggctgtcctttcagggaccccccggaggcccgggcatcggtcccggggtgggccccggctctgaggtgtggggaatccccccatgcccgcccccatacgaattctgtggcggaatggcctattgtgggccccaagtgggagtaggactggttcctcagggtggcctcgaaacctcccagccagagggggaggctggcgtcggagttgagtcaaattcagatggcgcatctccagaaccctgtacagtgactccgggggcagtgaagctggaaaaggagaagcttgaacaaaatcctgaggaaagccaagatatcaaggcccttcagaaagaactcgaacagtttgcgaagcttctgaagcagaaaaggattacattgggatacacccaggcagacgttggtctaaccctgggtgtactgttcgggaaagtcttttctcaaactacaatatgccgcttcgaggccctccagctgtccttcaagaacatgtgcaaacttagacccctgttgcagaagtgggtagaggaggccgacaacaatgagaatctgcaggaaatctgcaaggccgagacacttgtccaggctcggaaaaggaaaagaacatctatcgagaacagggttagaggcaacctggagaacctgtttctgcagtgtcccaagcctaccttacagcagatctctcatatcgcccagcaattaggtctggagaaggatgtggttagggtctggttctgtaataggaggcagaagggaaaaagatctagtagtgactacgctcagcgggaggactttgaggctgcaggttcacccttctctggtgggccggtatccttcccgttggctccaggccctcacttcggaactcccgggtacggctctccacatttcacagcactatattcttccgtgccgtttcccgaaggtgaggcgttccctcccgtctccgttactactctagggagccctatgcactcgaac

SEQ ID NO: 18424 - DNA, 1080 bp, synthetic construct
  misc_feature 1..1080: note = source = /note="Description of Artificial Sequence: Synthetic coding sequence"
  source 1..1080: mol_type = other DNA
atggccggacaccttgccagcgactttgcctttagcccgccaccgggtggcggcggggacggaccaggtgggccagagcccggttgggtggacccccgtacatggctgagtttccagggaccccccggcggccctggcattggtccgggtgtcggccccgggtcggaggtatgggggatccctccttgtccgccgccctatgagttctgtggggggatggcttattgcggaccccaagtgggcgtcggcctggtccctcaaggtggcctcgaaacctcccaacctgagggcgaagccggcgtcggcgtcgaatctaatagtgatggtgcatctccagagccttgcactgtgacccccggggccgttaaactggagaaagaaaaattggaacagaacccggaagaaagccaggatataaaagcactccagaaagagctggaacagttcgctaagctacttaagcaaaagcgcattacactgggatacacacaagcggacgttgggctgactcttggtgtccttttcggtaaagtattctcccaaacaacaatttgtaggtttgaagctcttcaactgtctttcaagaatatgtgtaagttgaggccacttttgcagaagtgggtggaagaagctgacaacaacgagaatcttcaggaaatctgtaaggctgagacactcgtgcaagctaggaagcgtaaacgtacatccatcgagaatcgggtccggggcaacctggagaacctatttctccaatgtcctaagcctacccttcagcagatctctcacatcgctcaacagctcggtcttgaaaaggatgttgtacgggtttggttttgcaaccgacggcagaagggcaagcgaagcagctctgactacgcccagagggaagatttcgaggcggccggttctcctttctcggggggccctgtttcgttccctttggcccccggaccccatttcggcactcccggctacggtagcccccattttacggctctgtattcttctgtcccctttccagaaggcgaggcattcccacccgtttcagttactacacttggctctccaatgcattctaat

SEQ ID NO: 18425 - DNA, 1080 bp, synthetic construct
  misc_feature 1..1080: note = source = /note="Description of Artificial Sequence: Synthetic coding sequence"
  source 1..1080: mol_type = other DNA
atggcgggtcatcttgcatcggactttgcgttctcgccgccaccggggggcggtggcgacggtcctggtggcccggaacctggctgggtggatcctcggacctggctgagctttcaagggccacccggggggcccggcattggacccggagtgggtccaggctccgaagtgtggggaatccctccgtgcccgcccccatacgagttttgcggcggtatggcttactgtgggccacaggtgggagtgggactcgtccctcaagggggtttggaaacgtcgcaaccggaaggagaagcgggcgtgggggtcgagtcaaatagcgacggcgcgtcccctgaaccttgtactgtcacgccaggggcagtgaagctggagaaggaaaaacttgaacagaaccccgaggaatcccaggatatcaaagcactgcagaaggagcttgaacaatttgcaaagttgcttaaacaaaaaaggataactctcggttatacccaggccgacgtgggattgaccctcggagtcctttttggtaaagtgttttcccagacgacgatttgtcgcttcgaagcacttcagctgtcgttcaagaacatgtgtaagctgcgtccccttctgcaaaaatgggtggaggaggccgataacaacgagaacttgcaagagatttgtaaggccgaaacccttgtgcaggctcggaaaaggaagcgaacttccattgaaaaccgcgtccgaggaaatctcgaaaacctttttctgcagtgccccaagccgactctgcaacaaatcagccatattgcacaacaacttggccttgaaaaggatgtcgtgcgcgtgtggttttgtaatagacgtcaaaagggaaagagaagcagcagcgattacgcacaaagagaagatttcgaggcagcagggtccccgttttccggaggaccggtttccttccctcttgcaccaggcccacattttggaacgcccggatacggatcgccacactttactgctctttactcatcagtgccttttccagaaggagaagcattccctccagtgtcggttaccaccctgggttccccaatgcacagcaac

SEQ ID NO: 18426 - DNA, 1080 bp, synthetic construct
  misc_feature 1..1080: note = source = /note="Description of Artificial Sequence: Synthetic coding sequence"
  source 1..1080: mol_type = other DNA
atggcaggacaccttgcctctgatttcgctttttcaccacccccagggggaggaggggatggcccagggggccctgaacccggctgggtggacccacgcacgtggttgtcgttccaggggcccccgggggggcccggcattggcccgggggttggcccaggctcagaagtgtggggcatacccccctgcccacccccctatgagttctgtgggggaatggcatactgtggtcctcaggttggcgtgggcctcgtgcctcagggcggtttagagacctctcaacccgagggggaggccggagtgggtgtagagagcaactctgacggggcatcccctgaaccctgcaccgtgaccccgggtgccgtaaaactcgaaaaggagaagctggagcagaacccagaagaatcccaggacataaaggccctgcagaaagaactggaacagttcgccaaattgttgaaacagaagagaatcactctgggctatacccaggccgatgtgggcttgacactaggggtcttatttgggaaggtattttctcagactactatctgtaggttcgaagcacttcaactgtcgtttaagaacatgtgtaagctccggcccttgctccaaaagtgggtcgaagaagcagacaataatgaaaacctgcaagaaatttgtaaggcagagaccttggtgcaggctcgcaagcggaaaaggacttctatagagaatagagtccgcgggaatctggaaaatctgtttctgcaatgcccgaaacccaccctgcagcaaatttctcatattgcccagcagctcggcctcgaaaaagacgtggtcagagtgtggttctgtaaccgaaggcaaaaaggcaagcgatcttcgagcgactatgcccagagggaggatttcgaagctgcggggtcacctttttccggcggccccgtgagctttcctctggcccccggccctcacttcggcacccccggctatggctccccccattttacagccctttattcgtcagttccattccctgaaggggaggcatttccacctgtgtccgttaccacattggggagcccaatgcactcaaat

SEQ ID NO: 18427 - DNA, 1080 bp, synthetic construct
  misc_feature 1..1080: note = source = /note="Description of Artificial Sequence: Synthetic coding sequence"
  source 1..1080: mol_type = other DNA
atggccggccacctggcatctgactttgctttcagcccccctcctggcggcggaggcgacggcccaggggggcccgagccaggctgggtggatccaaggacctggctgtcctttcagggccctccgggaggaccaggtatcggccctggggtgggccctggctcagaggtgtggggcattcctccctgccctcccccatacgaattttgtggcggcatggcctattgtggcccccaggtgggagtggggctggtgccgcagggtggactggagacatcacaacctgaaggcgaggctggggtgggagtggagtccaattcagacggcgcaagtcccgagccttgcaccgtgacgccgggggcagttaagctggagaaggaaaagctcgagcagaacccagaagaatcccaggacattaaagccctgcaaaaagaattggaacaattcgcaaagctgctaaagcagaagcgtattactctcggatatacccaggcggacgtaggcctaacactcggggtgctcttcgggaaggtattctctcaaacaacgatctgtaggtttgaagccctccagttgtcctttaagaatatgtgtaagctgaggccacttctgcagaagtgggtggaggaagccgacaataacgagaaccttcaggaaatatgcaaagccgaaactttagtgcaggcccgcaagagaaagagaacctccatagaaaatagggtcagaggaaacttggaaaatctctttctgcaatgcccaaagcccacgttgcagcagatttctcacattgctcagcagctgggtttagagaaggatgttgtgagggtttggttttgtaaccgccgccaaaaaggcaaacgcagctcctccgactacgctcagcgggaggactttgaggccgccggcagtcccttttctggtggaccagtgtcatttcctctggcccctggtccccactttggaacccctggatatggtagcccccatttcacggccctgtacagttccgtgccgttcccagagggtgaggccttcccacccgtgtctgttactactctgggctcgccgatgcactccaat

SEQ ID NO: 18428 - DNA, 1080 bp, synthetic construct
  misc_feature 1..1080: note = source = /note="Description of Artificial Sequence: Synthetic coding sequence"
  source 1..1080: mol_type = other DNA
atggcgggacacttggcgtccgattttgcatttagcccccctccaggagggggcggtgacggtcctggtggtcctgaaccaggctgggttgaccctcgcacctggctgagctttcaaggtcctccaggcggaccgggcattggacccggagtcggaccaggatcggaggtctggggaatccctccctgtccccctccatatgagttttgcggcggtatggcatactgtggtccccaagtcggagtgggactggtgcctcagggtggccttgaaacttcgcaacctgaaggcgaagcgggcgtgggagtggagtccaactcggatggggcatcgccggagccgtgcaccgtgactcctggtgccgtgaagctcgaaaaggaaaaacttgagcaaaacccagaagaatcccaagacataaaggcactgcagaaagaactggagcaatttgcaaaactgctgaagcagaagcgtatcactcttggttacacccaggcagatgtgggcctgaccctgggggtgctctttggcaaggtgttttcacaaactacgatttgccgttttgaggcacttcagctttccttcaagaacatgtgtaaactccggccgcttctccaaaaatgggtggaagaagcagacaacaatgagaatctgcaggaaatttgtaaggcagaaaccctcgtgcaggcgagaaagagaaagcggacttccattgaaaacagagtgcgtggaaatctggaaaacctgttcctccaatgtcctaagcccactctccagcagatttcacatatcgcccaacaactgggactggagaaggatgtcgtgcgcgtctggttctgtaatagacgccaaaagggcaagagatccagctccgactacgcacagagagaggatttcgaagctgcaggttcccctttttccggcggtccagtttcatttcctttggcacctggcccacattttggaacgccaggttacggatcgcctcattttaccgcactgtatagctcggtcccttttcctgagggcgaggccttcccacccgtcagtgtgaccaccctgggatctcctatgcactcgaat

SEQ ID NO: 18429 - DNA, 1080 bp, synthetic construct
  misc_feature 1..1080: note = source = /note="Description of Artificial Sequence: Synthetic coding sequence"
  source 1..1080: mol_type = other DNA
atggcaggacatctggcttcagactttgcattttcacctcctccaggaggcggaggtgacggacctggaggcccggaaccaggatgggtggacccgcgcacttggctctcgtttcaaggtcctccgggtggcccaggtattggtccgggagtgggtccaggaagcgaagtgtggggaataccaccatgtcccccgccctacgagttttgcggagggatggcatactgcggtcctcaagttggtgtcgggctcgttccgcaaggaggactcgaaaccagccaacctgagggcgaggctggtgtgggtgtggaatcgaactcagacggggcttcacccgaaccctgtacggtcaccccaggggcagtcaagctggagaaggaaaagctggagcagaacccagaggaatcacaggacatcaaagcacttcagaaggaactggagcagttcgccaagctgcttaagcaaaagcggattaccctggggtacacccaagcagatgtcggattgactctgggagtgctgttcggaaaggtgttttctcagaccaccatttgtaggtttgaagcattgcaactgagctttaagaacatgtgtaagctccgcccactgcttcaaaaatgggtggaagaggcggacaataatgagaacctgcaagagatttgtaaggcagagactcttgtccaggcacgaaagagaaaaagaacctcgattgaaaaccgtgtgcgcggaaacctggaaaacctgtttcttcaatgtcctaagccaaccctgcaacaaatctcccatattgcacaacaactgggacttgagaaggatgtggtgcgggtctggttctgcaataggcgtcaaaaaggcaagcgctcttcgtcggattacgcgcagcgagaagattttgaggcagcaggatcaccattcagcggtggtcctgtgtccttccctctggcaccgggaccacactttggcacccctggatacggctcccctcattttactgcactctattcaagcgtgccgtttcccgaaggtgaagccttccccccagtgtccgtgactactctgggctctccgatgcattccaac

SEQ ID NO: 18430 - DNA, 1080 bp, synthetic construct
  misc_feature 1..1080: note = source = /note="Description of Artificial Sequence: Synthetic coding sequence"
  source 1..1080: mol_type = other DNA
atggcgggtcatttagcgtcggattttgcgttttcgccgccgccgggtggtggtggtgatggtccgggtggtccggaaccgggttgggttgatccgcgtacgtggctatcgtttcaaggtccgccgggtggtccgggtataggtccgggtgtaggtccgggttcggaagtatggggtataccgccgtgtccgccgccgtatgaattttgtggtggtatggcgtattgtggtccgcaagttggtgttggtctagttccgcaaggtggtctagaaacgtcgcaaccggaaggtgaagcgggtgtaggtgttgaatcgaattcggatggtgcgtcgccggaaccgtgtacggtaacgccgggtgcggttaaattagaaaaagaaaaactagaacaaaatccggaagaatcgcaagatataaaagcgttacaaaaagaactagaacaatttgcgaaattattaaaacaaaaacgtataacgctaggttatacgcaagcggatgtaggtttaacgctaggtgtactatttggtaaagttttttcgcaaacgacgatatgtcgatttgaagcgctacaactatcgtttaaaaatatgtgtaaactacgtccgttactacaaaaatgggtagaagaagcggataataatgaaaatctacaagaaatatgtaaagcggaaacgttagttcaagcgcgaaaacgaaaacgtacgtcgatagaaaatcgagtacgaggtaatctagaaaatttatttttacaatgtccgaaaccgacgctacaacaaatatcgcatatagcgcaacaattaggtctagaaaaagatgttgtacgtgtttggttttgtaatcgtcgtcaaaaaggtaaacgttcgtcgtcggattatgcgcaacgagaagattttgaagcggcgggttcgccgttttcgggtggtccggtttcgtttccgctagcgccgggtccgcattttggtacgccgggttatggttcgccgcattttacggcgctatattcgtcggtaccgtttccggaaggtgaagcgtttccgccggtatcggttacgacgttaggttcgccgatgcattcgaat

SEQ ID NO: 18431 - DNA, 1080 bp, synthetic construct
  misc_feature 1..1080: note = source = /note="Description of Artificial Sequence: Synthetic coding sequence"
  source 1..1080: mol_type = other DNA
atggccggacacctcgcctctgatttcgcctttagcccaccacctggcggaggaggcgatggaccaggtggacccgagccggggtgggttgacccccgaacctggctgagctttcaggggccgcctggtggccccgggattggcccgggagtggggccagggagtgaggtttgggggatccccccttgtcctccaccatacgaattctgcggtgggatggcctactgcggaccgcaggtcggggtcggccttgtgccacagggtggcctggagacgtcccagcccgaaggagaagcgggagtgggagtagagagcaattctgacggggctagccccgagccctgcaccgtgacgcctggcgcagttaagctggagaaagaaaagctggaacagaatccggaggagagtcaggatatcaaggccctgcaaaaagagcttgagcagttcgccaaattactgaaacagaagcggattacactggggtatactcaggctgacgtgggactgacactaggcgtgttattcgggaaggtgttctcccagaccacaatctgccgttttgaagctctgcagctttcatttaaaaatatgtgcaagctgaggcctcttttgcagaagtgggtggaagaggccgataacaacgaaaaccttcaggaaatttgtaaggccgagacattggtgcaagcacgaaagcggaaacgtacctccatcgagaatagagtaaggggcaatctggaaaatctttttctgcagtgccccaaaccaaccttacagcagatctctcacatagcacagcagctaggcctggagaaggatgtggtccgcgtctggttctgcaatagacggcagaaaggtaagaggtccagctccgactacgctcagcgagaggattttgaggccgctgggtctcccttttccggaggcccagtttcttttccattagcccctggaccacattttggcactcctgggtacgggtctccgcacttcacggcactctacagttccgtgccatttcctgaaggggaagctttccctcccgttagtgtgaccacactgggaagtccgatgcactctaat

SEQ ID NO: 18432 - DNA, 1080 bp, synthetic construct
  misc_feature 1..1080: note = source = /note="Description of Artificial Sequence: Synthetic coding sequence"
  source 1..1080: mol_type = other DNA
atggccggacacctggcgtccgactttgccttctccccgcctcctggaggcggcggagacggaccggggggacctgaaccgggatgggtggatccgcgcacctggctctcattccagggaccgccgggaggaccagggatcggaccaggagtgggaccggggtccgaggtctggggaatccccccttgcccgccgccatatgagttctgcggaggaatggcatactgcggaccgcaggtgggagtgggactggtgccgcagggaggcctcgaaacgtcgcaaccggagggagaagcaggtgtgggagtggaatcaaactcggatggagcatcacccgagccctgcaccgtgaccccgggagcagtcaaactggaaaaggaaaagctggaacaaaacccggaggagtcgcaggacattaaggcactgcaaaaagaactggaacagttcgcgaaactgctcaagcaaaagagaatcaccctgggctacactcaggcagatgtgggactcaccctcggggtgctgttcggaaaggtgttcagccaaacgactatatgccggtttgaagcgctgcaactgtcatttaagaatatgtgtaaacttagaccactgcttcagaagtgggtggaagaagccgacaataacgaaaatctgcaggaaatctgcaaggccgagactctggtgcaagcacgcaaacgcaagagaacttccattgaaaaccgggtgaggggcaacctcgagaacctgtttctgcaatgcccaaagccaactttgcaacagatctcccatatcgcacagcagcttgggctggagaaagacgtggttcgggtgtggttttgcaaccgcaggcagaaaggaaagcgctccagcagcgactacgcccaaagagaagattttgaggccgcgggctccccgttctccggaggaccggtgtcgttcccgctcgctccgggtccacactttggcactcctgggtacgggtcaccacattttactgccctctactcatctgtgcctttccctgaaggggaagcgttcccacctgtgagcgtgacgaccctggggtcgcctatgcactcgaac

SEQ ID NO: 18433 - DNA, 1080 bp, synthetic construct
  misc_feature 1..1080: note = source = /note="Description of Artificial Sequence: Synthetic coding sequence"
  source 1..1080: mol_type = other DNA
atggccggccatcttgcttcggactttgccttctcccctcctcccggcgggggcggcgatggtcctggaggtccagagcccggctgggtggatcctcggacatggctgagcttccagggaccccccggcgggccaggaattgggcctggagtgggacctggtagcgaagtgtgggggatacctccatgtcctcctccatacgagttctgtggaggaatggcctattgcgggccgcaagtgggagttggcttggtgccacagggcggactcgagaccagtcaaccagagggggaggccggagtcggcgtggaaagtaattccgatggcgccagcccagagccttgtacggtgaccccgggcgccgtgaagctggaaaaagaaaagttggagcaaaatcccgaggaatctcaggatataaaggctctgcagaaggaacttgaacagtttgccaaactgcttaagcagaaaaggataaccctgggctatacacaggccgatgtagggttgacgctaggcgtgctgtttggcaaagtcttctctcagacaacaatctgtcgtttcgaggccttacaattgtcttttaagaacatgtgcaaactccgaccgctattgcagaagtgggtagaggaagctgataataacgagaacctccaagagatctgcaaggcagagaccctggtgcaggctcgaaaacgaaaacggacatctatcgaaaacagggtgcggggtaacctggaaaatctgttcctccaatgtcccaagcccacattgcagcagatttctcatatcgcacagcagctgggtctggaaaaagatgtagtgcgggtgtggttttgtaatagacggcagaagggcaaacggagttcgtctgactacgctcagcgggaagattttgaggcagcggggagccccttctcaggtggtcctgtgtccttcccactcgccccaggcccccactttggtacacctgggtatgggtcaccccacttcacagcactgtacagctcagttccttttcctgagggtgaagcttttccacctgtctcagtcaccacacttggatcccctatgcattctaac

SEQ ID NO: 18434 - DNA, 1080 bp, synthetic construct
  misc_feature 1..1080: note = source = /note="Description of Artificial Sequence: Synthetic coding sequence"
  source 1..1080: mol_type = other DNA
atggcagggcatttggcaagcgacttcgcattttcacctcctcctgggggaggaggtgacggtcccggtggaccggagccgggatgggtcgatccacggacctggcttagcttccagggtccacctggtggaccaggtatcggtccaggggtggggcctggctccgaagtctggggaattccgccatgtcctcctccttacgagttttgtggtggtatggcatactgcggaccccaggtgggtgtgggtctggtgccccagggaggtctggagactagccaacctgagggggaagctggtgttggagtggagagcaacagcgatggggctagcccagagccctgtaccgtgacgccaggagcagtgaaactcgagaaagaaaagttggaacagaatcctgaggaatcccaagatatcaaggccttgcaaaaggagctcgaacaatttgcaaagctccttaaacagaaaaggattactctgggatacacccaggcggacgtggggcttacccttggagtgcttttcggcaaggtgttctcgcagaccacgatctgccgctttgaagccctccagctgagcttcaagaacatgtgcaaactgcggcctcttctgcaaaagtgggtggaagaagctgacaataacgaaaaccttcaagagatctgcaaggcagaaacccttgtccaggcgcgcaagcgaaagagaacctcgatagaaaacagagtgagaggaaatttggagaacctttttctgcaatgtccaaagccaaccctgcagcaaatctcgcatatcgcccagcaattgggacttgaaaaggatgtagtcagagtgtggttctgtaacaggcggcaaaaaggtaagcgaagctcgagtgattacgcgcagagagaggattttgaagcagcaggatctcccttttccggaggaccagtgtctttccccctggcacctggccctcatttcggcacgcccggatatggttcgccccattttacggccctttactcctcggtgccgtttcctgagggagaagcatttcctccagtgtcggttaccactctcggatcccctatgcactctaac

SEQ ID NO: 18435 - DNA, 1080 bp, synthetic construct
  misc_feature 1..1080: note = source = /note="Description of Artificial Sequence: Synthetic coding sequence"
  source 1..1080: mol_type = other DNA
atggctggccacctggcttcagatttcgctttctcgccaccccctggcgggggaggcgacgggcctgggggaccagagccagggtgggtcgacccccggacctggctgagttttcagggacctccaggcgggccagggatcgggccgggggtgggccccgggagcgaagtgtggggaatccccccctgccctccaccgtatgagttctgcgggggaatggcctattgcggtccccaagtgggcgtcggcctggttcctcaaggcggtctcgaaactagtcagcccgaaggagaagccggggtaggcgtagaatccaattccgacggggcttccccggagccatgcaccgtgactcccggagcagtcaaattagagaaggagaaactcgaacagaaccccgaggagtcgcaagacattaaggctctgcagaaggagcttgagcagtttgcgaagttgttgaaacagaagagaatcaccctaggatatacccaagcggatgtaggcctcactctcggcgtgctttttggaaaggtgttttctcagactactatatgcaggtttgaggcacttcaactgagcttcaaaaacatgtgtaaattaaggcccctgctgcaaaaatgggtagaggaggcagacaacaatgaaaatctgcaggaaatttgcaaagcagaaactctggtccaagctaggaaaagaaaacggacctctatcgagaacagagtacgaggcaatctggagaatctgtttctacagtgcccaaagcccactctgcagcagatctcacacatagcccaacagttggggttggagaaggatgtagtcagagtgtggttttgcaaccgacgacagaagggaaagaggtcatccagtgattacgcccaacgcgaggacttcgaagcagccggaagtccgttctctgggggtccagttagctttcccctggccccaggaccgcattttggcacgcccggctacgggtccccgcactttacagccctgtattccagcgtacctttccccgaaggcgaggcatttcccccagtgtccgtgaccaccctggggagccccatgcattctaat

SEQ ID NO: 18436 - DNA, 1080 bp, synthetic construct
  misc_feature 1..1080: note = source = /note="Description of Artificial Sequence: Synthetic coding sequence"
  source 1..1080: mol_type = other DNA
atggcaggccatcttgcctctgacttcgccttttccccacccccgggtggcggcggggacggacccggtggaccagagcccggatgggtggatcctaggacatggctgagctttcagggccctcccggtggacctggaattgggcctggagtcggaccgggatctgaagtgtggggaatccccccctgcccaccaccgtatgagttttgtgggggtatggcatattgtggtccccaagtgggcgtggggctggtcccccagggaggtcttgagactagtcaacctgagggggaggccggtgttggggtggagtcaaactccgacggcgcctcccctgaaccctgtaccgtgactcctggagctgtaaagctggaaaaggagaagctggagcagaaccccgaggaatctcaggatatcaaggcccttcagaaagagctggaacagttcgctaagctgctgaagcaaaagagaatcacacttggctacacccaggcggatgttggacttaccctgggcgtgttgttcgggaaagtgttttcacagacgacgatctgcagatttgaggcactgcagctgagcttcaaaaacatgtgtaagctgcggcccctgctccagaaatgggttgaggaagcagacaacaacgagaatctgcaggaaatctgcaaagctgagacccttgtgcaggcaaggaagaggaaacggacatcaatcgaaaatagagtacgcggcaatctcgaaaacttgtttcttcagtgtcccaagcccaccctgcagcagataagccacattgcccaacagctcggactcgaaaaggacgttgtgagagtttggttctgcaacaggcgccagaagggaaagagatcaagttcagattatgcacagcgcgaggattttgaagctgccgggtcccccttttcaggcggtcccgtctcattcccactggctcctggaccccactttggcactccgggctatggttcccctcactttaccgcactttattctagcgtgcctttccccgaaggtgaggcgttcccaccagtatctgtgaccacccttggatctcccatgcactcaaat

SEQ ID NO: 18437 - DNA, 1080 bp, synthetic construct
  misc_feature 1..1080: note = source = /note="Description of Artificial Sequence: Synthetic coding sequence"
  source 1..1080: mol_type = other DNA
atggcgggacacctggcatcagatttcgccttctcgccgccaccaggcggaggcggcgacggtcccgggggtcctgagcccgggtgggtggacccgaggacctggcttagcttccaggggccgccaggcggccccggaatcggtcccggagtggggccaggaagcgaggtgtgggggattccgccgtgcccgccaccgtacgaattttgtgggggaatggcatactgcggacctcaggtgggagtgggactggttccgcaaggcggcctcgaaactagccagccggagggagaggccggggtgggagtcgagtcgaactccgatggagccagtcccgagccatgcactgtcactcccggcgccgtgaagctggagaaagaaaagctcgaacagaatccggaagaatcgcaagacatcaaagccctgcagaaggagctggagcagtttgcaaaacttctcaaacaaaagcggatcacccttggatatacccaagccgacgtgggattgacgctgggcgtcctgttcgggaaggtattctcccagacgaccatctgcagattcgaagcgctccagctgagcttcaagaacatgtgcaagctccgaccgttgcttcagaagtgggtggaagaagccgataacaatgaaaacctgcaggaaatttgcaaggcggaaaccctggtgcaagcgcggaaaagaaaacggacttcgatcgaaaaccgcgtcaggggaaacctggagaatctcttcctgcagtgcccaaagccaaccctgcagcagatttctcatatcgcccagcaattgggattggagaaggacgtggtgcgcgtgtggttttgtaaccggagacaaaagggaaagcgttcctcctcagattatgcacagcgcgaggactttgaagcagccggaagccctttctccggagggccggtgtcgtttcccctcgcgccaggaccgcacttcggaactcctggctacgggagccctcattttaccgcattgtactcctcagttccctttccagaaggagaagccttccctccggtgtcggtgactaccctggggagcccaatgcattcgaat

SEQ ID NO: 18438 - DNA, 1080 bp, synthetic construct
  misc_feature 1..1080: note = source = /note="Description of Artificial Sequence: Synthetic coding sequence"
  source 1..1080: mol_type = other DNA
atggctggacacctggcttcagatttcgcatttagcccccctccaggtggtggcggtgacggccccggaggtcctgagcctggctgggtggaccctcgcacctggttgtcctttcagggtccaccaggtggcccgggtattggacccggtgtcggcccaggttccgaagtttggggaattccaccatgtccacctccatacgaattctgtggaggtatggcttattgcggccctcaggtgggagttggtctcgtcccacagggtggcctcgagacatcacaaccagaaggtgaggctggtgttggtgttgagtctaacagcgatggagcatccccggaaccttgcaccgtgaccccaggtgccgtcaagctggaaaaggaaaagctcgaacaaaaccctgaagaatctcaggacattaaggccctgcagaaggaacttgagcaatttgctaaactgttgaagcagaagaggattacgttgggatatacccaggccgacgtaggtcttacccttggcgttttgttcggaaaagtgttctcacaaacaaccatttgcaggtttgaggccctgcagcttagtttcaaaaatatgtgcaagcttaggcctttgctgcaaaaatgggtcgaagaagcggacaataacgaaaatttgcaggagatctgcaaagctgagactctcgtgcaggcccgcaagcgcaagaggacctctatcgagaacagggtaagaggaaatttggagaacctctttctccagtgtccgaagccaaccctgcaacaaatctctcacatagctcagcaattgggactcgaaaaagacgtggtaagggtatggttttgcaaccgccgccaaaagggaaaacgcagctcctcagattacgctcaaagggaagattttgaggctgccggctctcccttctcaggcggcccagtgagttttcctctcgcccccggaccccattttggaacccccggttacggctctcctcactttacagccctgtacagtagtgttccgtttccggaaggcgaggcatttccaccagttagcgtaaccacgctgggctcacccatgcactccaat

SEQ ID NO: 18439 - DNA, 1080 bp, synthetic construct
  misc_feature 1..1080: note = source = /note="Description of Artificial Sequence: Synthetic coding sequence"
  source 1..1080: mol_type = other DNA
atggctggacatcttgcatccgactttgcattctcccccccacctggaggaggtggtgacggtccaggtggtcctgagcccggctgggtcgatcctcgcacctggctgtcctttcagggtccacctggcggacccggtattggacctggagtcggcccaggaagcgaggtttggggcattcccccttgcccccctccctacgaattttgcggtggaatggcttattgcggtcctcaggtcggagttggcctggtgccccagggaggcttggagacctcccaaccagaaggagaagccggcgtaggtgtggagagcaattccgatggagcatcccctgaaccctgcaccgtgacacccggagcagtgaaactggaaaaagagaagttggagcaaaatccagaggaatcccaagacataaaggctctgcagaaagaactggagcagttcgctaagctcctcaaacaaaaaagaattaccctgggatacacccaggccgacgtgggacttacccttggcgtgttgttcggcaaggttttttcccagactactatctgcaggttcgaggctctccagctgtctttcaagaacatgtgtaagctccgccccctcctgcagaaatgggttgaagaagctgacaacaacgagaaccttcaggagatctgcaaagccgagaccctcgttcaagcacgcaagagaaagcgcaccagcatagaaaacagggtgcgtggaaacctcgagaacctgtttctccagtgcccaaagccaaccttgcagcaaatcagtcacattgcacagcagctgggcctggagaaggatgtggtccgcgtgtggttctgcaatagacgccagaagggaaaaaggtcatcatccgactacgctcagagagaggatttcgaggctgccggctctccctttagcggcggcccagtgagtttccctctcgcacccggaccacactttggtacccccggttacggatcacctcatttcacagctctgtactcctccgttccttttcccgaaggagaagctttccctcctgtgtctgtgaccactctcggttcccccatgcacagcaac

SEQ ID NO: 18440 - DNA, 1080 bp, synthetic construct
  misc_feature 1..1080: note = source = /note="Description of Artificial Sequence: Synthetic coding sequence"
  source 1..1080: mol_type = other DNA
atggcaggacatctggcatcagatttcgcattttcccctccacctggtggaggcggggacggaccgggtggtccagaacccggatgggtggacccgcggacttggctctcgttccaggggccacccggcgggccgggaattggaccgggagtgggcccgggatcggaggtctggggaatcccgccctgtccgccaccatatgagttctgcggtggaatggcctactgtggtccgcaggtcggggtgggccttgtaccacaggggggattggaaacttcgcaaccggaaggagaagctggggtgggcgtcgagagcaactctgacggagcgagcccagagccttgcaccgtgactccaggagcagtgaagctcgaaaaagagaaactggagcagaatccggaagagtcacaagatatcaaggcccttcagaaggaacttgagcagtttgctaagctgttgaagcagaagcgtataacgctcggatacactcaagccgatgtcggcctgaccttgggagtgctgtttggaaaggtgttctcgcaaactactatctgtcgattcgaagcgctgcagctgtcctttaagaacatgtgtaaactccggcccctcttgcaaaaatgggtcgaggaggctgacaacaacgaaaatctgcaagaaatctgcaaagcggaaactctggtgcaggcccggaagcgcaagcggacttcaatcgaaaaccgcgtgcggggaaacctggaaaatctcttcctgcagtgcccaaagccaaccctgcagcaaatctcccatatcgcgcagcagctgggcctggagaaagacgtggtgcgggtgtggttttgtaacagaaggcagaagggaaaaaggtcatccagcgattacgcccagagagaggactttgaagccgccggctcgcctttctcaggaggaccggtatcattcccgctcgcgccgggcccacacttcggtaccccgggatacggttccccacacttcaccgccttgtacagctcggtgccttttcccgagggagaggccttcccgccggtgtccgtgactaccctgggctcacctatgcactcgaac

SEQ ID NO: 18441 - DNA, 1080 bp, synthetic construct
  misc_feature 1..1080: note = source = /note="Description of Artificial Sequence: Synthetic coding sequence"
  source 1..1080: mol_type = other DNA
atggctggacatttggcctcggattttgcgttctccccacccccgggcggtgggggcgatggccctggaggtcctgaaccaggttgggtggatcctagaacctggctgtcatttcaaggtccaccgggaggacctggtatcggaccaggagtgggtcctggaagcgaagtttggggtattcccccgtgcccacccccttacgagttttgcggcggtatggcttactgcgggccccaagtcggggtgggacttgtgcctcagggcgggctcgaaacgtcgcaacctgaaggagaagcaggtgtgggtgtggaatcgaattcggatggtgcatcgcccgaaccttgcaccgtgactcccggtgcagtgaagctggagaaagagaagctcgaacagaatccagaagaaagccaggacattaaggctctgcagaaagaacttgagcaattcgcaaaattgttgaagcaaaaacgtatcactctgggctacacccaggctgacgtcggccttacccttggggttttgtttggtaaggtcttttcacagaccactatttgtcgcttcgaggcactgcaactgtccttcaagaacatgtgtaagctgcggcctcttcttcaaaagtgggtcgaagaggccgacaacaacgaaaaccttcaagaaatttgtaaggcagaaaccctggtgcaggcaaggaagcgaaaacgtacctccatcgaaaaccgagtgagaggaaacctggaaaacctgtttctgcagtgtccaaagccaacgcttcagcagatatcccatattgcacagcaacttggactggagaaggatgtggtgagggtgtggttttgtaacagacgccaaaaagggaagcggtcctcgtccgattacgcacaacgcgaggacttcgaggcagccggatctccgttttcgggcgggccggtgtcgtttcctcttgcaccaggacctcattttggaaccccgggctatggctcacctcactttaccgcactctacagctccgtgccctttccagaaggtgaagcgttccctccagtgtcggtgaccacgcttggatcgcctatgcactccaac

SEQ ID NO: 18442 - DNA, 1080 bp, synthetic construct; identical to SEQ ID NO: 18374
  misc_feature 1..1080: note = source = /note="Description of Artificial Sequence: Synthetic coding sequence"
  source 1..1080: mol_type = other DNA

SEQ ID NO: 18443 - DNA, 1080 bp, synthetic construct
  misc_feature 1..1080: note = source = /note="Description of Artificial Sequence: Synthetic coding sequence"
  source 1..1080: mol_type = other DNA
atggccggacatctcgcatctgacttcgctttctcaccccctcctggaggaggtggtgatgggcctggcggacctgaacccggttgggtggaccctaggacctggctgagcttccagggaccacctggtggacctggcataggtccgggagtgggccctggttccgaggtgtggggaatccctccttgcccaccaccatacgagttttgcggaggtatggcctactgtggtccacaagtcggggtgggactcgtcccgcaggggggtcttgaaacctcgcaacccgagggagaggccggggtgggcgtcgagagcaacagcgatggagcatccccagaaccttgtaccgtgactcctggagcagtgaagctggaaaaggaaaaacttgagcaaaacccagaagaatcccaggatatcaaggcactgcagaaggaactggaacaatttgcgaagttgctgaagcagaagcggatcaccctggggtacactcaggccgatgtgggactgaccctcggagttctttttggtaaagtgtttagccaaaccaccatatgtcggtttgaggcactgcaactctcgttcaagaacatgtgcaagttgaggccactgcttcaaaagtgggtggaggaagcagataacaatgaaaacctgcaggaaatttgtaaagcagagactctggtccaggcgaggaagcgtaagagaacctccattgagaaccgcgtccggggaaatctggagaacctgtttctgcaatgtccaaagccaactcttcagcagatttcccatatcgcccagcagctgggactcgaaaaggatgtggtgcgagtgtggttttgtaataggcgacagaagggaaaaagatcctcaagcgactacgcacagcgggaagattttgaagccgccgggtcgccattttccggaggccctgtgtcgtttcctctggcaccaggcccccacttcgggacgcctggttacggatccccgcattttacggcactgtactcgagcgtgccttttccagaaggcgaagcatttcctcctgtgtccgtcaccacgctggggtcgcctatgcacagcaac

SEQ ID NO: 18444 - DNA, 1080 bp, synthetic construct
  misc_feature 1..1080: note = source = /note="Description of Artificial Sequence: Synthetic coding sequence"
  source 1..1080: mol_type = other DNA
atggccgggcacctggcatccgattttgccttttcacctcccccaggcgggggaggcgacggccccggcggccccgagcccgggtgggtggacccacggacgtggctgtcattccaggggcctccgggcgggcccgggattggtccaggggtgggcccaggatcagaggtgtgggggatcccaccttgccctcccccgtacgagttctgtggaggaatggcctactgtggcccacaggtcggcgtggggctggtaccacagggggggctcgagacatcacagcctgaaggggaggccggtgtgggcgtcgagagcaatagtgacggcgccagtccagagccgtgcaccgttactcctggcgccgtgaagttagagaaggaaaagctcgagcaaaaccccgaagagtcacaagacatcaaggcgctgcagaaggaactggaacagtttgccaagctcctgaagcagaagagaatcacgctggggtacacgcaggcagatgtgggcctcactctgggcgtactgtttgggaaagttttctcccagacaaccatttgccgattcgaggcactgcagcttagctttaagaacatgtgcaagttgcgtccgttactgcagaagtgggtggaggaggccgataataatgagaatcttcaggaaatctgcaaggctgaaacactggtacaggccagaaagcgcaagaggacatcgatcgaaaatagagtgagggggaatctggaaaatctcttcctgcagtgtccaaaacccactctgcagcagatctcacacattgcgcagcaattaggactagaaaaggacgtcgttcgcgtatggttttgtaaccgccgccagaaggggaagagaagtagcagtgactatgcacagagggaggatttcgaggccgcggggtctcccttttctgggggccctgtctcattccctctggcccctgggccgcatttcgggaccccaggatacggctctcctcactttaccgcgttgtacagctcagtgcccttcccggaaggagaggctttcccaccagtgtctgtcactaccctagggagtcccatgcactcaaat

SEQ ID NO: 18445 - DNA, 1080 bp, synthetic construct
  misc_feature 1..1080: note = source = /note="Description of Artificial Sequence: Synthetic coding sequence"
  source 1..1080: mol_type = other DNA
atggccggccatctggcttctgatttcgcctttagcccaccaccaggaggaggtggcgatggccctggaggcccagaacccgggtgggtggaccctagaacatggctcagcttccagggaccacctggtggccctgggataggacctggcgttgggcccgggagtgaagtctggggtatccctccctgcccacctccgtatgagttttgcggcggaatggcatattgcggaccccaggtcggggtgggtcttgtaccgcagggaggtctcgaaacctctcagccagagggcgaggccggtgtcggagtggaaagcaactccgacggagcttcccctgagccgtgtacagtgactcctggtgccgtaaagctggaaaaggaaaaattggagcagaaccccgaagaatctcaggatatcaaggcattgcagaaagagctcgagcaatttgcgaagctgctgaagcagaagaggatcacattgggctacacacaggcagatgtggggctgactcttggcgttctttttggcaaagtatttagtcaaacaacgatttgtaggttcgaggcattgcagctgagttttaagaacatgtgcaagctgcggcccctgctccaaaaatgggtcgaagaggccgataataatgagaacctgcaagaaatttgtaaggccgaaacccttgtgcaggccagaaaacgaaagcgcacaagtatcgagaatagagtccgagggaaccttgaaaacttgtttctccagtgtcctaagcccaccctccagcagataagccatattgcgcagcaactcggactggaaaaggacgtcgtacgggtttggttctgtaaccgtcgccagaagggcaagcggagctcatcagactacgctcagagagaagactttgaagccgcgggaagtccatttagcggtggtcccgtatcgttccctctggccccaggacctcacttcgggactcccggatacgggtcccctcacttcactgcactgtacagttcagttcccttccccgaaggtgaggcattccctccagtcagcgtgactacacttggcagtccaatgcattcgaat

SEQ ID NO: 18446 - DNA, 555 bp, synthetic construct
  misc_feature 1..555: note = source = /note="Description of Artificial Sequence: Synthetic coding sequence"
  source 1..555: mol_type = other DNA
atgcccagactctttttcttccatctgttaggcgtgtgtctcctgctgaatcaattctccagagcagttgcagattcctggatggaagaggtcataaaactttgcggacgggagctggtaagggctcagattgctatatgtggcatgtccacttggtcaaagagatcgcttagccaagaagatgcaccccagacccctcgtccagtggccgagatagttccgagctttataaacaaggacacagagaccatcaacatgatgtccgaattcgtcgccaatttacctcaggaattgaagctcacattgagtgagatgcaacccgctctaccgcagttgcaacaacatgtgcccgtgctgaaggatagctccctactgtttgaagaattcaaaaagcttatccgcaatcgacagagcgaggcagcggactccagcccttccgagctcaaatatttgggtttagatacccatagtcggaagaagagacagctctattccgccctcgctaataagtgttgccatgtcggttgtaccaagcgctcccttgcccgtttttgt

SEQ ID NO: 18447 - DNA, 555 bp, synthetic construct
  misc_feature 1..555: note = source = /note="Description of Artificial Sequence: Synthetic coding sequence"
  source 1..555: mol_type = other DNA
atgccaaggctgttcttcttccatctcctgggcgtgtgccttcttctgaatcagttctccagagccgtcgcagattcctggatggaggaagtcatcaagctatgtggcagggaactggtgagagcccagatcgctatatgtggaatgtctacctggtcaaaacgcagcctgtcccaagaagacgctccacagacccctcgtccagtggcggagatcgttcccagctttattaacaaagacacggaaactataaacatgatgtccgagtttgtcgcgaatctcccgcaggagcttaagctgactctctctgagatgcagcctgctctccctcaactgcagcagcacgttcctgtactcaaggactctagcttgcttttcgaagaattcaaaaagttgattagaaatcgacagtctgaggccgccgattcctcaccttccgagctgaagtatctgggcctggatacccatagcagaaaaaagagacaattatactccgctcttgctaacaagtgctgtcacgtgggctgtacaaaacgaagtctggcacggttttgt

SEQ ID NO: 18448 - DNA, 555 bp, synthetic construct
  misc_feature 1..555: note = source = /note="Description of Artificial Sequence: Synthetic coding sequence"
  source 1..555: mol_type = other DNA
atgccacgcttgtttttcttccatctcctgggggtatgcttgcttctgaatcaattttcccgtgccgtcgccgacagctggatggaggaggtgatcaagttgtgtggacgcgaattggtgcgcgcacagatagcaatttgtggtatgtccacctggagcaagcgctccctgtcgcaggaggacgcacctcaaactcctaggcctgtggcggaaattgtgccctcctttatcaataaggataccgaaacgattaacatgatgtcggaatttgtggcgaacctcccacaagagcttaagctgaccctgtcggaaatgcagccagcactcccacaactgcaacagcacgtgccggtacttaaagattcgagcctgcttttcgaagaattcaagaaactgattcggaatcgtcagtcagaggcagcggatagctcgccctccgaacttaagtacctgggcctcgatactcacagtcgaaagaagcgacagttgtactccgccctcgcaaacaagtgttgccatgtcggatgtactaaacggtcgctcgcaagattttgc

SEQ ID NO: 18449 - DNA, 555 bp, synthetic construct
  misc_feature 1..555: note = source = /note="Description of Artificial Sequence: Synthetic coding sequence"
  source 1..555: mol_type = other DNA
atgccgagacttttcttttttcacctccttggagtttgcctgcttctgaatcaattttcgcgtgctgtggccgatagctggatggaagaggtaatcaaactgtgtggaagagagctggtccgcgcacagatcgctatctgcggtatgtctacatggtccaagagatccctcagtcaggaagacgcacctcagacccccagacctgtcgccgagatcgttccgtcctttatcaacaaggacacagagaccatcaatatgatgtccgaatttgtcgcaaacctgcctcaagagctgaagctgaccttgtccgaaatgcagccggcccttccacagctgcagcagcacgtaccagtcctcaaggattcgtctctgctcttcgaagaattcaaaaagctcatcaggaatcgccagtcagaggcagcagactcaagcccttccgaactgaagtacctcggcctggacacacacagtaggaaaaagcgacagttgtattcagctcttgctaataagtgttgccatgtgggctgtacgaagagatccctagccaggttctgt

SEQ ID NO: 18450 - DNA, 555 bp, synthetic construct
  misc_feature 1..555: note = source = /note="Description of Artificial Sequence: Synthetic coding sequence"
  source 1..555: mol_type = other DNA
atgcccagactattttttttccacttgctgggcgtctgtcttttgctgaatcaattttccagggccgtcgcagactcatggatggaggaggtcatcaaactctgtgggagagaactagtgcgcgcacagattgctatttgtggtatgagcacctggtctaaacgctcactcagtcaggaggacgctcctcagaccccccgccccgtggctgaaatcgtgccgtcattcataaataaagacacagagaccatcaacatgatgtcggagttcgtagcgaatctacctcaggagctgaaacttacactgtctgaaatgcagccagctttgccacagctccagcagcatgtacctgtgctcaaagattcgtcacttcttttcgaggagtttaaaaagttgatccggaacagacaaagtgaggcggccgattcatcccccagcgagctgaagtacctcggcctagatacgcactcccgcaagaagagacagctctactcggcgcttgctaacaagtgctgccacgtaggctgtactaagaggtccctggcccggttctgt

SEQ ID NO: 18451 - DNA, 555 bp, synthetic construct
  misc_feature 1..555: note = source = /note="Description of Artificial Sequence: Synthetic coding sequence"
  source 1..555: mol_type = other DNA
atgccgcgtctctttttctttcatctacttggtgtgtgtttgcttttaaaccagttttctagggctgtggctgattcctggatggaagaagttatcaagctttgcggaagagagttggttagagctcagatagccatatgcggtatgtctacatggtcaaagaggagtctctctcaagaggatgcaccccaaacacccaggcctgttgctgagattgttcctagcttcattaacaaggatactgaaactattaacatgatgagcgaatttgttgccaaccttcctcaggaacttaaactgaccctatcagagatgcagccggcccttccacagttgcagcaacatgtgccagtgctcaaagatagttcactactcttcgaggagttcaaaaagctcataagaaaccgacaaagtgaggctgctgattccagtccttcggaattaaagtatctgggtttggatacccactcacgaaagaagcgacagttatactctgcattggcaaacaagtgctgtcacgtgggttgtactaagcgtagccttgcaaggttctgt

SEQ ID NO: 18452 - DNA, 555 bp, synthetic construct
  misc_feature 1..555: note = source = /note="Description of Artificial Sequence: Synthetic coding sequence"
  source 1..555: mol_type = other DNA
atgccacggctctttttcttccacttgctgggagtgtgcctgctcctgaaccaattttcaagagcagtcgcagattcgtggatggaagaagtcattaaactttgcggccgtgaactcgtgcgtgcacagatcgccatctgtggaatgtccacgtggtcgaagcgctccctcagtcaggaagatgctccacaaactcctcggccagtggccgagatcgtcccctctttcattaacaaggacactgaaacgattaacatgatgtcggagtttgtggctaacctgccacaagaactgaaactgactctgtctgagatgcaacctgcgcttccacaactgcaacaacatgtgcctgtgttgaaggattcatcgcttctttttgaggagtttaagaagttgattagaaatcgccagtcggaggcagcggattcaagcccatccgaactgaaatacctgggtcttgatacgcacagcagaaagaagaggcaactctactccgcactggcaaacaagtgttgccacgtgggatgtactaagaggtccttggcccgattttgt

SEQ ID NO: 18453 - DNA, 555 bp, synthetic construct
  misc_feature 1..555: note = source = /note="Description of Artificial Sequence: Synthetic coding sequence"
  source 1..555: mol_type = other DNA
atgccaagattatttttttttcatcttttaggagtttgtttattattaaatcagttttcaagagcagttgctgatagttggatggaagaagttataaaattatgtggaagagaactagtaagagctcaaattgcaatatgtggtatgagtacatggtctaaaagatcacttagtcaggaggatgctccacaaactccacgaccagttgctgaaattgttccatcatttattaataaagacacagaaactataaatatgatgtctgaattcgtagctaatttaccacaagaattaaaacttactctttctgaaatgcaaccagcattaccacaattacaacaacatgtaccagtattaaaagattcaagtcttcttttcgaagaatttaaaaaacttattcgtaatagacaatctgaagctgcagatagttccccttctgaacttaagtatttaggtttagatacacattcgagaaaaaaacgtcaattatattcagctttagcaaataagtgttgtcatgttggatgtacgaaaagatctcttgcaagattctgt

SEQ ID NO: 18454 - DNA, 555 bp, synthetic construct
  misc_feature 1..555: note = source = /note="Description of Artificial Sequence: Synthetic coding sequence"
  source 1..555: mol_type = other DNA
atgcccagactgttcttttttcacctgctgggtgtgtgcctgctgctgaatcagttttcgagagctgtggcagatagctggatggaagaggtgatcaagctgtgtgggcgagagctcgtgcgcgcacaaatcgccatttgtgggatgtccacctggtcaaaacgatcgctttcccaagaagatgcaccgcagactccaagacctgtcgccgaaattgttcctagcttcataaacaaggataccgaaactattaacatgatgtcggagtttgtggccaaccttccacaggaactgaagctcaccctctccgaaatgcaaccagccctgccacaacttcaacagcatgtgccagttcttaaggattcatcgctgctctttgaggagtttaagaaactcattcgaaatcggcaatcagaagcagccgatagctccccttcagaactgaagtacctcggtcttgatactcactcgagaaaaaagcgccagctgtattcggcgcttgcgaacaagtgctgtcatgtgggttgcaccaaacgctccctcgcgcgtttctgc

SEQ ID NO: 18455 - DNA, 555 bp, synthetic construct
  misc_feature 1..555: note = source = /note="Description of Artificial Sequence: Synthetic coding sequence"
  source 1..555: mol_type = other DNA
atgccgcgcctgttctttttccatcttcttggagtgtgccttctcctcaaccagttctcccgcgccgtggcggattcctggatggaggaagtcataaagctgtgtggaagggagctggttcgcgcccagattgccatctgcgggatgtccacctggtcgaaacgttctctgtcacaggaggacgcgccgcagacgccgcgccctgtggcagagatcgtgccgagcttcatcaataaggatactgagacgatcaacatgatgagcgagtttgtcgccaacctcccacaggagctcaaactgaccttgtcagagatgcaacccgccctcccacagttgcaacagcacgtgcccgtgctcaaggatagcagcctcctgtttgaggagttcaagaaactcatccgcaatcggcaatctgaagcagccgattcgtccccgtcagaactcaagtacctgggccttgatactcattcccgcaagaaaagacagctgtactcggctctggcaaacaaatgctgccacgtcggatgcactaagcgctcactcgcccgcttctgc

SEQ ID NO: 18456 - DNA, 555 bp, synthetic construct
  misc_feature 1..555: note = source = /note="Description of Artificial Sequence: Synthetic coding sequence"
  source 1..555: mol_type = other DNA
atgcctcgcctgttcttcttccacctcctgggagtgtgcctcttgttgaaccagttttctagggcggtcgcggacagctggatggaagaggtcattaagttgtgcggccgcgagcttgtgagagcgcagatcgctatttgcggcatgtctacttggtctaaacgttcgcttagccaagaggacgccccccaaaccccgcgcccagtggccgaaatcgtgccgtcgttcatcaataaagacactgaaactatcaatatgatgagcgaattcgtggccaacttgccgcaagagctgaagctcaccctgtcagagatgcagccagcccttccgcaacttcagcagcacgttccggttctgaaagactcgtctctgttgttcgaagagtttaagaagctgatcagaaacagacagtcggaggccgctgatagctccccatccgaactgaagtaccttggcctggatacccactcccgcaaaaagcgccagctctacagcgcgctggccaacaagtgctgtcacgtgggatgtacgaagaggtcgctcgcacgattctgc

SEQ ID NO: 18457 - DNA, 555 bp, synthetic construct
  misc_feature 1..555: note = source = /note="Description of Artificial Sequence: Synthetic coding sequence"
  source 1..555: mol_type = other DNA
atgcctagactgttcttttttcaccttctgggcgtctgccttctgctgaatcagttcagcagggcagttgccgattcttggatggaggaggtcattaaactgtgcgggcgcgagctggtgcgagcgcagatcgctatttgtggcatgagtacatggtccaaacgctctctgtctcaggaagacgcacctcaaacccccagaccagtagccgagatcgtgcccagctttattaacaaggacactgagactatcaacatgatgagcgagttcgtcgccaacctcccacaggagctgaagcttacacttagcgagatgcagcccgctcttccccaattgcaacagcacgttccagtcctgaaagatagcagtcttctcttcgaggagtttaagaagctgattcggaatagacagagcgaggccgccgatagcagcccgtcagaactgaagtacctggggctcgacactcatagcaggaaaaagaggcagctttattccgcactggcaaataaatgctgtcacgtgggttgtactaaaaggagcctcgcccgcttttgt

SEQ ID NO: 18458 - DNA, 555 bp, synthetic construct
  misc_feature 1..555: note = source = /note="Description of Artificial Sequence: Synthetic coding sequence"
  source 1..555: mol_type = other DNA
atgccgcgcctgttcttcttccacctcctgggcgtgtgtctgttgctcaaccaattctccagagcggtggcagattcttggatggaagaggtgatcaaactgtgtggaagggaactcgtgagggcgcaaatcgctatctgcggaatgtcaacttggtcgaagcgcagcctgtcgcaggaggacgctccccaaacgccaaggccggtcgccgagattgtgccttcctttatcaataaggacaccgaaaccatcaacatgatgtcggaattcgtcgcaaacctccctcaagaactgaagctgaccctcagcgagatgcagcctgcattgccgcagctgcaacaacacgtgccagtgctcaaggactcgtcgctgctgttcgaggagtttaagaagctcatccgcaaccggcagagcgaggctgccgattcgtcgccgtcggaactgaagtacttgggactcgacactcatagccgcaaaaaacgccaactgtactcggcattggcgaataagtgctgccatgtgggctgcaccaagcggtccctcgctcggttctgc

SEQ ID NO: 18459 - DNA, 555 bp, synthetic construct
  misc_feature 1..555: note = source = /note="Description of Artificial Sequence: Synthetic coding sequence"
  source 1..555: mol_type = other DNA
atgccacgcctctttttctttcaccttctaggcgtctgtttgctgctaaatcaattttctcgggccgttgcggatagctggatggaggaggtaattaagctgtgcgggcgggagctggtcagagcgcaaatcgctatctgcggaatgagcacatggtcaaagaggtccctatctcaagaagacgctccccaaaccccacgccctgtggctgagatcgtgccaagctttatcaataaggataccgagaccattaatatgatgagcgagttcgtggccaacctaccccaggagctgaagttaaccttatccgagatgcagcccgcgctgccccagctccagcagcacgtgcctgtccttaaggacagctccctgctctttgaagaatttaagaagttgattcgaaaccgccagagcgaggccgcggattcaagtcctagcgaattgaagtacctggggctcgacacccattccagaaagaagagacagctgtatagcgcgttggccaacaagtgctgccacgtggggtgcactaaacgtagcctagcaagattctgt

SEQ ID NO: 18460 - DNA, 555 bp, synthetic construct
  misc_feature 1..555: note = source = /note="Description of Artificial Sequence: Synthetic coding sequence"
  source 1..555: mol_type = other DNA
atgcctcgcctgttcttttttcatctgctgggggtgtgccttctcctgaaccaattttccagagcagtggccgattcatggatggaagaggtgattaagctgtgcggacgggagctggtccgagctcagattgcaatatgcggtatgagcacctggagcaagcggtcgctttcacaagaggacgcgccacagaccccacgccctgttgccgaaatcgtgccttcctttatcaataaagacactgaaacgatcaacatgatgtccgagttcgtggccaacctcccccaagaattgaaacttactctttcggaaatgcagcccgcactgcctcaacttcagcagcatgtcccagtgcttaaggactcatcgcttctctttgaggagtttaagaaacttattagaaacagacaatctgaggcagcagattcgtcgccgtcggaacttaagtacttggggctggacactcattcgagaaagaaaagacagctttactcagctttggcaaataagtgttgtcatgtcggctgtaccaaacgctccttggcacggttttgt

SEQ ID NO: 18461 - DNA, 555 bp, synthetic construct
  misc_feature 1..555: note = source = /note="Description of Artificial Sequence: Synthetic coding sequence"
  source 1..555: mol_type = other DNA
atgccacggctgttcttcttccatctcttaggcgtgtgcctgctactgaatcagttctctcgggcagttgctgactcctggatggaagaggttatcaaattatgtggcagagagctggttcgcgcccagatcgccatctgtggaatgtccacttggagcaaacggagcctgtctcaggaagatgcaccccagaccccgaggcccgtcgccgaaatagttccctcctttattaacaaggacacagagacgatcaatatgatgtcggaatttgtcgccaacttgccacaggagctgaagttgactctgagcgagatgcagcccgctctgccccagctacagcaacacgtgcccgtccttaaggattcaagcttactgtttgaggaatttaagaagctgatccgaaaccgacagagtgaggcagccgatagcagcccctccgaattaaagtaccttggtttagacactcattcccggaaaaagagacagctttactctgccctggccaataaatgctgccatgtgggctgcaccaaaagatcattggcaagattctgt

SEQ ID NO: 18462 - DNA, 555 bp, synthetic construct
  misc_feature 1..555: note = source = /note="Description of Artificial Sequence: Synthetic coding sequence"
  source 1..555: mol_type = other DNA
atgccacgcctgttctttttccatctgctcggggtgtgcctcttgctgaaccagtttagcagagcggtggccgactcctggatggaggaagtgatcaagctctgcggaagggaactcgttagggcccagatcgccatctgcggaatgtcaacgtggtccaagcggtctttgtcccaagaagatgcacctcagactcccagaccggtggctgagatcgtccctagcttcatcaataaagacacggagactatcaatatgatgagcgaattcgtggctaatctgcctcaggaactcaaactcaccctgtcggagatgcaaccggcgcttccgcagctgcagcagcatgttccggtgctgaaggactcctctctgctgtttgaagaattcaaaaagttgatccggaatcggcaaagcgaagctgccgattcctcgccgagcgagctcaagtacctgggactggatacccatagtcggaaaaagcgccaactgtacagcgcgttggccaacaagtgctgccacgtgggctgcactaagagatcgctcgctcgtttctgc

SEQ ID NO: 18463 - DNA, 555 bp, synthetic construct
  misc_feature 1..555: note = source = /note="Description of Artificial Sequence: Synthetic coding sequence"
  source 1..555: mol_type = other DNA
atgccgcgattgttctttttccacctgttaggcgtctgcctgctcttaaaccagtttagccgagctgtggccgactcctggatggaagaagtgataaaactgtgcgggcgagagctagtgcgagcccagatcgcaatttgcggaatgagcacctggtccaagaggagcctgtcccaggaggacgctccccagacccctaggcccgttgccgagattgtgccgagcttcattaataaggacacagagactatcaatatgatgagtgaattcgttgccaatctgccccaggaacttaaattgacactgtcggagatgcagccagcgctgccccagcttcagcagcacgttcccgtcctcaaggattccagcctcctcttcgaagagttcaaaaagctgatcagaaatagacagtcagaggccgccgatagctctccctcagaactcaaatatctggggttagacacccattcccgaaagaaacggcaactttactccgccctcgcaaacaagtgttgccatgtgggctgtacgaagcgtagccttgcgaggttctgc

SEQ ID NO: 18464 - DNA, 555 bp, synthetic construct
  misc_feature 1..555: note = source = /note="Description of Artificial Sequence: Synthetic coding sequence"
  source 1..555: mol_type = other DNA
atgccacgtctcttcttcttccacctgctgggagtgtgcttgcttctcaaccagttctcgagggctgtggcggattcttggatggaggaggtcatcaaattatgcgggagagaattagttagggcccagatagctatctgcggaatgagtacctggagtaaaaggtccctgagccaggaggacgctccccagactcctcggccagtggctgagatcgtgccgtcctttatcaataaggatacggaaactatcaatatgatgtcagagttcgtcgcaaatctccctcaggaactgaagctgacgctgtccgaaatgcagcctgcactccctcagctgcagcaacacgtgcctgtcctcaaagactcgtctctcctgtttgaagaattcaaaaagctgatacgcaacaggcagtctgaagcagccgatagcagccctagtgagctcaagtatctgggccttgatacacactcgagaaagaagcgccagctgtattccgccctggcaaacaagtgctgtcacgttgggtgtactaaacgatccctcgcaaggttctgc

SEQ ID NO: 18465 - DNA, 555 bp, synthetic construct
  misc_feature 1..555: note = source = /note="Description of Artificial Sequence: Synthetic coding sequence"
  source 1..555: mol_type = other DNA
atgccccgccttttcttcttccatcttctcggggtgtgcctactcctcaatcagttttcccgtgctgttgcggactcctggatggaggaagtgatcaagctgtgtggccgcgagctggttcgggcccaaatcgccatctgcggcatgtccacttggtctaagaggagtctctcccaggaggacgccccgcagactccccggccggtcgcggagattgttccaagtttcattaacaaggacactgagaccatcaacatgatgtctgagttcgttgctaatttgccccaggaactcaagctcacattgtccgagatgcagcccgcgctgccccagctacagcagcatgtgcccgtgcttaaagactccagtctccttttcgaggagtttaagaagctgatccggaatcgacagtcggaggccgctgactctagtccttccgaacttaagtacctgggtctcgatacgcactctcgcaagaaacgacagctgtacagcgccttggcgaacaagtgctgccatgttggctgtactaagagatcgcttgcacgcttctgt

SEQ ID NO: 18466 - DNA, 555 bp, synthetic construct
  misc_feature 1..555: note = source = /note="Description of Artificial Sequence: Synthetic coding sequence"
  source 1..555: mol_type = other DNA
atgcctagactgttcttttttcaccttctcggcgtgtgccttttgctgaatcagttcagtcgcgccgttgcggattcatggatggaggaagtaatcaaactgtgtggcagagaattagtccgagcccaaatcgccatatgcggcatgagtacatggtcaaagagatctctcagccaggaggatgctcctcagacaccacgccctgtggccgaaatcgtgccatccttcatcaataaggacaccgagactatcaacatgatgtcagagttcgtcgctaatctgccccaggagttgaagctgaccttgagtgaaatgcagcctgctcttccccagctgcagcagcacgtgcccgtcctcaaggatagcagtttgctcttcgaagaatttaagaaactcattcgcaatcgccaatctgaggcggccgactccagtccctctgagctcaagtaccttggcctcgatacacactccaggaagaagcggcagctctacagtgcactagccaacaaatgttgtcacgtaggatgcaccaaaagatcattagctaggttttgc

SEQ ID NO: 18467 - DNA, 555 bp, synthetic construct
  misc_feature 1..555: note = source = /note="Description of Artificial Sequence: Synthetic coding sequence"
  source 1..555: mol_type = other DNA
atgccacgcctttttttctttcacttgctgggcgtctgcctgcttctgaaccagttctcaagggccgtggccgactcctggatggaggaggtgatcaagctgtgtggcagggagcttgtgagggcacagatcgcaatttgcggcatgtctacatggagtaagagatcactgagtcaggaggacgcccctcaaactccacgccctgtggctgaaatcgttcccagcttcatcaataaggacaccgagacaattaacatgatgtcagagttcgtggccaatcttccccaggagttgaagcttactctttccgagatgcagcccgccctgccccagctccagcagcatgttccagttctcaaggactctagtctgttgttcgaggagtttaaaaaacttataagaaatcgccagtccgaggcagccgattcatctcctagcgaactcaagtacttgggcctggatacccattctcgcaaaaaacgccagctctatagcgctctcgccaacaagtgctgccatgttggctgcacaaaacgctccctggctcgcttttgc

SEQ ID NO: 18468 - DNA, 555 bp, synthetic construct
  misc_feature 1..555: note = source = /note="Description of Artificial Sequence: Synthetic coding sequence"
  source 1..555: mol_type = other DNA
atgcctcgtttgttcttttttcatctcttgggagtgtgtctcctccttaatcaattctctagagcggttgccgactcgtggatggaggaagtcattaagttgtgcggaagagaactcgtgagagctcagattgctatttgtggaatgagtacttggtctaaacgatcgttatcgcaagaggatgccccacaaactcctagaccggttgcggagattgttccatcatttattaataaggatacagaaaccattaacatgatgtctgagttcgtggcgaatttgccgcaagaacttaagttgacactttcagagatgcaaccagcacttccacaactccagcagcatgtacctgtcctcaaagattctagtctgcttttcgaagagttcaaaaaacttatacgcaatagacagtccgaagcagctgactcgtctccaagcgagctgaaatatttaggactagacactcattcacgaaaaaagcgccaattatactctgcgctcgcaaataagtgctgccacgtcggatgtacaaaacgaagcttagcacgtttctgc

SEQ ID NO: 18469 - DNA, 555 bp, synthetic construct
  misc_feature 1..555: note = source = /note="Description of Artificial Sequence: Synthetic coding sequence"
  source 1..555: mol_type = other DNA
atgcctagactcttcttcttccaccttctgggggtatgtttacttctgaaccagttttctcgggcagtggcggattcttggatggaagaagtgataaaactctgtgggcgggaacttgtgcgggctcagattgccatctgcgggatgtccacttggtcaaaacggtcactttctcaggaagacgcaccccagacaccaaggccagttgctgaaatagtgccatctttcataaataaagacacagaaacaataaacatgatgagtgaatttgtagccaacctgccacaggaattaaaactcacactctctgaaatgcagccggcgcttcctcagctccagcagcatgttcccgtactcaaagattcctctttattattcgaagaatttaagaaactaatcaggaaccgacagtctgaagccgctgattcctccccttctgaactcaaatatcttgggcttgatacacattccaggaagaagcggcagctgtattccgccttagctaacaaatgctgtcacgtgggatgcacaaaaaggtcacttgcccgattctgc

SEQ ID NO: 18470 - DNA, 555 bp, synthetic construct
  misc_feature 1..555: note = source = /note="Description of Artificial Sequence: Synthetic coding sequence"
  source 1..555: mol_type = other DNA
atgcctagactgttcttctttcaccttctgggagtgtgcctcctcctgaaccagtttagccgggcggtcgccgattcgtggatggaggaggtcattaagctgtgtggacgcgaactcgttcgcgcccaaatcgcaatctgcgggatgtccacgtggtcgaaacggagcctgtcgcaggaggacgccccgcagacgccgcggcccgtggctgaaattgttccttcgttcatcaacaaggatacggaaaccatcaacatgatgagcgaattcgtggcaaatctgccccaggaactgaaacttaccctctcggaaatgcaaccggcgcttccacagctccagcagcatgtgccggtcctgaaggactcttcgctgctgttcgaagagtttaagaagctgatcagaaaccgacagtccgaagcggcagactcatccccatccgagctgaagtacctgggtttggacactcactccagaaagaagcgccaactttactccgctctggccaataagtgctgccatgtcggatgtaccaagcgcagcctggcaagattctgt

SEQ ID NO: 18471 - DNA, 555 bp, synthetic construct
  misc_feature 1..555: note = source = /note="Description of Artificial Sequence: Synthetic coding sequence"
  source 1..555: mol_type = other DNA
atgccacgccttttcttcttccacctgcttggtgtttgtctgctccttaaccaattttcacgcgctgtggcagattcctggatggaagaggtcattaaactgtgtggtcgggaactggtccgcgcacagatagcaatctgcggcatgtcgacctggagcaagagaagcctttcgcaagaagatgccccacagactccacggccagttgctgagattgtgccctcattcataaacaaggataccgaaactattaacatgatgtctgaatttgtggcaaacctgcctcaagagcttaagttgaccctgtcggaaatgcagcccgctctgcctcagcttcagcagcatgtccctgtgctcaaggacagctcactgctgttcgaggagttcaagaagctgattcgaaatagacaatcagaagccgccgattcatccccgtccgagctcaagtacctgggactcgacactcatagccggaagaaaaggcaactttactcagcgctcgccaataagtgttgccatgtggggtgtaccaaacggtccctcgcgaggttttgt

SEQ ID NO: 18472 - DNA, 555 bp, synthetic construct
  misc_feature 1..555: note = source = /note="Description of Artificial Sequence: Synthetic coding sequence"
  source 1..555: mol_type = other DNA
atgccccgccttttctttttccatcttcttggagtctgcctcctcctgaaccagtttagccgggcggttgccgacagttggatggaggaggtcattaaattgtgtggtagagagttggttagagcccagattgcgatttgtggcatgagtacctggtctaagcgctccttgtcacaagaagacgcgcctcagactcctcggcctgtggcggagattgtgccatcatttatcaacaaggataccgagacaattaacatgatgtcagaatttgtggccaatctgcctcaggaactgaagctgacccttagtgaaatgcagccagccctgccccagctgcaacagcatgtccctgtgctgaaggattcttccctgctatttgaggaattcaaaaaactgatccgcaatcgtcagtccgaggctgcagactcctccccatcagagctgaaatacctggggctggatacccactcgcggaagaaacgacagttgtatagcgccctcgcgaacaaatgttgtcacgtgggttgtacgaaaaggtctctggcaagattttgt

SEQ ID NO: 18473 - DNA, 555 bp, synthetic construct
  misc_feature 1..555: note = source = /note="Description of Artificial Sequence: Synthetic coding sequence"
  source 1..555: mol_type = other DNA
atgcctcgtcttttcttctttcaccttcttggcgtgtgtcttttgctgaatcaattttcaagagcagtcgcagactcctggatggaagaagtcatcaaactgtgcggtagagagctggtgcgtgcacagatcgctatttgtggaatgtctacctggtcgaaacggtcactgagccaagaagatgcgccccagacccctcggccagtggctgagatcgtgccttcttttatcaacaaggatacggaaactataaacatgatgtccgaattcgtggcaaaccttcctcaggagctcaaactgactctgtcggaaatgcaacccgcgctgccgcaattgcaacagcacgtgcctgtcctgaaagattcatccctcctctttgaagagttcaagaagctcatcagaaaccgccaatcggaggccgcggatagcagcccgtccgaactcaagtacctcggtctggacacccactcgcggaaaaagcgccaactctactccgcactggccaataagtgttgtcacgttggctgcaccaaaagatccctcgcaaggttttgt

SEQ ID NO: 18474 - DNA, 555 bp, synthetic construct
  misc_feature 1..555: note = source = /note="Description of Artificial Sequence: Synthetic coding sequence"
  source 1..555: mol_type = other DNA
atgccaaggttgttcttctttcatttgctaggcgtgtgcctcttactcaatcagttcagcagggccgtcgccgacagctggatggaggaggtcataaagctttgcggaagggagctcgtgcgggcccaaatcgcgatctgcggcatgagcacttggagtaaacgctccctatctcaggaggatgctccgcagactccaaggcccgtcgctgaaattgtgccctcttttatcaacaaggacacagagacaatcaatatgatgagcgagtttgtcgctaacctgccgcaagaattgaagcttacgctgagcgaaatgcaaccagcgctgccacaactgcagcaacacgtgccagtgctaaaggattcctctttactgtttgaagagtttaagaagttgatccgtaatagacagtctgaagcagccgattcctccccctcagaattgaaataccttggcctggacacccacagccgtaagaagcgtcagctctacagcgctctcgctaataagtgctgccacgtgggctgcaccaagcgatcactagcgcgattctgc

SEQ ID NO: 18475 - DNA, 555 bp, synthetic construct
  misc_feature 1..555: note = source = /note="Description of Artificial Sequence: Synthetic coding sequence"
  source 1..555: mol_type = other DNA
atgcccaggttgtttttcttccacttgcttggagtctgcctgctgttgaatcagttctcccgcgctgttgctgatagttggatggaggaagtgataaagttgtgtgggcgcgaactggtcagagcacagattgctatctgcggtatgagcacgtggtcaaagaggtcactctcacaggaagacgcaccccagacccctcgacctgtggccgaaattgtccctagctttatcaacaaggataccgagaccatcaacatgatgtcagagttcgtggctaatcttcctcaagagctgaagcttacgttgagtgagatgcagccggcactcccacagctccaacagcatgtgcccgtcctgaaagatagctctctgcttttcgaagaattcaaaaagctgatccgaaatcggcagtccgaagcggctgacagcagccctagtgaattgaaatatcttgggctcgacacccacagtaggaaaaaaagacagctctattctgccctggccaacaagtgctgtcacgtcggctgtactaagagaagtctcgcgcgattttgt

SEQ ID NO: 18476 - DNA, 555 bp, synthetic construct
  misc_feature 1..555: note = source = /note="Description of Artificial Sequence: Synthetic coding sequence"
  source 1..555: mol_type = other DNA
atgccgagactctttttcttccatcttcttggggtctgcctgttgctgaatcaatttagccgtgccgtggccgatagttggatggaagaggttataaaactgtgtggacgggagctggtccgggcacagattgcgatctgtggaatgtctacctggagtaagcgcagcctctcgcaggaggacgcccctcagactcctaggcccgtggcggaaattgtcccctcttttataaataaagatacagagacaattaacatgatgagcgagttcgtcgctaacctgccccaggaattaaaactgaccttaagcgaaatgcagcctgccctccctcagctccagcagcacgtgccggtcctgaaggattctagtttactgttcgaggaattcaagaagcttatcaggaaccggcagtccgaggctgccgatagctcaccaagtgagttgaaatacctgggccttgacacccacagtcgcaaaaagaggcagctgtatagcgcccttgctaataagtgttgccacgttggctgtacgaaaagaagcctggcaagattctgc

SEQ ID NO: 18477 - DNA, 555 bp, synthetic construct
  misc_feature 1..555: note = source = /note="Description of Artificial Sequence: Synthetic coding sequence"
  source 1..555: mol_type = other DNA
atgccaaggttattcttctttcatctgctgggggtgtgtctcctgttgaatcagttttctcgagcggtcgcagatagctggatggaggaagtgatcaaactttgcggacgagagcttgtacgggcacagatcgctatttgcggcatgtccacctggtcaaagcggtcgttgtcccaggaagatgccccccagactcccagaccagtggctgagatcgttcccagcttcattaacaaggatacagagactattaacatgatgtcagagtttgtggcgaatttgccacaggagctaaagctcactttaagcgagatgcaaccagcactgcctcagctccagcaacacgtcccggtactgaaggattcgtcgctactcttcgaagaatttaaaaaactcatcaggaatcgtcaatcggaagccgcggactccagtcccagtgagctgaaatatcttgggcttgatactcattcccgtaagaaacgccagctgtactcggctctcgctaacaagtgttgtcatgtcggatgcaccaagcgatccttagcacgcttttgc

SEQ ID NO: 18478 - DNA, 555 bp, synthetic construct
  misc_feature 1..555: note = source = /note="Description of Artificial Sequence: Synthetic coding sequence"
  source 1..555: mol_type = other DNA
atgccaaggctgtttttttttcacttacttggggtctgcctcctcctgaatcagttttctcgggccgtggctgatagttggatggaagaagtgatcaagttgtgcgggcgcgaattagttcgcgcccagattgccatctgtggcatgagtacctggtctaaacgctccttgagtcaagaagatgcaccccaaacccctcgacctgtggccgagatcgtcccatccttcataaataaggatacggaaacaatcaatatgatgagcgaattcgttgccaatctgccgcaggagttgaaactgacgttgtctgaaatgcagcctgcgttaccacagctgcaacaacacgttcccgtgctaaaggacagctcactactattcgaggagttcaagaaattgattaggaataggcaatctgaggctgccgacagcagcccatccgaacttaagtatttaggacttgacactcatagcaggaaaaagcgccagctgtactccgccttggctaataaatgttgtcacgtgggctgcacaaaacggagtctggcccgtttttgc

SEQ ID NO: 18479 - DNA, 555 bp, synthetic construct
  misc_feature 1..555: note = source = /note="Description of Artificial Sequence: Synthetic coding sequence"
  source 1..555: mol_type = other DNA
atgccgcggctgttcttcttccacctgctgggagtgtgcctgctcctcaatcagttctcccgggcagtggccgactcatggatggaagaggtcatcaagctgtgtggccgggaactcgtcagagcccagattgccatctgtggcatgtcaacctggtccaaacgctccttgagtcaggaagatgcgcctcagacgccacgtcccgtggcggaaatcgtgccgtcgtttatcaacaaagatactgaaaccatcaatatgatgtcagaattcgtggctaacctgcctcaagagctgaaacttaccctctcagagatgcagcctgccctgccacagcttcagcagcacgtgccggtgttgaaggactcctcgctccttttcgaagagttcaagaagctgatccggaaccgccaatcggaggcggccgacagcagcccttcggagctgaagtacctcgggctggacactcactcacggaaaaagcggcagctttactccgccctggctaataagtgctgtcacgtcggatgcacgaaacggtcgctggcccggttctgc

SEQ ID NO: 18480 - DNA, 555 bp, synthetic construct
  misc_feature 1..555: note = source = /note="Description of Artificial Sequence: Synthetic coding sequence"
  source 1..555: mol_type = other DNA
atgccgcggctcttcttctttcatttgctcggcgtctgcctcctacttaatcagttctctcgagcagtcgcggactcttggatggaggaagtgatcaaattgtgtgggcgcgagcttgtgcgagctcagatcgccatctgtggcatgtctacctggtcgaagcgatctctatcacaggaggatgcccctcaaacgccgaggcctgtcgctgagatcgtcccatcgttcatcaataaagacaccgagacgatcaatatgatgtccgagttcgttgctaatctgccccaggaactcaaactcaccctcagtgaaatgcagcccgcgctccctcaactgcagcagcacgtccctgttctgaaagacagctcgcttttgttcgaggagttcaagaagttaatccgaaaccggcagtctgaagcagctgattcttccccgagcgagctgaaatacttaggtctcgatacacattcacgaaagaagaggcagctgtattcagcgctcgcaaataagtgctgccatgttggatgcacgaagcgatcgcttgcccggttttgc

SEQ ID NO: 18481 - DNA, 555 bp, synthetic construct
  misc_feature 1..555: note = source = /note="Description of Artificial Sequence: Synthetic coding sequence"
  source 1..555: mol_type = other DNA
atgccgcgactgtttttcttccatcttcttggtgtctgtctgctgctgaaccaattctcgcgcgccgtggcggattcctggatggaagaagtgatcaagctgtgtgggcgagaactcgtgcgggcacaaatcgctatttgcgggatgagcacgtggtctaagcggagcctgtcgcaagaggatgccccccaaactcctcgtccggtggcagaaatcgtgccgtcctttatcaacaaggacaccgaaactatcaacatgatgagcgaattcgtcgctaaccttccacaagaactcaagctgacgctttcagagatgcagcccgcactgccacaactgcagcagcatgtccctgtgcttaaggattcctcgttgctgtttgaagaattcaagaagctcattaggaacagacagagcgaagccgcagatagctccccttcagagctcaagtacctgggacttgacacccattcgagaaagaagagacagctctactccgcactggcaaataagtgttgtcacgtgggttgcaccaagaggtccctcgcacgcttttgt

SEQ ID NO: 18482 - DNA, 555 bp, synthetic construct
  misc_feature 1..555: note = source = /note="Description of Artificial Sequence: Synthetic coding sequence"
  source 1..555: mol_type = other DNA
atgcctagactgtttttctttcatctcctgggggtgtgcttgcttctcaaccagttcagccgggccgtcgccgacagctggatggaggaagtgatcaagttatgcgggagggaacttgttcgcgcacagatcgccatctgcggaatgtctacatggtcaaaaagatcactctcccaggaggatgctccccaaacaccccgtccagtggctgaaattgttccttcttttatcaacaaggatacagagaccatcaacatgatgagtgagtttgtagctaatctgcctcaagaattgaaactgactctgtctgagatgcaaccggcattacctcagttacagcagcacgtgcctgtgctcaaggatagcagcctgctttttgaggaatttaagaagttgatacgcaatagacagtccgaagctgctgatagctctccatctgagctcaaatacctcgggctggatacacattccagaaaaaagcggcagttatacagcgcgcttgccaacaagtgttgccatgtaggatgtaccaaacgatccctcgcgagattttgc

SEQ ID NO: 18483 - DNA, 555 bp, synthetic construct
  misc_feature 1..555: note = source = /note="Description of Artificial Sequence: Synthetic coding sequence"
  source 1..555: mol_type = other DNA
atgccaagactgttcttttttcacctgcttggagtttgcttgctactgaaccagttctcccgcgccgtcgccgattcctggatggaagaggttatcaaattgtgcggtcgggagctggtgcgggctcagatagcaatatgtgggatgagtacgtggagtaaacggagtctctcacaggaagacgccccccagacaccccgcccggtggccgaaatcgttcccagcttcatcaacaaagacactgaaactataaacatgatgagcgagtttgtcgcaaacctgccacaggagttgaagctgaccctctccgaaatgcagcctgctctaccccaattacagcagcatgtcccagtgctgaaggactcttctctgttgtttgaggaattcaaaaagttgattcgaaacagacagtccgaggccgcggactcatcgcccagtgagcttaaatacctgggccttgacacgcactcacggaaaaagcggcagctctacagtgccctagctaacaaatgttgtcatgtagggtgcacaaagagaagcctagctcgattttgt

SEQ ID NO: 18484 - DNA, 555 bp, synthetic construct
  misc_feature 1..555: note = source = /note="Description of Artificial Sequence: Synthetic coding sequence"
  source 1..555: mol_type = other DNA
atgccccggttgttcttctttcaccttctaggagtgtgcctgctccttaatcagttcagccgggccgtggcagattcgtggatggaagaggtgatcaaactatgtggccgagagctcgtcagggcccagattgcaatctgtggcatgtctacctggagtaaacgctcgttgtctcaggaggacgccccacagacacctaggcccgtggccgagattgtcccctcttttattaacaaagacactgaaacgattaacatgatgagcgagttcgttgctaacctgcctcaagagcttaagttaaccctcagtgagatgcagcccgcgcttccccaactgcaacagcatgtccctgtccttaaggattctagcctgctgtttgaggaatttaagaagctcatacgcaaccggcagtccgaagcggctgattccagtcctagcgaactgaagtatctgggtcttgacacccatagcagaaagaagcgccagctgtatagcgcgctggcaaacaagtgttgccatgtcgggtgtacaaagaggagcctggcacggttttgc

SEQ ID NO: 18485 - DNA, 555 bp, synthetic construct
  misc_feature 1..555: note = source = /note="Description of Artificial Sequence: Synthetic coding sequence"
  source 1..555: mol_type = other DNA
atgccgcgcctgttctttttccacttgctgggagtgtgtttgctcctgaaccagtttagccgggccgtcgccgactcctggatggaagaggtgatcaagctctgcggaagagaactcgtccgagctcaaatcgccatctgtgggatgagcacctggtccaagaggtcgctgagccaagaagatgcaccccagaccccgcgcccagtggcggaaatcgtgccatcgttcatcaataaggacaccgagactattaacatgatgtcagagttcgttgctaatctcccgcaggaactgaaactgacgctgtccgagatgcagccagccctccctcagttgcagcagcacgtcccggtgctgaaggattcgagtctgctcttcgaggagttcaagaaactcatccgtaaccgccaatctgaagcagcggactcatccccctcggaattgaagtacctcggcctggacactcatagtcgcaagaaacgccaactctactccgccctcgcaaacaaatgctgccatgtgggatgcactaagcgctctctggcacggttttgc

SEQ ID NO: 18486 - DNA, 555 bp, synthetic construct
  misc_feature 1..555: note = source = /note="Description of Artificial Sequence: Synthetic coding sequence"
  source 1..555: mol_type = other DNA
atgccaaggctttttttcttccatttgcttggagtatgcctgctgcttaatcagttcagcagagcagtggcagacagctggatggaggaagtcatcaagctctgtggccgggaactcgttagggcccagatcgcgatctgcggcatgagcacctggtctaagcgctcgctgtcacaagaagatgccccccaaaccccaagacctgtggcagagatcgtgccttccttcattaacaaggataccgagacaatcaatatgatgagcgaatttgtagcaaatcttccccaggaactgaagctgacactctctgagatgcagcccgccctgccacagttgcaacaacacgttcctgtgctaaaagactcctccctgctattcgaagaattcaagaagttgatccggaaccgacagagtgaggccgccgacagttccccttccgaactgaaatacctgggactggacactcacagcagaaagaagagacagctctattccgcccttgcaaataagtgttgccacgttggctgtacaaagagaagcctagcaaggttctgc

SEQ ID NO: 18487 - DNA, 555 bp, synthetic construct
  misc_feature 1..555: note = source = /note="Description of Artificial Sequence: Synthetic coding sequence"
  source 1..555: mol_type = other DNA
atgcctcggctgttcttctttcatctgcttggggtctgccttctccttaaccaattcagcagagcagtcgcggattcatggatggaggaagtgataaagttgtgtgggcgcgagctggtgagagcacaaattgccatttgcggcatgagcacttggtcgaagagatcgttgtcgcaagaggacgcaccacagacccccaggcctgtggcagaaattgtcccatcgttcattaacaaggacaccgaaactattaacatgatgtccgaatttgtggcaaaccttcctcaggaactgaagctgactctctccgagatgcaacctgccctcccgcagctccaacagcatgtccctgtccttaaagactcgtcgcttctctttgaagagttcaaaaaacttattagaaaccgacaatcagaagccgcagattcgtcgccaagcgaacttaagtacctgggactggacactcattcccgtaagaaaaggcaactttactcggcactggccaataagtgttgccatgttggatgtacgaaacgctccctggctcgcttctgc

SEQ ID NO: 18488 - DNA, 555 bp, synthetic construct
  misc_feature 1..555: note = source = /note="Description of Artificial Sequence: Synthetic coding sequence"
  source 1..555: mol_type = other DNA
atgccccgtttgtttttctttcacctgctcggagtgtgtctcttgcttaatcagttcagtcgtgctgtcgcagattcatggatggaagaggtaatcaaactctgcgggcgtgaactcgtccgggcccaaatcgccatttgcggcatgtccacctggagcaagaggtccttgtctcaggaggatgcaccacagacaccgcgccctgtcgccgaaattgttccttctttcatcaacaaagatacagagacgattaacatgatgagcgaatttgtagccaatctacctcaggaactgaagctgacactatcggaaatgcagcctgcattgcctcagctgcaacaacatgtgccagtgctaaaggactcctccctgctattcgaagagtttaagaaactgatcaggaatcggcagagtgaggccgccgatagctctccgagcgaacttaagtatctgggactggatacccattcacgaaaaaaacgccagctctactctgctctggctaataaatgctgccacgtgggatgcacaaaaaggagcctggcgcgtttctgt

SEQ ID NO: 18489 - DNA, 555 bp, synthetic construct
  misc_feature 1..555: note = source = /note="Description of Artificial Sequence: Synthetic coding sequence"
  source 1..555: mol_type = other DNA
atgccaaggctattcttcttccacctgctgggagtgtgtctgctgctgaaccagttctcgcgtgcagtcgcagattcctggatggaagaagtcatcaaattgtgcggtcgggagttggtccgcgcacaaatcgcaatttgtggtatgagcacatggagtaagcggtcactcagccaagaggatgcgccacagacaccccgtcctgttgcagagatcgttccatccttcataaataaagacaccgagacaattaacatgatgtccgaattcgtagctaacctgccacaggagctgaaactgaccctgagtgagatgcaaccagccctccctcagctacagcagcatgtgcccgtgttgaaggacagctctctgctgtttgaggagtttaagaagcttattagaaatcggcagagcgaagccgccgattctagtccaagtgaactgaagtacctgggtctcgatacccatagccgaaagaagcgccagctgtattccgccctggccaacaagtgctgtcatgttggttgcaccaagaggtctctggcgcggttctgc

SEQ ID NO: 18490 - DNA, 555 bp, synthetic construct
  misc_feature 1..555: note = source = /note="Description of Artificial Sequence: Synthetic coding sequence"
  source 1..555: mol_type = other DNA
atgccccgtctgtttttctttcatctccttggtgtctgtctgctgctcaaccagttttcccgggcagtcgcagatagctggatggaagaagtgattaagttgtgcgggcgggagcttgttcgcgcccaaatcgccatttgtggaatgtccacctggtccaagaggtcactctcgcaagaagatgctccacagacccctcgacctgtggctgagattgtgcccagcttcataaacaaggacacggaaaccattaacatgatgtcagaattcgtggccaacctgccgcaggaactgaagctcaccttgtccgaaatgcagccagctctcccacagctgcaacaacacgtgccagtgcttaaggattcctcactgctttttgaagagtttaagaagctgatcaggaacagacaatcggaagcagcagactcctcgccatccgagctgaagtatctgggattggatactcattcgaggaaaaagcgacagctttacagcgcattggcaaacaaatgctgtcatgtcggatgtactaaaagatccctggcacgcttttgt

SEQ ID NO: 18491 - DNA, 555 bp, synthetic construct
  misc_feature 1..555: note = source = /note="Description of Artificial Sequence: Synthetic coding sequence"
  source 1..555: mol_type = other DNA
atgccccgactgttcttttttcacctcctgggagtgtgcctccttttgaatcaattcagcagagctgtcgcagacagttggatggaggaagtgattaagctgtgcggacgggagctcgtgagagcgcaaattgcgatatgtgggatgtcgacttggtcaaagcgttcactctcgcaggaagatgcacctcaaactcctagacctgtggcagaaatcgtcccgtcttttatcaacaaggataccgaaactattaacatgatgtcagagtttgtcgcaaatctgccccaggaacttaaacttaccctttccgagatgcaaccagcactgccgcagttgcaacaacatgttccagtactgaaagattcctcccttctgtttgaagaattcaaaaagttgattcggaacagacagagcgaagccgcagactccagccctagtgagctgaagtacctgggcttggatacgcacagccgaaagaaacgacagctttactcggccctcgctaacaagtgttgccatgtaggttgtaccaagcgctcactggcccgcttttgt

SEQ ID NO: 18492 - DNA, 555 bp, synthetic construct
  misc_feature 1..555: note = source = /note="Description of Artificial Sequence: Synthetic coding sequence"
  source 1..555: mol_type = other DNA
atgccccgtcttttcttcttccacctgctgggtgtgtgtctgctccttaatcaattcagccgggccgtcgcggattcatggatggaggaagtgattaagttgtgcggaagggaactggtgcgggcacagatcgccatctgcggcatgtctacgtggtcaaagcggtcgctgtcgcaggaggatgcgccacagacgccaagaccggtggcagaaatcgtaccatcgtttatcaacaaggacaccgaaactatcaacatgatgtcggagtttgtcgcgaatttgccgcaagaactcaagctgactctgagcgaaatgcagcctgcactccctcaactgcagcagcatgtgcccgttctcaaagacagcagtctgctgttcgaagaattcaaaaaactcatccgcaatagacagtcggaggcagcggattcctcaccgtctgagcttaaatacctgggtctggacacccacagcagaaaaaagcgtcaactctacagcgctctggctaacaagtgttgccatgtgggatgcaccaagcgatccctcgcccgcttttgc

SEQ ID NO: 18493 - DNA, 555 bp, synthetic construct
  misc_feature 1..555: note = source = /note="Description of Artificial Sequence: Synthetic coding sequence"
  source 1..555: mol_type = other DNA
atgccacgccttttctttttccatctcctgggagtgtgccttctgctgaaccagttcagcagagctgtggcagattcctggatggaagaagtgattaaactttgtggaagagaactggtccgcgcacagatcgcaatatgtggcatgtcgacttggtccaagcggtcgctctctcaggaggatgcgcctcagactccaagaccagtcgcagagattgtgccatccttcattaacaaggacaccgagacgatcaacatgatgtcggaatttgtggccaatctgccccaggagttgaagctgacgctttcggagatgcaacctgccctcccccaattgcaacagcacgtccccgttctcaaagattccagccttttgtttgaggagttcaaaaaacttattcgcaaccgacagagcgaagccgcagattcatcccctagcgaactcaaatacctgggtctggatacccactctaggaagaaacgacaactctactcggcgttggccaataagtgttgccacgtggggtgtactaaacgtagcttggccagattctgc

SEQ ID NO: 18494 - DNA, 555 bp, synthetic construct
  misc_feature 1..555: note = source = /note="Description of Artificial Sequence: Synthetic coding sequence"
  source 1..555: mol_type = other DNA
atgccaagactgttctttttccaccttcttggagtgtgtctgctccttaaccaattttcgcgcgctgtggctgactcttggatggaagaagtcattaagttgtgcggccgggagctggtgcgcgcccagattgctatatgtgggatgtcgacatggagcaaacgctccctcagccaggaggacgccccccagactcctaggcccgtagccgagattgttccaagttttatcaataaggatacggaaaccatcaacatgatgtcagaatttgttgccaatcttccacaggagttgaagttgaccctttccgagatgcaacctgcgctcccacagttgcagcagcatgtccctgttctgaaggacagtagcctgctcttcgaggagttcaagaaattaatccgaaaccggcagagcgaagcagcagactcaagcccctcagaacttaaatatttaggtctcgacactcattcaaggaaaaagagacaactttactcagctctcgccaataaatgttgccatgttggttgcactaaacggagtcttgcgaggttctgt

SEQ ID NO: 18495 - DNA, 555 bp, synthetic construct
  misc_feature 1..555: note = source = /note="Description of Artificial Sequence: Synthetic coding sequence"
  source 1..555: mol_type = other DNA
atgccccgcttgttcttttttcatcttttaggcgtgtgcctccttttaaaccaattcagtcgggctgtggcggattcctggatggaagaagttataaagctctgcggtcgtgaactggtacgggcgcagatcgccatctgcggcatgtccacctggtcaaaaaggtcattatcccaggaggatgcaccgcaaactcctagacctgtagctgaaatcgtgccttctttcatcaataaagacacagaaacgattaacatgatgtcagagttcgtggccaaccttcctcaggagctgaaactgacactgagtgagatgcaaccagccttgccacagctgcaacagcacgtgccagtgctgaaggattcctcactcctgttcgaggaattcaaaaagctgattcgcaatagacagtctgaggccgccgactcatcgccgagcgagctaaagtacctcgggctggacacacattctcgcaaaaaacggcagttatatagtgctctcgccaataagtgttgtcacgtcggctgcaccaaaagaagcctggctcggttttgc

SEQ ID NO: 18496 - DNA, 555 bp, synthetic construct
  misc_feature 1..555: note = source = /note="Description of Artificial Sequence: Synthetic coding sequence"
  source 1..555: mol_type = other DNA
atgccacgattgttctttttccatcttctgggagtctgtcttttgctcaaccagttttccagagcagtcgcagattcgtggatggaggaagtgataaagctctgtgggcgtgaacttgtgcgggctcagattgcgatttgtgggatgtccacgtggtccaaacggtccctgtcacaggaagatgcaccacaaactccaaggccggtggcagaaatcgtgccatcgtttatcaataaagacactgaaactatcaacatgatgtccgaatttgtggcaaaccttccacaagaacttaaactgacgctctcggaaatgcagcccgccctcccacagcttcaacagcatgtgcctgtcctcaaggatagctcgctcttgttcgaagaattcaaaaagctgatcagaaacagacaatccgaggccgcagattcgtcgccgtccgagctcaagtacctgggcctggacacccattcccggaagaagagacaactgtactcagccctggcaaacaaatgctgccacgtggggtgtaccaagaggtcactggcacgattctgc

SEQ ID NO: 18497 - DNA, 555 bp, synthetic construct
  misc_feature 1..555: note = source = /note="Description of Artificial Sequence: Synthetic coding sequence"
  source 1..555: mol_type = other DNA
atgccacgcctgttctttttccacttgcttggagtgtgcttgctgcttaaccagttctcgcgtgctgtggctgactcctggatggaggaagtcattaaactttgtggacgggaactggtgcgagcgcaaatcgcgatttgcggaatgtccacctggagtaagcgctcgctatcccaggaggatgcaccgcaaacaccacgcccagtggctgagatcgtgccatcgttcattaacaaggataccgaaacgataaacatgatgagcgagtttgtggcaaacctgccccaagagcttaagctgacgctgagcgaaatgcagcccgcccttccccagctgcagcagcacgtgcccgtcctgaaggatagttcgttgctgttcgaagagttcaaaaagctgatccgcaatcgccagtccgaagcggccgattcttctccaagcgagctaaagtacctcggcctggatacacactcccgcaagaaacgccaactgtactcggcattggcgaacaaatgttgtcacgttggatgtacaaagcgttcgttggcgagattttgt

SEQ ID NO: 18498 - DNA, 555 bp, synthetic construct
  misc_feature 1..555: note = source = /note="Description of Artificial Sequence: Synthetic coding sequence"
  source 1..555: mol_type = other DNA
atgcctagactctttttcttccatctccttggagtttgccttcttcttaaccagttttcacgggccgtggccgattcctggatggaagaggtcattaaactctgtggtagagagctcgtgcgagcgcagattgcaatttgtggaatgtccacttggtccaagagatcattgtcgcaggaagatgctcctcagacccctaggccggtcgccgaaatcgtgcccagcttcatcaacaaggataccgaaaccataaacatgatgtcagaattcgtcgcaaatctgccacaagaattgaaacttaccctgtccgagatgcaacccgcattgccacagctgcagcagcatgtgcctgtgctcaaggacagttcgctcctgtttgaggagtttaagaaacttattcgtaacagacaatccgaagcagcagatagctcgccatcagaattgaaatacttgggactggacacccatagccgcaagaagagacagctctactccgctctcgcaaacaagtgttgtcatgttggctgcaccaaaagaagcctcgcccgcttttgt

SEQ ID NO: 18499 - DNA, 555 bp, synthetic construct
  misc_feature 1..555: note = source = /note="Description of Artificial Sequence: Synthetic coding sequence"
  source 1..555: mol_type = other DNA
atgcctaggctgttcttttttcacctgcttggtgtgtgcctgcttctgaaccagttcagccgcgccgttgcggatagctggatggaagaagtcatcaagctctgtgggcgggaacttgtgagagctcagattgcaatatgtggaatgtcaacctggtccaaaaggtcgctctcccaagaggatgcaccccagacgcctcgtccagtcgcggaaattgtgccgtcgttcattaacaaagataccgagacgatcaatatgatgagcgaattcgtcgctaacttgccacaagagctgaagctgactttgtcagaaatgcaacctgccctcccacaacttcaacaacatgtgccggtcttgaaagactcatcgcttctttttgaagaattcaagaagctcatccgcaatcgtcaatcagaagccgctgatagctccccttccgaattgaagtaccttggtcttgatactcacagcagaaagaagcgtcaactgtactccgcactcgccaataagtgttgtcacgtgggctgcaccaagagatcactggcaagattctgc

SEQ ID NO: 18500 - DNA, 555 bp, synthetic construct
  misc_feature 1..555: note = source = /note="Description of Artificial Sequence: Synthetic coding sequence"
  source 1..555: mol_type = other DNA
atgccaagactgtttttttttcacctcttgggagtgtgtctgctcctaaaccagtttagccgcgccgttgccgattcctggatggaggaggttattaagctttgcggtcgtgaactggtgagagctcagattgctatatgtgggatgagtacctggtctaagagatctctttcgcaggaagacgcaccccagacgcctagacctgttgctgagatcgtgccctcttttatcaataaagatacggaaacgataaatatgatgtcagaatttgtggcaaacctgcctcaggagcttaagttgactttgtcagaaatgcagccagcactgcctcaactacagcagcatgtgccggtgttgaaggattccagcctcctctttgaggaatttaaaaagctgatcaggaaccgacagtccgaggccgccgacagttccccttccgagctgaagtacctcggcttggacacccattccagaaagaaaaggcagctgtactctgccctggctaacaaatgctgccacgtgggatgcaccaaacgcagtctggccaggttctgc

SEQ ID NO: 18501 - DNA, 555 bp, synthetic construct
  misc_feature 1..555: note = source = /note="Description of Artificial Sequence: Synthetic coding sequence"
  source 1..555: mol_type = other DNA
atgcctagactctttttctttcacctcctgggagtttgcctgctccttaaccagttctctcgcgcggtcgcggactcctggatggaggaggtgatcaagctctgtggccgagaacttgtcagggcccaaattgccatctgcggaatgtctacctggtcaaagcgaagcctctcccaggaggacgccccgcaaacccctcgcccggtcgccgaaattgtgccttcctttatcaacaaggatacggaaactatcaacatgatgagcgagttcgtcgcgaatctgccgcaggagctgaaactgaccctgtcagaaatgcaaccggcactgccacagttgcaacagcacgtcccagtgctgaaggattccagcttgctgttcgaagaattcaaaaagctgatccgcaaccggcagtccgaagcagcagatagcagccctagcgaacttaagtacctgggactggatacccacagcaggaaaaagagacagctgtacagcgccctcgccaacaaatgctgtcatgtgggatgtactaaaagatcactcgctcggttctgc

SEQ ID NO: 18502 - DNA, 555 bp, synthetic construct
  misc_feature 1..555: note = source = /note="Description of Artificial Sequence: Synthetic coding sequence"
  source 1..555: mol_type = other DNA
atgccaagactgttctttttccatttgctcggagtgtgccttcttttgaatcagtttagcagagcagtggccgattcatggatggaagaggtcattaagctgtgtggaagagagctggtgagggcacaaattgcgatctgcggcatgagcacttggtctaagaggagcctgtcccaggaggacgctcctcagacgcccaggccggtggccgagatagtgccgagctttatcaacaaagacaccgagactataaacatgatgagtgaatttgtcgcaaacctcccccaagaactcaagctcaccctctccgaaatgcaacctgccctgccccaattgcagcagcatgtgccagttcttaaagattcctccctgctgttcgaagaattcaagaaacttattcgcaatagacaatcggaagcagcagatagtagcccctccgaacttaagtacctcggtctggatacccactcacgcaagaagaggcaactctacagcgcccttgcaaacaaatgctgtcatgtaggttgtactaagcgctcgctggctagattttgc

SEQ ID NO: 18503 - DNA, 555 bp, synthetic construct
  misc_feature 1..555: note = source = /note="Description of Artificial Sequence: Synthetic coding sequence"
  source 1..555: mol_type = other DNA
atgccccgtttattttttttccatcttttgggcgtttgcttactgctcaatcagttctcgagggccgttgccgattcatggatggaggaagtcataaaattatgcggcagagaattggtgcgagcacagatcgcgatatgcggaatgtcgacctggtcaaagaggtcgcttagccaggaggacgcgccacagacaccacgaccagtggcggaaattgttccttcctttataaacaaggataccgaaacaatcaacatgatgtccgaatttgtggcgaacctaccacaggaactgaaactcactctatcggaaatgcagcctgcactgccccagctgcaacaacatgtccctgtcctcaaggacagtagtttgctgttcgaggagttcaaaaagcttataagaaacaggcagtccgaagccgcggactcttctccttccgaattgaagtacttggggctggatacacactctaggaagaagcgtcagctttacagtgcattggctaacaagtgttgccacgtgggatgtactaaacggtcgctggctaggttctgt

SEQ ID NO: 18504 - DNA, 555 bp, synthetic construct
  misc_feature 1..555: note = source = /note="Description of Artificial Sequence: Synthetic coding sequence"
  source 1..555: mol_type = other DNA
atgccgcggctgttcttcttccaccttctcggcgtgtgtctcctccttaaccaatttagcagggccgtggcggacagctggatggaggaggtcatcaaactgtgcggtcgcgagctggtgcgggcccagattgcgatctgcggaatgtcgacctggtccaaacgctccctgagccaggaggacgccccacagacccctaggccagtcgctgaaattgtcccttcattcatcaataaggacaccgaaactatcaatatgatgtctgagtttgttgctaacctgccgcaggaactgaaactgactctgtcagaaatgcaaccggcactcccccagctgcagcaacacgtgccagtgctgaaggattcctccctcctgttcgaagaattcaagaagctgatcagaaacagacaatcggaagcagcggattcgtcgccgtccgagttgaagtacttgggacttgacacgcattcgcgaaaaaagcggcagctctactcagccctcgccaacaagtgctgccatgtggggtgtactaagcgcagcttggcacgcttttgc

SEQ ID NO: 18505 - DNA, 555 bp, synthetic construct
  misc_feature 1..555: note = source = /note="Description of Artificial Sequence: Synthetic coding sequence"
  source 1..555: mol_type = other DNA
atgccgcggctcttcttcttccacctcctcggggtctgcctgttgctgaatcagttctcgagagccgtcgccgattcctggatggaggaggtgatcaaactgtgcggacgcgaactggtgcgtgcacagatcgcaatttgcgggatgtccacctggtccaagagaagcctgtcgcaagaagatgcacctcagaccccgcgcccggtggccgaaatcgtcccatccttcatcaataaggacactgaaactatcaacatgatgtcggagttcgtcgccaaccttccacaagaactgaagctgaccctgtcggagatgcagccagccctgccgcagcttcagcaacacgtgccagtgctcaaggactcgagcctgctctttgaagaattcaagaagctgatccgcaaccgccagtccgaggccgctgactcctccccttcagaattgaaatacttgggactggacacccattcgagaaaaaagaggcaactctactcggcgctcgcgaacaagtgttgtcacgtgggatgtaccaagcgctcgctggcgcgtttttgc

SEQ ID NO: 18506 - DNA, 555 bp, synthetic construct
  misc_feature 1..555: note = source = /note="Description of Artificial Sequence: Synthetic coding sequence"
  source 1..555: mol_type = other DNA
atgccccggctcttcttcttccatctccttggggtttgcctcctgctgaatcaattctctagggcagtcgccgactcctggatggaggaagtgatcaagctgtgcggacgagagctcgtgcgcgcacaaatcgccatttgcggcatgagcacttggagcaaaagatcattgtcccaggaggacgcgccgcagacgccgcggccggtggcggagatcgtgccttcttttatcaacaaggacactgaaaccatcaatatgatgtcggaattcgtggccaacctgccacaggaactcaagctgactctgtccgaaatgcagccagccctgccgcaactgcaacaacacgtgcctgtccttaaggattcatctctcctgtttgaggaattcaaaaagctcattaggaacaggcagtccgaagccgcagattcatcaccatcggagctcaagtacctcggactggacacccactcccgcaaaaagcggcagctctactcggcccttgctaacaagtgctgccacgtcggatgtaccaaacgctcacttgctcggttctgt

SEQ ID NO: 18507 - DNA, 555 bp, synthetic construct
  misc_feature 1..555: note = source = /note="Description of Artificial Sequence: Synthetic coding sequence"
  source 1..555: mol_type = other DNA
atgcctagactgttcttttttcatctgctcggggtttgtctactgctgaaccagttcagccgagccgtagcggattcttggatggaagaggtgatcaagttgtgtggccgcgaactggtacgcgcccagattgctatctgtgggatgtctacctggagcaaacgtagcctcagccaggaagacgccccccagacgccccggccagtggcggagatcgtgcccagttttattaacaaagacactgaaactataaacatgatgagtgagttcgtggccaaccttccacaggaacttaaacttaccttaagcgagatgcaaccggcattaccccagctccagcaacatgtgcccgtgcttaaagattcttccctcctgttcgaggagtttaaaaaacttattcggaacagacagagtgaggcagcagacagctcaccatcagagctcaaataccttggcctcgacactcatagccgaaaaaagcggcaattgtattctgccctggcaaacaagtgttgtcacgtagggtgtactaaacggtcccttgcaagattctgc

SEQ ID NO: 18508 - DNA, 555 bp, synthetic construct
  misc_feature 1..555: note = source = /note="Description of Artificial Sequence: Synthetic coding sequence"
  source 1..555: mol_type = other DNA
atgccaaggctattcttctttcaccttcttggagtatgtctgcttctgaaccagttttcacgggccgtcgctgatagttggatggaagaagtcataaaattatgcggacgggaactcgtgagggcacagattgcaatctgcggaatgagtacatggagtaaacgaagtctttcacaggaggacgcacctcagacacccagacccgtagcagaaatagtcccttctttcattaacaaagacacagaaacaattaatatgatgtcggaattcgtagctaatctccctcaggaactgaaattaactttatctgagatgcagccagccctcccccagctccagcagcatgttcccgtactcaaagatagttcccttcttttcgaagaatttaagaaactcatacgcaatcgccagtccgaagcggctgattcgtctccttcagagctcaaatatctcggacttgatactcattctagaaaaaaaagacagctatatagtgccctcgcgaacaaatgttgtcatgtagggtgcactaagcggtccctcgctagattctgt

SEQ ID NO: 18509 - DNA, 555 bp, synthetic construct
  misc_feature 1..555: note = source = /note="Description of Artificial Sequence: Synthetic coding sequence"
  source 1..555: mol_type = other DNA
atgccgaggctgtttttctttcacttgctgggagtgtgcctgctgctgaaccagtttagccgcgctgtcgcggactcctggatggaggaggttatcaagctctgtggacgcgagttggtccgggcgcagatcgctatctgtggaatgtcgacgtggtcaaaacggtcgctgtcccaggaagatgccccccagactcctcggccagtggctgagattgtgccatcgtttatcaacaaggacaccgagactatcaatatgatgtcagaattcgtcgcgaatctgccacaggaactgaagctgaccctgtcggaaatgcagcccgcattgcctcaactccaacagcacgtgcctgtcctcaaggacagctcgctgctgttcgaagagttcaaaaaactcatccgcaataggcagtcggaggcagcagattcttcgccgtcagagcttaagtacttgggcctcgacacccatagcagaaagaaacggcagctgtactccgctctggcgaacaaatgctgccatgtgggatgcactaagagatccctggcccggttctgt

SEQ ID NO: 18510 - DNA, 555 bp, synthetic construct
  misc_feature 1..555: note = source = /note="Description of Artificial Sequence: Synthetic coding sequence"
  source 1..555: mol_type = other DNA
atgccaaggctcttttttttccatctgcttggagtgtgtctcttgcttaatcagttttcacgcgcagtagccgattcatggatggaggaggtgatcaagttgtgtggacgcgagctggtgcgtgcccagattgctatctgtggtatgtcaacttggtccaaaaggtcactgagtcaggaagatgcccctcagactccaaggcctgtcgctgagattgtacccagctttattaacaaggacactgagacaatcaatatgatgtccgaattcgtggcaaatctcccccaggagcttaaattgactctgtctgagatgcagccagcattgcctcaactgcaacagcacgtacccgtcctgaaagactctagccttctttttgaggagttcaagaagctgatccgtaatcgtcagtctgaagctgcagacagctctccctccgagttgaaatacctgggattggatacacactcccgtaagaaacgtcagctgtacagcgctttggcaaacaagtgctgccacgtgggatgtaccaagaggagtttggcccgcttctgt

SEQ ID NO: 18511 - DNA, 555 bp, synthetic construct
  misc_feature 1..555: note = source = /note="Description of Artificial Sequence: Synthetic coding sequence"
  source 1..555: mol_type = other DNA
atgccgcgactatttttttttcatttattaggtgtatgtttattactaaatcaattttcgcgtgcggttgcggattcgtggatggaagaagtaataaaactatgtggtcgagaattagtacgtgcgcaaatagcgatatgtggtatgtcgacgtggtcgaaacgttcgttatcgcaagaagatgcgccgcaaacgccgcgtccggttgcggaaatagtaccgtcgtttataaataaagatacggaaacgataaatatgatgtcggaatttgttgcgaatttaccgcaagaactaaaattaacgctatcggaaatgcaaccggcgctaccgcaattacaacaacatgttccggttctaaaagattcgtcgctattatttgaagaatttaaaaaattaatacgtaatcgacaatcggaagcggcggattcgtcgccgtcggaattaaaatatctaggtctagatacgcattcgcgtaaaaaacgtcaattatattcggcgttagcgaataaatgttgtcatgttggttgtacgaaacgttcgctagcgcgattttgt

SEQ ID NO: 18512 - DNA, 555 bp, synthetic construct
  misc_feature 1..555: note = source = /note="Description of Artificial Sequence: Synthetic coding sequence"
  source 1..555: mol_type = other DNA
atgccccggctttttttttttcacttgttgggtgtctgccttctcttgaaccaattttcaagggcagttgctgacagctggatggaagaagtgatcaaactctgcggtagggaattggtgagagctcagatagcgatctgtggaatgagtacatggagtaaaaggtctctctcccaagaggacgcacctcagacccctcggcctgtggccgagatcgtgccaagcttcattaacaaggacaccgagacaatcaatatgatgagtgagttcgttgcaaatttaccacaggagttgaaacttacactgagcgaaatgcagcctgctctgccccaacttcagcaacacgtccccgtgctgaaagattcatctttgctgttcgaagaatttaaaaagttgattagaaaccgacaaagtgaagctgcggacagcagcccatctgaactgaaatatctgggtctggatacgcactctagaaagaaaaggcaactgtacagtgctctggcaaacaagtgttgtcacgtggggtgcaccaagaggagtctggccaggttttgc

SEQ ID NO: 18513 - DNA, 555 bp, synthetic construct
  misc_feature 1..555: note = source = /note="Description of Artificial Sequence: Synthetic coding sequence"
  source 1..555: mol_type = other DNA
atgccacgactgtttttcttccacctgctcggggtgtgtctgctgctcaaccaattctcacgtgctgtggcggacagttggatggaagaagtaatcaagctgtgtggcagagaattagtgcgcgcacagatagctatctgtggcatgtcaacctggtccaaacggtccctgtctcaggaagacgctccccagacgccaagacctgtcgccgaaatagtgcctagcttcatcaataaagacaccgagaccattaatatgatgtctgagttcgtcgccaatctgccccaggagctgaagctcacactgagtgaaatgcaaccagctttaccacaactccagcagcacgtgccagtgctcaaagattcctccctcctttttgaagagtttaagaagctgatcaggaatcgccagtccgaagccgccgattccagcccgtcggagcttaaatatctggggctggatactcatagtcggaaaaagagacaactatattcagcccttgcaaataaatgctgccacgttggctgcaccaaacgctctcttgcccggttctgt

SEQ ID NO: 18514 - DNA, 555 bp, synthetic construct
  misc_feature 1..555: note = source = /note="Description of Artificial Sequence: Synthetic coding sequence"
  source 1..555: mol_type = other DNA
atgcctagactgttttttttccatctactcggggtatgtctcctcctcaatcagttcagcagggccgtggcagacagttggatggaggaggtaatcaaactgtgtggccgcgagctcgtgagggcccaaattgccatatgtgggatgtcaacttggtcaaagcgtagtctgagccaggaggatgctcctcagaccccaaggccagtggccgaaattgttccctctttcataaataaggatactgagaccataaacatgatgagcgagttcgtggctaaccttcctcaggaactgaagctgacactaagtgaaatgcagcctgcactgccacagttacagcagcatgtgcccgtccttaaggactccagtttactgttcgaggagttcaaaaagctgatccggaataggcaatcagaagccgccgatagcagcccaagcgagctcaaatatttgggcttggatacccattccaggaaaaaacgccaactctattccgccctcgcaaataaatgttgccacgtggggtgtactaaaaggagcctggcaaggttctgc

SEQ ID NO: 18515 - DNA, 555 bp, synthetic construct
  misc_feature 1..555: note = source = /note="Description of Artificial Sequence: Synthetic coding sequence"
  source 1..555: mol_type = other DNA
atgccaaggctgttttttttccacctgctgggcgtttgtctcttgcttaaccaattctctagagccgtcgccgacagttggatggaggaggttatcaaactgtgtgggcgagaactggtcagagcccagatagcgatttgcgggatgagcacctggtctaaacggagcctgtcccaggaagacgccccccagacccctcggcccgtcgccgagatcgtaccttcctttataaataaggacaccgagactattaatatgatgtctgagtttgtggcaaatcttccgcaggaactgaagctgactctctccgaaatgcagcctgccttgccgcaactgcagcaacacgtgcctgtgctgaaggactcctcactgttgttcgaggaattcaaaaagctgatccgcaacaggcagagcgaggccgccgactctagtccgtctgagcttaaatatctgggcctggacacacactcacgaaaaaagagacaactgtacagtgccttggctaataagtgctgccacgtggggtgcacaaaaagatccttggctcgcttctgc

SEQ ID NO: 18516 - DNA, 555 bp, synthetic construct
  misc_feature 1..555: note = source = /note="Description of Artificial Sequence: Synthetic coding sequence"
  source 1..555: mol_type = other DNA
atgcctcgcctatttttctttcaccttctcggcgtgtgtctgctgctcaaccagtttagccgagctgttgctgattcctggatggaggaggtgatcaagttatgcgggcgggaacttgtacgggcgcaaattgcgatctgcggaatgtctacctggtcaaagaggagcctaagccaggaggacgcaccacaaacaccacgccctgtcgccgaaattgtcccctccttcattaataaagataccgaaactattaacatgatgagcgaatttgtagctaatttgccacaggagctgaaactgaccctaagcgagatgcagcctgcccttccgcagcttcagcagcacgtgcctgtgcttaaggactcctccctgttgttcgaggagttcaagaaactgatccggaataggcaaagtgaagccgccgattcttcaccaagcgagcttaagtatctgggacttgacacccactccagaaagaagcgccagctgtactccgctctcgctaacaaatgttgccatgttggctgcacaaaaaggagtcttgcgagattctgt

SEQ ID NO: 18517 - DNA, 555 bp, synthetic construct
  misc_feature 1..555: note = source = /note="Description of Artificial Sequence: Synthetic coding sequence"
  source 1..555: mol_type = other DNA
atgccaagactgttctttttccacctcctgggagtgtgtctgctcctgaaccagttcagtcgggcggtcgcagactcgtggatggaggaggtgatcaagttgtgcggccgtgaactcgtccgcgcacaaatcgctatctgtggtatgagcacttggtcaaagcggtcgctctcacaagaggacgcgccgcagactccgcgccctgtcgccgaaatcgtgccatccttcatcaacaaggataccgaaaccatcaacatgatgtccgaattcgtggcgaatctcccgcaagaactcaagctcactttgagcgaaatgcagcctgcactgccccagctgcagcagcatgtcccggtgctgaaggacagctcgctcctgtttgaggaattcaaaaagctgatccgcaatcggcagtcggaagccgctgactcgagcccgtcagagctgaagtacctgggactggacacccacagccggaagaagcgccaactctatagcgcgctggcgaacaaatgctgccacgtgggatgcactaagcggtccctggcgcggttctgt

SEQ ID NO: 18518 - DNA, 555 bp, synthetic construct
  misc_feature 1..555: note = source = /note="Description of Artificial Sequence: Synthetic coding sequence"
  source 1..555: mol_type = other DNA
atgccgaggctattcttcttccatctgctgggagtctgcttgcttctcaatcagttcagccgggctgtcgccgatagctggatggaggaagtgattaaactgtgtggacgtgagcttgttcgggcccagatcgcaatctgcggaatgagtacatggagtaagagatcactatcccaggaggacgccccccagacccccaggcctgtggccgagattgtgccgtccttcattaacaaggacacagagacaatcaacatgatgagcgagttcgtagcaaacctgccacaagaacttaagctgacactgtccgaaatgcagccagcactccctcaacttcaacagcatgtacccgttctgaaggatagcagccttctatttgaggagtttaagaagctcatccgtaatcggcagtccgaggcagctgactcaagccctagcgaattaaagtacctgggtctagatactcattctaggaagaaaagacagctctatagtgctttggctaacaaatgttgtcatgtcggatgcactaagagaagcttagcccgcttttgt

SEQ ID NO: 18519 - DNA, 555 bp, synthetic construct
  misc_feature 1..555: note = source = /note="Description of Artificial Sequence: Synthetic coding sequence"
  source 1..555: mol_type = other DNA
atgccgcggctgttcttcttccacctgctgggggtgtgcctgctgctgaaccagttttcgagagccgtcgccgactcgtggatggaagaggtgatcaagctgtgcggtcgagaacttgtcagggcccagatcgcaatatgtggaatgtccacttggtccaagaggtccctctcacaggaggatgctcctcaaacgcctagaccggttgcggaaatcgtgccgagctttatcaataaagacaccgagactatcaacatgatgtcagaattcgtggcaaatctcccgcaggaactgaagctcactctcagcgagatgcaacccgccctgccacagttgcagcagcacgtgcccgtccttaaggattcatccctgttgttcgaggaattcaagaaattgattcgcaacagacaatccgaagcagccgactcgtcaccgtctgaactgaaatatctgggcctcgacacccacagccggaagaagaggcagttgtactcggcactggcaaacaagtgttgccatgtaggatgcaccaaacgtagccttgcgcgcttttgc

SEQ ID NO: 18520 - DNA, 555 bp, synthetic construct
  misc_feature 1..555: note = source = /note="Description of Artificial Sequence: Synthetic coding sequence"
  source 1..555: mol_type = other DNA
atgcctcgactgtttttttttcacttactcggtgtgtgccttttactgaaccagttctcccgcgccgtagccgacagctggatggaagaggtgatcaagctctgtggtcgagagctggtgcgcgcgcagatcgcgatttgcggtatgtccacctggtctaaacgctcactgtcacaggaggacgccccgcagacaccgaggccagttgccgagatcgtgccttccttcattaacaaagacactgagacaattaatatgatgagcgagttcgtggcaaatctgcctcaggagctgaagttgaccctgagcgagatgcaaccagctctgccacaactgcagcagcacgtgccagttctgaaggatagctctcttcttttcgaggaatttaagaagctgatccgtaacaggcaaagcgaggcagccgattctagccccagcgagctgaaatacctgggcctggacacccacagtcggaagaagcgacagctgtacagcgcactggctaataagtgctgtcacgttggctgtactaaacgcagcttggcacgcttttgc

SEQ ID NO: 18521 - DNA, 555 bp, synthetic construct
  misc_feature 1..555: note = source = /note="Description of Artificial Sequence: Synthetic coding sequence"
  source 1..555: mol_type = other DNA
atgccgagattgtttttcttccaccttctgggagtttgtttgctcctcaatcagtttagccgagcagtagctgactcctggatggaggaagtcatcaaactgtgtggccgggagctagtgcgcgctcagatcgccatctgcggtatgtctacgtggagtaaaagatccctttcgcaggaagatgcccctcagacaccgagacctgtcgctgagatcgtaccgagcttcatcaacaaagatactgagacgataaacatgatgtccgaatttgtcgccaatctgcctcaagagctgaagctaacactgtccgaaatgcagccagctcttcctcagctccagcaacacgtgccagtcctaaaggacagcagtctactgttcgaagagtttaaaaagcttattaggaacaggcagtccgaggccgccgattcctccccctcagagctaaaatacctaggtctggacactcattccaggaagaaacgccagctttactctgctctggcaaataagtgctgccacgtggggtgcacaaagcggtccctagcccgcttctgc

SEQ ID NO: 18522 - DNA, 555 bp, synthetic construct
  misc_feature 1..555: note = source = /note="Description of Artificial Sequence: Synthetic coding sequence"
  source 1..555: mol_type = other DNA
atgccgcgactattcttctttcatctccttggcgtttgtttgctgcttaatcagttttctagggcagttgcagacagctggatggaagaggtgatcaagctctgcggacgggagctcgttagggcacagatcgcgatatgcggcatgtcaacctggtctaagcgatctctgagtcaagaggatgccccgcagacccccaggccagtcgctgagatcgttccgtccttcatcaataaggacacggagacaatcaacatgatgtccgagtttgtggccaaccttcctcaggagttgaagctaacgctttcagagatgcagcccgccctccctcaactgcagcagcacgtgccagtgcttaaggactcgtccctgctattcgaagaatttaagaaactgattaggaacaggcagtccgaggccgccgatagcagtcccagcgagctgaaatacttagggctggacacgcacagccgtaagaaacggcaactatactctgccttggcaaataagtgctgtcatgtggggtgtaccaagcgaagtcttgcacgcttctgc

SEQ ID NO: 18523 - DNA, 555 bp, synthetic construct
  misc_feature 1..555: note = source = /note="Description of Artificial Sequence: Synthetic coding sequence"
  source 1..555: mol_type = other DNA
atgcctagactcttcttttttcacttgctcggagtgtgtctgcttcttaaccagttcagccgcgcagtggccgacagctggatggaggaagtgattaaactttgtggcagggaactggtgcgcgcccagatagctatttgcggaatgtcgacttggtcgaagagatcactcagccaagaggacgcgcctcaaacccctcgccctgtcgccgaaatagtgccatccttcattaacaaagatacggaaactattaacatgatgtccgaatttgtcgcaaatctgccacaggaactgaagctgactctttctgagatgcagccagcactgccacagctccaacaacatgtgccagtgctgaaggattcctcgctgctgtttgaagaattcaaaaaacttattagaaacaggcagtcggaggcagcagattcaagcccaagcgaactgaagtacttgggactggacactcatagcagaaagaaaagacaactttactcagcacttgcgaataagtgctgtcatgtgggatgcactaagcgcagccttgccagattttgt

SEQ ID NO: 18524 - DNA, 555 bp, synthetic construct
  misc_feature 1..555: note = source = /note="Description of Artificial Sequence: Synthetic coding sequence"
  source 1..555: mol_type = other DNA
atgccccgccttttctttttccacctgctgggagtgtgcctccttctgaaccaattctcacgcgctgtcgccgatagctggatggaggaagtgattaagctgtgcggtcgcgaactggtccgggcccagatcgctatatgcggcatgagcacttggtcgaaaagatcgctctcgcaagaggacgcgcctcagactcctagaccagttgctgaaatcgtgccttcattcattaacaaagacactgaaaccatcaatatgatgtcagaattcgtagctaacctgccgcaggagctgaaactcaccctgagcgagatgcagccggcgctgccccaattgcaacaacatgtgccagtcctcaaagattcctccttgctctttgaagaattcaagaagttgatcaggaatagacagagcgaagcagcggactcgagcccatccgagctgaagtacctgggtcttgacacccattcacggaagaagcggcagctgtactctgccctggccaataagtgctgtcacgtgggatgcacgaaacgctcactcgcgcggttctgc

SEQ ID NO: 18525 - DNA, 555 bp, synthetic construct
  misc_feature 1..555: note = source = /note="Description of Artificial Sequence: Synthetic coding sequence"
  source 1..555: mol_type = other DNA
atgcctaggctattcttttttcacctcctgggcgtgtgtctcctactaaatcaattctccagagccgtagcagacagctggatggaggaggtgattaaactttgcggaagggaactggtgcgcgcacaaattgctatctgtggaatgagtacgtggtctaagcggagcttatcacaggaggatgctccccaaacccctcggcccgttgcagaaatcgtaccatctttcattaacaaggatacggaaaccataaacatgatgtcagagttcgttgcaaatctgcctcaagaactcaagctgaccctcagcgagatgcagcctgcactgccacagctccagcagcacgtgccggtgctaaaggacagtagtctgttgttcgaagagttcaagaagcttattcgcaacagacagtccgaagcagcagattcatctccatcagaattgaagtacttagggcttgatactcactctagaaagaaaagacagctatatagcgcactggcgaataaatgctgccacgttggttgcaccaagcgctctcttgctcgattttgt

SEQ ID NO: 18526 - DNA, 555 bp, synthetic construct
  misc_feature 1..555: note = source = /note="Description of Artificial Sequence: Synthetic coding sequence"
  source 1..555: mol_type = other DNA
atgccgagactgttctttttccatctgctgggggtgtgcctgctcctgaaccagtttagccgcgcggtggcggattcgtggatggaagaagtcatcaaactgtgtggaagggagctcgtgagagcacaaattgcgatctgtggaatgtcaacctggagcaagaggtccctgtcccaggaggacgcaccccagactccccggccggtcgcggagattgtgccttcattcatcaacaaagatacggaaactatcaatatgatgtccgagtttgtggccaacctgccgcaggagctcaagttgactctgtcggaaatgcagccggccctgcctcaactgcagcagcatgtgccggtgctcaaagatagcagcctgctttttgaagagttcaagaagttgatccggaacagacaatcggaggccgctgatagctccccgtcagagctgaagtacctgggcctggacactcattcacgcaagaagcgccaactgtacagcgccctggccaataagtgctgccacgtgggatgcactaagagatcgctcgctcgcttctgc

SEQ ID NO: 18527 - DNA, 555 bp, synthetic construct
  misc_feature 1..555: note = source = /note="Description of Artificial Sequence: Synthetic coding sequence"
  source 1..555: mol_type = other DNA
atgccgcgtttattcttcttccacctgcttggtgtatgtctgctgttgaaccagttttctcgcgcagttgccgactcgtggatggaggaagtaatcaaattgtgtggccgagagttagtccgggcacaaatcgctatctgtggaatgtcaacatggtctaaaagaagtctgtctcaagaggatgctccacaaacaccgcgaccggtggcggagattgttccttcgtttattaacaaggacacagagactatcaatatgatgtcagaatttgtcgctaacctgccacaagaattgaaattgacgctctcggaaatgcaacctgcactgccccagttgcagcaacatgtgccggtgctgaaagatagttctttattatttgaagagtttaaaaaactcatcagaaatcgccagtccgaagcggcggattcgtccccgtcggaattaaaatatctcggccttgacacacattcgagaaaaaaacgtcagttgtattccgctttagcaaacaaatgttgtcacgtaggatgtacgaaacgttccttagcaaggttttgt

SEQ ID NO: 18528 - DNA, 555 bp, synthetic construct
  misc_feature 1..555: note = source = /note="Description of Artificial Sequence: Synthetic coding sequence"
  source 1..555: mol_type = other DNA
atgccgcgcctgttcttctttcacctcttgggagtgtgcctgctgctgaatcaattctcgcgggctgtggccgactcttggatggaggaggtgattaagctctgcggcagagaactggtgcgggcccaaatcgccatctgtgggatgtccacttggagcaagagatcgctttcccaggaagatgcgccgcaaacccctcggcctgtcgccgagatcgtcccatcctttatcaacaaggacactgaaaccatcaatatgatgtcggagttcgtcgccaacctcccgcaagagctcaaactgacgctcagcgagatgcagcctgcgttgccccaactgcaacagcatgtccccgtcctcaaggacagctcgctgctgttcgaagaattcaagaagctgatcagaaaccggcaatcagaggccgcagacagctcgccgtccgaactcaagtacctgggcctggatacccactcacgcaaaaagagacaactctactccgcactcgccaacaaatgctgccacgtgggatgcaccaagaggtcactggcacgcttctgc

SEQ ID NO: 18529 - DNA, 555 bp, synthetic construct; identical to SEQ ID NO: 18459
  misc_feature 1..555: note = source = /note="Description of Artificial Sequence: Synthetic coding sequence"
  source 1..555: mol_type = other DNA

SEQ ID NO: 18530 - DNA, 555 bp, synthetic construct
  misc_feature 1..555: note = source = /note="Description of Artificial Sequence: Synthetic coding sequence"
  source 1..555: mol_type = other DNA
atgccgcgcctgttcttctttcatctgctgggagtctgcctgctgctgaaccagttctctcgagcggtcgccgattcctggatggaagaggtgatcaaactgtgtgggcgggaacttgtgcgcgcgcaaattgccatctgcggtatgtcgacttggtcgaagcggtcgctgtcccaggaagatgcgccgcagactccgcgccctgtggctgagatcgtcccttcgtttatcaacaaggataccgaaactatcaatatgatgtcagaattcgtggcaaatctcccgcaagagctgaagctcactctgagcgagatgcaaccggcgttgcctcagcttcaacagcatgtgccagtgctgaaggatagctcgctgctctttgaggagttcaaaaagctcatcagaaatcgccaatccgaggcggctgactcatcgccgtcggaactgaagtacctcggactcgacactcactcacgcaagaaacggcagctgtactcggccctggcaaacaagtgctgccacgtcggctgcacgaagcgctcactggcccgcttttgc

SEQ ID NO: 18531 - DNA, 555 bp, synthetic construct
  misc_feature 1..555: note = source = /note="Description of Artificial Sequence: Synthetic coding sequence"
  source 1..555: mol_type = other DNA
atgcctaggctgtttttctttcaccttctgggtgtttgccttcttctgaaccagttttcaagagccgtggcagattcgtggatggaggaagtgataaagctctgtggcagggagctcgtccgagctcaaatagccatttgcggcatgtccacctggtcaaagcgatctctgtcgcaagaggatgcgccgcaaacccctagaccagtggcggagatcgtcccttcgttcatcaataaagacaccgaaaccatcaacatgatgagcgaatttgtggccaaccttccgcaagaactgaaacttactttgtccgagatgcaacctgcacttccacagcttcagcagcatgtgccggtgctcaaggacagctctctcctgttcgaagaattcaaaaaacttatcagaaatcggcagtcggaggcagcagattcatcgccctctgaacttaagtacctcggacttgacactcatagtcggaagaagagacaactttacagcgcattggctaataagtgttgccacgtggggtgtaccaagcgttcacttgcaaggttttgt

SEQ ID NO: 18532 - DNA, 555 bp, synthetic construct
  misc_feature 1..555: note = source = /note="Description of Artificial Sequence: Synthetic coding sequence"
  source 1..555: mol_type = other DNA
atgcctcgattatttttttttcatctgctcggagtgtgcttgctccttaatcagttttctcgggcggttgcggattcttggatggaggaggtcattaagctgtgtgggcgggagttggtccgcgcacaaatcgcaatttgtggaatgtctacctggagcaagcgcagcttgtctcaggaagatgctccgcagaccccacgacccgtcgccgagatcgtcccaagtttcataaacaaggatactgagaccattaacatgatgagcgagttcgtggctaacttgccccaggagctgaagcttacactttccgagatgcagccagcattaccacaactgcaacagcatgttcccgtgctaaaggattcatccctcctgttcgaagagttcaagaaactgatcagaaatcgccaaagcgaggccgcagactccagcccttcggagctgaaatatttgggtctggatacacacagcagaaagaagcggcagttgtactccgcactagcaaataagtgttgccacgtaggctgcacgaagaggtctctggcgcgattttgt

SEQ ID NO: 18533 - DNA, 1044 bp, synthetic construct
  misc_feature 1..1044: note = source = /note="Description of Artificial Sequence: Synthetic coding sequence"
  source 1..1044: mol_type = other DNA
atgaatggcacagaaggaccaaacttttacgttccattctctaatgcaacgggagtagtgagatccccattcgaatacccacaatactatcttgccgagccgtggcagttttctatgctcgccgcatacatgtttttactgattgtgttgggattcccaattaatttccttacattgtacgtgactgtgcagcacaaaaaacttagaacgccgctcaattatatcttgctgaatctggctgtggcagatttgttcatggttctgggaggttttacaagtaccctctacacttctttgcatgggtacttcgtatttggtcctacgggatgcaatctagagggatttttcgctacacttgggggtgaaatagcattatggtccctcgtagtgctggctatcgaacgatacgttgtggtgtgcaaacccatgtccaatttcaggtttggggaaaaccatgctattatgggagtagctttcacatgggttatggccctagcctgcgcagcccctcccttagcaggttggtcacgttacataccggaaggtttgcaatgttcatgtggaattgattactacacactcaaaccagaggtcaacaacgagagttttgtaatttacatgtttgtggtgcactttactataccgatgatcattattttcttttgctatgggcaattggttttcactgtaaaggaagctgcagcccaacaacaagagtcggctaccacgcaaaaagctgaaaaagaagtcactagaatggtaataattatggtaatcgcttttcttatttgctgggtcccgtacgcatcagtcgctttctatatcttcactcatcaaggttccaatttcggtcctatctttatgacaataccagccttttttgcgaagtcagctgccatctacaatcctgttatttacatcatgatgaataagcagtttcgaaactgcatgcttacgaccatatgctgtggaaaaaacccacttggagacgatgaagcgagcgctacagtgtctaagacagagacgagccaggttgctcccgct

SEQ ID NO: 18534 - DNA, 1044 bp, synthetic construct
  misc_feature 1..1044: note = source = /note="Description of Artificial Sequence: Synthetic coding sequence"
  source 1..1044: mol_type = other DNA
atgaatggaaccgaaggaccaaacttttacgttcctttttcgaatgcgacgggggtggtgaggtccccatttgaatatccacagtactacctggcagagccttggcagttttcaatgcttgcagcatacatgtttcttcttatagtcctgggattccctattaactttcttaccctgtacgtcactgtccagcataagaagctgagaacccccctgaattacattcttctgaatctggcagttgcagatcttttcatggtcttgggagggtttacctcaacgctctacacctcgcttcatggatacttcgtgtttggaccaaccggatgtaatcttgagggtttctttgctacccttggaggcgaaattgctctgtggtccctcgttgtgcttgcaattgaaaggtacgtggtggtgtgcaaacccatgtccaatttccgattcggagaaaaccacgcgattatgggggtcgcgtttacctgggtgatggcgctggcgtgtgcggcacctccactcgcaggatggagcaggtacatcccagaaggactgcaatgttcctgcggtatcgactattacaccctgaagcccgaggtgaacaacgaatcatttgtgatttacatgtttgtcgtgcactttaccattcccatgatcatcatattcttctgttacggtcagctggtctttaccgtgaaggaagcagcagcccaacaacaagaaagcgctactactcaaaaggcagaaaaggaagtcactcggatggtcatcattatggtgatcgcctttctgatttgttgggtgccatatgcaagtgttgcgttctacattttcactcaccagggttcgaactttgggccgatcttcatgaccattcctgccttctttgcaaagtcagcagcaatttacaaccccgtcatctacattatgatgaacaagcagtttcgcaattgtatgcttactacgatttgctgtggcaagaaccctttgggagatgatgaggcatcggcaaccgtcagcaagactgagacttcccaggtcgcacctgcg

SEQ ID NO: 18535 - DNA, 1044 bp, synthetic construct
  misc_feature 1..1044: note = source = /note="Description of Artificial Sequence: Synthetic coding sequence"
  source 1..1044: mol_type = other DNA
atgaacggaactgagggacctaacttctacgtcccattcagcaacgcaacgggcgtggtgcggtcaccctttgagtacccgcagtattacctggctgaaccatggcagttctctatgctggcggcatacatgttcttacttatcgtgttgggattcccaattaattttctgactttgtacgttacagtgcaacacaagaagctgcggacacccctgaattatatccttctaaatctggcagtggcggacttgttcatggttctgggaggattcacaagcactttgtataccagcctccacggttacttcgtgtttggtccgaccgggtgcaaccttgagggctttttcgctacactgggaggagagatcgccctatggtccttagtggtactcgccattgagcggtacgtagttgtgtgcaaaccaatgtccaactttcgatttggcgaaaatcacgctattatgggagtcgccttcacatgggtaatggcccttgcatgtgctgcacctccattagcggggtggagcaggtatatccctgaggggctgcagtgtagctgtggaatagattactacaccctgaaaccagaagtcaataatgagtcattcgttatttatatgtttgtcgtgcactttaccatcccaatgattattatttttttttgttacggacaactggtgtttaccgtcaaggaggccgctgcgcaacagcaggaatccgctaccactcagaaggcggagaaagaggtcacaagaatggtgatcatcatggtcatcgccttcctgatatgctgggtaccctacgccagcgtcgccttttatattttcacacaccagggttctaactttgggcctatatttatgacaatccctgcattcttcgcaaagtccgccgccatttataatccagtgatttacattatgatgaacaagcagtttaggaactgcatgctgaccaccatttgttgcgggaagaatcctctgggtgacgacgaagcatccgccacagtgtcaaagacagagacctcgcaggtagccccagct

SEQ ID NO: 18536 - DNA, 1044 bp, synthetic construct
  misc_feature 1..1044: note = source = /note="Description of Artificial Sequence: Synthetic coding sequence"
  source 1..1044: mol_type = other DNA
atgaatggaacagagggacctaacttctacgtccccttctctaacgctacaggcgtagttcggtctccctttgagtacccacaatactacttggcggagccttggcagttctcaatgttggcagcctatatgttcctgttgattgtcctgggattccctataaatttcctgacgctctacgtcacagtccagcataagaaactccggacccccctgaactatattttgctgaacttggcagtagccgatctatttatggtcctgggtggattcacgtctactctgtacacatctttacatggctacttcgtgttcggtccgaccgggtgtaacctagagggtttcttcgctacactgggcggcgagatagctttgtggtccctcgtggtcctcgctatcgagaggtatgtcgtggtgtgtaagccgatgtccaattttagattcggggaaaaccacgctattatgggggtcgcattcacatgggtaatggcccttgcgtgcgccgccccccccctggcgggctggagccggtacattcccgaggggctacagtgttcgtgcggtatagactactacactctcaaacccgaggtgaacaacgagagctttgtgatctacatgttcgtggtgcactttactattccgatgatcattattttcttttgttacggtcaactagtgtttacagtcaaggaagcggctgctcagcaacaggagtccgccaccacacagaaagctgaaaaagaggtgacaaggatggtcattatcatggtcattgcctttctgatctgctgggtgccttacgcgtcggttgccttctatattttcacccaccaaggctccaatttcgggcccatctttatgacaatcccagccttctttgctaagtccgcggccatttacaatccagtgatatacattatgatgaataaacaattccgaaactgcatgttaaccaccatttgttgtggaaaaaatcctctgggggatgacgaggcatccgctacagtatccaagacggagacttcccaagtggcccctgca

SEQ ID NO: 18537 - DNA, 1044 bp, synthetic construct
  misc_feature 1..1044: note = source = /note="Description of Artificial Sequence: Synthetic coding sequence"
  source 1..1044: mol_type = other DNA
atgaacggcacggaggggcccaacttttatgttcccttttcaaacgccacaggcgtagtgcggtcaccttttgagtatccacaatactatttggccgagccctggcagttctcgatgcttgccgcttacatgttcttgctaatcgtcctgggattcccaatcaacttcctgactctgtacgtaacagtccagcacaagaaactcagaacccccctaaactacattctcctgaatcttgccgtggccgacctatttatggtgctgggcgggtttacatccaccctgtacacctctctgcatgggtattttgtgttcgggcccactggctgtaacctggaggggttcttcgctactctgggcggcgaaatcgccctgtggagtctggtggtccttgctatcgagcgctacgtggtcgtctgtaaacccatgagtaacttccggttcggcgaaaaccacgccataatgggggtagcatttacatgggtgatggctttggcatgtgccgctcctccgctcgcagggtggtccaggtatatccccgaaggacttcagtgttcatgtgggatcgattactatactctgaagcccgaagtcaacaacgaatcctttgttatttacatgttcgtggtccactttactatccctatgatcattatctttttctgctacggtcagctggttttcacagtcaaggaggccgccgcgcaacagcaggagtctgccacaactcaaaaggccgagaaagaggtcacccgtatggtcattatcatggtaatcgctttcctgatttgttgggtgccatacgccagcgttgcattttatattttcacacaccaaggcagtaatttcggcccaatatttatgacaatccctgctttcttcgccaaaagtgccgcaatttataacccagttatctacatcatgatgaataagcagttccggaactgtatgctcaccaccatatgttgtggcaaaaatcccttgggagatgacgaagccagcgctactgtgagcaagaccgagacttcccaggttgccccagcc

SEQ ID NO: 18538 - DNA, 1044 bp, synthetic construct
  misc_feature 1..1044: note = source = /note="Description of Artificial Sequence: Synthetic coding sequence"
  source 1..1044: mol_type = other DNA
atgaacggaacagaggggcccaacttttatgtcccttttagcaatgccactggtgtcgtgaggagcccttttgagtatccacaatactacctcgcagaaccatggcagttcagtatgctggcggcctatatgttcctgctgatcgtcttggggttccctatcaactttcttacgctctacgttaccgtgcagcacaaaaagctacggacacctttaaattacattctgttaaatttagccgtggcagacttgtttatggtactagggggctttacttccactctgtatactagccttcatgggtattttgtattcggccccaccggctgtaacctggaaggcttcttcgctacgctgggaggggagatcgccctatggtcactggtagtactggctattgagagatacgtggtggtgtgtaaacctatgagcaacttcagatttggcgaaaatcatgccattatgggcgtagcgttcacatgggtaatggcacttgcgtgcgctgcccccccgctggccggatggagtcgttatatccccgaagggcttcagtgttcctgcggcatcgactattacaccttgaagcccgaggttaataatgaaagcttcgtcatctacatgttcgtggtgcattttaccattccgatgatcattatctttttttgttacgggcagctcgtgttcacagttaaggaggccgcagcacagcaacaagaatccgcaaccactcagaaggcggagaaggaggtaactcggatggtcattatcatggttattgcatttctgatatgctgggttccatatgcaagcgtcgctttctatattttcactcaccaagggtcaaacttcggtcccatctttatgactatccccgcgttttttgcgaagagcgccgctatttacaacccagttatctacatcatgatgaataaacagtttcgtaactgcatgttgaccactatttgttgcgggaaaaaccccctgggcgacgatgaggcgtccgccaccgtgtcaaaaaccgaaacttcccaagtcgcccccgcc

SEQ ID NO: 18539 - DNA, 1044 bp, synthetic construct
  misc_feature 1..1044: note = source = /note="Description of Artificial Sequence: Synthetic coding sequence"
  source 1..1044: mol_type = other DNA
atgaacggtactgaaggtcctaatttctacgtccctttctcgaacgccactggggtggtgcgctcaccgttcgaataccctcagtattacctggctgagccatggcagttcagcatgcttgcagcgtacatgttcctcctgatcgtgcttggattccccatcaactttctcaccctgtacgtcaccgtgcagcacaagaagctgagaaccccgctgaactacatcctgctgaatcttgcggtggccgacctcttcatggtgctgggaggcttcacctccacgctgtacacttccctgcatggctacttcgttttcggaccaaccgggtgcaatctggaaggattcttcgcaaccctgggaggcgagatcgcactgtggagcctggtggtgttggccatcgagcgctacgtggtggtttgcaagccaatgagcaacttccggtttggggagaaccatgcaatcatgggagtggcatttacctgggtgatggcccttgcgtgcgcggctccgccgctcgcgggttggtcgaggtacatcccagaaggactgcaatgcagctgcggaatcgattactacactctcaagcctgaagtgaacaacgagtccttcgtaatctacatgttcgtggtccacttcaccatcccaatgattatcatctttttctgctatggtcagctggtgtttactgtcaaggaggcggctgcccaacaacaagaatcggccactactcagaaggctgagaaggaagtgacccggatggtgatcatcatggtcattgcctttcttatctgctgggtcccgtacgcctcggtcgccttctacatcttcactcatcaggggtccaactttggcccgatcttcatgaccataccggcgttcttcgcgaagtccgcggctatctacaatcccgtgatctacatcatgatgaataaacagtttcgcaattgcatgctgaccaccatctgttgcggtaagaaccctctcggcgatgacgaggcctcagcaaccgtgagcaagactgaaactagccaggtggcaccagca

SEQ ID NO: 18540 - DNA, 1044 bp, synthetic construct
  misc_feature 1..1044: note = source = /note="Description of Artificial Sequence: Synthetic coding sequence"
  source 1..1044: mol_type = other DNA
atgaatgggacagaaggcccaaacttttatgtccctttcagtaatgctacaggcgtggttaggagcccatttgaatacccgcagtactacctggccgaaccttggcagtttagcatgctcgcagcctatatgttcctgttgattgtgctcgggtttcctattaatttccttaccctgtacgtcactgtgcaacataaaaaattacgaacaccgctgaattatatcctgctaaatcttgccgtggctgacctgttcatggtgttaggtggattcaccagcaccctgtacacgtctcttcatgggtactttgtgtttggccctaccggctgtaatttagagggattttttgcaacactgggaggagaaatcgccttgtggtcccttgtggtgttggcgatagaacgttacgtcgtcgtttgcaaaccaatgtcaaattttcgctttggagagaaccatgccatcatgggagtcgctttcacctgggtcatggcactggcgtgcgcggctccaccactcgctggatggtccaggtatatcccagaaggcctacagtgtagttgcggaatcgattattacaccctgaagcctgaagtgaacaatgagtcattcgttatctacatgttcgtcgtccattttacgatccccatgattataatcttcttctgctacggacagcttgtatttaccgtaaaagaagccgcagcccagcaacaagagagcgcgaccacacagaaagccgaaaaggaggtcacacgtatggtgattataatggtgatcgccttccttatctgctgggtcccttacgctagcgttgcattctacatctttacccatcaggggagcaactttggacctatctttatgaccattccagctttctttgcgaagtccgctgctatctacaacccggtgatctacataatgatgaataagcagtttaggaactgtatgctgactacaatctgttgcggtaaaaatcccttgggagatgatgaagcgagcgccaccgttagcaaaacagagacttctcaggtcgcccccgcc

SEQ ID NO: 18541 - DNA, 1044 bp, synthetic construct
  misc_feature 1..1044: note = source = /note="Description of Artificial Sequence: Synthetic coding sequence"
  source 1..1044: mol_type = other DNA
atgaacggtactgaaggacccaacttttacgtccccttttcgaatgcaaccggagtggtgcgttcgccttttgaataccctcaatactacctcgcagaaccttggcaattcagcatgcttgcggcctacatgtttcttctgattgtgctgggatttcctataaactttctcactctctacgtgactgttcaacacaaaaagctgcgaactccacttaactacatccttctcaacctggcggtggctgaccttttcatggtgctggggggcttcacctccaccctttacacctcactgcacggttactttgtctttggaccgactggatgtaaccttgaaggtttctttgcaactctgggaggcgaaattgcactgtggagccttgtggtgcttgcaatcgagagatacgtggtggtgtgcaagccaatgagcaattttcgttttggtgagaatcatgctataatgggtgtggcctttacttgggtgatggcccttgcatgcgcagcaccaccacttgctggttggtcacgatacattccggaggggctgcagtgttcgtgtggtattgactactacaccctgaagcctgaggtgaacaatgaatcctttgtcatttacatgttcgtcgtgcactttacgatcccaatgatcattatcttcttctgttacggtcaattggtgtttaccgtgaaagaagctgccgcccagcaacaagagtctgccactactcaaaaggccgaaaaagaagtgaccaggatggtgatcattatggtaatcgcctttcttatttgttgggtcccctatgcatcagtggccttctacatctttacccatcagggatcgaacttcggccccattttcatgaccataccggcatttttcgccaagtcagcagcgatttacaatcctgtgatctatatcatgatgaataagcaattccggaactgtatgctgactactatatgttgcggaaagaaccccctgggtgacgatgaggcgtccgcgaccgtgagcaaaaccgagactagtcaagtggccccagca

SEQ ID NO: 18542 - DNA, 1044 bp, synthetic construct
  misc_feature 1..1044: note = source = /note="Description of Artificial Sequence: Synthetic coding sequence"
  source 1..1044: mol_type = other DNA
atgaatggcaccgaaggcccgaatttttacgtgccctttagcaacgcaacaggcgtggtgcgctccccctttgaatatcctcagtactaccttgcagagccatggcagttttctatgctggccgcctatatgtttttgcttatcgtcctgggattcccaattaatttcctgaccttgtacgttacagtgcagcacaagaagttgaggaccccactgaactacatactgctcaaccttgctgtagcggatttgtttatggtgctcggaggatttacatccactctctacacatctctacatgggtactttgtgttcggccctacagggtgtaacctagaaggcttcttcgctaccctcggaggcgaaattgccctctggagcctagtcgtcctggcaatcgaaagatacgtggtggtgtgcaaaccgatgagcaacttccgtttcggcgagaaccacgccatcatgggagttgccttcacatgggttatggctctggcatgtgcagcccccccgctagccggctggtctagatacatacctgagggactgcaatgttcttgtgggatcgactattatacacttaaaccagaggtaaacaacgaatctttcgtcatctatatgttcgtagtgcacttcacaataccaatgataataatctttttctgctatgggcaactggtgttcaccgtaaaggaggcagcggcacagcagcaagaatcggctaccactcagaaggccgagaaggaggtaacccggatggtgattattatggttatcgccttcctgatctgctgggttccctacgcttccgtggccttctacatcttcacacaccagggatccaattttgggcctatcttcatgaccatccccgcgttttttgccaagtctgctgccatttataatcctgtcatctatataatgatgaataaacagtttcggaattgtatgcttactacgatctgctgcggtaagaatccccttggcgacgatgaagcctcagcaaccgtcagcaagaccgagacgagccaggtcgcgccagcc

SEQ ID NO: 18543 - DNA, 1044 bp, synthetic construct
  misc_feature 1..1044: note = source = /note="Description of Artificial Sequence: Synthetic coding sequence"
  source 1..1044: mol_type = other DNA
atgaatggtaccgaaggacccaacttttacgtgccgttttccaacgccaccggcgtggtccggtcgccctttgaatacccccaatactacctggcagaaccttggcagttctcgatgctggcagcctatatgttcctgcttattgtgctcggttttcccataaactttcttaccctgtacgtgactgtccaacataagaaactcagaacgcctctgaactacatactgttgaacctggccgtcgccgatcttttcatggtcctgggcggctttacttcaactctctacacctccctgcatggatacttcgtgttcggaccaactggctgtaatctggaagggttttttgccacccttgggggtgagattgccctgtggtccctcgtggtccttgcaattgagcgatatgtcgtggtgtgcaagcctatgagcaactttcgcttcggtgaaaaccacgccattatgggtgtcgccttcacgtgggttatggcactcgcatgcgctgccccacctcttgcgggttggtcccgatacatcccggaaggactccagtgttcttgcgggatcgattactataccctgaagccggaagtcaataacgagagctttgtgatttacatgttcgtggttcactttactatcccaatgatcatcatcttcttctgctacggtcagttggtgttcactgttaaggaagcagccgcgcagcaacaagagtcggccactacccagaaggcggaaaaagaggtgaccaggatggtgatcattatggtcattgccttccttatttgttgggtgccatacgcaagcgtcgcattttacatctttacccaccagggaagcaactttggacctatctttatgaccattccagcgtttttcgcaaaatcggccgcgatctacaatccagtgatctacataatgatgaataagcaattcagaaactgtatgctgactactatttgttgcggcaagaacccactcggtgacgacgaggcatcagccaccgtgagcaagactgaaacctcccaagtcgcaccagcc

SEQ ID NO: 18544 - DNA, 1044 bp, synthetic construct
  misc_feature 1..1044: note = source = /note="Description of Artificial Sequence: Synthetic coding sequence"
  source 1..1044: mol_type = other DNA
atgaatggaacggaaggaccaaatttctacgtacctttttcgaatgccaccggagtcgtcaggagcccgttcgaatacccccaatactacctggcagaaccctggcaattcagtatgctggctgcatacatgttcctgctgattgtcctcggattcccgataaactttctgactctgtacgtcactgtgcaacacaagaagctgcggactcctctcaactacatcctgcttaacttggccgtggcggatttgtttatggtcctggggggtttcacttcgaccctgtacacctcactccatggatacttcgtgtttggaccgaccggctgcaacctcgaaggtttcttcgccacgttggggggcgaaattgctctgtggtccctggtggtcctggccatcgaaagatatgtcgtggtctgcaagccgatgtccaacttccggtttggtgagaatcacgcgatcatgggagtggcattcacctgggtgatggccctggcgtgcgcggcgccgccactggcggggtggtcccggtacatcccggagggactgcaatgctcgtgtggaatcgattactacacccttaagccggaagtcaacaatgagtcgttcgtcatctacatgttcgtggtgcacttcactattccaatgatcatcatcttcttctgttacggacagctggtgtttaccgtgaaagaggcggccgcccagcagcaggagtcagccaccactcaaaaagccgagaaggaggtcacccggatggtgatcatcatggtgatcgccttcctgatctgctgggtgccatacgcgtctgttgccttctacattttcacccatcagggaagcaatttcggcccgatctttatgaccatcccagccttcttcgcgaaatcagccgccatctataacccagtgatctacattatgatgaacaaacaattcaggaattgcatgctcaccaccatctgttgcggaaagaacccgctgggggacgacgaggccagcgccaccgtctcaaagaccgagacttcacaggtggccccagct

SEQ ID NO: 18545 - DNA, 1044 bp, synthetic construct
  misc_feature 1..1044: note = source = /note="Description of Artificial Sequence: Synthetic coding sequence"
  source 1..1044: mol_type = other DNA
atgaacggcaccgaaggtccaaacttctatgtgccattttctaatgcaacaggcgtcgtccggtcgccatttgagtatccccaatattatcttgcggagccttggcagttctcaatgttggccgcctacatgttcctgctgatcgttctggggtttcctattaactttctcaccctttacgtcacggtccagcacaagaagctgcgtactccactgaactacatccttctcaatcttgcagtggccgatctcttcatggtattaggcggcttcacttctaccttgtatacctcattgcacggctatttcgtcttcgggcctacgggctgcaacctggaaggcttctttgccacactggggggcgagattgctctgtggagcctggttgtgcttgctatcgaacgttacgtcgtagtatgcaaaccaatgagtaactttaggtttggagagaaccatgccatcatgggggttgcctttacctgggtcatggctttggcctgcgccgcaccgccgctggcaggctggagccgttatatacctgaaggcttgcagtgctcgtgcggcatcgattactatacactgaagccggaagtgaacaatgagtcattcgtcatctacatgttcgtggtccactttaccattccaatgattattattttcttctgttacggccagcttgtctttaccgtcaaggaagccgcagcacaacaacaagaaagcgcaacaacccaaaaggcagaaaaagaggttacccgaatggtcattataatggtgattgcatttttgatttgttgggtgccttatgcttctgtggccttctatattttcactcatcaaggaagcaacttcggcccaatcttcatgaccatcccagcatttttcgcaaaaagcgctgctatctataatccggtaatatatatcatgatgaacaagcagtttagaaactgcatgttgactactatctgctgcgggaaaaatccactgggagatgacgaggctagcgccactgtcagtaagactgagacctctcaggttgctcccgca

SEQ ID NO: 18546 - DNA, 1044 bp, synthetic construct
  misc_feature 1..1044: note = source = /note="Description of Artificial Sequence: Synthetic coding sequence"
  source 1..1044: mol_type = other DNA
atgaacggaaccgagggccccaatttttatgtccctttcagcaacgcaactggcgtggtgaggagtccctttgaatacccgcagtattaccttgcagagccatggcaatttagcatgctggcagcctatatgtttctgctaatcgtcctgggttttccgattaacttcttgacgctgtatgtgactgtgcagcataaaaaattaagaacccccctaaattacatactactcaatttagctgtggcggacctattcatggtcctagggggatttacgtcaaccctgtatacatccctacacggctatttcgtctttgggcctaccgggtgcaacttagagggattttttgccacgctgggcggtgagattgctctgtggtcactggtcgtcttagccattgaaaggtacgtggttgtgtgtaaacccatgtccaattttaggtttggagaaaatcacgctatcatgggggtggctttcacctgggttatggctctagcatgcgccgccccgccgcttgccggatggtcccgctatattcctgagggcttgcagtgctcttgcggaatagactattacactctgaagccagaggtgaacaatgagagtttcgtcatttacatgtttgttgtccacttcaccatccctatgatcatcatatttttctgctacggccagctggtgttcactgtgaaagaagccgccgctcagcaacaggagagtgccactacccagaaggctgagaaggaggtcaccaggatggtcattataatggtcatcgcttttctgatctgttgggtgccgtacgcctcagttgctttttacatatttactcaccagggcagcaacttcggccctatttttatgacaatacccgcttttttcgcaaagtcggcagctatctacaaccccgtaatttacatcatgatgaacaagcagttccgaaattgcatgttaactacgatttgttgtggaaagaaccctctcggagatgatgaagctagcgccaccgtaagtaaaacggagacaagtcaggtcgcgccagcg

SEQ ID NO: 18547 - DNA, 1044 bp, synthetic construct
  misc_feature 1..1044: note = source = /note="Description of Artificial Sequence: Synthetic coding sequence"
  source 1..1044: mol_type = other DNA
atgaacggaactgaaggcccaaacttttacgtcccattttccaacgctaccggcgtggtcaggagccccttcgaatacccgcaatactacctcgccgaaccgtggcagttctcgatgctggccgcgtacatgtttctgctcatcgtgctggggttcccgatcaactttcttactctttacgtgaccgtgcagcacaaaaagttgcgcactcctttgaactatatcctgctgaatcttgcggttgctgatttgttcatggtcctcggagggttcacctccactctgtacacctcattgcacggatacttcgtgttcggaccgaccggttgcaatctcgaaggattctttgcgactctgggtggagagatcgctctgtggtcgcttgtggtcctggccatcgaacgctacgttgtggtctgtaagccaatgagcaactttcggtttggagaaaatcatgccatcatgggagtggccttcacttgggtcatggcacttgcctgtgcggcacctcctttggctggctggtcgcggtatattccagaagggcttcagtgtagctgcggcatcgactactacaccctgaaaccggaagtcaacaacgagtcattcgtgatctacatgttcgttgtgcacttcaccattcctatgatcataatcttcttctgttacggacagctggtgttcaccgtcaaagaggcagcagcccaacagcaagagtctgctaccacccaaaaggcggagaaggaagtgacgcgcatggtcataatcatggtgatcgccttcctgatctgctgggttccctatgcgtcggtggccttctacatctttactcatcagggctctaacttcggaccgatcttcatgactattcctgccttctttgcgaagagcgctgctatctacaacccggtgatttacatcatgatgaacaagcaattcaggaattgcatgttgactaccatctgctgcggaaagaatccgctgggtgatgatgaggcctcagccactgtgtcaaagaccgaaacgtcccaggtggccccggca

SEQ ID NO: 18548 - DNA, 1044 bp, synthetic construct
  misc_feature 1..1044: note = source = /note="Description of Artificial Sequence: Synthetic coding sequence"
  source 1..1044: mol_type = other DNA
atgaacggcaccgaaggtccaaatttttacgtgcctttctcaaacgccactggagtcgtccgtagccctttcgagtacccacagtactacttggccgagccttggcaattctctatgctggctgcttacatgttccttctcattgtgctcggtttccctattaactttttgaccctgtacgtcaccgtgcagcacaagaagctccgcacacctctcaactatatcttgctcaacctggctgtcgctgacctgtttatggtcttgggtggttttaccagcactctgtataccagccttcacggttacttcgtgttcggccccactggttgcaacctcgagggtttctttgccacactgggaggtgaaattgctctttggtccctggtggttttggctatcgagcgctacgtcgtcgtttgtaagcccatgagcaatttccgctttggcgaaaaccatgccatcatgggtgtagccttcacttgggtgatggcactcgcttgtgccgccccacctcttgcaggttggtccaggtatattccagagggtctccagtgttcatgcggcatcgactattacaccctgaagccagaggtgaataacgagtccttcgtcatctacatgtttgtggttcacttcactatccccatgatcattatctttttttgctacggacagctcgtcttcactgtgaaggaagccgctgctcagcagcaagagtccgccaccactcagaaggctgagaaggaagtaaccaggatggtaataatcatggtaattgccttcctgatctgctgggtgccttacgcttctgtggctttttatatttttacccaccaaggatctaatttcggtccaatttttatgactattcccgccttcttcgctaagtccgcagccatctataacccagtaatttacattatgatgaacaagcaatttagaaattgcatgttgactactatatgctgcggcaaaaaccccctgggcgacgacgaggcttcagccacagtaagcaaaactgagacaagtcaggtggctcccgct

SEQ ID NO: 18549 - DNA, 1044 bp, synthetic construct
  misc_feature 1..1044: note = source = /note="Description of Artificial Sequence: Synthetic coding sequence"
  source 1..1044: mol_type = other DNA
atgaacgggaccgagggtcccaatttctacgtgccattctcaaatgcaactggcgtcgtacggagcccctttgagtacccacagtactacctggccgaaccttggcagttctcaatgttggcggcctatatgttcctgctgattgtgctgggatttcctatcaacttccttactttgtatgtgactgtgcagcataagaagctgcggaccccactgaactacatcctccttaacctggcggtggcagaccttttcatggtcctgggaggcttcacctccaccctgtacacctcgctccacggatacttcgtttttggaccgactggttgcaatctggaaggctttttcgccactctggggggtgaaatcgccctctggagcctcgtcgtcttggctatcgagcgctacgtcgtggtctgcaagccgatgtccaactttagattcggagaaaaccacgcgatcatgggggtcgcctttacttgggtgatggcactcgcctgtgcagcaccacccctcgccggatggtcgcgctacattccggaagggctgcagtgttcctgcggaatcgactactacaccctcaaaccggaagtcaacaatgaatcctttgtgatttacatgttcgtggtgcacttcaccattccgatgatcattatcttcttttgttacgggcagttggtgttcaccgtgaaggaggcggccgcacaacaacaggaatcggccactactcagaaggctgaaaaggaggtgactaggatggtcatcatcatggtcatcgctttcctgatctgctgggtgccttacgccagcgttgcgttttacatctttactcaccaggggtcaaactttggtccgattttcatgaccatccctgcattctttgcaaagtccgcagcgatctacaaccctgtgatctacatcatgatgaacaaacagtttagaaattgtatgttgacgacgatctgttgcgggaaaaatcccctcggggatgatgaagcatcagcaactgtgtcaaaaaccgagacttcgcaggtggccccggct

SEQ ID NO: 18550 - DNA, 1044 bp, synthetic construct
  misc_feature 1..1044: note = source = /note="Description of Artificial Sequence: Synthetic coding sequence"
  source 1..1044: mol_type = other DNA
atgaacggaaccgaaggacctaacttctacgtcccattttccaacgcaacgggggtggtgagatcgccattcgagtaccctcagtattacttggcggagccctggcagttttccatgcttgcggcttacatgttcctgttgattgtgctgggattccccatcaatttcttgactctctacgtaactgttcaacataagaaactgcggactccgctgaactacatcctcctcaaccttgccgttgcagatctgttcatggtgcttggaggattcacctcgaccctttacacttcgctgcatggatactttgtgttcggtccgaccggctgcaacctggaaggatttttcgccaccctcggcggagaaatcgcgctgtggtcgctggtggtcctggctatcgaacgctacgtggtcgtgtgtaaacctatgagcaacttccggttcggagaaaaccatgcgatcatgggtgtggcattcacttgggtgatggcactggcttgcgcagcgccaccgttggcaggatggagccgctacatcccggagggcctccaatgctcgtgcggaatcgactactacactctgaagccggaggtcaacaacgagtcctttgtcatttacatgttcgtcgtgcacttcaccatcccgatgatcatcatcttcttctgttacggccagctggtgttcactgtcaaggaggccgccgcccaacaacaggaatccgccaccacccagaaagccgaaaaggaggtcactagaatggtgattatcatggtcattgcgttcctgatctgctgggtgccttacgcgtcagtcgccttctacatcttcacgcaccaaggatccaacttcggaccgatcttcatgaccatccccgccttttttgccaaatctgccgcaatctacaatccggtgatctacatcatgatgaataaacagttccgcaactgtatgctgactactatctgttgcggaaagaatccgttgggagacgatgaagcatccgccaccgtgtccaaaaccgaaacttcacaggtcgctcctgcc

SEQ ID NO: 18551 - DNA, 1044 bp, synthetic construct
  misc_feature 1..1044: note = source = /note="Description of Artificial Sequence: Synthetic coding sequence"
  source 1..1044: mol_type = other DNA
atgaacgggactgaagggcctaatttctacgtccctttctccaacgcgaccggcgtggtgcgcagcccattcgaatacccgcaatactaccttgcagaaccgtggcagttcagcatgttggccgcgtacatgttcctgttgatcgtcctgggcttccccatcaactttttgaccctctacgtgacggtccagcacaagaaactgagaaccccgctcaactacatcttgctgaatctggccgtcgcagacctgttcatggtcctgggaggttttacgtcaactctctacacttcgctgcatggttacttcgtgttcggcccgaccggatgcaatctggaaggatttttcgcgactctcggcggagagatcgccctgtggtcgctggtcgtgctggccatcgagcggtacgtcgtggtgtgcaagccaatgtcaaatttcagatttggggagaaccacgctattatgggggtggcgttcacgtgggtgatggcgctggcgtgcgccgcgccacctctggccggatggagccggtacattcccgaaggactccaatgcagctgtggaatcgactactacactctcaagccggaagtgaataacgaatcattcgtcatctacatgtttgtcgtccacttcaccatccctatgatcatcatcttcttttgttacggacaactggtgttcactgtcaaggaggccgcggcgcagcagcaggaatcggcaactacccaaaaagcggagaaggaagtgactagaatggtgataatcatggtcatcgccttcctgatttgttgggttccgtacgcttccgtggccttctacatctttactcaccagggaagcaactttggccccattttcatgaccatcccagcatttttcgccaaatccgccgccatctacaatccagtcatctacatcatgatgaacaagcagtttcgcaactgcatgctgaccactatctgctgcgggaagaacccgctcggtgacgacgaggcatcggccaccgtctccaagaccgaaacctcgcaggtggcgcccgcc

SEQ ID NO: 18552 - DNA, 1044 bp, synthetic construct
  misc_feature 1..1044: note = source = /note="Description of Artificial Sequence: Synthetic coding sequence"
  source 1..1044: mol_type = other DNA
atgaacggcacagagggacctaacttttacgtgcccttttccaatgctaccggcgtggtgaggtcaccattcgagtaccctcaatattatctcgctgagccttggcagttttccatgctcgccgcttacatgtttctgttaatcgttttggggttccctatcaatttcttgaccctatacgtgactgttcagcacaagaagctgcgaacgcccctgaactacatactgctgaatctcgcggtggccgacctgtttatggtgctaggtgggttcacatccactctgtacacatccctgcacggttactttgtctttggccctacaggttgtaaccttgaaggttttttcgctacgctgggcggagagattgcattatggtccttggttgtactcgctattgaaaggtacgtagtggtgtgtaaaccgatgtctaattttaggtttggtgagaatcatgccattatgggagttgctttcacctgggttatggcactggcttgcgccgctccacccctggctggatggagccgatatattcccgagggcctgcagtgctcatgcggaatagactactacactctgaaacctgaggtcaataacgagagctttgtcatttacatgtttgtggtccacttcaccattccaatgataataatctttttttgctacggccagctcgtcttcactgtgaaggaagctgccgcacagcagcaagagtccgccacgactcagaaggctgaaaaagaggttactagaatggttataatcatggtgatcgcatttcttatctgttgggtgccttatgctagtgtcgctttttatattttcacccaccaggggtccaacttcgggccaatttttatgaccattcctgcctttttcgcaaagtctgctgcaatttacaacccagtgatatacatcatgatgaacaagcagtttcgtaattgcatgcttacaacaatttgctgcggaaaaaacccgctcggggatgacgaagcatctgccacagtgagcaaaacggaaacctcacaggtagcacctgcc

SEQ ID NO: 18553 - DNA, 1044 bp, synthetic construct
  misc_feature 1..1044: note = source = /note="Description of Artificial Sequence: Synthetic coding sequence"
  source 1..1044: mol_type = other DNA
atgaacggaaccgaaggccctaacttctatgttcccttctcgaatgcaaccggtgtggtgcgatccccgtttgaatacccacaatactacctggcagagccttggcaattttccatgctggcagcatacatgtttctcctgattgtgctcggctttcccataaactttcttaccctttatgtgactgtgcagcacaaaaagttgagaacgcccctcaattacattctgctgaatcttgcagtcgcggatttgttcatggtgctgggtggattcacgagcactctttacacttccctgcacggatacttcgtctttggtcctacgggatgcaatctggagggtttctttgcaaccctggggggtgagatagccctctggtccctggtggtccttgccattgagagatacgtcgtggtttgtaaacctatgtcaaactttaggttcggagagaatcatgccatcatgggtgtggcatttacttgggtcatggcccttgcgtgcgcagcaccccccttggcgggctggtcgagatacattcctgaagggctccagtgtagctgtggtattgattactacacccttaagccagaagtgaacaacgaatccttcgtgatttacatgttcgtggtgcatttcactatccctatgatcattatcttcttttgctacggacagcttgtgtttactgtgaaggaagctgcggcacaacagcaggagagcgctactacccaaaaggctgaaaaggaagtgaccagaatggtcattatcatggtgattgcattccttatctgctgggtcccttacgccagcgtggctttctacatctttactcaccagggatcgaactttggtccaattttcatgactattcccgcctttttcgcaaagtcagcagctatttacaaccccgtgatctacattatgatgaacaagcagtttagaaactgcatgctgacgaccatatgttgtggaaagaacccactcggagatgatgaggcatcggcaaccgtcagcaagaccgaaacctcccaggtggcacctgca

SEQ ID NO: 18554 - DNA, 1044 bp, synthetic construct
  misc_feature 1..1044: note = source = /note="Description of Artificial Sequence: Synthetic coding sequence"
  source 1..1044: mol_type = other DNA
atgaacgggaccgaaggcccaaatttctacgtgcctttctctaacgccaccggcgttgtcagatcaccgtttgaatacccgcagtactacctggccgaaccttggcagttctcaatgctcgctgcctacatgtttttactgattgtgctcggcttccctatcaactttctgactctgtatgtaacagttcagcacaaaaaattgaggactccgctgaattacatcctgttaaacctagccgttgccgacttgttcatggtactgggcgggtttacttccaccttgtacacaagcctgcacggctactttgtattcggccccacagggtgcaacctggaaggcttctttgccacactcgggggggagatagctttgtggtctctggtggtgctcgcgatcgagcgatatgttgtcgtttgtaagccgatgtcgaactttcgcttcggcgaaaatcacgccataatgggggtggcctttacctgggtgatggcacttgcatgtgccgcaccgcccctagcaggctggtcccgctatattccagagggacttcagtgttcttgtggcatcgattattacaccttgaagcccgaggtaaacaatgaatctttcgtgatttatatgtttgtggtgcatttcacaattcccatgatcattatcttcttttgctacgggcagcttgttttcaccgtgaaagaggcagctgcccagcagcaggagagtgccaccacacagaaggctgagaaagaggtgacccggatggttataataatggtaatcgcgtttctaatttgttgggtgccctatgcttcagtggccttctacattttcacacatcagggcagcaacttcggcccaatcttcatgacaattcccgcctttttcgcaaaatccgccgcgatatacaaccctgttatctatatcatgatgaacaagcagtttaggaactgcatgctgaccacaatctgttgcggaaagaatcccctgggcgacgacgaggcctccgctacagtttcaaagactgaaacctcccaggttgctcctgcc

SEQ ID NO: 18555 - DNA, 1044 bp, synthetic construct
  misc_feature 1..1044: note = source = /note="Description of Artificial Sequence: Synthetic coding sequence"
  source 1..1044: mol_type = other DNA
atgaacggtaccgaaggaccgaacttctacgtccctttttccaatgctactggtgtggtgagatcgccgttcgaatacccacagtactaccttgcagaaccatggcaattttccatgttggcagcatacatgtttcttctgatcgtgctcgggtttcccattaacttcctcacgttgtacgttaccgtgcaacacaagaagctgcgcaccccccttaactacatcctgcttaaccttgcagtcgccgacctgttcatggtgctgggaggatttaccagcactctgtacacctccctccatggttactttgtattcggtcctactggctgtaacctcgaggggttttttgcaacccttggtggcgaaattgcactgtggtcgctggtggtgctcgcaattgaacgttacgtcgttgtctgcaagcctatgagcaattttcggttcggagagaaccacgccattatgggcgtggcttttacttgggtcatggctctggcttgtgcggcacctcccctggccggttggtcccgttacatccctgaagggctccaatgcagctgcggcatagactactacacccttaagcctgaagtgaacaatgaatcgtttgtgatttacatgtttgtggtgcattttactattccaatgattatcatctttttctgttacggacagctcgtgttcaccgtgaaggaggcagcagcccaacagcaagaatccgccaccacccaaaaggccgaaaaggaagtgactagaatggtgattatcatggtgattgcattccttatctgctgggtcccttacgcatcggtggcattctacatattcactcaccaggggtcgaactttgggccgattttcatgactatacctgcatttttcgctaagtcggccgcaatctacaatccagtcatctacatcatgatgaataagcaattccggaactgtatgctgactactatttgttgtggaaaaaacccgctgggtgatgacgaggcctccgcaactgtgagcaagaccgaaacctctcaggtggcacctgca

SEQ ID NO: 18556 - DNA, 1044 bp, synthetic construct
  misc_feature 1..1044: note = source = /note="Description of Artificial Sequence: Synthetic coding sequence"
  source 1..1044: mol_type = other DNA
atgaacggcaccgagggaccgaatttctacgtcccttttagcaatgccacgggagtggtccgctcaccatttgaatatccgcaatactacctggcggagccctggcaattctcgatgctggcagcctacatgttcctcctgattgttctgggattcccaatcaacttccttactctgtacgttacggtgcagcataagaagttgcggaccccattgaactatattcttctgaatcttgccgttgcggatctgttcatggtgctgggaggatttaccagcactttgtataccagcctgcacggatacttcgtgttcggaccaaccggctgcaacctggaaggattcttcgcgaccctgggaggagagatcgctctgtggtcgctggttgtgctcgctatcgaaagatacgttgtggtgtgcaaaccgatgagcaatttccgcttcggagagaaccacgcgatcatgggcgtcgcattcacttgggtgatggcgctcgcctgcgcagcaccgcccctggcgggatggagccgctacatcccggaaggactccaatgtagctgcggaatcgactactacaccctcaaacctgaagtgaataacgagtcctttgtgatctacatgttcgtggtccatttcactatccctatgataatcatcttcttttgctacggacagctcgtctttactgtcaaggaagccgccgcacagcagcaggagtccgcgaccactcagaaggctgagaaggaagtcactcgcatggtgatcatcatggtcatcgctttcctcatttgctgggttccttacgcctccgtggccttttacatcttcacccaccagggaagtaatttcggaccgattttcatgaccatccccgctttctttgcgaagtctgcggccatctacaaccccgtgatctacatcatgatgaacaagcaatttcggaactgcatgctcaccactatctgctgtggcaagaaccctctgggcgatgacgaggcttcggcgacggtgtccaagactgaaaccagccaggtggctccggcc

SEQ ID NO: 18557 - DNA, 1044 bp, synthetic construct
  misc_feature 1..1044: note = source = /note="Description of Artificial Sequence: Synthetic coding sequence"
  source 1..1044: mol_type = other DNA
atgaatgggactgaagggccaaatttctatgtccctttcagtaacgcgacgggagtggtcaggtctcccttcgaatatccgcaatattacctcgctgagccctggcagtttagtatgcttgctgcttatatgtttcttttgatagtcttggggtttcctatcaatttccttacattgtatgttaccgtacaacataaaaaacttagaactccattaaactatattttgcttaatcttgccgttgcagatttgtttatggttcttggtggttttaccagtactttgtatacaagcttgcacgggtatttcgtttttggaccaacgggatgcaacttggaaggattcttcgccactttgggaggcgagatagctttatggtcgttggttgtcctcgccattgaaaggtatgtggttgtctgcaagcctatgtcgaattttcgcttcggagagaaccatgcaattatgggggttgcttttacatgggttatggctttggcttgcgctgcaccaccgcttgctggatggtccagatatattccagagggccttcagtgctcatgcggtattgattattacactctaaaaccggaggttaataatgaatcatttgtcatctatatgttcgtggtacatttcaccatccccatgattattatatttttctgttatggacagctcgtgttcaccgtgaaggaagctgctgcccaacaacaggagtccgcaacaacccagaaagctgagaaagaggttactagaatggtcattataatggtcattgcttttcttatatgctgggtcccatacgcctctgtggctttttacattttcactcaccaaggttctaacttcggtccaatttttatgacaatcccagcttttttcgcaaaatcagctgcaatttataatccagttatttatataatgatgaataagcaattccgtaactgtatgttgactactatatgctgcggaaaaaaccccttgggggatgatgaagcgtccgcaaccgtgtctaagactgaaaccagccaagtcgccccagca

SEQ ID NO: 18558 - DNA, 1044 bp, synthetic construct
  misc_feature 1..1044: note = source = /note="Description of Artificial Sequence: Synthetic coding sequence"
  source 1..1044: mol_type = other DNA
atgaacggcacggagggtccaaatttttatgtcccgttcagcaacgctaccggggtagtgagatccccgtttgaatacccacagtactatctggcagaaccctggcagttctctatgttggcagcttacatgttcctgctgattgtcttgggctttccaattaatttcctgacgctctatgtcaccgtgcagcacaagaagctgaggacacccttaaattacatccttctaaatttggcagtcgcggatttgtttatggttcttggcggctttacctccactctgtataccagtttgcacgggtatttcgtattcgggccaaccggatgcaatctggaagggttcttcgctaccctcggcggtgagatagctctgtggtccctcgtggtgttggctatagaacggtacgtcgtggtgtgcaagccaatgtccaactttcgatttggagagaaccatgccattatgggggtggccttcacttgggtgatggctctggcctgtgccgctccacccctggccgggtggtccaggtacatacccgaaggattacagtgtagttgtgggatcgactattacactcttaaacctgaggtgaataatgaatcattcgtaatttatatgtttgttgttcattttaccattccaatgataataatcttcttttgctacggacagctagtctttacggtaaaggaggctgcagcccagcaacaggagagcgccacgacacagaaggcagaaaaggaggtcaccagaatggtcatcatcatggtgattgcattcctgatctgctgggtaccatacgcttcagtggcattttacatctttacccaccagggaagcaacttcggccctatattcatgacgattccagcttttttcgcaaaatcggccgcaatctataatcccgtcatatacatcatgatgaacaagcaatttagaaactgtatgctcacaacaatctgctgtggaaagaaccccctgggggacgatgaggcgtcagccacagtcagtaaaactgaaactagccaggtagctccagcg

SEQ ID NO: 18559 - DNA, 1044 bp, synthetic construct
  misc_feature 1..1044: note = source = /note="Description of Artificial Sequence: Synthetic coding sequence"
  source 1..1044: mol_type = other DNA
atgaacggaaccgaaggacccaatttctacgtaccattcagcaatgcaaccggagtcgtcaggtcgccgtttgaatacccccagtactacctggcggagccatggcagttcagcatgctcgccgcttacatgtttttgctcatcgtcctgggatttccgattaacttcctgactctctacgtgaccgtgcagcataagaagctgcggaccccgttgaattacatcctgttgaacctcgcagtcgcagatctgtttatggtcttggggggatttaccagcactctgtatacttccctgcacggatacttcgtgttcggacccacgggttgcaaccttgaaggtttcttcgcgacgctgggaggcgagattgcgctctggtccctggttgtgctggcgatcgagagatacgtggtggtgtgtaagccgatgtccaacttccggttcggagaaaaccatgccatcatgggcgtggctttcacttgggtgatggccctggcatgtgcggcgcctccacttgcaggatggtcacgctacatcccagagggactccagtgctcctgcggcattgactactacactctgaaaccggaggtgaacaacgaatccttcgtcatctacatgttcgtggtccacttcacgatcccgatgatcatcatcttcttttgttatggacaactcgtctttactgtgaaggaggcagccgcgcagcagcaggagtcggccaccacccaaaaggcggagaaggaggtcactaggatggtgatcatcatggtgatcgcttttctgatctgctgggtgccgtacgcctcggtcgccttctacatcttcactcaccaaggaagcaatttcggaccaattttcatgaccatcccggccttcttcgcgaaatcggcggccatctacaatccggtgatctacataatgatgaacaaacaattccgaaattgcatgctcactaccatctgctgcggcaaaaatcccctcggtgatgacgaggcctcggcaactgtctcgaaaaccgaaaccagtcaggtggctcccgct

SEQ ID NO: 18560 - DNA, 1044 bp, synthetic construct
  misc_feature 1..1044: note = source = /note="Description of Artificial Sequence: Synthetic coding sequence"
  source 1..1044: mol_type = other DNA
atgaatgggacagagggacctaatttctatgtaccttttagtaatgcaacgggcgtagtgaggtcacccttcgaatatccacagtattacctggcggagccgtggcagttcagtatgctggcagcctatatgttccttctgatcgtactagggtttcctatcaacttcttgacattgtatgtgacagttcagcacaagaagcttaggactcctttgaactatatacttttgaacctcgccgtcgcggacctgttcatggtgctggggggattcacgtcaacactttacacttcgttacacggctacttcgtctttggcccaactggatgcaaccttgaaggcttcttcgctacactgggaggcgagattgcgctatggagtttggtggtgttggccatcgagcggtatgttgtcgtgtgcaaacccatgagcaacttcaggttcggggagaatcacgcgatcatgggcgtcgcctttacatgggttatggctcttgcttgtgcagcaccccccttggccggttggtcgagatatatacctgagggtctgcaatgctcctgcgggattgattactacacacttaaaccagaggtcaataacgagtccttcgtgatctacatgttcgtggttcactttaccattcccatgattatcattttcttctgctatggtcagctcgtgtttacagtgaaagaggccgcagcccaacagcaggaatctgcaacaacgcagaaagcagaaaaggaggtgactaggatggtcattataatggtgatagcctttctgatatgctgggttccctatgcatcagtagctttctacatcttcactcatcaggggagtaatttcggacctatcttcatgacaatccccgctttttttgccaagtcagccgctatctacaacccagtaatttacattatgatgaataaacaatttaggaattgtatgctaactactatttgctgcgggaagaatcctctgggggacgacgaggcctctgcaaccgtgtcaaaaaccgaaacgagtcaggtggctccggcc

SEQ ID NO: 18561 - DNA, 1044 bp, synthetic construct
  misc_feature 1..1044: note = source = /note="Description of Artificial Sequence: Synthetic coding sequence"
  source 1..1044: mol_type = other DNA
atgaacggtactgaggggcctaatttctacgttccattcagtaatgcaacgggagttgtgcggtcccctttcgagtacccccaatattatttggcagagccttggcagttctctatgcttgccgcctacatgttcctcctaatcgtactgggatttccaatcaacttcctgaccttatatgtcaccgtccaacacaagaaacttcggactcctcttaactatatcctgctgaacttagcggtcgctgatctgtttatggtgttgggcggctttaccagcactctttacacaagcctccatggctactttgttttcgggcctactggctgcaacctggaaggtttctttgctacactggggggcgaaattgcgctgtggtccctcgtggtcctggccatcgaaaggtatgtggtcgtgtgtaaacctatgagtaacttcaggttcggagagaaccatgccataatgggagtcgccttcacttgggtgatggcactggcctgcgccgccccaccactcgccggttggtccaggtacattcctgaaggcctgcagtgttcttgcgggatcgactactacacactgaaacccgaagtcaataatgagtcctttgtgatttatatgttcgtagtccactttacgattcctatgatcatcatctttttctgctatgggcagcttgtgttcaccgtcaaggaggcggctgctcaacaacaagaatccgccacaacacaaaaagccgaaaaggaagtcacaaggatggtgattatcatggttatcgcgttcctaatctgctgggtcccgtacgcctcggtggctttttatatcttcacgcaccaggggagcaacttcgggcccatttttatgacgatacccgctttcttcgcaaagtcagccgccatctacaatcccgtgatttacatcatgatgaataagcagtttagaaactgcatgttaactaccatttgttgtggcaagaatcccttaggggatgatgaagcctccgccaccgtgtccaagaccgagacgagccaggtggcaccagct

SEQ ID NO: 18562 - DNA, 1044 bp, synthetic construct
  misc_feature 1..1044: note = source = /note="Description of Artificial Sequence: Synthetic coding sequence"
  source 1..1044: mol_type = other DNA
atgaatgggactgaaggtcccaatttctatgtgcctttctccaatgcaactggagtggtgagaagcccgtttgaataccctcaatactaccttgccgagccttggcagttctccatgttggcagcttatatgtttctgcttattgtgctgggttttcctatcaattttctcaccctgtacgtgactgtccaacacaagaaacttcggaccccactgaactacatacttcttaaccttgctgtcgcagatctctttatggtgttgggtggattcacttcaactctgtacacctcgctccatggttacttcgtgtttggtccaaccggctgcaatctcgagggtttcttcgccacccttgggggagaaattgcactgtggagcctggttgttctggcaattgaacgttacgttgtggtgtgtaagccaatgagcaactttcgatttggagaaaatcatgcaattatgggagtggcatttacttgggtgatggcgctggcatgtgcggcaccgcctctggccgggtggtcgagatacatcccggaaggactccaatgttcctgtggaattgactactacactttgaagccagaggtgaataacgagtcctttgtcatctacatgtttgtggtgcatttcaccatccctatgattatcattttcttctgttatgggcagctcgtgtttacggtgaaagaagcagccgcacagcagcaagaatccgcaacgactcaaaaagcagagaaagaagtgactagaatggtgatcatcatggtgatcgcattccttatatgttgggtgccctacgcctcggtggccttctacatattcacgcatcaagggtcgaattttgggccaatctttatgacgatcccagcattcttcgcaaaatccgccgcaatatacaacccagtcatctacattatgatgaataaacaatttaggaattgtatgctgaccaccatttgttgcggcaagaatccactgggtgacgatgaggcatcagccaccgtatcaaagaccgaaacttcgcaggtcgcacctgcc

SEQ ID NO: 18563 - DNA, 1044 bp, synthetic construct
  misc_feature 1..1044: note = source = /note="Description of Artificial Sequence: Synthetic coding sequence"
  source 1..1044: mol_type = other DNA
atgaacggaactgaaggaccgaacttctacgtgccattctccaatgccaccggtgtggtcagatcaccgtttgagtatcctcagtactacctggcagagccatggcagttctccatgctggcagcatacatgtttctgcttattgtgttggggtttccaattaactttctgactctctacgtgaccgtccaacataagaagctccgcactccgcttaactatattctgcttaatctggcagttgccgatctcttcatggtgcttggaggattcactagcaccctttacacgtcacttcatggctattttgtgtttgggcccaccggatgtaaccttgagggatttttcgccaccctcggtggggaaattgctctgtggtcactggtcgtgctggcgattgaaaggtacgtggtggtgtgtaaaccaatgagcaatttcagatttggtgaaaaccatgctatcatgggagtggcgtttacgtgggtcatggccctcgcatgtgccgcacctcctcttgccggatggtcaagatacatcccagaggggcttcagtgttcgtgcggaattgattactacacgctgaagcctgaagtcaacaacgaatcattcgtgatttacatgtttgtggtgcattttaccattccgatgatcatcattttcttttgttacggacaactggtttttaccgtgaaggaagcagctgctcagcaacaagaaagcgcaaccactcaaaaagcagaaaaggaggtgactcggatggtgatcataatggtcatcgcctttctcatctgttgggtgccatacgccagcgtggcattctacattttcactcatcaagggtcgaacttcggcccaatctttatgaccatacctgcatttttcgcaaaaagcgcagccatctacaatcctgtcatttacattatgatgaataagcaattcaggaactgcatgcttactactatttgttgcggaaagaatccgcttggcgacgatgaagctagcgcaactgtgagcaagactgaaacttcccaagtggcgcctgcc

SEQ ID NO: 18564 - DNA, 1044 bp, synthetic construct
  misc_feature 1..1044: note = source = /note="Description of Artificial Sequence: Synthetic coding sequence"
  source 1..1044: mol_type = other DNA
atgaacggaacagaagggcccaacttctacgtcccattttccaatgccactggcgtggtgaggagccccttcgaatatccccagtactacttggcagagccttggcagttctcgatgctggcagcgtatatgtttctgttaattgtgttaggtttccctatcaatttccttactctgtatgtcacagtgcaacacaagaagttacggaccccgctgaactatattcttctcaacctagcagtcgccgacttgttcatggtccttggaggcttcacatccactctttacacatctctgcatggttactttgtgtttgggccgaccggttgcaatctagagggcttttttgccacccttggaggtgaaatcgcgctatggtcgttagttgtgttggctatcgaaagatacgtggtcgtgtgtaaaccaatgagtaatttcagatttggcgaaaatcacgccattatgggcgtagcgttcacttgggtgatggcattggcctgcgccgcccccccgctagcaggctggtcccgatacatccctgagggactccagtgtagctgtggcatcgactactatacgctgaagcccgaggttaataacgaatcatttgtaatttatatgttcgtcgttcactttaccatccccatgataatcatctttttttgttacggccagctggtctttacggtaaaagaggccgcagcccaacagcaggaatcagctaccacgcaaaaggcagagaaggaagttacgagaatggttatcataatggtgattgcttttcttatctgttgggtaccgtacgctagcgtggcgttctacatttttacacaccaaggttccaacttcggacccatcttcatgacaattccagccttcttcgcaaaaagcgccgcgatctacaacccagtcatctacattatgatgaacaaacaatttaggaactgcatgttaaccacaatttgctgcgggaagaatccccttggtgacgatgaagcctcggctaccgtgtcaaaaaccgagactagccaggtggcaccagct

SEQ ID NO: 18565 - DNA, 1044 bp, synthetic construct
  misc_feature 1..1044: note = source = /note="Description of Artificial Sequence: Synthetic coding sequence"
  source 1..1044: mol_type = other DNA
atgaacggaactgagggcccgaatttctacgttccattctcaaacgcgactggagtggtgaggtcccccttcgagtacccgcagtattacctggcagagccttggcagttttccatgctggccgcctacatgtttctgttgatcgtcctcgggtttccaatcaatttcttgaccctgtacgtgaccgtgcaacataagaagctgcggactccgctgaactacattctgctgaatctcgctgttgccgacctgttcatggttctgggaggattcacgagcacgctgtacaccagcctgcatggatactttgttttcggaccaaccggttgcaacctcgaaggattcttcgccacgctgggcggcgaaatcgctctgtggtcgttggtcgtcctcgccatcgagaggtacgtggtcgtgtgtaagcccatgtcgaacttcagatttggtgaaaatcatgccatcatgggagtggcttttacctgggtcatggccctggcatgcgcggccccgccgctggctggatggtcacgctacatcccggagggactgcaatgcagctgcgggatcgactactacactcttaagccagaagtcaataacgaatcgtttgtgatctacatgttcgtggtgcactttacgatcccgatgatcatcatcttcttttgctacggccaactggtctttaccgtgaaggaagccgcagcccaacagcaagaatccgcaacgacccagaaagcagagaaggaggtgacccggatggtcattatcatggtgattgcgttcttgatttgctgggtgccgtacgcttccgtcgctttttacatctttacccaccaggggagcaatttcgggcccatcttcatgactatccccgctttcttcgccaagtcggccgccatctataaccctgtgatttacattatgatgaataaacaattcagaaactgtatgctgactactatctgctgcggaaagaaccctctcggggacgacgaggcctctgcgactgtgtccaagaccgaaacctcccaggtggccccagct

SEQ ID NO: 18566 - DNA, 1044 bp, synthetic construct
  misc_feature 1..1044: note = source = /note="Description of Artificial Sequence: Synthetic coding sequence"
  source 1..1044: mol_type = other DNA
atgaacggaaccgaaggcccgaatttctatgtcccgttttcgaatgcgactggagttgtgcggtccccatttgaatacccgcagtactacctcgcagagccgtggcagttctccatgttggcagcatacatgtttctgcttattgtgcttggatttcccatcaactttctgaccctgtacgtgaccgtgcaacataagaaactccgtactcccctgaactatatcctgttgaacctggccgtggcggatttgttcatggtgttgggagggtttacctctaccctttacactagtctccatggatacttcgtctttggcccaacgggctgcaatcttgaaggatttttcgccaccctcggaggagaaattgccctctggagcctggtggtgctggctatcgagcgctacgtggtggtctgcaaacctatgtccaacttccgcttcggcgagaaccacgctatcatgggggtggcgttcacctgggtcatggccctggcatgcgccgctcctccccttgctggatggtctaggtacatccctgaagggctgcagtgctcgtgtggcatcgactactacaccctcaagccagaggtcaataacgagtcgttcgttatctacatgttcgtggtccacttcactattccgatgatcatcatattcttctgctacggtcagctggtgttcactgttaaggaagccgccgcccagcaacaagagtcggcaacgacccaaaaggctgaaaaagaagttactagaatggtgatcatcatggttatagctttcctgatctgttgggtgccttatgcgtcggtggcgttctacatcttcacgcaccagggatccaacttcggcccaatcttcatgaccattccggcgttcttcgccaagagcgcggccatctacaacccggtgatttacattatgatgaacaagcagttccgcaattgcatgctgacgactatctgttgcggtaagaatccattgggagacgatgaggcgagcgcaactgtaagtaagaccgaaacttcgcaggtcgctcctgcc

SEQ ID NO: 18567 - DNA, 1044 bp, synthetic construct
  misc_feature 1..1044: note = source = /note="Description of Artificial Sequence: Synthetic coding sequence"
  source 1..1044: mol_type = other DNA
atgaatggtactgagggcccaaatttttatgttccattcagtaatgccactggcgtggtacgctcaccgtttgaataccctcagtattatctcgcagaaccttggcaattctccatgctggccgcatatatgtttctcctgatagttctaggctttccgattaactttctgacattgtatgttacggtgcagcacaagaagttacggacgcccctgaattatatcctgctgaatctagcagtggctgacctctttatggtactggggggttttacgtctaccctctacacctccttgcacggctatttcgtcttcgggcccaccgggtgcaatctggaaggattctttgccaccctcggaggtgagattgctctgtggagcttagtcgtcctggccatcgaacgatacgttgtggtttgtaagcccatgtctaacttccgttttggcgagaatcacgcaatcatgggcgtcgcctttacttgggtgatggccttggcctgtgctgcaccccctctcgccggatggagcagatacattcctgagggtctgcaatgctcttgcggcattgactactacactctcaagcccgaggtgaacaatgaaagttttgtcatctatatgttcgttgtacacttcactattcctatgatcattatcttcttttgttatggtcagttggttttcactgttaaggaagcagctgcacagcagcaagaatctgccactacccagaaagccgagaaggaagtgacccggatggttatcattatggtcattgccttcctcatctgctgggttccctacgcctctgtagccttttacatttttactcaccagggctccaacttcggaccaattttcatgaccatccccgccttcttcgccaagtctgcagctatttacaatccggtgatctacattatgatgaataagcagtttcgcaattgcatgctgacaaccatctgttgcggcaaaaatccgctcggagacgacgaggcctccgcgaccgtttctaagacagaaacctcacaagtggctcccgcc

SEQ ID NO: 18568 - DNA, 1044 bp, synthetic construct
  misc_feature 1..1044: note = source = /note="Description of Artificial Sequence: Synthetic coding sequence"
  source 1..1044: mol_type = other DNA
atgaatggaacagagggtcctaacttctacgtgccattctccaacgccacgggcgtggtgaggtccccttttgaatatccacagtattacctagcagaaccttggcagttcagcatgcttgccgcctacatgttcttactcatagtccttgggtttccaatcaatttcctgactctgtatgtgactgtgcagcacaagaaactgcggacccctctcaactacatcctacttaacctggcggtggcggatctgttcatggtactgggtgggttcacgagcactctttataccagccttcacgggtactttgtttttggcccaactgggtgcaacctggaagggttctttgccactcttgggggggaaatagcactttggtcactcgtggtactagcaattgagcgctacgtggtggtttgcaaaccaatgtctaattttcggttcggggagaaccacgcaataatgggggttgccttcacctgggtaatggccctagcctgtgccgcacccccccttgccgggtggagtagatacataccggaaggtctgcagtgttcatgtggtattgactattacaccctcaagcctgaggtcaacaacgaatcttttgtgatttacatgtttgtggtccacttcactattcccatgataataatttttttttgctacggtcagctcgtgtttactgtaaaggaggcagctgctcagcagcaggagagtgctacaacacaaaaagccgagaaagaggtcactcgcatggtgatcattatggtgattgctttcctcatttgctgggtaccctatgcctccgttgcattttatattttcacacaccagggaagcaatttcggaccgatatttatgacgattccagcattcttcgccaaatccgctgcgatctataaccctgttatctatatcatgatgaacaagcagtttcgcaattgcatgctaactactatctgttgcggcaaaaaccctttgggggacgatgaggccagtgctaccgtctccaaaacggagactagccaggtagcacctgca

SEQ ID NO: 18569 - DNA, 1044 bp, synthetic construct
  misc_feature 1..1044: note = source = /note="Description of Artificial Sequence: Synthetic coding sequence"
  source 1..1044: mol_type = other DNA
atgaacggaacggaggggcccaacttttatgtgcccttctctaatgcaaccggagttgttagaagcccctttgaataccctcaatactatctcgccgagccctggcagttcagtatgcttgcggcatacatgtttctccttatcgtgctagggttcccgattaattttctgacactctacgtcactgtacaacacaagaaactgaggacccccctgaactacatccttctaaatttagcagtcgccgatctctttatggtcttgggcgggttcacctcaactttgtacacatctctgcacggttacttcgtgtttggcccaactggctgtaacttagagggattttttgctacgcttggaggagagattgccctctggagtctggtggtcctggctatcgagagatatgtggtcgtttgcaagccgatgtcgaacttccgctttggagagaatcatgcaatcatgggggtcgcgtttacttgggtcatggcactcgcctgcgccgctccgcctctggctgggtggagccgatacattcctgagggactgcaatgttcctgtggtatcgattactacacattaaagccagaagttaataatgaatcattcgtcatatatatgtttgtggtacatttcactatacctatgatcataatttttttctgctatggccagctggtgtttacagtcaaggaagcggcggcacagcaacaagagagcgccacgacccagaaagccgagaaggaagtcacaagaatggtgattattatggttattgctttcctgatctgttgggttccgtatgcctcagttgctttttatatcttcacccaccaggggtccaactttggacctattttcatgacaatccccgcgttctttgctaaatccgccgcgatatacaatcccgtgatttatatcatgatgaataaacagttccgaaactgcatgcttaccacaatatgctgcggaaagaatcctctgggcgacgacgaagcatctgcaaccgtctctaagacagaaactagccaggttgcccccgcg

SEQ ID NO: 18570 - DNA, 1044 bp, synthetic construct
  misc_feature 1..1044: note = source = /note="Description of Artificial Sequence: Synthetic coding sequence"
  source 1..1044: mol_type = other DNA
atgaacggaactgaggggcccaatttctacgttcctttctcaaatgcaactggcgtggtgcggtcgccattcgagtacccgcagtactacctggcggaaccttggcagtttagcatgctggccgcgtacatgttcttgctgatcgtgctgggcttcccaatcaatttcctgactctgtacgtcaccgtccagcacaagaaacttcgcacccccctcaactatatacttctgaatctggccgtggcagatctcttcatggttttgggaggctttacctccactctttacacttcactgcatggatacttcgtgtttggtccgactgggtgtaatcttgaaggcttctttgccaccctcggaggagaaatcgccctctggtcactggtggtgctggccatcgagcggtacgtggtggtgtgcaagcccatgtcaaacttccggttcggggagaaccacgcaatcatgggtgtcgctttcacctgggtgatggccctggcttgcgccgctccgccgctggctgggtggtcccgttacatcccggaaggccttcagtgttcgtgcggaatcgactactatacccttaaaccagaagtgaacaacgagtcctttgttatctacatgttcgtggtccatttcaccatcccgatgatcattatcttcttctgctacggccagttggtctttacggtcaaagaagctgccgcgcagcagcaggagtcggccactacccagaaggcggaaaaagaagtcaccagaatggtgatcatcatggtgatcgccttccttatctgctgggtcccgtacgcctctgttgccttctacatcttcacccaccaaggatcgaatttcggacccatcttcatgaccatccctgcgttctttgcaaaatcggcggccatctacaaccctgtgatctacattatgatgaataagcaattcaggaactgcatgctgaccaccatttgctgcggcaagaatccgctcggggacgatgaggcctcggccaccgtgtccaagaccgaaacttcccaagttgcgcctgct

SEQ ID NO: 18571 - DNA, 1044 bp, synthetic construct
  misc_feature 1..1044: note = source = /note="Description of Artificial Sequence: Synthetic coding sequence"
  source 1..1044: mol_type = other DNA
atgaatggtaccgaaggcccaaacttttacgtgccatttagcaacgcaactggtgtggtgcgctccccatttgaataccctcaatactatctggcagaaccttggcagttttcgatgctggcagcatacatgttcctccttattgtcctgggttttcccatcaatttccttacgctgtacgtgactgtgcagcacaagaagctgcgaactcccctcaattacattctgcttaatctcgccgtggcagacctctttatggtactgggaggttttacttcaactctctacaccagccttcatgggtacttcgtctttggcccaactggttgtaacttggagggattctttgctactcttggtggagaaatcgcgctgtggtcactggtcgtgctggccattgaaaggtacgtggtagtgtgtaagcctatgtcgaacttcagattcggagaaaaccatgcgattatgggtgtcgcatttacttgggtcatggcactggcatgcgccgcaccccctctggccggttggtcaagatacataccggagggcctgcagtgcagctgtggcattgactactacaccctcaagcctgaagtgaataacgaatcattcgtgatttacatgtttgtggtgcactttaccatccctatgataatcatattcttttgttacggccagctcgtttttaccgtcaaagaggcggcggctcagcagcaggaatcggcaaccactcaaaaagcagaaaaggaagtcaccaggatggtgattatcatggtcatagcttttttgatctgctgggtgccttacgcatccgtggcattttacatctttacgcatcagggatccaactttgggcccatattcatgactatacctgcgtttttcgcaaagtcggccgccatatacaaccctgtcatttacatcatgatgaacaagcaatttcgcaattgtatgcttactaccatttgctgtgggaaaaatccactcggagatgatgaggcttctgccaccgtgagcaaaactgagacttcccaggtggcccccgca

SEQ ID NO: 18572 - DNA, 1044 bp, synthetic construct
  misc_feature 1..1044: note = source = /note="Description of Artificial Sequence: Synthetic coding sequence"
  source 1..1044: mol_type = other DNA
atgaacgggaccgaagggccgaacttttacgtccccttttccaacgccaccggggtcgtgcgatctcccttcgagtatccacagtattatctcgccgaaccatggcagttttcaatgcttgccgcgtacatgttcttgttgatcgtccttggcttccctatcaattttctgaccctgtatgtcactgtgcagcacaaaaaactgagaaccccgctaaattacatactgctcaacttagccgttgccgaccttttcatggttctcgggggctttaccagtactctgtacacttcgctgcatggatatttcgtctttggaccgactggttgcaatctcgaaggctttttcgcaacattggggggagagatcgcattatggagcctggttgtcttggccatcgaacggtatgtcgtggtatgcaagccaatgagcaacttccgcttcggggagaaccacgcgatcatgggggtagcatttacctgggtgatggctttggcctgtgccgccccaccactcgctggctggtcaaggtacatccctgaggggcttcagtgcagttgcgggatcgactactacacactcaagccggaggtcaacaacgagagcttcgtaatttatatgtttgtggttcatttcaccatccccatgatcatcattttcttctgttatggacagttggttttcaccgttaaggaagctgcggcccagcaacaggagtccgcaacaacccagaaggccgagaaagaggttacacgtatggtcatcatcatggtgattgctttcctgatctgctgggtcccctatgcaagcgtagccttctacatcttcacccaccaggggagcaactttggcccgatctttatgacaattcccgcgtttttcgccaagtccgcagcaatttataatcccgtaatctacattatgatgaataaacagtttcgcaactgcatgctcaccaccatatgttgcggcaagaaccccctgggggatgacgaggcgagcgccactgttagcaagactgagacgtcccaggtcgccccagct

SEQ ID NO: 18573 - DNA, 1044 bp, synthetic construct
  misc_feature 1..1044: note = source = /note="Description of Artificial Sequence: Synthetic coding sequence"
  source 1..1044: mol_type = other DNA
atgaatgggacagaagggcccaacttttatgtgccattcagtaatgccactggggtagtccggtctcccttcgaatacccacaatattatctggctgaaccctggcagttctcaatgctcgccgcttacatgtttttacttatagtgctcgggtttccgataaatttcttgacactgtacgtcactgtgcagcataaaaaattacgcacacctctgaattatatcctcctcaacctggccgtggcggatctttttatggtcctcggagggttcacatcaacactctatacttcattacatggatatttcgtgtttgggcctacaggatgtaatctcgagggattctttgctactctcgggggggaaatcgcactgtggtctctcgtggtcctcgccattgaaagatatgtagtggtgtgtaaacctatgagtaattttcgcttcggagaaaaccacgccataatgggggttgccttcacatgggtgatggccctcgcatgtgcagctcctcctcttgctggatggtcccggtacatcccagaagggctgcagtgctcctgtggaattgattactatacactgaaaccagaggtcaataatgaatcttttgttatatacatgtttgtggttcacttcacaatccccatgataatcatctttttctgttacggacagctcgtgttcacagttaaagaagcagccgctcagcagcaggaatcagccacaactcagaaagctgaaaaagaagttacgcggatggtgataattatggtgatcgctttcctaatctgctgggtgccatacgcctctgtagctttctacattttcactcaccaggggtcaaatttcggacccatcttcatgacaatccccgctttttttgccaagtccgcagccatatataaccccgttatatatattatgatgaacaaacagttcaggaattgcatgctcacaacaatttgttgtggaaaaaaccccctcggagacgatgaagcttccgctacagtgtcaaaaactgaaacatctcaggtcgccccagca

SEQ ID NO: 18574 - DNA, 1044 bp, synthetic construct
  misc_feature 1..1044: note = source = /note="Description of Artificial Sequence: Synthetic coding sequence"
  source 1..1044: mol_type = other DNA
atgaacggaaccgagggaccgaatttctacgtgcctttcagcaacgcgactggagtcgtgcgctccccattcgaatacccccagtactacctggccgagccatggcaattctcaatgctggcggcatatatgttcctgctgatcgtgttgggattcccgattaactttctgaccctgtacgtgaccgtccaacacaagaagctgagaactccgctgaactacatcctgcttaatctggccgtcgccgacctgttcatggtgctgggagggttcacttcgactctctacacttccctccatggatactttgtgtttggaccaaccggctgtaacctcgaggggttcttcgccactctgggtggagaaatcgctctctggtcgctggtggtcctggccatcgagcgctacgtggtggtgtgcaagccgatgtcgaactttaggttcggcgaaaatcacgcgattatgggcgtggcctttacttgggtgatggctctggcctgcgccgcccctcccttggcgggatggtcgcggtacatcccagaagggctgcaatgttcgtgtggaatcgattactacactctgaagcccgaagtgaacaacgaatccttcgttatctacatgttcgtcgtccattttacgatccctatgatcattatcttcttctgctacggccagcttgtctttactgtgaaagaagccgccgcacaacagcaggaatccgccaccactcagaaagcggaaaaagaggtgaccaggatggtgatcattatggtgattgccttccttatctgctgggtgccttatgcgagcgttgcattttacatcttcacccaccaaggatcaaacttcggcccaatcttcatgaccatacctgctttcttcgccaagtcggccgcgatctacaaccctgtcatctacattatgatgaacaagcagtttcgcaactgtatgctcaccactatatgttgtggcaagaatccgctgggagacgacgaagcatcggccactgtgtcaaaaaccgaaaccagccaagtggctccagcc

SEQ ID NO: 18575 - DNA, 1044 bp, synthetic construct
  misc_feature 1..1044: note = source = /note="Description of Artificial Sequence: Synthetic coding sequence"
  source 1..1044: mol_type = other DNA
atgaatggaacagagggaccaaacttctatgtacccttctcaaacgctactggtgtcgtaagaagtcccttcgagtatcctcagtattaccttgctgagccctggcaattctccatgctcgccgcatatatgttcttgcttattgttctaggcttccctattaacttcctcaccctgtacgtgacagttcagcataagaagttgagaacccctctgaattatatcctgcttaatctagctgtcgccgatcttttcatggtcctaggtggctttaccagcacgttgtacacgtctttacatggatactttgtgttcgggcctacaggctgtaatctggaggggtttttcgccaccctcggaggtgaaatcgccctctggagcctggtggtcttggccatcgaaagatacgttgtggtgtgtaaacctatgtcgaactttaggtttggcgagaatcacgcgatcatgggtgtcgcatttacctgggtgatggcgctagcgtgtgccgctccccctttggcgggatggtcccggtatatcccggaggggctgcagtgttcttgtggtatagattattacacactgaagccagaagtgaacaacgagtccttcgtgatctacatgtttgtggtccacttcacaataccgatgatcataattttcttttgttacggacaattagtgtttacagtgaaggaggccgctgcacagcagcaggagagtgcaactactcagaaggccgaaaaggaagtgacccgaatggtaataataatggttattgctttcctcatctgctgggtgccctacgcgagcgtcgcgttttatattttcacccaccagggcagtaatttcgggccaatctttatgactatcccggccttcttcgctaagagcgcggccatttataaccctgtgatttatatcatgatgaataaacaatttagaaattgcatgctcacaacaatctgttgtggcaagaatcctttgggagacgatgaagcttcagccactgtgtccaaaacggaaacttcccaagttgcccccgct

SEQ ID NO: 18576 - DNA, 1044 bp, synthetic construct
  misc_feature 1..1044: note = source = /note="Description of Artificial Sequence: Synthetic coding sequence"
  source 1..1044: mol_type = other DNA
atgaatggtacagaaggccctaatttttacgttccgttctcaaacgcaacaggcgtggtgcgctcaccattcgaatacccccagtattatcttgctgaaccttggcagtttagcatgctggctgcttacatgttcctgttgattgtccttgggtttcctatcaacttcctcactctctatgtgacggtccaacacaaaaagcttagaactcctctcaattatatcctgcttaacttggccgtggctgatctgtttatggtactcgggggctttacctctactctgtacacatctttgcacggatactttgtgtttgggccaactggctgtaacctggaggggttttttgcaaccctcggcggggaaatcgctctgtggtctctagtggtactggctatcgagcgctacgtggtggtatgcaagcctatgagcaacttcaggtttggtgaaaatcatgccatcatgggggtcgcatttacgtgggtaatggctctggcatgcgccgccccacctcttgccggatggtcaaggtacatacccgagggtttgcagtgctcctgtggtattgattactacacgcttaagcccgaggttaacaacgaaagcttcgtgatttacatgttcgtggtgcatttcacaatccccatgatcataatttttttctgttatggccagctggtcttcactgtcaaagaggctgccgcccagcagcaagaatccgctacgacccagaaggcagaaaaggaagtgacaaggatggtcataatcatggtaattgcgtttctcatctgctgggtaccatacgcaagtgtcgcgttctatattttcacccaccagggatcgaattttggtcccatatttatgacaatacctgccttctttgccaaaagcgctgctatttacaacccagtgatttacatcatgatgaacaaacagtttaggaattgcatgctgacgactatctgctgcggaaaaaaccctttgggcgatgatgaggccagcgcgaccgtgtcaaaaaccgagacaagccaggttgcaccggca

SEQ ID NO: 18577 - DNA, 1044 bp, synthetic construct
  misc_feature 1..1044: note = source = /note="Description of Artificial Sequence: Synthetic coding sequence"
  source 1..1044: mol_type = other DNA
atgaatggaaccgaaggacctaacttctacgtgccattttcaaacgccacgggagtggtgaggagcccgttcgagtacccccaatactacctggccgaaccgtggcagttctcgatgctggcggcttacatgttcctgctgatcgtgctcggattccctatcaacttcttgacgctctacgtcactgtgcagcacaaaaagctgaggacgccgctgaactacatcctgctgaacctggcggtcgccgatctcttcatggtgctgggcggcttcacctcaaccctctacacgtcgctccacggttacttcgtctttggcccgactggatgcaacctggaaggatttttcgcgaccctgggcggagaaatcgcactgtggtcattggtcgtcctcgcgatcgagagatacgttgtggtgtgcaaaccaatgagtaacttccgattcggcgagaaccacgcaattatgggagtcgcatttacctgggtgatggcccttgcatgcgctgctcctccactcgctggatggtcacgctacatcccggaaggactgcaatgcagctgcgggatcgattactataccctcaaacctgaagtcaacaatgaatcgtttgtcatctacatgtttgtggtgcatttcaccatccctatgatcattatctttttctgctacggtcagctcgtgttcaccgtgaaggaggccgcagcgcaacagcaggaatcggcaaccacgcaaaaagccgaaaaggaagtgactagaatggtgattatcatggtgatcgccttcctgatctgctgggtgccgtacgctagcgtcgcattttacatcttcacccaccaagggtcgaactttgggcccattttcatgactatcccggccttctttgcgaaaagcgccgccatctacaatcctgtgatttacatcatgatgaataagcaatttcggaactgtatgttgactaccatttgctgcgggaagaacccgcttggagatgacgaagcgtccgcaaccgtgtccaagaccgaaacttcacaagtggctccggcg

SEQ ID NO: 18578 - DNA, 1044 bp, synthetic construct
  misc_feature 1..1044: note = source = /note="Description of Artificial Sequence: Synthetic coding sequence"
  source 1..1044: mol_type = other DNA
atgaatggaactgagggacctaatttctacgtaccattctccaacgccaccggggtcgttcgtagcccatttgaatatccgcagtactacctggctgaaccatggcaatttagtatgctggccgcctatatgttcctgctgatagtcctcggttttcctataaacttcttaaccttgtatgttaccgtccagcataagaagttgcggactcctctgaattacatcctgctgaacctggcagtggccgacctattcatggtactgggtggctttaccagtaccctgtatacaagtctgcacgggtactttgtgttcggcccgactggctgcaatctggaaggctttttcgctaccttgggaggagagattgccctgtggtccctcgtcgtgctggccatcgagcgctacgtggtagtatgcaagccaatgtcgaatttcagatttggcgaaaaccatgcaatcatgggcgtggcgtttacttgggtgatggcccttgcctgcgctgctcctcctttagccggctggtcacggtatatccccgaaggactccagtgctcgtgtggtattgattattatacccttaaacccgaagtaaataacgagtccttcgttatatacatgtttgtggtgcatttcaccattcctatgataatcatatttttctgttacgggcagctggtgttcacggtgaaagaagctgctgctcagcagcaggaatctgctaccacacaaaaggctgagaaggaagttactagaatggtcatcatcatggtgatcgcctttttgatttgctgggtgccttatgcatccgtagccttttatatattcacacatcagggttccaatttcggacccattttcatgacaatccccgcctttttcgccaaatcggctgccatatataatcctgtgatctacatcatgatgaacaaacagtttcgcaactgcatgttgaccaccatatgttgcggtaaaaacccccttggagatgatgaggcctccgcaactgtatccaaaacagaaaccagtcaggttgccccagct

SEQ ID NO: 18579 - DNA, 1044 bp, synthetic construct
  misc_feature 1..1044: note = source = /note="Description of Artificial Sequence: Synthetic coding sequence"
  source 1..1044: mol_type = other DNA
atgaatggtactgagggccccaatttttatgtcccattctccaatgccacgggagtcgtgaggagtccatttgaatacccacaatattacctggcagaaccatggcagttctccatgctggcggcctacatgttcctcttgatcgttctggggttcccgatcaacttcctgacactctatgtaacggtacagcataaaaaattgagaactcctttgaactacattctgttgaatctggcagtcgcagatctgtttatggtcctcggaggatttacctccaccctctacacaagtctgcacgggtatttcgtgttcggtcccaccggctgtaacctggaaggtttcttcgccacgctgggtggggagatcgccctctggagcctggtcgttttggctattgagcggtacgtggtggtgtgtaagccaatgtctaattttcggtttggagagaaccacgccataatgggcgtggcgttcacatgggtaatggctctggcttgtgcagccccacccttggccgggtggagtcgatacatccctgaaggactgcagtgctcttgtggaatcgattattatacacttaagcctgaggtgaacaacgaaagttttgtaatttacatgttcgtggttcacttcaccatacctatgataatcatctttttctgctatggtcagctggtgtttaccgttaaagaggctgctgcacagcagcaggagtcagcgaccacccaaaaagcagagaaggaagtgacaagaatggttatcatcatggtcatcgctttcttgatatgctgggttccctatgccagcgtggcattctatatcttcacccatcaaggcagtaacttcgggccaatctttatgacgatccccgcctttttcgccaagagcgctgcaatttataatcccgttatttatattatgatgaataagcagtttcgaaattgtatgctgaccacgatttgctgtgggaagaaccccctgggcgatgatgaagcgtctgcgacggtgagcaagactgagacaagtcaggtcgcaccagcc

SEQ ID NO: 18580 - DNA, 1044 bp, synthetic construct
  misc_feature 1..1044: note = source = /note="Description of Artificial Sequence: Synthetic coding sequence"
  source 1..1044: mol_type = other DNA
atgaacggtaccgaaggccctaacttctacgtgcctttttcaaatgctacgggagtcgtgaggtccccattcgagtacccgcaatactacttggccgaaccatggcagttttcaatgcttgcggcctacatgttcctgctgatcgtgctgggctttccgattaacttcctcaccttgtacgttactgtgcaacataagaaacttcggaccccgctcaattacatcctgctgaacctggccgtcgccgatctcttcatggtgctcggcggattcacctcgactctgtatacttccctgcatgggtatttcgtctttgggccgactggctgtaacctggagggattctttgcgaccctgggcggtgaaatcgccctgtggtccctcgtggtcttggccatcgagcgctacgtggtggtttgcaagccgatgtcgaactttagattcggagagaatcacgcgatcatgggggtcgctttcacttgggtcatggcgctcgcatgcgcagcaccgccacttgcaggctggagccgctacataccagaaggactgcagtgctcgtgtggaatcgattactatacccttaaacctgaagtgaacaacgaatcattcgtgatctacatgtttgtagtgcacttcaccatcccaatgatcatcatcttcttctgctacggacagttggtattcactgtgaaagaggccgccgcccaacaacaggagtcagcaaccacgcagaaggcagagaaggaagtgacccgcatggtgattatcatggtgatcgccttccttatatgctgggtgccgtacgccagcgtggccttttacatcttcactcaccaggggagcaatttcggccctatctttatgaccatccctgcctttttcgcgaagagcgcggcgatctacaatccggtgatttacatcatgatgaacaaacaattcagaaactgcatgctgactaccatctgctgtggaaagaatccgctcggagacgacgaggcctctgccaccgtgtcaaagactgaaacctcgcaggtcgcgcctgcg

SEQ ID NO: 18581 - DNA, 1044 bp, synthetic construct
  misc_feature 1..1044: note = source = /note="Description of Artificial Sequence: Synthetic coding sequence"
  source 1..1044: mol_type = other DNA
atgaacggcaccgagggtcccaatttctatgtaccctttagcaatgcaactggtgtcgtgcggtctccctttgagtacccccagtattaccttgcagagccatggcagttctccatgttagccgcttacatgttcctgctgattgttttggggttcccgatcaactttttgacgttgtacgtcaccgtgcagcataagaagctgcggacgccgctgaactatatccttctcaaccttgccgtagcagatttgttcatggttttaggtggttttacgtccaccttgtacacctcgcttcacggatacttcgttttcggcccgacgggctgcaatctggagggcttttttgccacgctgggtggcgaaatcgcactttggagtttggtcgttttggcgatagaacgctacgtggtggtctgcaagccgatgtccaactttcgctttggcgagaatcatgccattatgggagtcgcgttcacgtgggtgatggcactggcctgcgcagcgccacctctagcaggttggtctcgatacatcccggagggcttgcagtgttcgtgcggtatagattattatacgctgaaacccgaggtgaacaatgagtcgttcgtgatctacatgttcgtggttcacttcactatcccaatgataatcatatttttttgctatggccagctggtgttcacagtgaaagaagccgccgcgcaacagcaggagagcgcaactacccagaaggctgagaaggaggtgacacgaatggtgattataatggttattgcgtttctgatttgctgggtaccctacgcctcggtggccttctatatatttacacaccaaggaagcaatttcgggcctattttcatgacgatcccggccttctttgcgaagagcgccgcgatctacaacccggtgatctatattatgatgaacaagcaattccggaattgtatgctgacgaccatttgctgcggaaagaatcccctgggagacgacgaggccagtgcaacagtttctaagaccgagacatcacaggtggcccccgca

SEQ ID NO: 18582 - DNA, 1044 bp, synthetic construct
  misc_feature 1..1044: note = source = /note="Description of Artificial Sequence: Synthetic coding sequence"
  source 1..1044: mol_type = other DNA
atgaatgggaccgagggaccaaacttctacgtgccatttagcaatgctaccggggttgtacgttctccatttgaatatccgcaatactacctggccgaaccatggcagttttcaatgttggcggcttatatgttcctgttaatagtgctggggtttccaatcaatttcctgaccctatatgtgacagttcaacacaagaagctccgcactcctttgaactacattctgctcaaccttgctgttgccgacctgttcatggttctgggtggcttcaccagtacactctatacttctctgcatgggtacttcgtcttcggccctacaggctgcaacctggagggatttttcgcgacgctcggcggcgaaatagccctctggagtcttgtggtcctcgccattgaacgctatgtggttgtgtgtaagcctatgagtaacttcagatttggagaaaatcatgccatcatgggagtagcattcacatgggttatggctctggcctgcgccgccccccccctggcaggctggagtcggtacatccccgaaggcttgcagtgttcttgcggcatcgattactacaccttaaaaccagaggtgaacaacgagagctttgtgatctacatgtttgtggtccatttcaccatacccatgataatcatcttcttctgctacggtcaattagtgttcacagtgaaggaggctgcagctcagcagcaggagtccgctacgacccagaaggcggagaaagaagtaacacgtatggtgattatcatggtgatagcttttctgatttgttgggttccctatgctagcgtggccttttacattttcacacatcagggaagtaacttcggccctatttttatgacaattccagcgttttttgctaagtcggcggccatttacaaccccgtgatttatatcatgatgaacaagcagttcagaaattgtatgctgaccacaatctgctgtggaaagaatcctctgggcgacgacgaagcttccgctacagtttccaagaccgagaccagtcaggtggcacctgca

SEQ ID NO: 18583 - DNA, 1044 bp, synthetic construct
  misc_feature 1..1044: note = source = /note="Description of Artificial Sequence: Synthetic coding sequence"
  source 1..1044: mol_type = other DNA
atgaacggaacagagggacccaacttttacgtgccattttctaatgcgactggggtggtccgttccccgttcgagtacccgcagtactatctggctgagccttggcaattttcaatgctcgcagcctatatgtttctcctcattgtgttgggcttcccaatcaactttctgacattgtatgtaactgtgcagcacaaaaagttgcgcacgccactgaactacatactgctcaacctggctgttgcggatctgttcatggtactgggaggattcactagcaccctgtacacttctctccacggttactttgtatttggtccgaccgggtgcaatctcgagggatttttcgccactttaggtggagaaatcgccctttggtcactggttgtgctggctatcgaaaggtacgtcgtggtctgcaagcctatgtctaattttcgattcggggaaaatcacgccatcatgggagttgcattcacctgggtaatggcccttgcatgtgcagctcctccgctcgcagggtggagcagatatattccagaggggctccagtgcagctgcgggatcgattattacacccttaagccggaagtcaataatgaaagcttcgttatctacatgtttgtggttcacttcaccatcccaatgataatcatctttttttgctacgggcagctggtgttcactgtaaaggaggccgcggcccagcaacaagagagcgccacaacccagaaggccgaaaaggaggtcacacgtatggtgattattatggttatcgcgttcctgatctgctgggtgccctatgcctcagttgcattttacattttcacccatcagggcagcaacttcggtcccatcttcatgacaatccccgcatttttcgctaaaagtgctgcgatttataatcccgttatctatatcatgatgaataaacagtttcggaactgcatgctcacaaccatttgttgcgggaaaaatcccttaggcgatgacgaggcctctgcaacggtttctaagacagaaacctcgcaggtggcccccgct

SEQ ID NO: 18584 - DNA, 1044 bp, synthetic construct
  misc_feature 1..1044: note = source = /note="Description of Artificial Sequence: Synthetic coding sequence"
  source 1..1044: mol_type = other DNA
atgaatggaaccgaggggcctaatttttatgtgccattctcgaacgcaacaggggtggtaaggagtcctttcgaatatcctcaatattacctggctgagccgtggcagttctctatgttggccgcctatatgttccttttgatcgtgctggggtttccgatcaactttctcactttatacgtaacagtccagcataagaaactcagaactccgttaaactacattcttctgaacctcgctgtcgccgacctttttatggttctgggtgggtttacgagcacgttgtacacgtcacttcatggatactttgtattcggcccaaccggctgtaacctggaaggctttttcgcgacacttggtggcgagatcgccctttggtcactggtcgtgctcgcaatagaaaggtatgtcgttgtttgtaaacctatgtccaattttcggttcggtgagaaccatgctattatgggcgtcgcatttacctgggttatggccttggcctgcgccgcgccaccgttggctggttggagccgctacataccagaaggactgcagtgctcctgtggcattgactactacacattgaagcctgaagtcaacaatgagagcttcgtgatctatatgttcgtggttcactttacaatccctatgatcattattttcttctgttacgggcaactggttttcactgtgaaagaagccgccgcacagcaacaagagagcgcaactacccaaaaagccgagaaagaggtcacacggatggtcataatcatggtcatcgcattccttatatgttgggttccctacgcttccgtggccttttatatattcacgcatcagggatccaacttcgggcctatcttcatgaccatcccagctttcttcgccaagagtgccgccatctataatcctgttatctacattatgatgaacaagcaattccgcaattgcatgcttactacaatttgttgcggcaaaaatccgttgggcgatgatgaggcctctgctaccgtctccaagactgagacctctcaggtcgcaccagcc

SEQ ID NO: 18585 - DNA, 1044 bp, synthetic construct
  misc_feature 1..1044: note = source = /note="Description of Artificial Sequence: Synthetic coding sequence"
  source 1..1044: mol_type = other DNA
atgaatgggactgaaggacccaatttctacgtgcccttctccaatgcaaccggcgtggtgcgctcccccttcgagtatccccagtattatctggcagagccttggcagttcagcatgctggcagcctacatgtttttacttatagtactgggctttcctataaatttccttaccctgtacgtaacggtgcaacacaaaaagctgaggacaccgctgaactacatactgctgaacctggctgtggcagatcttttcatggtccttggaggtttcacgtctaccttgtacacgagcctgcacggatactttgtgttcggccccaccggctgcaatctggaaggcttctttgctaccctcggaggagagatcgctctgtggtcactcgtagtgttggctatcgagcgatatgttgtagtctgcaaacctatgtctaacttccggtttggtgaaaatcacgccataatgggggtcgctttcacctgggtgatggccctggcatgcgccgcaccccctctggctggttggtcgcgttatatcccggagggccttcagtgtagttgtggaatcgattactacaccctgaagcctgaagtcaacaatgaaagttttgtgatctacatgttcgtcgtccatttcaccatccctatgatcatcatttttttctgttacggacagctggtattcaccgtcaaagaggcggccgctcagcaacaggaatctgccacgacacagaaggctgaaaaggaagtcacccgtatggtgataattatggtgatcgcatttctcatctgttgggtcccctacgcaagcgtcgccttctacatttttactcaccaaggatccaattttggtcccatttttatgaccatccctgcctttttcgccaagtccgcggctatctataaccctgtgatctacattatgatgaataagcagtttaggaactgtatgctgaccactatttgctgcggcaaaaacccactgggagacgacgaggcatcggctactgtgtccaagaccgaaacaagtcaggttgcgcctgca

SEQ ID NO: 18586 - DNA, 1044 bp, synthetic construct
  misc_feature 1..1044: note = source = /note="Description of Artificial Sequence: Synthetic coding sequence"
  source 1..1044: mol_type = other DNA
atgaatggaactgaaggccctaacttttacgtgcctttttccaacgccaccggagtggtccggtcgccctttgagtatccacaatactacctggctgaaccctggcagttttccatgctcgcagcatacatgtttctgcttatagtgctggggtttccaattaacttcctgactctgtacgtgaccgtgcaacacaaaaagttgagaacccccttgaactatattctgcttaatcttgccgtggcggacctgtttatggttcttggcggttttactagcactctgtacaccagccttcatgggtacttcgtgttcggccccaccggctgcaaccttgagggattctttgctaccctgggtggggaaatcgcattgtggtcgctggtcgtgctcgcaatagagcgctacgttgtggtgtgtaagcctatgtcgaactttaggtttggcgagaaccacgccattatgggggtggctttcacctgggttatggcactggcatgtgcagcccctccgctggcagggtggtcgagatatatccccgagggattgcaatgctcatgtggtattgattactacactcttaagcccgaagtcaataacgaatcgttcgtgatttacatgttcgtcgtccattttacgattcctatgataatcattttcttttgctacggtcaactcgtgttcaccgtgaaagaagcggccgcccaacaacaggagagcgcgactactcagaaggccgaaaaagaggtgactaggatggtcatcatcatggtcatagcgtttctgatttgttgggtgccatacgcaagcgtggccttttacatctttacccaccaaggttctaatttcggacctatattcatgacgatccccgcctttttcgctaagtcggcagcaatttacaatcctgtgatctacatcatgatgaacaaacagtttaggaattgcatgcttaccactatctgctgtggtaagaacccactcggtgatgatgaagcatcagcgaccgtctctaagacggaaaccagccaggtggcaccagcc

SEQ ID NO: 18587 - DNA, 1044 bp, synthetic construct
  misc_feature 1..1044: note = source = /note="Description of Artificial Sequence: Synthetic coding sequence"
  source 1..1044: mol_type = other DNA
atgaatggaacagagggacccaacttttatgtgcctttcagtaacgcgactggcgtcgttcgttccccgttcgagtacccccagtactacctggctgagccgtggcagttcagtatgttagccgcctacatgttcttgctcatcgtcctgggcttcccaatcaacttcctcactctctacgtcaccgtccagcacaagaagctccgtacccccttgaactacatcctgttgaaccttgctgtggccgacctctttatggttctcggcggcttcacgtccaccttgtacacgtctcttcacggttactttgtgttcggccccaccggctgcaacctggagggtttttttgcaacacttggaggcgagatcgctctatggtccctggtcgtcttggccatcgagcgctacgtcgtggtctgcaagcccatgtctaatttccgttttggtgaaaaccacgcgattatgggtgtcgcgttcacttgggtgatggcgttggcttgtgctgcaccccctctcgccggttggagcaggtacatccctgagggtctgcagtgcagctgtggtatcgactactacacactcaagcccgaggttaacaacgagtctttcgtaatttacatgttcgtggtccatttcaccattcctatgatcatcatctttttctgctacgggcaactcgtcttcaccgtgaaggaggccgctgcacagcaacaagagtccgcaaccacgcagaaggccgaaaaggaggtcactcgcatggtcattattatggtgattgcgttccttatttgctgggtgccgtacgcgtccgtcgctttctacatcttcactcaccaaggctccaacttcggtcccatctttatgactattcccgccttcttcgctaagagcgccgcaatctataaccccgtcatctacatcatgatgaacaagcagttcaggaactgtatgctcacgaccatttgctgtggcaagaaccccttgggcgatgacgaggcctctgccaccgtctccaaaaccgagacgagccaagtcgccccggcg

SEQ ID NO: 18588 - DNA, 1044 bp, synthetic construct
  misc_feature 1..1044: note = source = /note="Description of Artificial Sequence: Synthetic coding sequence"
  source 1..1044: mol_type = other DNA
atgaacggcaccgagggaccaaatttctacgtgcctttcagcaatgctactggagtggtgaggtccccttttgaataccctcaatactacttggcagaaccctggcaattctccatgcttgcagcatatatgtttcttctgattgtcctgggattcccgatcaacttccttactctttacgtgaccgtccagcataagaagctgcgaacccccctcaactatattctgctgaacctggcagtcgcggaccttttcatggtccttggtggttttacttcgaccctctacacctccctgcacggctactttgtgttcggaccaaccggttgtaaccttgagggtttctttgcaacgttgggaggagagattgcactgtggtcactcgtggtgctggcaattgagcgctacgtggtggtctgtaaacctatgtccaatttccgttttggagaaaaccacgcaataatgggagtggcttttacctgggttatggcactggcgtgtgccgcgccccctcttgcgggttggtcgagatacattccggagggactgcagtgttcatgcggcattgattactatacccttaagcctgaagtcaataatgagagttttgtcatttacatgttcgtcgtgcactttaccattcctatgatcattatctttttctgttacggtcagctcgttttcactgtgaaggaagccgcagcacaacagcaagaaagcgccacgacccagaaggcagagaaggaggtgacccgcatggtcatcattatggtgattgccttccttatttgttgggtgccatacgcttcggtggccttctacatcttcacccaccagggcagcaactttggacccatattcatgactattcctgccttctttgcaaagtcggccgcgatctacaatccagtcatttacattatgatgaacaagcaatttaggaactgcatgcttaccaccatttgctgtggaaagaacccactgggggacgacgaggcatcagcaacggtgagcaagacggaaacctcgcaggtggcacccgcg

SEQ ID NO: 18589 - DNA, 1044 bp, synthetic construct
  misc_feature 1..1044: note = source = /note="Description of Artificial Sequence: Synthetic coding sequence"
  source 1..1044: mol_type = other DNA
atgaacggtaccgaggggcctaacttctacgtccctttcagcaatgcaaccggtgtggtccgtagcccgttcgaatacccgcagtactacctggcagaaccctggcaattcagcatgcttgcagcgtatatgtttcttctgatcgtcctgggcttcccgattaactttctcactctgtacgtgacggtccaacacaagaagctgcggactcctctgaactacatactcctcaacctggctgtcgcggacctgtttatggtcctcggagggtttacctcgaccttgtacacttcgcttcatggctacttcgtttttggacccaccggttgtaaccttgagggatttttcgccaccctcggaggtgaaattgcactgtggtcactcgtcgtactggcaatcgagcgctatgtcgtggtctgcaagcctatgtccaactttaggttcggcgaaaatcatgccatcatgggagtcgcatttacttgggtgatggcactggcatgcgctgcaccgcctctcgcggggtggtcaaggtatatacccgaaggcctccaatgttcgtgcggaatcgattactacactctgaagcctgaagtgaataacgagtcgtttgtgatttacatgtttgtcgtgcactttaccattccgatgattatcatattcttttgttacggccagctggtgtttaccgtcaaggaagcagcagcccagcagcaagaatccgccactacccaaaaggccgaaaaggaggtgaccagaatggtcattatcatggtcatagcctttctgatttgctgggtgccctacgcttctgtggccttctacattttcactcatcagggatccaactttggccccattttcatgactatccctgcattctttgcaaagtccgccgctatttacaatcctgtgatctacataatgatgaacaagcagttcaggaattgcatgcttacgactatttgttgtgggaaaaatccccttggggatgacgaggcttccgcaactgtgagcaagaccgaaacctcccaagttgccccagcg

SEQ ID NO: 18590 - DNA, 1044 bp, synthetic construct
  misc_feature 1..1044: note = source = /note="Description of Artificial Sequence: Synthetic coding sequence"
  source 1..1044: mol_type = other DNA
atgaacgggactgagggcccaaatttctacgtcccattctctaacgccaccggcgtggtcaggtcccccttcgaatacccccaatattacctggccgagccttggcagttctcaatgttggctgcctacatgtttctcttgatcgttttggggtttccaataaacttcctcaccttgtacgtgaccgtgcagcataaaaaattgaggacaccactgaattacatacttcttaacttggcggtcgccgatcttttcatggtgttaggggggttcacgagcaccttgtataccagcttgcacggatactttgtatttggccctacaggatgtaatcttgaggggtttttcgcaacgctcggcggcgaaattgccttgtggtcgttagttgtgctggctatcgagcgctacgttgtggtgtgtaagcctatgagcaacttccggtttggcgagaatcacgccattatgggcgtcgcatttacctgggttatggcactggcatgtgccgccccccctctagccggatggagcaggtacatcccagaaggactacagtgctcctgtgggatcgattattatactctcaaacctgaggtgaacaacgaaagttttgtgatttacatgttcgtggtgcactttaccatcccaatgatcatcatctttttttgttatggccagttagtatttactgttaaagaggcggcagcgcagcagcaggagtccgccactacacagaaggcggaaaaagaggtgacacggatggtgattattatggtgatagcatttctgatctgctgggtgccatatgcgagcgtagcattctatattttcacacaccagggcagcaatttcgggccaatctttatgactatacccgccttttttgcgaagtcagccgctatttataaccccgtcatctatatcatgatgaataaacagtttcggaattgcatgcttaccacgatttgttgcggaaagaacccacttggtgatgatgaggcctctgctaccgtttctaagacagagacttctcaggtagctcccgca

SEQ ID NO: 18591 - DNA, 1044 bp, synthetic construct
  misc_feature 1..1044: note = source = /note="Description of Artificial Sequence: Synthetic coding sequence"
  source 1..1044: mol_type = other DNA
atgaatggaaccgaaggaccgaatttctacgtgccattctccaatgccaccggggtggtcagatccccgttcgagtacccgcagtactacctggcagagccgtggcagttctcgatgcttgcagcgtacatgttcttgctcatcgtgctgggcttcccgatcaatttcctcactctctacgtcaccgtgcaacacaaaaagctccggacgccactgaactacatcctgctgaatctggccgtggccgatttgttcatggtcctcggaggcttcacctcgactctctacacttcccttcacgggtactttgtgtttggacctactggatgtaatctggaaggcttttttgccactctgggaggggaaatcgccctttggtcccttgtcgtgctcgcgatcgagaggtatgtcgtggtttgcaagccgatgtcgaacttccgctttggtgagaaccatgcgatcatgggagtggcctttacctgggtcatggcactggcatgtgctgcccctccgctggctgggtggtcacggtacatcccggaaggactccagtgttcgtgcggaatcgactattacactctcaagccagaggtgaacaacgaatcgttcgtcatttacatgtttgtggtgcatttcaccatcccaatgatcattatcttcttttgctacggccaactggtgttcaccgtgaaagaggccgctgcacagcaacaggagtcggccactactcagaaggccgaaaaggaggtgactcgcatggtgatcatcatggtgatcgcgttcctcatctgctgggtgccgtacgcatcagtcgcgttttacatctttacccatcagggctcaaatttcggacccatctttatgactatcccagcgttcttcgccaagtcggctgctatctacaaccctgtgatctacatcatgatgaataagcagttccggaattgtatgctcaccactatctgctgcggcaagaacccactgggtgatgacgaagcatccgcgactgtgagcaagaccgagacttcccaagtcgcgccggcc

SEQ ID NO: 18592 - DNA, 1044 bp, synthetic construct
  misc_feature 1..1044: note = source = /note="Description of Artificial Sequence: Synthetic coding sequence"
  source 1..1044: mol_type = other DNA
atgaacgggacggagggacctaatttctacgtccccttcagcaatgcaacaggagtagttcgctcccccttcgaatatccccagtattatctggccgagccatggcagttcagtatgttggcagcttacatgtttctgctgatagttctgggctttccaattaacttcctgacgttgtacgttaccgtccaacacaagaagcttcgtaccccgctgaactacatccttttaaacctagcagtagccgatcttttcatggtcttaggcgggttcacctctactttatatacctcccttcacggctattttgtattcgggcctaccggttgtaatctcgaaggcttcttcgctacgcttgggggagaaatcgcgttgtggtctctcgtggtgctggccatagagcgatacgtcgtcgtttgcaaacccatgtcgaattttcggttcggcgaaaaccatgcaattatgggagttgcctttacatgggttatggccttggcatgcgctgcgccacctttagctggatggtcaagatacattccagagggccttcaatgcagttgcggaatcgactactataccttaaagccagaagtaaacaacgaatcctttgttatctatatgttcgttgtgcacttcactattccgatgataatcatatttttctgctacggccaactggtcttcactgtcaaagaggccgctgcgcagcaacaagagagtgccacgacccaaaaagcggaaaaggaggtcacacgcatggttatcatcatggtcatcgcctttctgatctgctgggtcccatatgcatccgttgcgttctacattttcacccaccaaggatccaatttcgggccaatcttcatgacaattccagcgttcttcgcgaagagcgcggctatttacaatcctgtaatttatatcatgatgaataagcagttccgtaattgcatgcttactaccatctgctgtggtaagaacccgttaggggatgacgaagcgtctgcgactgttagtaagaccgagactagccaggtcgcgccagct

SEQ ID NO: 18593 - DNA, 1044 bp, synthetic construct
  misc_feature 1..1044: note = source = /note="Description of Artificial Sequence: Synthetic coding sequence"
  source 1..1044: mol_type = other DNA
atgaatggaaccgagggaccaaacttctacgtccctttttcaaacgcaactggggtcgtgaggtccccttttgagtacccgcagtactaccttgcagaaccatggcaattttccatgctcgccgcatacatgtttctcctgatcgtccttgggtttcccattaacttccttaccttgtacgtgaccgtgcaacataagaaattgcgtactccacttaactacatcctgctgaacctcgcagtggcagatcttttcatggtcctgggaggatttacttccaccctctacacctccctgcatggatactttgtgtttggacctaccggatgtaacctggaaggttttttcgcgactctcggtggggaaattgcactttggagcctggttgtccttgccattgagcgctacgtggtggtgtgtaaacccatgtcgaattttcgcttcggagagaaccatgccataatgggcgtggcattcacttgggtgatggcgctggcatgcgcagcacctcctctggcaggatggtcccggtatattcctgaaggactgcaatgctcgtgtggtatagactactatactctgaaaccagaagtgaataacgagtcatttgtgatttacatgttcgttgtgcattttacgatccctatgatcatcattttcttttgctatggtcagctggtgtttaccgttaaggaggcagcggcacaacaacaggaatcggcaactactcaaaaggcagagaaagaagtgactcgcatggtgataatcatggtgattgccttcctgatatgctgggtgccctacgcatcagtggcattctacattttcacccaccagggatcgaactttggccctattttcatgaccattccagcattcttcgctaagagcgcggcgatttacaacccagtgatctacattatgatgaacaaacagtttagaaattgtatgctgactaccatatgttgtggtaagaacccactcggcgacgacgaagcgtcggctaccgtctctaagactgaaacctcgcaagtcgcgccagcc

SEQ ID NO: 18594 - DNA, 1044 bp, synthetic construct
  misc_feature 1..1044: note = source = /note="Description of Artificial Sequence: Synthetic coding sequence"
  source 1..1044: mol_type = other DNA
atgaatggaacagagggtccaaatttttatgttcctttctccaatgcaacaggagttgtaagatcaccatttgaatatccacaatattatttagctgaaccatggcaattcagtatgttagcagcatacatgtttttacttattgtacttggttttcctataaattttcttactctttatgttactgttcaacataagaaattacgtactcctttgaattatattttacttaaccttgcagttgctgatttgttcatggttcttggaggatttacatctactctttatacaagtttacatgggtatttcgtttttggaccaacaggttgtaatcttgaaggattttttgcaacattaggaggagagattgctttatggagtttagtcgttttggctattgaaagatatgtagtagtatgtaaaccaatgtctaactttcgtttcggagaaaatcacgcaattatgggagttgccttcacttgggtaatggctttagcttgtgctgcacctccacttgcaggatggtcacgatatatcccagaaggacttcaatgttcatgtggaattgattattatacactaaaaccagaagttaataatgaatcattcgttatatatatgtttgtagtacattttacaattccaatgattattattttcttttgttatggtcaattagtttttacagtaaaggaagcagctgctcaacagcaagaatcagctacaacacaaaaagctgaaaaagaagttactagaatggtcataattatggttattgcttttcttatatgttgggttccatatgcttcagtggctttctatatttttacacatcaaggaagtaattttggtcctattttcatgacaattccagccttttttgcaaaatcagctgctatttataatccagttatttatataatgatgaataaacaatttagaaattgtatgttaactactatttgttgtggaaaaaatccattaggagatgatgaagcaagtgcaacagttagtaaaacggagactagtcaagtagctccagct

SEQ ID NO: 18595 - DNA, 1044 bp, synthetic construct
  misc_feature 1..1044: note = source = /note="Description of Artificial Sequence: Synthetic coding sequence"
  source 1..1044: mol_type = other DNA
atgaacggtaccgagggccctaacttctacgtgccattctccaacgctactggcgtcgtgaggagcccgttcgaatatcctcaatattaccttgccgagccctggcagttttccatgctagcagcatacatgttcctgctgatcgtgcttggattccccattaacttccttacgctctacgtgactgtccaacacaagaaactcaggacccctttaaactacatactgctgaatctcgcagtagccgatcttttcatggtcctcggtggcttcacctccaccctctatactagtctccatggttacttcgtctttgggcctacagggtgtaatctggaggggttcttcgccacactgggcggggaaatcgcgctatggtctctggtggtcctcgctatcgagcgctacgtggttgtgtgcaagccgatgtccaatttcaggtttggggaaaaccacgccataatgggcgtcgccttcacctgggttatggccctggcatgcgctgcacctccacttgctgggtggagtaggtatatccccgaaggtctgcagtgctcttgcggaattgactattatacccttaaacctgaagtgaacaacgaatcattcgtcatatatatgtttgtcgtgcactttacaatacccatgatcataatttttttctgctatgggcaactggtctttacggtgaaagaggccgcagcccagcagcaagagagtgcaaccacccagaaagccgaaaaggaagttactcgaatggttatcatcatggtaatcgcctttctgatctgctgggtgccatatgccagcgtggccttctacattttcactcaccaaggatctaatttcgggcctatttttatgaccattcccgcgttctttgcaaagagcgcagctatttataatccagttatttatataatgatgaacaagcagtttagaaattgcatgttgacaactatctgttgtggcaagaaccctctgggagacgacgaagcatcagctacggtgagcaagacagaaacttcgcaggtggctccagcg

SEQ ID NO: 18596 - DNA, 1044 bp, synthetic construct
  misc_feature 1..1044: note = source = /note="Description of Artificial Sequence: Synthetic coding sequence"
  source 1..1044: mol_type = other DNA
atgaacggcaccgaaggccccaatttctacgtacctttctccaacgccaccggagtcgtacgctctcctttcgagtatccgcagtactatctggctgagccctggcaattctctatgctggcagcttacatgtttctgttgattgtcctgggattcccaatcaactttctgaccctttatgtgactgtgcagcacaaaaaactccgcacaccgctcaactatatcctgctcaatctggccgtcgcggacttgttcatggtgctcggcggattcacgtcaacattgtacacaagcctgcacggttacttcgtgtttggtccaaccggttgtaacctggagggtttcttcgcaaccctgggcggtgaaatagcgttgtggtcactcgttgtgcttgctatagagagatacgtggtggtgtgcaaacccatgtccaactttaggtttggcgaaaatcacgctatcatgggagtagcattcacctgggtgatggcccttgcttgtgccgcccccccactcgcgggatggagtaggtacattcctgaaggtcttcagtgcagctgcggcatcgactattacactctcaaaccggaagtgaataacgaaagctttgtgatatatatgttcgtggttcattttacaatccctatgatcattatcttcttctgttacggtcaactggtcttcaccgtgaaggaggccgccgcccaacaacaggagagcgcgaccactcaaaaagctgagaaagaggtcactcgcatggtcatcattatggttattgcttttctgatttgctgggtcccatacgcttctgtcgccttctatatcttcactcatcagggctctaattttggccctatctttatgactatccccgcattctttgccaagtccgccgctatatataatcctgtgatttacatcatgatgaataaacagtttagaaactgtatgcttaccactatctgctgcggcaagaatccattgggtgacgatgaagcatccgccaccgtgtctaagacagagacctcccaagttgcgcctgcg

SEQ ID NO: 18597 - DNA, 1044 bp, synthetic construct
  misc_feature 1..1044: note = source = /note="Description of Artificial Sequence: Synthetic coding sequence"
  source 1..1044: mol_type = other DNA
atgaatgggactgaagggcccaacttttacgtaccgttctctaatgcaactggagtcgtgaggtctccattcgagtaccctcagtactatctcgccgaaccttggcaattttctatgctggccgcatatatgtttttactcatcgtgcttggatttcccatcaattttttaactttatatgtaacagtacagcacaaaaaactgcgaactcctctgaattatatccttctgaacctagcggttgccgacctgtttatggtgttagggggatttactagtactctctacacttcacttcacgggtatttcgtattcggacccacagggtgtaatctggaaggattcttcgctactctggggggggagatcgctttatggtctttagtggtgcttgctatcgaacgttacgtggtagtctgcaagcccatgagtaactttcgattcggagaaaaccatgctattatgggggtagcatttacttgggtaatggcattagcctgtgctgcccctccactggctggatggtctcgctatatccccgaaggactgcagtgctcatgtggaattgattactatacactaaagcccgaagtgaacaacgaatctttcgtgatctacatgtttgtggtgcacttcacaatacccatgattatcatctttttctgctatggacagttagtgttcacagtgaaggaagccgccgctcagcagcaggagtcagctactacacaaaaagccgagaaagaagtcactaggatggtgatcattatggtcatcgctttcctaatttgttgggtaccctatgcctccgtggccttttatatcttcactcaccaggggtccaattttggacccattttcatgactatccccgccttctttgccaaatccgcagccatctataatccagttatatacatcatgatgaacaagcagttccggaactgtatgcttactactatttgttgtgggaagaacccactaggggatgacgaagcatccgcgacagtgagtaaaactgagacaagtcaggtagcaccagct

SEQ ID NO: 18598 - DNA, 1044 bp, synthetic construct
  misc_feature 1..1044: note = source = /note="Description of Artificial Sequence: Synthetic coding sequence"
  source 1..1044: mol_type = other DNA
atgaatggtacggaaggtccgaatttttatgtaccgttttcgaatgcgacgggtgttgtacgatcgccgtttgaatatccgcaatattatctagcggaaccgtggcaattttcgatgttagcggcgtatatgtttctattaatagtactaggttttccgataaattttctaacgttatatgttacggttcaacataaaaaactacgtacgccgctaaattatatactattaaatttagcggtagcggatttatttatggttctaggtggttttacgtcgacgctatatacgtcgttacatggttattttgtttttggtccgacgggttgtaatttagaaggtttttttgcgacgctaggtggtgaaatagcgctatggtcgctagtagtattagcgatagaacgttatgtagtagtatgtaaaccgatgtcgaattttcgatttggtgaaaatcatgcgataatgggtgtagcgtttacgtgggtaatggcgttagcgtgtgcggcgccgccgttagcgggttggtcgcgttatataccggaaggtttacaatgttcgtgtggtatagattattatacgctaaaaccggaagtaaataatgaatcgtttgtaatatatatgtttgttgtacattttacgataccgatgataataatatttttttgttatggtcaactagtttttacggtaaaagaagcggcggcgcaacaacaagaatcggcgacgacgcaaaaagcggaaaaagaagtaacgcgaatggttataataatggtaatagcgtttctaatatgttgggtaccgtatgcgtcggtagcgttttatatatttacgcatcaaggttcgaattttggtccgatatttatgacgataccggcgttttttgcgaaatcggcggcgatatataatccggtaatatatataatgatgaataaacaatttcgtaattgtatgttaacgacgatatgttgtggtaaaaatccgttaggtgatgatgaagcgtcggcgacggtatcgaaaacggaaacgtcgcaagttgcgccggcg

SEQ ID NO: 18599 - DNA, 1044 bp, synthetic construct
  misc_feature 1..1044: note = source = /note="Description of Artificial Sequence: Synthetic coding sequence"
  source 1..1044: mol_type = other DNA
atgaacggtaccgaagggcctaacttttacgtccctttttcgaacgcaaccggggttgtcagatccccattcgaatatcctcaatactacctcgcggaaccttggcaattctcgatgctcgcagcctacatgttcctgttgatcgtgcttggttttccaataaacttcctgactctttacgtgactgttcaacacaagaaactgcgcacccccctcaactacattctgttgaatcttgcagtggcagatctgtttatggtccttggtggatttacttcaaccctttatacttcacttcacgggtacttcgtctttgggcccactggttgtaatctggaaggatttttcgccaccctcggaggagaaatagcactttggagcctggtggtgctggccattgagcgctacgtggtggtttgtaagcctatgtcgaactttagatttggagagaatcacgcaattatgggagtggccttcacttgggtgatggccttggcgtgcgccgcacccccgctcgctggctggagccggtacattcctgaaggcctgcaatgtagctgtggtatcgactactacactcttaagccggaggtgaataacgagtcgtttgtgatttacatgtttgtcgtgcactttaccattccaatgataatcatcttcttttgctacggtcagttggtctttactgtgaaagaggccgcggcccaacaacaggaatcggcaacgactcagaaagcagaaaaggaagtgactaggatggtcatcattatggtgatagccttcctgatttgctgggtgccttacgccagcgtggccttttacattttcactcatcagggttcgaacttcggtccaatcttcatgaccattccagccttctttgccaagtcagccgccatctacaatccagtgatttacattatgatgaacaagcagtttcgaaattgcatgctcaccaccatctgttgtggaaaaaacccactcggtgatgatgaagcatccgcgaccgtctcaaagaccgagactagccaggtggctcccgca

SEQ ID NO: 18600 - DNA, 1044 bp, synthetic construct
  misc_feature 1..1044: note = source = /note="Description of Artificial Sequence: Synthetic coding sequence"
  source 1..1044: mol_type = other DNA
atgaacggaacagaagggcccaacttctatgtaccattctccaacgccaccggggtggtacgttccccattcgaatacccacagtattacttggcggaaccttggcagtttagcatgctggccgcctatatgtttctccttattgtgctgggcttccccattaatttccttacgctctatgtgacagtgcagcacaaaaaattaaggacgcctctgaattacatattgctgaacttagccgttgccgacctgttcatggtcttgggcggctttacatcaactctgtatacgtctctgcatggctacttcgtcttcggacccaccgggtgtaacttagaggggttctttgctaccttggggggagagattgcactgtggagcctagtagttctggctatcgaacgctacgtcgtggtgtgcaagcctatgagcaatttccgattcggagagaaccacgcaatcatgggtgtagccttcacctgggtgatggctctggcctgtgccgcgcctccactcgccggttggagccggtacatccccgagggactgcagtgttcctgtggcattgactactataccctcaagccggaggttaataatgaatccttcgttatctacatgttcgttgtgcatttcacaattccaatgataattatcttcttctgctatggccagctggtttttaccgtgaaagaagctgcagctcagcagcaggagagtgctactactcagaaggccgagaaagaggttactcggatggtgataatcatggtgatcgccttcctcatctgctgggtgccctacgcatctgttgcgttctatatcttcacccatcagggctccaacttcggccctatctttatgacaatacctgcattctttgctaaatccgcagccatctataatcctgtgatatatattatgatgaataaacagtttagaaattgtatgctcaccaccatctgctgcggaaaaaatccccttggtgatgacgaggctagtgctaccgtgtccaaaacagagacatcccaagtcgccccagcc

SEQ ID NO: 18601 - DNA, 1044 bp, synthetic construct
  misc_feature 1..1044: note = source = /note="Description of Artificial Sequence: Synthetic coding sequence"
  source 1..1044: mol_type = other DNA
atgaacggtaccgaaggaccaaacttttacgtccctttctccaacgcgaccggtgtggtgcgcagtccttttgagtatcctcaatactacttggcagaaccatggcagttttcaatgctggcagcctacatgtttctgctgatcgtgctggggtttccaataaacttcttgacgctgtacgtcactgtccaacataagaagctccgtacccctttgaactacattctgctgaatcttgcagtcgcagatctgtttatggttctgggcggttttacctcaaccctttacacgtcacttcatggatacttcgtgtttggtcccactgggtgcaatctggaaggctttttcgccaccctgggtggggaaattgccttgtggtccttggtagtgctcgcaatcgagcgctacgtggtagtgtgtaagcctatgtccaactttaggttcggcgaaaatcacgcaattatgggagtggcatttacgtgggtgatggccctcgcgtgtgcagctcctccgctcgctggatggtcaagatacattccagagggactccaatgtagctgcggaattgattactacactcttaagcccgaagtcaacaatgagtcgtttgtcatttacatgtttgtggtgcacttcaccatccctatgataatcatctttttctgctacggacagcttgtgtttactgtgaaagaagcagcagcacagcagcaagaatccgccaccactcaaaaagcggaaaaggaggtcactcggatggtgatcataatggtcatcgctttccttatctgttgggtgccctatgcgtcggtggcgttctacattttcactcatcaaggaagcaacttcgggccgatctttatgaccattccagcatttttcgcaaaatcagcagcaatatacaatcccgtcatttacattatgatgaataagcaattcagaaactgtatgcttacgaccatctgttgcggaaagaatcccctcggagacgatgaggcatcagcgacggtgagtaaaaccgaaacttctcaggttgcccccgca

SEQ ID NO: 18602 - DNA, 1044 bp, synthetic construct
  misc_feature 1..1044: note = source = /note="Description of Artificial Sequence: Synthetic coding sequence"
  source 1..1044: mol_type = other DNA
atgaacgggaccgaaggtccaaatttctacgtgcccttctcaaacgccactggggtggtgcggtcaccattcgagtacccacaatactacttggccgagccatggcagttctccatgctggccgcctatatgttccttctgattgtcctggggttcccaattaacttcttgacgctgtatgtgaccgtgcagcacaaaaaactgcgcacgcctctgaattacatcctcctcaacctcgcggtggcggatctcttcatggtgttgggtggattcacttcgacgctgtacaccagcctgcatggctatttcgtgtttggcccgactggatgcaacctggaagggttcttcgcgacccttggcggcgaaatcgccctgtggtcgctggtggtcctggcaatcgagagatacgtcgtcgtctgcaaacccatgtcaaactttcgctttggagagaaccatgcaattatgggggtggcgtttacttgggtgatggccctggcatgcgcggctccgcctttggcgggatggagtagatacatccctgaaggactgcaatgctcgtgtgggatcgattactacactctgaagccggaagtgaacaacgaatcgttcgtgatctacatgtttgtcgtgcacttcaccatccctatgatcatcatcttcttttgttacgggcaactggtctttaccgtcaaggaagccgccgcacagcaacaagagtcggccactactcagaaggcggagaaagaggtaacccgaatggttatcatcatggtcatagcgttcctgatctgctgggtcccgtacgcttcagtggccttctatatctttacccaccagggaagcaacttcggaccgatcttcatgactatcccagcattcttcgcgaaaagcgccgcaatttacaatccagtgatttacatcatgatgaacaagcagttccgcaattgcatgttgacgacgatctgttgcggcaaaaatccactcggtgacgacgaggcttccgccaccgtttccaagacggaaacctctcaagtagcaccagcg

SEQ ID NO: 18603 - DNA, 1044 bp, synthetic construct
  misc_feature 1..1044: note = source = /note="Description of Artificial Sequence: Synthetic coding sequence"
  source 1..1044: mol_type = other DNA
atgaacggcaccgaggggcctaatttctacgtgccattctccaatgccaccggcgtcgttaggagccccttcgagtaccctcaatattatcttgctgaaccttggcagttttctatgctggccgcttacatgtttttgctgatagtactggggtttcccatcaatttcctgacgctgtacgtgacagtgcaacataagaagctccgcacgcctctgaactacattctacttaatctcgcagttgctgaccttttcatggtactcgggggctttacatctaccctttacacctcgctgcacggatactttgtgttcggccctactggatgcaatctggaaggattttttgctactctcggaggagaaatcgccttgtggtcactggttgttctggccatagaacggtacgttgtggtttgtaagccaatgtcgaacttccgcttcggtgaaaaccacgcaatcatgggggtggcctttacctgggttatggccctggcctgcgcagcccctccacttgcaggctggtcccggtatatcccagaaggactgcaatgctcgtgtgggatagattattacaccctgaagcctgaagtgaacaacgagagtttcgtaatctacatgtttgtggtgcacttcactattcccatgattataatcttcttttgctacggccagctcgtgttcactgtaaaggaggcagcagcacagcagcaggaatcagccacgacccagaaagccgaaaaggaagtgacacgcatggtgataataatggtgatagcatttctgatttgctgggttccctatgcgtccgtcgcattctacatcttcacacaccaggggagcaatttcggacctatcttcatgaccatccccgcctttttcgctaagagcgccgccatttacaaccctgtgatttacatcatgatgaataagcaattcagaaactgcatgctcacaaccatttgctgcggaaaaaatcctctgggcgacgatgaggcctctgctaccgtgagtaaaactgagacttcacaggtggcaccagct

SEQ ID NO: 18604 - DNA, 1044 bp, synthetic construct
  misc_feature 1..1044: note = source = /note="Description of Artificial Sequence: Synthetic coding sequence"
  source 1..1044: mol_type = other DNA
atgaatggcactgaaggaccgaacttctatgtgcccttctccaacgccaccggcgtcgtaagatctcctttcgagtatcctcagtactacctggctgaaccatggcaatttagcatgttggccgcctatatgttccttctcattgtgctcggctttccaatcaatttcctgacactgtatgtaacggtgcagcataaaaagctgagaactcctcttaactatattctgcttaatttggccgtggccgatctgttcatggtgctcggggggttcacatcaaccctttacacctccctgcacggatattttgtctttggtcccactggttgtaatttggagggattcttcgctactctgggaggcgaaattgccctgtggtcacttgtggtgcttgccatcgagcgatacgtggtggtgtgcaagccaatgagtaactttaggttcggtgagaaccacgccatcatgggcgtggccttcacgtgggtgatggcccttgcatgtgccgccccacccctggcgggttggagtcgttatatccccgaaggcctgcagtgctcatgtggaatcgactactacactctcaagccagaagtgaacaatgaatctttcgtgatttatatgtttgtagtacatttcacaattcccatgattatcatcttcttttgctatggtcagctcgtctttacagtgaaggaggccgccgcacagcagcaagagagtgcgacaacccagaaagccgagaaggaagtcacccggatggtcatcataatggtcatcgcctttctcatctgttgggtgccatacgcaagtgttgccttttatatttttacccaccagggcagtaactttggccctatttttatgaccattcctgccttctttgctaaaagtgctgccatctacaaccctgtgatttatatcatgatgaacaaacagttccgaaattgtatgttgacaacaatctgttgtggcaaaaaccccctcggagatgatgaagcctcagcaacagtctcaaaaactgaaacctctcaggtggctccagcc

SEQ ID NO: 18605 - DNA, 1044 bp, synthetic construct
  misc_feature 1..1044: note = source = /note="Description of Artificial Sequence: Synthetic coding sequence"
  source 1..1044: mol_type = other DNA
atgaatgggaccgaaggccccaatttctatgtgccgttttcaaatgcaaccggggtggtgcgctcaccctttgaatatcctcagtattacttggcagagccttggcagttctccatgctcgcggcttatatgtttctactaatcgtgctggggtttcctataaactttctcactctgtacgtaaccgtgcagcacaaaaagctgagaacccctcttaattatatcctgctaaatctcgccgttgctgatctattcatggtgctgggaggctttactagtaccttgtacaccagcttgcacggctatttcgtatttggcccaactgggtgcaatcttgagggattctttgccaccctcgggggtgaaattgccctgtggtccctggtggtgctcgccattgaacggtacgtcgtggtctgtaaacccatgtccaatttccgattcggcgaaaaccacgctattatgggcgtggccttcacatgggtgatggcactagcttgcgctgcccccccgctggccggttggtctagatacattcccgaagggctgcaatgttcctgtggaatagactactacacactcaaacccgaagtgaacaatgagtccttcgtcatctacatgtttgtcgtccacttcacaattcccatgatcattattttcttttgctacgggcaactggtctttactgtgaaagaggccgctgctcagcaacaggaatccgctaccacccaaaaagctgagaaggaggtcacaagaatggtgattataatggtgatcgcattcttaatctgctgggtcccctatgcttctgttgcattctatattttcacacaccaggggtccaactttggacccatctttatgacaattcctgcctttttcgccaagagtgcagcaatttacaaccctgtaatctacataatgatgaacaagcagtttaggaactgcatgttaaccactatttgctgcggaaagaacccccttggcgatgacgaggcctcggccaccgtgtccaaaaccgagacctcccaagtcgcccccgcc

SEQ ID NO: 18606 - DNA, 1044 bp, synthetic construct
  misc_feature 1..1044: note = source = /note="Description of Artificial Sequence: Synthetic coding sequence"
  source 1..1044: mol_type = other DNA
atgaatggaacagagggcccgaatttttatgttcccttcagtaatgccacaggcgtggttaggtccccatttgagtacccacagtactatctggctgagccctggcaattttcaatgctggccgcatatatgttcctgctgatcgtgttgggctttcccattaacttcttgaccctgtatgtgaccgtgcagcataagaagctgcgtactcccctaaattacatcctgctgaacctggctgtggccgatctctttatggttctaggcggatttaccagcactctgtatacttctctgcatggctacttcgttttcggccctacaggatgcaacctggaaggttttttcgccactctgggcggcgagatagctctgtggtctctcgtggtcctggcaattgaacggtatgttgttgtgtgtaaaccaatgagtaattttcgattcggcgaaaaccacgctatcatgggggtagcttttacctgggtgatggccctggcttgtgccgctcccccactagcaggatggtctaggtacattccagagggcctacagtgctcctgcggcatcgactactataccctgaagcccgaggtgaacaatgagagtttcgtgatctatatgtttgttgtgcacttcaccattcccatgataattatattcttctgctatggacagctggtctttactgtgaaagaagctgctgctcagcagcaggaatccgctacaactcaaaaggccgagaaagaagtgacccgcatggtgataatcatggtgatagccttcctcatatgttgggtcccctacgctagtgttgccttttacattttcacccaccagggaagcaactttggtcctattttcatgaccattcccgcttttttcgccaagagcgccgcaatttataatcccgtgatctacatcatgatgaataagcagttcaggaactgtatgctcacaaccatctgttgcgggaaaaatcctctgggtgacgatgaagcatctgctaccgtgagtaaaacagaaactagccaggtggctcctgcc

SEQ ID NO: 18607 - DNA, 1044 bp, synthetic construct
  misc_feature 1..1044: note = source = /note="Description of Artificial Sequence: Synthetic coding sequence"
  source 1..1044: mol_type = other DNA
atgaacggaactgagggcccgaatttctacgtgccattctccaatgccacgggagtcgtgcgctcgcccttcgagtaccctcagtactacttggccgaaccttggcaattctcgatgctggctgcgtacatgttcctgctcattgtcctcggtttcccgatcaattttctgaccctctacgtgaccgtgcaacataagaagctgcggacccctctgaactacatcctgctgaacctcgcggtcgcagatctcttcatggtcctcggaggatttacttcaaccctttataccagcctgcacggctacttcgtgttcggtccgacgggctgtaacctggaaggattttttgccaccctgggcggcgagatcgcactttggtcccttgtggtgctggccatcgagcggtacgtggtcgtgtgcaagccgatgtcgaatttcagatttggagaaaaccacgccatcatgggagttgcattcacctgggtcatggcgctggcttgcgcagctccaccattggctgggtggtcccgctacatccctgagggcctccagtgctcatgcggtatagactactacactttgaagcccgaagtgaacaacgagtcattcgtcatctacatgttcgtggtgcacttcaccatcccaatgatcatcatcttcttctgctacgggcagctggttttcactgtgaaagaagcggccgcacaacagcaggaatcggccactactcagaaggccgaaaaggaagtcactcgaatggtgatcattatggtgatcgccttcctgatctgctgggtgccgtacgcctcggtagcgttctacatttttactcatcaggggagcaactttggacccatcttcatgaccattccggcgttctttgccaaatctgcggcaatctataatccggtgatctacattatgatgaacaaacagtttaggaattgtatgctcactacgatctgttgcggaaagaacccactgggagacgatgaggcctccgctaccgtgagcaagaccgaaactagccaagtcgctccggcc

SEQ ID NO: 18608 - DNA, 1044 bp, synthetic construct
  misc_feature 1..1044: note = source = /note="Description of Artificial Sequence: Synthetic coding sequence"
  source 1..1044: mol_type = other DNA
atgaatggcaccgagggacccaatttttatgtaccctttagcaacgctaccggggtagtgaggagccctttcgagtatccacagtattatctggccgagccatggcagttctcaatgctggctgcctacatgttcctgcttattgtgctgggattcccaatcaattttctcaccctgtacgtgacagtacaacataaaaagctccgcaccccccttaattacatattgttaaacctcgctgtggccgatctattcatggttctgggtggattcacctcaacattgtatacttccctgcacggctactttgtctttggacccactggatgtaacttggaaggattcttcgctaccctgggtggcgaaattgcactttggagcttagttgtgctggcgatagaacggtacgttgtggtttgtaagcctatgagtaattttagattcggcgaaaaccacgcgatcatgggagtagcgttcacctgggttatggccctggcctgcgcggctccccccctggcaggatggtcccggtatatacccgagggactccaatgctcttgtggcatcgattattacaccctgaaaccagaggtgaacaacgagtccttcgttatttatatgttcgtggtgcactttaccataccaatgattatcatatttttctgctatgggcagcttgttttcaccgttaaagaggccgccgcgcagcagcaggagtccgccacaacccagaaggctgagaaggaggtgacgagaatggtcattatcatggtgattgcattcctgatttgctgggttccctacgcatccgtcgcattctatatattcacccatcaaggatctaattttggacccattttcatgaccatacccgcatttttcgcaaaaagcgcggctatttacaacccagtaatctatattatgatgaataagcaattcagaaactgcatgcttactacaatttgctgcggaaaaaatccgctgggcgacgatgaagcaagcgcaaccgtgtctaaaactgagacttcacaggtggcgccagca

SEQ ID NO: 18609 - DNA, 1044 bp, synthetic construct
  misc_feature 1..1044: note = source = /note="Description of Artificial Sequence: Synthetic coding sequence"
  source 1..1044: mol_type = other DNA
atgaacggaactgaaggccctaacttttacgttcctttttccaacgcaaccggagtggttcggtcaccttttgaatatccccagtactacctcgcggagccttggcaattcagcatgcttgcggcatacatgttcctgttgatagtgctcggcttcccgattaactttcttactttgtacgtgaccgtgcagcataagaaactgcggaccccacttaactacattctgcttaatcttgcagttgcagatctgttcatggtcctcggaggattcaccagcactctctacacgtccctccatggttactttgtgtttgggccaaccggatgcaatcttgaaggattctttgccaccttgggaggagaaattgcactttggagccttgtggtgctggccatcgaacggtacgtcgtggtctgtaaacctatgagcaactttagatttggggaaaatcatgccattatgggtgtggcctttacttgggtgatggcactggcatgtgcagcccctccgctcgctgggtggagcagatacattcctgaaggactgcaatgttcctgcggtatcgactactacacccttaagccggaagtgaataacgagtcctttgtgatatacatgttcgtggtccattttactatccctatgataatcatcttcttttgctacgggcaactggtctttactgtgaaggaagccgccgcacagcagcaggagtcagcaactactcagaaggcagaaaaagaagtgacccggatggtgatcattatggtcattgcattccttatatgttgggtgccatacgcctcagtggccttctacatattcacgcatcaaggatcaaactttggtcctatcttcatgactatccccgcgtttttcgcgaagtcggcggccatatacaacccagtcatttacattatgatgaataagcagttcagaaactgtatgcttaccacgatctgctgtgggaaaaatccactgggagatgatgaggcttccgccactgtgagcaagactgaaacgtctcaagtcgcacccgca

SEQ ID NO: 18610 - DNA, 1044 bp, synthetic construct
  misc_feature 1..1044: note = source = /note="Description of Artificial Sequence: Synthetic coding sequence"
  source 1..1044: mol_type = other DNA
atgaacggtacagaaggcccaaacttctatgtacctttctccaatgccaccggtgtagtaagatctccgtttgagtaccctcagtattaccttgccgaaccatggcaattctcaatgctggctgcgtatatgttccttcttatcgtcttggggtttcctatcaatttcttgaccttatatgttacagtccaacacaaaaaattacgtaccccgttaaactacattcttttgaatctggcagtggcggacctattcatggtcctcggaggttttacctcaacgttatatacctcacttcatggctattttgtctttggcccaactggatgcaatcttgaaggatttttcgcgacgctaggcggtgaaatagccttgtggtcgttagtagtcctggcaatcgagcggtatgttgtagtatgtaaacctatgtccaacttcaggtttggagagaatcatgcgattatgggtgtggcatttacgtgggtaatggccctggcatgcgccgccccgccactggccggttggagtagatacattcctgaaggcctgcagtgtagctgtggtattgactattacactctgaaacctgaagtcaacaacgaatcatttgtaatttatatgtttgtggttcattttactatcccaatgattattatttttttttgctatggtcaattggtgtttacggtgaaagaagcagctgcgcagcagcaggaatcagcaaccacgcaaaaagccgaaaaggaagttacccgcatggtaatcattatggttattgcttttttgatttgttgggtaccatatgcctctgtcgcattttatatctttactcatcagggatccaattttggtccgatttttatgacgattcctgcattctttgcaaagtcagctgccatatataacccagtaatatacattatgatgaacaaacagtttaggaattgtatgctgacgacgatatgctgtggtaaaaatccgctgggggatgatgaggcgtcggctacagttagtaaaactgaaactagccaagtggcacccgcc

SEQ ID NO: 18611 - DNA, 1044 bp, synthetic construct
  misc_feature 1..1044: note = source = /note="Description of Artificial Sequence: Synthetic coding sequence"
  source 1..1044: mol_type = other DNA
atgaacggcaccgaaggccccaacttctatgtacccttctcaaacgcaactggggttgtgcgaagccccttcgagtacccccagtactacctggccgaaccatggcagtttagcatgcttgcggcctatatgtttttgcttatagtgctcgggttccccattaatttcctgacactgtatgtgaccgtgcagcacaaaaaactgaggactcccttgaactatattctcctgaacctggctgtggctgatctctttatggtgctggggggatttactagtaccctctacacgtctttgcacggctacttcgtgttcggtcccaccggatgcaacctcgagggattctttgccactctgggtggagaaatagccctctggagcctggttgtgttggctatcgaaagatacgtcgtagtatgcaaaccaatgtcaaactttaggttcggcgagaaccatgcaattatgggagtagcttttacatgggtaatggccctcgcttgtgccgcgcccccccttgcgggctggagtaggtatatccctgaggggctgcaatgcagctgcggtatcgactattatacactcaaaccagaggtcaacaacgagtctttcgtcatctatatgtttgtcgtccacttcaccatccccatgatcataattttcttctgctacggccagctcgtttttaccgtgaaggaagcggcagcccagcagcaggagagcgcaacaacccagaaggcagagaaagaggttaccagaatggtgatcatcatggtcatcgcattcctgatctgttgggtcccctacgccagcgttgcattttatatttttacccatcaaggcagcaactttggtcccatttttatgactatccctgctttctttgccaaatcagccgcaatctataatcccgtgatctacattatgatgaacaaacaatttcgcaactgcatgttgacaacgatctgttgtggtaagaaccctcttggcgacgacgaagcttctgcaacagtcagcaagactgaaactagccaggtggcacctgcg

SEQ ID NO: 18612 - DNA, 1044 bp, synthetic construct
  misc_feature 1..1044: note = source = /note="Description of Artificial Sequence: Synthetic coding sequence"
  source 1..1044: mol_type = other DNA
atgaacggcaccgaggggcccaatttctacgtgcctttcagcaacgctaccggagtcgtgagatccccattcgaatacccccaatactatctggcggagccgtggcagttcagcatgttggccgcctacatgtttcttcttatagtactcggttttccaataaacttcctgaccctctacgtgacggtccaacataagaaactgcgtactccattgaactacatcttgctcaacctggctgtggcggatctcttcatggtgctcggaggatttacttcgaccctctacacttcgcttcacggttactttgtctttggtccgactgggtgcaatctggagggcttctttgccactctgggcggtgagatcgcactgtggtcactcgtcgtgctggcaatcgaacgctacgtcgttgtgtgcaagccgatgtcaaatttccgcttcggggaaaatcacgccatcatgggagtggcgtttacctgggtgatggcgttggcttgcgcggccccgccgctcgcaggttggtcacggtacatcccggaaggactccagtgttcgtgcggaatcgactactacactctcaaaccagaggtcaacaacgagagcttcgtgatctacatgttcgtagtgcatttcactatcccaatgatcatcatctttttctgctacggacagctggtgttcaccgttaaggaagcagcagcccaacaacaggaaagcgccactacccagaaagccgaaaaggaggtgacccggatggttatcatcatggtgattgccttcctgatctgctgggtgccctacgcctcggtggcattctacattttcacccaccagggcagtaatttcggacctatctttatgacgatccctgcctttttcgcgaagtccgcggcaatctataacccggttatctacatcatgatgaataagcagtttcgtaactgtatgctgactaccatttgctgtggaaagaatccgctgggggatgacgaagcctccgctactgtcagcaagacggaaacgtcacaggtggcgccggcc

SEQ ID NO: 18613 - DNA, 1044 bp, synthetic construct
  misc_feature 1..1044: note = source = /note="Description of Artificial Sequence: Synthetic coding sequence"
  source 1..1044: mol_type = other DNA
atgaacgggacggaaggacctaacttctacgtcccattcagcaacgcaactggggtggtccgcagccctttcgagtatccgcagtactacctggccgaaccatggcaattctcaatgctcgcggcctatatgtttttgctgatcgtgctgggcttcccaatcaatttcctgaccctctacgtcactgtgcaacataagaagctcagaacgcctctcaactatatcttgctcaacctggctgtggctgacctgtttatggtgcttggtggattcacttccaccttgtacacctcgctgcacggctattttgtgttcggcccgactggatgcaatttggaaggatttttcgcgaccctgggcggagaaatagcgctctggtccctggtggtcttggccattgaaagatacgtggtggtgtgcaagccaatgagcaacttccggttcggggagaatcacgctattatgggcgtggcgttcacctgggtgatggcacttgcgtgcgctgccccgccgcttgccggctggtcgcggtacattcctgaaggactgcagtgctcctgcggaattgattactacaccctcaagcctgaggtcaacaacgagtcgttcgtgatctacatgtttgtggtccattttacgatcccgatgatcatcatcttcttctgctacggacagctggtgttcaccgtcaaggaagccgcggcccagcagcaggaatccgctaccacccagaaggctgagaaagaagtcactcggatggtgattatcatggtgatcgccttccttatctgctgggtcccatacgcctccgtggcattctatatcttcacccatcagggaagcaacttcggaccaatcttcatgactattccggctttcttcgcaaagagcgccgcaatctacaatccggtgatttacatcatgatgaataagcaattcaggaattgcatgctgaccaccatctgctgcggaaagaacccgttgggagatgacgaagcctccgcaactgtttcgaaaactgaaaccagccaggtcgccccagca

SEQ ID NO: 18614 - DNA, 1044 bp, synthetic construct
  misc_feature 1..1044: note = source = /note="Description of Artificial Sequence: Synthetic coding sequence"
  source 1..1044: mol_type = other DNA
atgaatgggactgaaggacctaacttttacgtgccgttttcaaatgcaactggagtggtgcgctcgccctttgaatacccccagtactaccttgcggaaccttggcagtttagcatgctcgccgcatacatgtttcttcttatagtgcttggttttcccattaacttcctgacgctttacgtgaccgtccagcacaagaaactcagaaccccgctgaactatatcctcctgaacctggccgtcgcagatctgtttatggtgcttggtggctttacctccactctgtacacctcccttcatggttactttgtctttggaccaactggatgcaatctggagggcttttttgctacccttggtggagaaattgcactttggtcactggtggtcctggccattgaacggtacgtggtggtgtgtaagccaatgtcgaatttcagatttggagagaaccacgcgataatgggagtggcgttcacctgggtcatggcgcttgcatgtgccgcaccccctctggccggttggtcacgatacatcccagaaggcctgcaatgtagctgtggcatcgactactacacccttaagccagaagtgaataatgaatcatttgtgatttacatgtttgtggtgcactttactatccctatgattatcattttcttttgttacggccagctggtgtttactgtgaaagaagcagcagctcaacaacaagagtccgcaactacgcaaaaggcagaaaaagaagtgactcggatggtcattatcatggtgattgcatttctcatttgctgggtgccatacgcatccgtggcattttacatctttacccatcaaggctcaaatttcggtcctatctttatgacgatccccgcgtttttcgcaaagtccgcagccatatacaaccctgtcatttacatcatgatgaataagcagttcagaaattgcatgcttactacgatctgttgcgggaagaatcctttgggagatgatgaggcctctgctaccgtgtcaaaaacggaaacgtcgcaagtggcacctgcc

SEQ ID NO: 18615 - DNA, 1044 bp, synthetic construct
  misc_feature 1..1044: note = source = /note="Description of Artificial Sequence: Synthetic coding sequence"
  source 1..1044: mol_type = other DNA
atgaacgggactgaggggccgaatttctatgtcccgttctctaacgctacaggagtagtccggagccctttcgagtaccctcagtactatctggcagagccatggcaattcagcatgcttgctgcttatatgttcttactcatagtgcttggatttcctattaacttccttactctgtacgtgaccgtccagcacaagaaactaagaacccctttgaactacatattgttaaacctagcagtagctgaccttttcatggtgctgggcggcttcaccagcaccctctacacctccttgcatgggtacttcgtgtttggccctacaggctgtaatttggaagggttcttcgcaactctgggcggcgaaattgcactgtggagtctagtcgtgctggccattgagaggtacgtcgtggtgtgcaaacccatgagcaacttccggttcggcgaaaaccacgcaataatgggcgtagcttttacttgggtgatggctctggcctgtgcggctccccccctggctgggtggtcaaggtacattcccgagggactgcagtgtagctgtggaatagactactatactctgaaacctgaagtgaataacgagagctttgtgatttacatgtttgtagtccacttcacgattcccatgataattatctttttttgctatggccagctggtcttcacggtgaaagaggctgcggctcagcaacaagagagcgccactacacagaaagccgaaaaagaagtgacaagaatggtcatcatcatggtgattgccttcctgatttgttgggtgccatatgcctccgtggccttctacatttttactcatcaaggctccaacttcggtcctatttttatgactatccccgcttttttcgccaaatccgccgccatctacaaccctgtgatttatatcatgatgaataaacaatttagaaattgtatgctgaccacgatttgctgcgggaaaaaccccctgggagatgatgaagcaagcgccacagtgagcaaaactgagaccagtcaggttgcccctgcc

SEQ ID NO: 18616 - DNA, 1044 bp, synthetic construct
  misc_feature 1..1044: note = source = /note="Description of Artificial Sequence: Synthetic coding sequence"
  source 1..1044: mol_type = other DNA
atgaatgggaccgaagggccaaatttctatgtgcctttttccaacgcaactggtgtcgtccggtcgccattcgaatacccccaatactaccttgcagaaccctggcaattttcaatgctggctgcctacatgttcctgctgatcgtcctcggttttccgatcaattttctgactttgtacgtaactgtgcaacataagaaactcagaactccacttaactatatactccttaatcttgcagtggcggatctgtttatggtactgggtggatttacctcaaccctttacacctcccttcacggctactttgtgttcgggcctacgggatgtaacctcgaggggtttttcgcgacccttggaggagagatagctctctggtcactcgtggtgttggcaatcgaacgctacgtggtggtgtgtaagcctatgtcgaactttcgatttggcgagaatcatgcgattatgggagtggcatttacgtgggtgatggcgctcgcatgcgccgcaccaccattggccggatggtccagatacattccagagggcttgcagtgttcgtgcggaattgattactataccctcaagcctgaggtcaacaacgaatcgtttgtcatttacatgtttgtcgtgcacttcaccatcccgatgattatcattttcttctgttacggacagcttgtattcactgtgaaagaagcagctgcccagcagcaagagagcgcaaccacgcagaaagcagaaaaggaagtgaccaggatggtgataatcatggtgatcgccttcctgatctgttgggtcccctacgcttcagttgccttttacattttcacccatcaaggtagcaattttggccctatctttatgactattcctgcgttctttgctaagtccgcggcaatttacaacccagtgatttacatcatgatgaacaagcagttccgcaactgtatgctgactaccatttgctgcgggaagaaccccctgggagatgacgaagcaagcgcaacggtgtctaagacggaaacttcccaagtggcacctgcg

SEQ ID NO: 18617 - DNA, 1044 bp, synthetic construct
  misc_feature 1..1044: note = source = /note="Description of Artificial Sequence: Synthetic coding sequence"
  source 1..1044: mol_type = other DNA
atgaatggaaccgagggtcccaatttctatgtcccattttctaacgcgacaggggttgtgagatctcccttcgagtatccacagtattacttggctgagccctggcagttctccatgcttgctgcttatatgttcctcctgatagttcttggctttccaatcaatttcttgaccctctacgtgaccgtgcagcataagaagctccgcactccattgaattatatcctgctgaatctcgccgtggccgatctgtttatggtgctgggagggtttaccagtacactttacacctccctccacggctatttcgttttcggcccaaccggatgcaacctcgaagggttttttgctacacttgggggagaaattgccctctggagccttgtagtgctcgccatagagcgatatgttgtagtgtgcaagcccatgtccaacttccgatttggcgagaaccacgccatcatgggggttgctttcacgtgggtgatggctcttgcttgcgctgctccaccgctggccggctggagcagatatattcctgagggcctccagtgctcttgcgggatcgattactacactctgaagcccgaggtgaataacgaaagttttgtgatttacatgttcgttgttcattttaccatccccatgatcattatctttttttgttatggtcaactggtgttcacagtcaaagaggctgctgcgcagcagcaggagtccgccacaacgcaaaaggcagagaaggaagtgactaggatggtgatcatcatggtgattgctttcctgatttgctgggtcccatatgccagcgtcgcattctacattttcacacaccagggctccaacttcggacccatcttcatgactatccccgccttcttcgctaaaagcgcagccatttacaaccccgtgatatatatcatgatgaataagcagttccgcaactgtatgctcacaactatatgctgtggcaaaaaccctctcggggatgatgaagctagtgcaacggtgagtaaaaccgagacgagccaagtggctcccgcc

SEQ ID NO: 18618 - DNA, 1044 bp, synthetic construct
  misc_feature 1..1044: note = source = /note="Description of Artificial Sequence: Synthetic coding sequence"
  source 1..1044: mol_type = other DNA
atgaacggaactgaaggtccgaatttttacgttcctttctctaacgccaccggggtggtccgtagccccttcgaatatccgcagtattaccttgcggagccatggcaattctctatgctcgccgcttatatgtttctgctcatcgttctgggtttcccgatcaacttcctgacactgtacgtgactgttcaacataaaaagctgcggaccccgctgaattatattctgttgaacttggccgttgcggacctgttcatggttcttggtggctttacaagcaccttgtacacttctctgcacggctatttcgtgttcggtccaactgggtgtaacctagaaggttttttcgctactctgggaggtgagattgcactgtggagcctggtggtcctggcgatcgaacgctatgttgtggtgtgtaaacccatgagcaactttcgatttggagaaaatcacgcgattatgggcgtggcatttacctgggtgatggctttggcctgtgcagctccgcctctggctggctggtcgaggtatatccctgagggcctgcaatgctcctgcggaattgactactacactctgaaacctgaggtgaacaacgagagcttcgtgatctatatgttcgtcgttcacttcaccattccaatgattatcatctttttctgttacggtcagctggtcttcaccgttaaggaagccgctgcgcagcagcaggagagcgccacgacgcaaaaagccgagaaagaggtgacacgcatggtcatcatcatggtgatcgcttttctcatctgttgggttccttacgcgagcgttgcattctatattttcacccaccagggtagcaattttggtccgatattcatgaccattccagcgttcttcgcgaagtccgctgccatttacaatccggtcatttacatcatgatgaataagcagtttcgcaattgcatgctaaccactatttgctgtggtaaaaatccactgggcgatgacgaagctagcgcgaccgtgtctaaaacggagactagccaggtggctccggct

SEQ ID NO: 18619 - DNA, 1044 bp, synthetic construct; identical to SEQ ID NO: 18560
  misc_feature 1..1044: note = source = /note="Description of Artificial Sequence: Synthetic coding sequence"
  source 1..1044: mol_type = other DNA

SEQ ID NO: 18620 - DNA, 1254 bp, synthetic construct
  misc_feature 1..1254: note = source = /note="Description of Artificial Sequence: Synthetic coding sequence"
  source 1..1254: mol_type = other DNA
atgcctagttcagtatcctggggaatcctgctcctggccgggctgtgttgtctggtgcctgttagtctggctgaagacccccagggggatgctgctcagaagacggacacatcccaccacgaccaagatcatcccacgttcaataagataactcccaacctggcggaattcgcatttagtctctataggcagctggcgcaccagagcaatagtacaaatatttttttctcaccggtgagtatcgccaccgccttcgcgatgttaagcctgggaaccaaggccgacacccatgatgaaattttagaaggattgaattttaacctcaccgaaattcctgaggctcaaattcacgaaggattccaggagttgcttcggaccctgaatcagccggattcgcaactgcaacttaccacaggtaatggtcttttcttaagtgagggcctgaaactagtggataaatttctggaagacgtgaagaagctgtaccactcagaggcttttacagtgaatttcggcgacacggaggaggccaaaaaacagattaacgactatgtggagaaggggacccagggaaagattgtggacttggtgaaggagctcgaccgggacacagtcttcgcattggttaattatattttctttaagggtaagtgggagaggccctttgaggtgaaagataccgaagaagaggacttccacgtagaccaggtgaccacggtgaaggtgcctatgatgaaaaggttagggatgtttaacatccagcattgcaagaagttgtcaagctgggtcttgctgatgaagtatctcggaaatgctactgccatattcttcttacctgacgaaggcaaactgcaacacctcgagaatgaactgactcacgatatcattacaaaatttcttgaaaacgaggatcggaggtcagccagcctgcatctaccgaagttatctatcaccggtacgtatgacctcaagtctgtgttgggccagctcggaattactaaggttttttccaacggcgctgacctctccggcgtgacagaggaggcaccactaaagttgtccaaagcggtgcataaggctgtcctcactatcgacgaaaaaggcacggaagcagctggagctatgtttctcgaagctattcctatgagtattccacccgaggtgaagtttaacaaaccttttgtgttcttaatgattgagcagaataccaagtcccccttgttcatgggcaaggtggtaaacccgacacagaaa

SEQ ID NO: 18621 - DNA, 1254 bp, synthetic construct
  misc_feature 1..1254: note = source = /note="Description of Artificial Sequence: Synthetic coding sequence"
  source 1..1254: mol_type = other DNA
atgccctcgtcggtgtcctggggtatattgcttctcgctggtctttgttgtctggtgccagtgtcgcttgccgaggacccacaaggagatgcagcacaaaagaccgatactagccatcatgatcaagaccatcctactttcaataagattactcctaatcttgcagaatttgcctttagcctgtacagacaacttgcgcatcagtccaactcgaccaacattttcttctctcccgtgtcgattgcaactgcgttcgcaatgctgtcgctcggtaccaaggctgatacgcatgacgaaatcctcgaaggccttaacttcaacctcaccgaaatcccagaagcgcagattcacgaaggatttcaggagctccttcgcacgcttaatcaacctgattcacagctccagctcacgaccggaaatggtctgtttctgtcagaaggactcaaactggtcgacaagtttcttgaggacgtcaaaaagctctaccacagcgaagcgttcaccgtcaacttcggagacaccgaagaggcaaagaagcagattaacgattacgtggaaaagggaactcaagggaaaattgtggaccttgtcaaggagctggaccgtgatactgtgtttgcgctggtgaattacatattctttaagggtaagtgggagcgaccgtttgaggtgaaagataccgaagaagaggactttcatgtggatcaagttaccacggttaaggttccaatgatgaagcgcttgggtatgttcaatattcagcactgcaagaaactgtcgagctgggtgctgcttatgaagtacctggggaacgcaaccgccattttctttctgcctgacgaggggaaacttcaacacctggagaacgaacttacccatgatatcataaccaaatttctggaaaacgaagataggcgctcggcatccctgcatcttcctaaactctcgatcaccggaacttatgatctgaagtccgtcctggggcagcttggcattaccaaggtgtttagcaacggagccgatctttcgggcgtcactgaagaagccccgctcaagttgtccaaggcagtacacaaggccgtgttgactattgacgaaaaagggaccgaagccgcaggcgcgatgttcctcgaggcaatccccatgtccattcctcctgaagtaaagttcaataagcctttcgtctttcttatgatcgaacagaacaccaaatcaccactgttcatgggaaaggtcgtcaacccaactcagaag

SEQ ID NO: 18622 - DNA, 1254 bp, synthetic construct
  misc_feature 1..1254: note = source = /note="Description of Artificial Sequence: Synthetic coding sequence"
  source 1..1254: mol_type = other DNA
atgcccagctccgtgagttgggggatcctgctgctggcagggctgtgctgtctggtgcccgtttctctggcggaagatccgcagggtgacgccgctcagaagacggacacaagtcaccatgatcaggatcaccctaccttcaacaaaatcacacctaacctcgcagagtttgcctttagcctctatcggcagttggcgcatcagagcaatagtactaacatctttttttccccggtttctattgcgacagcgttcgccatgctgtccctcggtaccaaggctgatacgcacgatgaaatcttggaaggtctgaattttaacttgactgagatcccagaggctcaaattcatgagggttttcaggagttgctccgcactttgaaccagcccgacagccaattgcaattgaccactggcaatggtttgtttctgtctgagggtttgaagcttgtggataagttcctggaagacgtgaaaaagttgtaccattctgaggctttcacagtgaattttggggacactgaggaagcaaagaagcagatcaacgattatgtcgagaaaggaactcaggggaagattgttgatttggtgaaagagctggatcgggacactgtcttcgctctggtaaactatatcttcttcaaaggcaagtgggagagaccgtttgaagtgaaggatactgaggaggaggactttcacgtggaccaggtgacaaccgtgaaagtgcccatgatgaaaaggctgggcatgttcaacattcagcactgtaagaaactgagctcatgggtcctgcttatgaagtacttgggtaacgcaactgcgatattcttccttcccgatgagggaaaactgcagcacctcgagaacgaactgactcacgacattattaccaaattcctggaaaacgaggacagacggtccgctagcctccatttgcccaaactctctataacaggtacctacgaccttaaatctgttctcggacagctggggattacaaaggtgttttctaatggcgctgatttgtctggggtgacagaagaggcgcccttgaaactgtccaaagcagtgcacaaggctgtgctgacaattgacgaaaaaggcaccgaggccgccggagctatgttcctggaggccatccccatgtccatccctccagaagtgaaatttaataaaccctttgtcttccttatgatcgaacagaacactaaatcccctttgttcatgggcaaggtcgtgaatccgactcagaag

SEQ ID NO: 18623 - DNA, 1254 bp, synthetic construct
  misc_feature 1..1254: note = source = /note="Description of Artificial Sequence: Synthetic coding sequence"
  source 1..1254: mol_type = other DNA
atgccgagctctgtgagctggggaattcttctgctggcaggactgtgttgcctggtgccggtgagcctggccgaagatccgcagggggatgccgctcagaaaactgatacttcgcatcacgaccaggaccatcccaccttcaacaagatcacccctaacctggccgagtttgccttctccctgtaccggcaactcgcccaccagagcaactccaccaacatctttttctctcctgtctccattgcgactgcttttgccatgctgtccctggggactaaggccgatacccatgacgagatccttgagggactgaacttcaacctcaccgaaatcccagaagcacagatccacgagggctttcaggagttgttgcgcactctgaatcaaccagacagtcaactgcagcttactaccggaaacgggctgttcttgtccgagggcttgaaactggtcgacaaatttctggaagatgtgaaaaagctgtaccactccgaagcgttcaccgtcaacttcggcgacaccgaggaggcgaagaagcaaatcaacgattacgtggagaaaggaacccaaggtaagattgtcgacttggtgaaagaactcgatcgggacaccgtgttcgcgctggtgaactacatctttttcaaaggaaagtgggaacgcccattcgaagtgaaggacactgaagaggaggactttcatgttgaccaggtcaccactgtgaaggtgcctatgatgaagcgcctggggatgttcaatattcagcactgcaaaaagctgtcgagctgggtcctgctcatgaagtacttgggaaatgctaccgccatctttttcctgccggatgaaggaaagctccaacatctggagaacgaattgactcacgacatcattaccaagttcctcgagaacgaggacaggagaagcgcgagcctgcacctcccgaagctcagcatcacgggcacttacgatctcaagagcgtgctcggtcaacttggaatcactaaggttttctcgaatggcgcagacctgtcaggcgtcacggaagaagcgccgctcaagctctccaaggccgtgcataaggctgtgctcaccattgatgagaaaggaacggaagccgcgggagctatgttcctggaagcaatcccaatgtcaatcccaccagaggtcaagttcaataaacctttcgtgttccttatgatcgaacaaaataccaaatcgcctctgttcatgggaaaggtggtgaaccccacccaaaag

SEQ ID NO: 18624 - DNA, 1254 bp, synthetic construct
  misc_feature 1..1254: note = source = /note="Description of Artificial Sequence: Synthetic coding sequence"
  source 1..1254: mol_type = other DNA
atgccttcatcagtgtcctggggcattctcctcctcgcggggttgtgttgtctggtgccagtctccctcgcagaggatccacaaggtgacgctgcacaaaagaccgatacctcccatcatgatcaagatcatccaacgttcaataagattacccctaacttggccgaatttgcctttagcctgtacagacaacttgcacaccagagcaactcgactaacattttcttttcccccgtcagcatagctactgccttcgcaatgctttcactgggcaccaaggcagatactcatgacgaaattcttgaggggctcaacttcaatctcacggagatccctgaagcacagatccatgaaggtttccaagagctgttgagaaccctgaaccagcccgatagccaattgcaacttacgactggcaacggactgttcctttcggaggggttgaaacttgtcgacaaatttctggaggacgtcaaaaaactctatcattccgaagcctttaccgtcaattttggcgataccgaggaagcaaagaaacaaatcaacgattacgtggaaaaggggacccagggaaagattgtcgacctggtgaaggagctggatagggacactgtctttgcactggtgaactacattttcttcaaggggaagtgggagcgtccgttcgaagtcaaagatactgaagaagaggactttcacgtcgatcaagtcactacggtgaaggtgccaatgatgaagcgacttggtatgttcaatattcagcattgcaaaaaactcagtagctgggtgctcctcatgaagtacctgggtaatgcaaccgcaatcttctttctgccagacgaaggaaagctccagcacctggagaacgaacttactcatgacattatcaccaagtttcttgaaaatgaggaccggcggagcgcctcgctccacctgcctaagttgagcatcaccggaacctacgacctgaaaagcgtccttggacagctcggaattactaaagtcttttccaacggtgcagacctttcgggtgtcaccgaagaagcaccactgaagctctcaaaggccgtccataaggccgtgctgaccatcgatgaaaagggaactgaagcagcaggtgcaatgtttcttgaggctatccctatgtcaattccccccgaagtgaagtttaacaagccttttgtgttcctgatgattgagcaaaatactaagtcgcccctctttatgggtaaggtcgtgaacccaacccaaaag

SEQ ID NO: 18625 - DNA, 1254 bp, synthetic construct
  misc_feature 1..1254: note = source = /note="Description of Artificial Sequence: Synthetic coding sequence"
  source 1..1254: mol_type = other DNA
atgccctccagcgtgagctggggcatcttgcttcttgcgggactttgctgtctggtgcccgtgtccttggctgaggacccgcaaggagacgccgcccaaaaaaccgacacctcgcaccacgaccaggatcacccaacttttaacaagattacccctaatcttgcagaattcgcgtttagcctgtaccgccaactcgcccaccaatctaactcgactaatatcttcttctcacccgtttctatcgccacggctttcgcaatgctgtctctgggaactaaggctgatactcatgacgagatcttggagggactcaacttcaacctcaccgagatcccagaagcccaaatacatgaaggattccaggagctgctgcgcactctgaaccagccggacagccagctgcaactgactacgggcaatggtctgtttctcagcgaaggactcaagctcgtggataagttcttggaagatgtcaagaaactgtaccactccgaggcattcactgtgaattttggggacactgaagaggcgaagaaacagataaatgattacgttgagaagggaacccagggtaaaatcgttgatctggtcaaggaactggaccgcgatacggtctttgcgctcgtcaactatatctttttcaaagggaagtgggagaggcctttcgaggtgaaggacaccgaagaagaggacttccacgtcgaccaggtgactactgtgaaggtgccgatgatgaagcgcctgggcatgttcaatatccaacattgcaaaaaactctcctcctgggtgttgttgatgaagtacctgggcaacgccaccgctatcttcttcctcccggatgagggaaagctgcagcatctggaaaatgagcttacgcatgatatcatcaccaagttccttgagaacgaggacagacgcagcgcctcgctccacctgccaaagctctcaatcaccggcacctacgatctgaaaagcgtgcttggacagctgggcattactaaggtgttttccaacggagctgatttgtcgggtgtcactgaagaagctcctctgaagctctcaaaggcagtgcacaaggccgtcctcaccatcgacgagaaggggaccgaagccgccggtgcaatgtttctggaggccatcccaatgtcgattcctccggaagtgaagttcaataagccgttcgtgttcctgatgatcgaacaaaacacgaaatcaccgctctttatgggaaaagtcgtcaacccgacccagaag

SEQ ID NO: 18626 - DNA, 1254 bp, synthetic construct
  misc_feature 1..1254: note = source = /note="Description of Artificial Sequence: Synthetic coding sequence"
  source 1..1254: mol_type = other DNA
atgcctagtagcgtctcctggggaattctcctcctggcaggcctgtgctgcttggtccccgtgagtctagctgaggatccccagggagatgcggctcagaagaccgacacaagccaccacgaccaggatcaccccacttttaacaagatcacacctaatcttgctgaatttgcgttctccctctatcgtcagctcgcccaccagagtaattcaaccaatatttttttcagccccgtatcaattgctacggccttcgcaatgctgtccctgggcacaaaggcagacactcacgatgaaatcctcgagggactgaacttcaatttgaccgagatccctgaggctcagattcatgagggctttcaggaacttctgcgcactctcaaccaacccgactcccagctccaactcacaaccggaaatggcctgtttctgtccgaagggctcaaactcgtggacaaattcttagaggatgtgaaaaagttgtatcactccgaagcttttacagtgaattttggtgacaccgaagaagccaagaaacagataaatgattatgttgagaagggcacgcaggggaaaattgtcgacttggtgaaggagctggacagagacacagttttcgcacttgtgaattacattttctttaagggaaagtgggagagacctttcgaggtgaaagatacagaggaggaggactttcacgtggatcaagtgacaaccgttaaagtgcccatgatgaagagactggggatgttcaatattcagcattgcaagaaactgtcttcatgggtgttactcatgaagtatctgggaaatgccactgccattttctttctcccagacgagggaaagttacagcacctggagaatgaattgacacatgatatcatcacaaaatttctggagaacgaggacagacgaagtgctagtctgcacttgccaaagctttccattactggcacctacgacctgaaatccgtactggggcagctgggcatcactaaggtgtttagcaacggagccgacctgtctggtgtgaccgaggaggcccccttgaagttgtcaaaggccgtccataaagccgtgttgaccatagatgaaaaaggtacagaggcggcgggcgcgatgttcctggaggctatacccatgtccatcccaccggaggtcaaattcaataagcctttcgtgttcctgatgatagaacagaatactaagagtccgctgtttatgggtaaggtggtgaatccaacccagaaa

SEQ ID NO: 18627 - DNA, 1254 bp, synthetic construct
  misc_feature 1..1254: note = source = /note="Description of Artificial Sequence: Synthetic coding sequence"
  source 1..1254: mol_type = other DNA
atgccgagctcggtgtcctgggggatcctcctcctggctggactttgttgcttggttcctgtgtccctcgccgaagatccacagggcgacgctgcccaaaagacggacacgtcgcatcatgaccaggaccaccccaccttcaacaagattacccctaatttggcggaattcgccttctctctttaccgacagctggcccaccagagcaactcgactaacattttcttcagccccgtctcgatcgccactgcattcgcaatgctgtcactggggactaaggctgatacccatgacgagatactcgagggcctcaacttcaatctgaccgagatccctgaggcccagatccacgaagggtttcaagaactgctcaggactctcaatcagcccgactcgcaactgcaattgactacgggaaacggactttttctgtccgaaggactgaagctggtcgataagtttttggaggacgtgaaaaaactgtaccatagtgaagccttcacggtgaacttcggagataccgaggaagccaagaaacagatcaatgactacgtagagaagggaactcagggcaaaatcgtggacctggtaaaggaactggacagagatactgttttcgccctggtcaactacatcttcttcaaaggtaaatgggaaagaccatttgaagtgaaggacactgaagaggaagattttcacgtcgatcaggtgaccaccgtaaaggtgcccatgatgaagcgcctcggtatgttcaatatccaacactgcaagaagctctcctcctgggtgttgctgatgaagtatctcggcaatgcgactgccattttctttctcccggatgaaggaaaactccaacacctggaaaacgaacttacccacgatatcatcaccaaatttctggagaatgaggacagacggtcggccagcctgcatcttccaaaactgtcgattaccggaacctacgatcttaagtcagttctgggtcagctgggcatcactaaggtgttctcaaacggcgcggacctgagcggggtcaccgaggaggccccgctgaagctgtcaaaggccgtgcataaggcggtgttgacgatcgacgaaaagggaaccgaagcggcgggcgcaatgtttctggaggctatcccaatgtcgattccgccggaagtgaagttcaacaagccgttcgtgtttctcatgatcgagcaaaacactaaaagtccgctgttcatgggaaaggtcgtgaacccgactcagaaa

SEQ ID NO: 18628 - DNA, 1254 bp, synthetic construct
  misc_feature 1..1254: note = source = /note="Description of Artificial Sequence: Synthetic coding sequence"
  source 1..1254: mol_type = other DNA
atgccttcgtccgtgtcatgggggatactgctgctggcggggctgtgctgcctggtgccggtgtctctggctgaggatccacagggagacgcagcccaaaagactgacacttctcaccatgaccaggaccatccaactttcaacaaaatcactcctaaccttgcagaatttgcattctccctgtacaggcagctcgcgcatcaatcgaattcaaccaacatcttcttcagccccgtttccatcgcaaccgccttcgccatgctgtcgctggggaccaaagccgacacccacgacgagatcctcgaaggactgaatttcaatcttacggaaatccctgaagcccagatccatgaggggtttcaagagttgttgcggacgcttaaccagccggatagccagttgcagcttacgaccggcaatggactgttcctttccgaagggctcaagctggtggacaaattcttggaggatgtgaaaaaactgtaccactcagaggcgttcacggtgaactttggagataccgaagaggctaaaaagcagatcaatgattatgtcgaaaagggcacccaaggaaagatcgtggatcttgtgaaggagttggacagagacactgtctttgctctggtcaactacatctttttcaagggaaagtgggaacgccctttcgaggttaaggatactgaagaagaggacttccacgtagaccaagtgaccactgtgaaggtgccaatgatgaagcggctcggaatgttcaacatccaacattgtaagaaactgtccagctgggtgctgctcatgaagtacctgggcaacgccaccgcaatcttcttcctgccagacgaaggaaagctgcagcacctggagaatgagctcacccatgacatcattactaaattcttggaaaacgaggacagacgcagcgcgagtttgcacctgccaaagctctcgatcactggcacgtacgacctcaagtccgtgctggggcagctgggtattactaaggtcttttcgaacggagccgatctctcaggggtcactgaagaggcccctcttaaactgagtaaggcggttcacaaggccgtgctcaccattgatgaaaagggtaccgaggcggctggcgcgatgtttctggaagctatcccgatgtccattccgccagaagtcaaattcaacaagcccttcgtgttcctcatgattgaacagaacaccaagtccccgctgtttatgggaaaagtagtgaaccccacccaaaag

SEQ ID NO: 18629 - DNA, 1254 bp, synthetic construct
  misc_feature 1..1254: note = source = /note="Description of Artificial Sequence: Synthetic coding sequence"
  source 1..1254: mol_type = other DNA
atgccgtcgagcgttagttggggcattttactgctcgctggcttatgttgccttgtgccggtctctctggcggaggatcctcagggcgatgccgcgcagaaaaccgatacttcacaccacgaccaagatcacccaacgttcaacaaaatcactcccaatcttgcggagtttgccttctctctgtacaggcagctggctcatcagagtaatagtacaaatatctttttttcaccagtaagtatagcgacagccttcgcaatgctaagcctcgggaccaaagctgacacgcacgacgagatactagaaggcttaaactttaacttaacagagattcccgaagcccagattcacgaaggcttccaagaactgctgaggaccctgaaccagccggattcccagttacagctgactacaggtaatggcctttttctttcggaggggctgaaactcgttgataagttcttggaagacgtcaaaaaactctaccattcggaagccttcactgttaactttggcgatactgaagaggccaagaagcagattaatgactatgtggagaaggggacccaggggaagatcgtggacctggtgaaagagctggatcgggatacagtgtttgccctggttaactacatctttttcaagggaaagtgggaaagaccctttgaggtaaaagataccgaagaggaggattttcatgtggatcaggttaccactgtaaaggtccccatgatgaaacgcctgggcatgtttaacatccagcactgcaaaaaactgtcatcttgggtgctccttatgaagtatctgggcaacgcgactgcgattttcttcctgcctgatgaagggaagctgcagcatctggagaacgaattaacccacgatatcataactaaatttctggagaacgaagaccgcagatctgcgtccctgcatctgcctaagctctcaatcactgggacctatgaccttaagagcgtgttggggcaactaggcattaccaaagttttctctaacggcgcagatctctccggcgtgaccgaagaggcgcctctgaagctgtctaaggccgtacataaagctgtgctgactattgacgaaaagggcacggaggcggctggggccatgttcctggaagccattccaatgagcattccgccggaggtgaagttcaacaagccgttcgtgttcctgatgattgagcagaacaccaagagccctctgttcatgggcaaagtcgtgaatcctacccagaaa

SEQ ID NO: 18630 - DNA, 1254 bp, synthetic construct
  misc_feature 1..1254: note = source = /note="Description of Artificial Sequence: Synthetic coding sequence"
  source 1..1254: mol_type = other DNA
atgccatcatccgtatcttggggaatcctgcttctggcagggctgtgctgtctggttccagtgtccctggctgaagatccccaaggggatgcggcccagaagactgatacctcccatcatgatcaggaccacccaacttttaataagattactcctaatttagctgagttcgcctttagcctctacagacaattagcccatcagtccaacagcacaaacatcttcttctctccagtcagcatcgccaccgccttcgctatgctctctttgggtacaaaagcagacacccacgacgaaatcctcgaaggcctgaactttaaccttaccgaaatacctgaggcccagattcacgaaggtttccaggagttactcagaaccctgaatcagcccgactcccagctgcagctgaccacggggaatggtctgtttttgtcagaaggcctgaaactcgtggacaagttcctagaggatgtgaaaaagctgtatcactccgaggcttttacggtgaattttggggatacagaagaagccaagaagcagatcaacgactatgtggagaaggggacacaaggaaagatcgtcgacctggtgaaagagttggacagagataccgtgttcgcacttgttaactatattttttttaaaggcaagtgggagcgtccctttgaggtgaaagacaccgaggaggaggacttccacgtggatcaagtcacaaccgtcaaagtgcccatgatgaagagacttggcatgtttaacattcagcattgcaagaaattgtcctcctgggttttactgatgaaatacctgggtaatgctaccgcaattttctttctcccggatgagggaaaattacaacatttggaaaacgagctgacccatgacatcatcaccaagttcctagagaacgaggatcgccgctcggctagtttacacttgccgaaactttccatcacaggcacctacgacctaaagagtgtcctaggacagctagggatcactaaggtgttcagcaatggagccgatctatctggcgtgacagaagaagccccactgaagctgagcaaagcagtgcacaaagcagtgctgactatcgatgagaagggcacagaagccgcaggggccatgttcttggaagctattcctatgtccatccctcctgaagtgaagttcaacaaaccatttgtgttcctaatgatcgagcagaatactaaatcacctctattcatggggaaggtggttaaccctactcagaaa

SEQ ID NO: 18631 - DNA, 1254 bp, synthetic construct
  misc_feature 1..1254: note = source = /note="Description of Artificial Sequence: Synthetic coding sequence"
  source 1..1254: mol_type = other DNA
atgccgtcgtccgtgtcgtggggcatccttctcctggctggactgtgttgtctggtgccggtgtccttggcagaagatccgcagggagatgcagcccaaaagactgacacttcgcatcacgaccaggatcacccaaccttcaataagatcaccccgaacctggccgagtttgctttctccctctacagacaactggctcatcaatccaactccaccaacattttcttctcccccgtctccattgccaccgctttcgccatgttgtcactgggtactaaggcagacactcatgacgaaatcctggagggactcaacttcaatctgaccgagattccggaggcgcagatccatgaaggattccaggagctgctccgaacgctcaaccaaccagactcgcagcttcagctcactaccggaaatggactgttcctctccgaaggattgaagctggtggacaagtttctggaggacgtgaagaaactgtaccactcggaggcctttaccgttaactttggagatactgaggaagccaagaaacagatcaacgactatgtagagaagggaactcagggaaaaatcgtggatctcgtcaaagagctggaccgcgacaccgtgtttgcgttggtcaattacatattcttcaagggaaagtgggagcgcccttttgaggtaaaagacaccgaagaggaggacttccacgtcgaccaggtgacgaccgtgaaggtcccgatgatgaagcggctgggcatgttcaacatccagcactgcaagaaactgtcatcttgggtcttgttgatgaagtacctcggtaatgcgaccgccattttcttccttccggatgaggggaaactgcaacacctggaaaacgaactcacgcatgatatcatcaccaaattcctcgaaaatgaagatcggcgctcggcgtcccttcacctcccaaaactttcgatcaccggaacgtacgatctgaagtccgtcctgggacaactgggaatcaccaaggttttttccaacggggcagacttgtcgggggtcactgaagaagcgccgctcaaactcagcaaagcagtgcataaggcagtgctgacgatcgacgaaaaagggaccgaggccgccggggcaatgtttctggaggctatcccgatgtcaatcccacccgaagtgaagttcaacaagccttttgtgttcctgatgattgaacagaataccaagtcgcctctcttcatgggtaaggtggtgaacccaacccaaaaa

SEQ ID NO: 18632 - DNA, 1254 bp, synthetic construct
  misc_feature 1..1254: note = source = /note="Description of Artificial Sequence: Synthetic coding sequence"
  source 1..1254: mol_type = other DNA
atgccgagctcagtctcctggggcatcctgctgctggccgggctctgctgtctggtgcctgtgtccctggcagaggacccgcagggggatgcagcccaaaagaccgatacgtcacaccatgatcaggaccatcctaccttcaacaaaatcaccccgaatctggccgaattcgcattcagcctgtaccggcagctcgcccaccaatccaactcgaccaacatcttcttcagcccagtttcgatcgctaccgcgttcgccatgttgtctctgggcaccaaggcagatacccatgacgagatactcgagggcctgaatttcaatttgaccgaaatacccgaagcacagattcacgaggggttccaagagctccttcgcaccctgaaccagcctgacagccaactccagctcacgaccgggaacggtctgttcctgtcagaaggactgaaattggtggataagttcctggaggacgtgaagaagctgtaccatagcgaagcattcactgtcaacttcggagacaccgaagaagccaaaaagcaaatcaacgattacgtggaaaagggcactcagggcaagatcgtggatctcgtgaaagaactggatagagacaccgtctttgctctggtgaactacatcttctttaaaggtaaatgggagcggccttttgaggtcaaggataccgaggaagaagatttccatgtcgatcaggtgacgactgtgaaggtcccaatgatgaagcgcctgggaatgttcaatatccaacactgcaagaagctgtcgtcgtgggtgctgctgatgaagtacctgggtaacgccactgccatctttttcctgccggacgagggcaagctgcagcatcttgaaaacgagttgacccacgacattatcacgaagttcttggagaacgaggaccgcagatcagccagcctgcacctgccgaagctgagcatcaccggaacctacgatctcaagtcggtgctgggacagttgggaattaccaaggtgttctcaaatggagcggacctctcgggtgtgactgaggaggctcccctcaagctcagcaaggccgtgcacaaagccgtgcttactatcgacgaaaaaggaacggaagcggcaggagccatgttcctggaagccatcccaatgagcatcccgcctgaagtgaagttcaacaaacctttcgtgtttctgatgatcgagcaaaataccaagtcacccctgttcatgggcaaggtggtgaatccaacccagaaa

SEQ ID NO: 18633 - DNA, 1254 bp, synthetic construct
  misc_feature 1..1254: note = source = /note="Description of Artificial Sequence: Synthetic coding sequence"
  source 1..1254: mol_type = other DNA
atgccttcctctgtaagttggggcattttactgttggccggcctgtgttgcctcgtccctgtttccttggccgaagatccacaaggtgatgcggcgcagaaaacagatacgtcccaccatgaccaagatcaccccaccttcaacaagattacccccaatctggccgagttcgcattttccttgtaccgtcagttggcccaccagtcaaattcaaccaatattttcttctcaccggtgtcaatagctacggcattcgcgatgctttctctaggcaccaaggcagatacacacgacgagatacttgaggggttaaacttcaacctgaccgagatccctgaagcacaaatccacgagggttttcaagaactgctcagaacactgaaccaacccgactcacaattgcagctgaccacaggcaatggtctgttcctgtctgagggacttaaactcgttgacaagtttcttgaagacgtaaagaagctctaccactccgaagccttcacagtgaactttggtgatacggaggaagctaagaaacagatcaatgattacgttgagaagggtacccagggcaagattgtggatctggtgaaggaactcgatagggacactgtctttgcactggtcaactatatcttttttaaagggaaatgggaacgtccctttgaggtgaaagacacagaggaagaagactttcatgtggatcaggtgaccacggttaaggtccctatgatgaagaggttgggcatgttcaacattcagcattgcaagaagctgtcatcctgggtgctactgatgaagtacctcggtaatgccacagccatattttttttgccagacgaaggcaaacttcaacatctggagaacgaactgacccatgatatcattaccaaatttctcgaaaacgaggatcgcaggtctgcctctctgcatctgccaaagctctctattacaggcacatatgacttgaagagcgtgctggggcagctcggcatcacaaaagtgttcagcaacggggcagacctgtccggggtgaccgaggaagcccccttaaaactcagtaaggccgtacacaaggcagtcttaacaatcgatgagaaaggaactgaggccgcgggagccatgtttctggaggccatcccaatgtccattcctcccgaggtaaagttcaataagcctttcgtgtttctgatgatcgaacagaataccaagtcccctttgtttatgggcaaggttgtgaatccaacccagaaa

SEQ ID NO: 18634 - DNA, 1254 bp, synthetic construct
  misc_feature 1..1254: note = source = /note="Description of Artificial Sequence: Synthetic coding sequence"
  source 1..1254: mol_type = other DNA
atgcccagttctgtcagctggggtattctgcttctcgcaggtctttgctgtctcgtgcctgtgagcctggcagaggatccccagggcgatgcagcacaaaaaaccgataccagccatcatgatcaggaccatcccacttttaacaagattacccctaacctcgctgaattcgctttttccttgtaccgacaactggcccaccaatcgaactcgacgaacattttcttttcccccgtgagcatcgcgacggcgtttgcaatgctttcgcttggcactaaggcggatacccacgatgagatcctggaggggcttaactttaacctcaccgaaataccagaggcacagatccatgaaggatttcaagaactgctccgaactcttaaccagccggattcgcaacttcaactgactaccggcaacgggttgtttttgagcgaggggctgaagctggtcgataagttccttgaagatgtcaaaaaactttaccattcggaagccttcaccgtgaactttggagatactgaggaagcaaagaagcagattaatgactacgtggaaaagggtacccagggaaagattgtggacctggtcaaggaactggatcgcgacaccgttttcgcacttgtgaattacattttctttaaagggaagtgggagaggccattcgaggtcaaggacaccgaggaggaggacttccatgtggatcaggtcaccactgtcaaagtgccgatgatgaagagactcggaatgtttaacatccaacattgtaagaaactgtcgtcttgggtgcttcttatgaagtaccttggaaacgcaacggctatctttttcctgcctgatgaagggaaacttcaacatctggagaacgagcttactcacgacattatcactaaattcctggaaaacgaggatagacgttccgcatcgctccatctgcctaaactttcaattaccggaacttacgatctgaaatcggtcctcggacaacttggaattactaaagtgttttccaacggagcagatctttccggcgtgactgaagaagcgccactgaagctgagcaaggccgtgcacaaagctgtcctgactatcgatgaaaagggcaccgaggcggcaggtgcaatgttccttgaggctattccaatgtccattcctccagaggtcaagttcaataagccctttgtgttcctgatgatagaacaaaacacgaaatcgcccctgtttatggggaaggtggtgaaccccacccaaaag

SEQ ID NO: 18635 - DNA, 1254 bp, synthetic construct
  misc_feature 1..1254: note = source = /note="Description of Artificial Sequence: Synthetic coding sequence"
  source 1..1254: mol_type = other DNA
atgccatctagcgtgagctggggaatcttactcctcgcaggactgtgttgtctggtgcccgtgtcactggcagaagatccgcagggtgacgccgcacagaagaccgatacctctcatcacgatcaggaccaccccaccttcaataaaattacccccaatctcgccgagttcgccttcagtttatacagacagctagcccatcagtcgaattcaaccaacatttttttttcgcccgtcagtatcgccactgcctttgccatgttgagtctggggaccaaggccgacacccacgacgaaattctcgaaggccttaactttaacctaacagaaatccccgaagcccagatacatgaggggttccaagagctgttaaggactttaaaccagcccgattcccagttgcagttgacaactggcaatgggctgttcctgtccgagggactaaagcttgttgacaagttcctggaggatgtcaagaagctgtatcactccgaagccttcaccgttaattttggtgatacagaagaggctaaaaaacagatcaatgactatgttgagaagggaacacaaggtaaaatagtagacctggtcaaagagctcgatcgcgacacagtgtttgcactggtgaattacatcttcttcaagggtaaatgggagcgtcctttcgaagtgaaagatactgaggaggaggacttccacgtggaccaggttactactgttaaggttccaatgatgaagaggctgggaatgttcaacattcaacactgtaagaagctctcttcttgggtgttgttgatgaagtacttgggcaacgccactgccattttctttctgccagatgagggtaagctccaacacctggagaacgagttaacccatgacattataacaaaattcttggaaaacgaggatcggaggagcgcttccctgcacctgccgaagctgagcattaccggcacttacgatctgaagtctgtgctgggccagttgggcataactaaagttttcagcaatggagccgacctcagcggcgtcaccgaggaggctccgcttaagctttcgaaggctgttcacaaggcagttctgaccattgacgaaaaggggaccgaggcagccggcgccatgttcttagaggcaattcccatgagcatccctcccgaagtgaaattcaataaacccttcgtgttcctgatgatagagcagaatactaaatccccactctttatgggaaaagtggttaatcccacccagaaa

SEQ ID NO: 18636 - DNA, 1254 bp, synthetic construct
  misc_feature 1..1254: note = source = /note="Description of Artificial Sequence: Synthetic coding sequence"
  source 1..1254: mol_type = other DNA
atgcctagctccgtctcctggggaattcttctgcttgccggcttgtgttgtctggttccggtgagcctggccgaagatccgcaaggcgatgcagcgcaaaagaccgacaccagccatcacgatcaagaccatcctactttcaacaagataacccctaacctggcggaatttgccttctccctctaccggcaacttgcacatcaatcgaacagcaccaacatctttttctcccctgtgtccatcgccaccgcgtttgccatgctgtcgcttggtactaaggccgatacccatgatgaaatcctcgaaggacttaactttaatctgactgagattccagaagcacagatccatgaaggttttcaagagctcctgcgaacgttgaaccagcctgattcccaacttcaacttaccaccggtaacggcctctttcttagcgaaggccttaagttggtggataagttccttgaggacgtcaaaaaactttatcacagcgaagcctttactgtgaattttggtgacaccgaggaagcaaagaagcaaatcaatgattacgtggaaaaaggtacccaaggaaaaatcgtcgatcttgtgaaagagctggacagagatactgtgtttgcactggtcaactacatcttctttaaaggtaaatgggagaggccttttgaagtgaaggacactgaagaggaggattttcacgtggatcaagtgaccactgtgaaggtgcctatgatgaagagactcgggatgttcaatattcaacactgcaagaagctctcatcgtgggtgctgctgatgaagtaccttgggaatgccactgccatcttttttctgccagatgaaggcaaacttcagcatcttgagaacgaacttacccatgacattatcaccaagttccttgaaaatgaagataggcgttcggcatcactccatcttccaaagctctcaatcactggaacctacgatctgaagagcgtcctgggacaacttggaattaccaaagtgttctcgaacggcgcagatctctccggggtcaccgaagaagcgcctctgaaacttagcaaggcagtgcataaagcagtgctgactattgacgagaaaggcaccgaggcagcaggggcaatgtttctggaggctatcccgatgtccataccaccagaagtgaagttcaataaaccgttcgtctttctgatgattgaacaaaataccaagtcgcctctcttcatgggaaaggtggtgaatcccactcaaaag

SEQ ID NO: 18637 - DNA, 1254 bp, synthetic construct
  misc_feature 1..1254: note = source = /note="Description of Artificial Sequence: Synthetic coding sequence"
  source 1..1254: mol_type = other DNA
atgcccagcagcgtgagttggggcatcctcctgctagccggcctttgctgtcttgttcctgtgagcctggcggaggaccctcagggggacgctgcccagaagacggacaccagccaccacgatcaggatcatcctacattcaataaaatcaccccaaacctggctgaatttgcgttttccctttatagacagctcgcacatcaatctaacagcaccaacatctttttctcccctgtgagcatcgctacagcgttcgccatgctgagtttaggcaccaaggccgacacccatgacgagatcctagagggcctaaatttcaacctgacagagatccccgaagcacagatacatgagggtttccaggagctccttagaacgctcaaccagcccgattcccaactgcaattgacgacgggcaatggcctgtttctcagcgaggggctaaagctggttgacaaatttctggaagatgtgaaaaagctttatcatagcgaggccttcaccgtgaattttggtgacacagaggaggctaagaaacaaataaacgattacgtagaaaagggaactcagggcaaaatcgtggatctggtaaaagagctcgacagggataccgtgttcgcgctagtgaattatatcttcttcaaaggtaagtgggaaagaccatttgaagttaaggatacagaggaggaagatttccatgtcgatcaggtgactaccgtgaaggtgcccatgatgaagaggcttgggatgtttaacatacagcattgtaaaaagttaagtagctgggtcctgctgatgaaatatctcggaaatgccacagctatcttctttctacctgacgaagggaaattgcagcatctcgagaacgagttaacgcacgacattataactaaattccttgaaaatgaagataggcggagtgcttctctccatttgcccaagctctccatcacaggtacttacgacttgaagtcagtgctcggacagctgggtatcaccaaggttttttcgaatggcgccgatctaagcggcgtgacggaggaggcgcccttaaaactcagcaaggccgtgcataaagccgtactgaccatcgatgagaaaggaactgaggccgcgggtgctatgttcttggaagccatccctatgtccataccaccagaagtgaagttcaataaaccttttgtgttcctgatgattgaacagaacacgaagtctcccttattcatggggaaggttgttaatccaacacagaaa

SEQ ID NO: 18638 - DNA, 1254 bp, synthetic construct
  misc_feature 1..1254: note = source = /note="Description of Artificial Sequence: Synthetic coding sequence"
  source 1..1254: mol_type = other DNA
atgccctcgagcgtgtcatggggaatcctgctgcttgcaggactttgttgtctggtgccagtgtcgctggcggaggacccacaaggggacgcagcacagaaaaccgatacttcccatcatgatcaggatcatcctactttcaacaagattaccccgaacctggcagaatttgcattcagcctgtaccgtcagttggcacatcagtcaaacagcactaatatcttcttttccccagtgtccattgcaaccgcatttgcgatgctgagcctgggcactaaagctgacactcatgacgagattcttgaaggccttaactttaacctgacggaaattccagaagcgcaaatccatgaaggttttcaagagctgctgaggaccctgaaccaacccgattcccagcttcaactgaccaccgggaacggactctttctgagcgaggggttgaaactggtggacaagtttcttgaggatgtgaagaaactctaccacagcgaagcatttacggtcaacttcggagatactgaggaagcgaagaagcagattaacgactacgtcgaaaaaggaactcagggcaagattgtggatctcgttaaggagttggatagagacaccgtctttgcactggtgaactacatcttctttaagggtaagtgggaacggccttttgaggtcaaagacaccgaagaagaggacttccacgtcgatcaagtcactactgttaaggtgcccatgatgaagaggcttggcatgtttaacattcaacactgtaagaagctctcctcgtgggtcctcctcatgaagtacctcggaaacgcaaccgcaatctttttcctgcctgatgaagggaaacttcagcatctggagaacgaacttacccatgacatcattaccaagtttctggaaaacgaggatagacggtccgcctctctgcacctgcctaaactttcgatcaccggaacctacgatttgaaatctgtcttgggccaacttggaatcactaaagtgttctccaatggtgctgacctctcgggagtgaccgaggaagcccctctcaaacttagcaaagcagtccacaaggctgtgctgactattgatgagaaggggacggaggccgcaggggccatgttcctcgaagcaatcccaatgtccatcccaccagaagtcaagtttaacaagccattcgtgtttctgatgattgagcagaacactaagtcccctctgtttatgggaaaagtcgtcaacccaacccaaaag

SEQ ID NO: 18639 - DNA, 1254 bp, synthetic construct
  misc_feature 1..1254: note = source = /note="Description of Artificial Sequence: Synthetic coding sequence"
  source 1..1254: mol_type = other DNA
atgccatctagtgtttcttggggaattttattgttagcaggactttgttgtttggttccagttagtttagcagaagacccacaaggagatgcagcacaaaaaacggacacttcacatcatgatcaagatcatccaacttttaacaaaattacgccaaatttagcagaatttgcattcagtttatatagacaacttgcacatcaaagtaattcaacaaatattttctttagtccagtatcaatagcaactgcatttgcaatgttatcattgggaacgaaagctgatacacatgatgaaattcttgaaggattaaattttaatttaacagaaattccagaagcacaaattcatgaaggttttcaagagcttttaagaacacttaatcaaccagattcacaattacaacttacaactggaaatggattattcttatctgaaggacttaagttagtcgataaattcttagaagatgttaaaaagttatatcatagtgaggctttcactgtaaattttggtgatactgaagaagctaaaaaacaaattaacgattatgttgaaaaaggaacacaaggaaaaattgttgatcttgtaaaagaactagatagagatactgtttttgcattagttaactatattttcttcaagggaaaatgggaaagaccttttgaagttaaagacacagaagaagaagactttcatgttgatcaagtaactacagtaaaagttccaatgatgaaacgacttgggatgtttaatatacaacattgcaagaaattatcaagttgggttttacttatgaaatatttaggaaatgcaacagctattttcttccttccagatgaaggtaaattacaacatttggagaatgagcttactcatgatattatcactaaattccttgaaaatgaagatagaagatcagcatcattacatcttccaaaactttctatcacaggaacatatgatcttaagtctgtcttaggacaacttggaataactaaggttttctcaaatggagctgatttaagcggagttacagaagaagctccattaaagctatctaaagcagttcataaagctgttctaactattgacgaaaagggaactgaggctgctggagctatgtttttagaagcaattccaatgtcaattcctccagaagttaagtttaataaaccattcgtttttctaatgattgaacaaaatactaaatcacctttatttatgggaaaagttgttaatccaacacaaaaa

SEQ ID NO: 18640 - DNA, 1254 bp, synthetic construct
  misc_feature 1..1254: note = source = /note="Description of Artificial Sequence: Synthetic coding sequence"
  source 1..1254: mol_type = other DNA
atgcccagtagcgtatcatggggaattttgcttttagcaggcctgtgctgtctggttcccgtcagcctggccgaagatccgcagggcgatgccgcacagaagacagatacatctcaccatgaccaagatcaccccacctttaataagattaccccaaatctggccgaatttgctttttcattgtataggcagttggcacatcagtctaattccacaaacatctttttttctcctgtgagcatcgccaccgcgtttgcaatgctaagcctcgggaccaaagccgacacccatgatgagatcttggagggcctgaatttcaatctaactgaaatcccagaggcccagatccacgagggcttccaagaactactccggacactaaaccagcccgacagccagctgcagctgactacagggaacggcctgttcttatccgaaggactgaagctggtcgacaaattcttggaggatgtaaaaaagctgtaccatagcgaagcattcaccgttaatttcggagataccgaggaagccaagaagcagatcaacgattatgtggaaaaaggcacacaggggaaaattgtggacttggtgaaagagctggacagggacacggtattcgcactcgtaaattacatcttctttaaaggaaagtgggaaaggcccttcgaagtgaaagacaccgaggaggaggatttccatgtggatcaggtcacgacagtcaaggttcccatgatgaagcgcctcggcatgttcaatattcagcactgcaagaaattaagctcctgggtgctcctgatgaagtatctggggaacgccacagccatattcttcctgccagacgaggggaagctgcagcacctagagaatgagttgacccacgacatcatcaccaaatttcttgagaacgaagaccgcagatcagcatctctgcatctccctaagctgtccattaccggtacttacgacttgaagagtgtactgggacagctgggtattacgaaggtctttagcaacggggccgatctctcaggagtgaccgaggaagctcccctgaagctctcaaaggccgtgcataaagcggtgttgacaatcgacgagaaggggaccgaagcagccggcgccatgtttctcgaggcaattcctatgagcatcccacccgaggtaaaatttaacaaaccatttgtcttcttgatgattgagcagaacaccaaaagcccgttgtttatgggaaaggttgtcaatccgactcagaaa

SEQ ID NO: 18641 - DNA, 1254 bp, synthetic construct
  misc_feature 1..1254: note = source = /note="Description of Artificial Sequence: Synthetic coding sequence"
  source 1..1254: mol_type = other DNA
atgccgagcagcgtgtcctggggcatccttttgcttgcaggattatgttgtttggtgcccgtgagcctggctgaagacccacaaggggacgcggctcaaaagaccgatacaagccatcacgaccaggaccacccaacctttaataagattactccaaacctggcagagtttgccttctcactgtaccgccaactcgcacaccagtccaatagtacgaacattttcttttctcccgtgtccattgctaccgcattcgctatgctcagtctcgggaccaaggcggacacacatgacgaaatcctggaaggcctgaactttaacttgaccgaaatcccggaggcccaaatccacgagggattccaagaactgctgcgaaccttgaaccagcccgactcgcagctgcagcttaccaccggaaatggcctattcctgtccgagggactcaaactagttgacaagttcctggaggatgtgaagaagctgtatcatagtgaggcatttaccgttaactttggcgataccgaggaagccaagaagcagattaacgactatgtggaaaagggtactcagggaaagatcgtggacctggtgaaagagctggatcgggacactgtgtttgcgctagtgaattatatatttttcaaaggcaaatgggaacgccccttcgaagtaaaggacaccgaggaggaggatttccacgtagaccaggtaaccacagtgaaggtaccaatgatgaagaggctaggcatgttcaacatacagcactgtaagaagttgtcatcctgggtactgcttatgaagtacttggggaacgctaccgccatatttttcctgccagacgagggcaaattgcagcacctggagaacgagttaacccacgatattattacaaagttcctggaaaacgaagatcggcggtcggcctctcttcatcttcccaagctgagcatcacggggacttacgacctcaagtcagtcttgggtcagctgggcattaccaaggttttctccaatggagccgacttgagcggggtgaccgaggaggctccactgaagctctcgaaagccgtgcacaaggcagttttaacgattgatgagaaggggacagaagccgcaggcgccatgtttttggaggctatcccaatgtctattccccccgaggtgaagttcaataaaccattcgtgttcctgatgatcgaacagaacaccaaaagccccttgtttatgggtaaggtcgtaaaccccacacaaaaa

SEQ ID NO: 18642 - DNA, 1254 bp, synthetic construct
  misc_feature 1..1254: note = source = /note="Description of Artificial Sequence: Synthetic coding sequence"
  source 1..1254: mol_type = other DNA
atgccgtcatcagttagttggggaattcttttgctcgcaggtttgtgctgcctcgtaccagtctcgttggcggaggatcctcaaggagatgcagcacagaaaactgatacctcccaccacgatcaagatcatccaacattcaataaaattaccccgaaccttgcagaattcgcattctctctctaccgacaattagcccatcaatcaaattctactaatatttttttctcaccagtgtccatcgctactgcgttcgcaatgctgtcccttggcacgaaagctgatacgcatgacgagatactcgagggactcaatttcaatctaacagaaatcccagaagctcaaatacatgagggttttcaagagttattaagaactttgaatcagccggatagtcaacttcaactgacgaccggcaatggactttttctgtcagaaggcttgaagttggtggataagttcttggaggatgtgaaaaaactgtatcatagcgaggcttttacggttaattttggagatacagaagaggcaaaaaaacaaattaacgattatgttgaaaaggggacacagggtaagattgtagatcttgtgaaggagctagatcgagacactgtgtttgccctagtaaattacattttttttaaaggaaaatgggaacgtccatttgaggtcaaggacactgaagaagaagacttccacgtcgatcaagtaaccacggtaaaggttccaatgatgaagaggctgggaatgtttaatattcaacactgcaaaaagctttcttcttgggttttgctcatgaaatatctcggaaatgcaacagccatctttttccttccggacgaaggaaaacttcaacacttggaaaatgaactaacacacgatatcattacaaaattcctcgaaaatgaggatcgtcgatctgcttctcttcacctaccaaaactttctattaccggtacttatgatcttaagtcagtattgggtcaactcgggattacaaaagtctttagtaacggagctgacttgtctggcgtgactgaagaggctccgctcaaacttagtaaggccgtccataaagcagttttgaccatagatgaaaaaggaactgaagctgcgggcgcaatgtttcttgaggcgattccaatgagcattcccccagaagtcaagtttaataaaccgtttgttttcctcatgatcgaacaaaatacaaaatcaccattgtttatgggtaaagttgttaatccgacacaaaaa

SEQ ID NO: 18643 - DNA, 1254 bp, synthetic construct
  misc_feature 1..1254: note = source = /note="Description of Artificial Sequence: Synthetic coding sequence"
  source 1..1254: mol_type = other DNA
atgccctcatcagtcagctggggtattctcctgctggccggactgtgctgcctggtgcccgtgtccctcgcggaggacccgcaaggagacgcggctcaaaagaccgacacttcacaccacgaccaagatcacccaaccttcaacaagattaccccgaatctcgccgaattcgcattttccctgtacagacaacttgcccatcagagcaactcgactaacatcttcttctcgccggtgtccatcgccactgcgttcgccatgctctccctgggaactaaggctgacactcacgacgaaatcctggagggactgaacttcaatctgaccgagatcccagaagcccaaatccatgagggttttcaggagttgttgcgcaccctgaaccagccagacagccagctgcagttgacgaccggcaatggcctgtttctgagcgaaggactgaagctcgtcgataagttcctggaggacgtgaagaagctgtaccacagcgaagccttcacggtgaacttcggcgacacggaagaagcgaaaaagcagatcaacgactacgtggaaaaaggaactcaaggtaaaatcgtcgacctggtgaaggagctggacagagataccgtgtttgcgctggtgaactatatcttcttcaaaggaaaatgggaaaggccattcgaagtcaaggatactgaagaagaggatttccacgtggaccaggtgactaccgtcaaggtgccgatgatgaagcgcctggggatgttcaatatccagcactgtaagaagttgagctcgtgggtgcttctcatgaaatacctcgggaatgctacggcaatcttctttctgccggatgaagggaaactgcagcacctggaaaacgagctcacccatgacatcatcaccaaatttcttgaaaatgaggaccgccgctccgccagtctgcacctgccgaagctgtcgatcaccggcacttatgacctgaaatccgtgttgggacagcttggaatcaccaaagtctttagcaatggtgctgacctgtccggagtgactgaggaggcgccactcaagttgtcaaaggcagtgcataaggccgtgctgacgatcgatgaaaagggcacggaagctgcgggagcaatgttcctggaagcaattcctatgtctatcccgccagaggtcaagtttaacaaacccttcgtgttcctgatgatagaacaaaacacgaaatccccccttttcatggggaaagtggtgaacccgactcaaaaa

SEQ ID NO: 18644 - DNA, 1254 bp, synthetic construct
  misc_feature 1..1254: note = source = /note="Description of Artificial Sequence: Synthetic coding sequence"
  source 1..1254: mol_type = other DNA
atgccatcgagcgtctcatgggggatcctgctcctcgcgggtctttgctgccttgtgcctgtctcgttggcagaggatccgcaaggagatgcagcccaaaagacggatacctcgcaccacgaccaagaccatccgacgttcaacaagattaccccaaacttggccgagttcgccttctcattgtaccggcagctcgctcaccagtcgaactccaccaacatcttcttctcgccagtcagcatcgccaccgcattcgccatgctcagcttgggtacgaaggcggacactcatgatgagattctggaaggcctgaatttcaacctcaccgaaatcccggaggcccagatccatgaaggcttccaagagctgctgcgtaccctcaatcagcccgactcccaacttcagctcactaccggaaatggactctttctgagcgaaggactgaaactggtggacaagttcttggaggacgtgaagaagttgtaccactcggaggccttcaccgtgaatttcggcgacaccgaggaagcgaaaaaacaaatcaatgactacgtggagaagggaacccagggcaagatcgtcgaccttgtcaaggaactggaccgcgatactgttttcgcacttgtcaactacatcttctttaaagggaagtgggaaaggccatttgaagtgaaggatactgaagaagaagatttccatgtggaccaggtgaccactgtgaaggtgcccatgatgaagcgcctcggcatgttcaacattcagcattgtaaaaagctgagctcgtgggttcttttgatgaagtacctgggtaatgcgaccgccatctttttcctgccagacgagggcaagctgcagcacctcgaaaatgagctcacgcatgacatcatcaccaagtttctggagaacgaggatagacggtcagcaagcctgcacctgccaaagttgtccataacgggaacctacgacctgaaatcggtcctgggtcagctcggaatcaccaaagtcttttctaacggggccgatctgtcgggcgttactgaagaagccccgctgaagctgagcaaggcggtgcacaaagccgtgcttactattgatgagaagggaactgaagctgctggagccatgttcctcgaagcaattcctatgtcgatccctccggaagttaagtttaacaagccgttcgtgttcctgatgatcgaacaaaacactaaatcacctctgtttatgggaaaagtcgtgaatccgacgcagaag

SEQ ID NO: 18645 - DNA, 1254 bp, synthetic construct
  misc_feature 1..1254: note = source = /note="Description of Artificial Sequence: Synthetic coding sequence"
  source 1..1254: mol_type = other DNA
atgccaagttccgtgtcgtgggggatactgcttctcgccgggctctgctgtctcgttcccgtgtcattggcagaggatcctcagggggatgctgcacagaaaacagatacatcgcatcatgatcaggatcatccaacttttaacaaaattactccaaatctcgcagaatttgcattctctctttatagacagctggcccaccagtccaattctacaaatatattcttctctccagtttccatagcgacagcctttgccatgctctctctaggaactaaagccgatacacatgatgagattctcgagggactgaattttaatctcactgaaattcctgaagcccagatacatgaggggtttcaggagctgctccgtactctgaaccagcccgattctcagctccagctgacaacgggaaatggactcttcctgtcagagggacttaaactggtcgataaattcctggaagatgtgaagaaactataccattccgaggctttcacagtgaattttggagatactgaagaggccaaaaaacagataaacgattacgtggaaaaaggaactcagggaaagatcgtcgatcttgttaaagaactcgacagggatactgtgtttgcccttgtaaactatatattctttaaaggaaaatgggagagaccttttgaagtaaaggatactgaagaagaggacttccatgtcgatcaggtcacaactgtgaaagtgccaatgatgaaaagactcggaatgtttaatattcagcattgtaagaaactctcctcttgggtcctactgatgaaatatttgggaaatgccacagctattttctttcttcctgatgaagggaaactccagcaccttgagaacgaactaacacatgacattataactaaattcctggagaatgaagatcggcggtccgcttccctgcaccttcctaaattgtcgattacaggaacttatgaccttaagtccgtgctcggacagcttgggataactaaagtgttctctaatggagcagacctgtccggggttactgaggaagcccccctaaaactcagtaaagctgtccataaagccgtgctaactatcgacgagaaaggaactgaggccgctggggccatgtttcttgaggccattcctatgagtataccccctgaggttaaattcaacaaaccttttgtgttccttatgatagaacagaacactaaatccccattgtttatggggaaagtagtgaaccccacacagaaa

SEQ ID NO: 18646 - DNA, 1254 bp, synthetic construct
  misc_feature 1..1254: note = source = /note="Description of Artificial Sequence: Synthetic coding sequence"
  source 1..1254: mol_type = other DNA
atgccttcttctgtctcttggggaatcctcctgcttgctggcctgtgctgtctggttccggtttctcttgctgaagaccctcagggcgacgcagcccagaaaacggatacatcccatcacgatcaggatcaccccacctttaacaaaatcacacccaatctcgcagaattcgcgtttagcctgtatagacagcttgctcaccagtccaattctactaatatcttcttttcccccgtgtccatcgcgacagcgtttgctatgttgtccctgggaacaaaagccgatacacacgatgaaatcctagaaggcctaaatttcaatctcaccgaaattcccgaggcacagatccacgagggttttcaagagctgttgaggacattaaaccagcccgatagtcagctgcagctgaccactgggaacggtctgtttcttagtgaagggctaaagcttgttgataaattcctggaggatgtgaagaagctgtaccacagcgaggccttcaccgtgaactttggcgataccgaggaagccaagaagcagataaacgactacgtggagaaaggtacgcagggaaaaatcgtggacctggttaaggagctggatcgcgataccgtctttgcgcttgtgaactacatctttttcaaagggaaatgggagcggccttttgaagtgaaagacactgaggaggaggactttcatgtggatcaggtgacaacagtcaaagttccaatgatgaagcgcctcggaatgttcaacattcagcactgcaagaagttgtcctcatgggttctgctgatgaaataccttgggaacgccaccgcaattttcttcttgccagatgaggggaagctccagcatctagagaatgagctcacacatgatattatcactaaatttttagagaacgaggaccgaaggtcagcctctcttcatctgcccaagctttcaatcacggggacatacgatctgaagagcgtgctcggacaactgggaatcactaaggtctttagcaacggggcagacctgtccggtgtgacagaagaggcgccattgaaactgtcgaaggcagtgcacaaagcggtgctgaccatcgacgaaaaaggtacagaagccgctggtgccatgtttctcgaggcaatccccatgtcgatacccccagaggtcaagttcaataaaccattcgtgttcctcatgatcgagcagaatacaaagtccccactatttatgggcaaggttgtgaaccctacccagaag

SEQ ID NO: 18647 - DNA, 1254 bp, synthetic construct
  misc_feature 1..1254: note = source = /note="Description of Artificial Sequence: Synthetic coding sequence"
  source 1..1254: mol_type = other DNA
atgcctagtagcgtctcgtggggcatcctgctgctcgccggactttgttgcctggtgccagtctcgctcgcggaggacccacaaggagatgcagcacaaaaaactgacacgagccaccatgaccaggaccaccctaccttcaacaagatcacgccaaatctggccgagttcgcgttctcactctacaggcagctcgcgcaccagagcaactcaactaacatctttttctctccagtgtccattgccaccgccttcgcgatgttgtccttggggaccaaggcagacacccatgacgaaatcctggaaggccttaatttcaacctcaccgaaatccccgaggctcagatccacgaaggattccaggaactgctgcggaccctgaaccaaccggacagccaactgcagctgactaccggtaacggtctgttcctgtccgagggactgaagctcgtggataaatttttggaggacgtgaagaaactgtaccactccgaggcttttaccgtgaattttggagacacggaagaagccaagaagcaaatcaatgattatgtcgaaaaaggaactcagggaaagattgtggaccttgtcaaggagctggatcgggataccgtgttcgcgctggtgaactacattttctttaagggcaaatgggaaagaccgttcgaagtgaaggataccgaggaagaagatttccatgtggaccaggtgactactgtgaaggtgcccatgatgaagagactggggatgttcaacatccagcactgcaagaagctgtcgtcctgggtgctcctcatgaagtacctgggaaatgcgactgctatcttcttcttgccggacgaaggaaaactgcagcatcttgagaacgaactcacccatgatataatcactaagttcctcgagaatgaggaccgccgctccgcttccctgcacctgccaaagctgagcatcaccggcacctacgatttgaagtcagtcctcgggcaactcggcatcactaaagtgttttcgaacggagcagatctctcgggtgtcaccgaagaagccccgctgaaactctcaaaggcagttcacaaggccgtccttactatcgacgaaaaagggacggaggccgctggagccatgttcctggaggccattccgatgtcgatcccgccggaggtgaagttcaacaaaccgtttgttttcctgatgatcgaacagaacactaagtcgcctttgtttatgggcaaagtcgtgaatcctactcaaaag

SEQ ID NO: 18648 - DNA, 1254 bp, synthetic construct
  misc_feature 1..1254: note = source = /note="Description of Artificial Sequence: Synthetic coding sequence"
  source 1..1254: mol_type = other DNA
atgccctcctccgtgtcctggggaatccttctgctggccggcctctgttgtcttgtccccgtgtcactggcagaggatccacaaggggatgcggcccagaaaaccgatacttcacatcatgatcaagatcacccaactttcaacaagattaccccaaacctggcagaatttgcattctcgttgtacaggcagcttgcccatcaatcaaattctactaacatcttctttagccccgtgtcgattgccaccgcgttcgccatgctttcgttggggaccaaggccgatacgcatgatgagattttggaagggctcaacttcaatctgactgagattccagaagctcagatccatgaaggttttcaagaactccttcgcacgctcaaccaacctgactcccaacttcagctcacgaccggaaacggccttttcctgtctgagggactcaaacttgtggataagtttctcgaagatgtcaaaaaactgtaccattcggaggcatttactgtgaactttggcgatactgaagaggcgaaaaagcagattaacgattacgtcgaaaagggaactcaaggcaagatagtggatcttgttaaggaactcgacagagacaccgtgtttgccctcgtgaactacatctttttcaagggaaaatgggaaagaccttttgaggtgaaagataccgaagaggaagattttcacgtggatcaagtgacgactgtgaaggtgccaatgatgaagagactcggaatgtttaacattcagcactgcaaaaaactttcatcgtgggtccttcttatgaagtacctcggtaatgccaccgccatcttctttcttccagatgagggaaagctgcaacatctggagaacgaactcacccatgatatcatcactaagttcctcgaaaatgaagatcggcggtcggcctccctccatctgccgaaactttccataactggaacttacgacctgaagtcggttcttggccagctgggcataaccaaggtgttttcgaatggagcagatctctcgggtgtgactgaggaagcaccgcttaagctgagcaaggcagtgcataaggcagtcttgaccatagatgaaaaaggtactgaagcggccggagcaatgttcctggaggcaatccctatgtccatacctcccgaggtgaagttcaacaagccatttgtctttttgatgatcgaacagaatacgaaatcccccctgttcatggggaaagtagtgaatcctacccagaaa

SEQ ID NO: 18649 - DNA, 1254 bp, synthetic construct
  misc_feature 1..1254: note = source = /note="Description of Artificial Sequence: Synthetic coding sequence"
  source 1..1254: mol_type = other DNA
atgccctcttccgtgagctggggaatcctgctcctagccggcctctgttgtcttgtgcctgtgtctttggctgaagacccgcagggggacgcagcgcaaaagacagacactagccaccacgatcaggaccatcccacctttaacaagataactcccaacttggccgaatttgcattttctctatataggcagctcgctcatcagagcaactccaccaatattttcttttctccggtgtctattgccacggcgttcgcgatgctgagtctcggcaccaaagccgacacccacgacgaaatcctggaaggactgaattttaatctgaccgaaatacccgaggctcagatccacgaaggcttccaagagttgctgagaaccctcaatcagcccgactctcagctgcagttgacaactggcaacggacttttccttagtgaagggctcaaactagtcgacaagtttctggaggacgttaagaagctttatcattccgaggcctttactgtgaatttcggcgatacggaagaggcaaaaaagcagatcaacgattacgtggagaaggggacacaaggcaaaatcgtagacctggtgaaggagcttgatcgcgataccgtgttcgctctggttaattacatattttttaagggtaaatgggaacggccattcgaggtgaaagacacagaggaggaagattttcacgtcgatcaggtcacgaccgtcaaggtaccaatgatgaaaagattgggaatgtttaatatacagcactgcaagaaactgagttcatgggtgctcctgatgaaatacctgggcaatgcaaccgcgatctttttcctgcccgacgagggaaagttgcagcacttggagaacgagctcactcacgacattatcactaaattccttgagaatgaggatcgtcggagcgcatctctgcacctgcccaaactgtccatcactggaacatatgatttgaaaagtgtgttggggcagcttggcatcactaaagtgttctcaaacggcgcagacttgagcggggtgacagaagaagctcccctgaaactatctaaagcagtccataaggccgtgctgactatcgacgaaaaaggaactgaggccgccggcgctatgtttctcgaagctatcccaatgagcattccaccagaagtgaaattcaacaagccattcgtctttctgatgatcgagcagaacacgaaaagcccccttttcatgggtaaggtggtcaatcctacgcagaag

SEQ ID NO: 18650 - DNA, 1254 bp, synthetic construct
  misc_feature 1..1254: note = source = /note="Description of Artificial Sequence: Synthetic coding sequence"
  source 1..1254: mol_type = other DNA
atgccctcgtcggtgagctggggtatcctccttctggccgggctgtgttgcctggtgccagtcagccttgcagaagatcctcaaggtgatgcagctcaaaaaactgatacgagccatcatgatcaggaccatcctacttttaacaagatcactccaaatctggcagaattcgctttttccctgtacagacaacttgctcatcagtcgaactcgaccaacattttcttttcgcctgtgtcgatagccaccgcctttgcaatgctttcgctgggaaccaaagcagatactcacgacgagatccttgaaggactgaactttaacctgaccgagattccagaagcacagatccatgaaggatttcaagaactcctgagaaccctgaaccaaccagattcacagctccagctcactaccggaaatggattgttccttagcgaaggcctgaagctggtggataagttccttgaagatgtgaagaagttgtaccactcggaggcatttacggtgaattttggtgatacggaggaagcgaaaaagcaaatcaacgactacgtggaaaagggaacccaaggtaaaatcgttgatttggtgaaagaattggacagagacactgtgttcgcacttgtgaactacatctttttcaagggcaaatgggagcgaccgtttgaagtgaaggacaccgaggaggaggattttcatgtggatcaggtcacgactgtgaaggtgcctatgatgaaacggcttggtatgtttaacatccaacattgtaaaaagctgagctcgtgggtgctgctgatgaagtacttgggcaatgccaccgcaatattcttcctgcctgacgagggaaagctgcagcatctcgaaaatgaattgactcatgacatcattactaaattcctggaaaacgaggatcgtaggtccgccagcctccatcttccaaagctctcaatcacgggaacttacgatcttaagagcgtcctcggccagctgggtataactaaggtgttcagcaatggagcagatctctcgggggtgaccgaagaggcaccgctgaaactgtctaaggcagtgcataaggccgtgcttaccattgatgagaagggaaccgaagccgccggagcgatgttcctcgaagccattcctatgagcatccctcctgaagtcaaattcaataagccatttgtgtttctcatgattgaacaaaacaccaagtcgcccctgttcatgggcaaggtggttaaccctacccaaaaa

SEQ ID NO: 18651 - DNA, 1254 bp, synthetic construct
  misc_feature 1..1254: note = source = /note="Description of Artificial Sequence: Synthetic coding sequence"
  source 1..1254: mol_type = other DNA
atgccctcatctgtgagctggggcatcctgctactggctggcctctgctgtctggttcccgtgtctctcgctgaggacccacagggggacgcagcacagaagacagatacgtcgcaccatgatcaggatcaccctacatttaacaaaatcactcccaacctcgccgagtttgcattttcactttaccggcaactggcccaccagagcaactctaccaacatttttttttctccagtctctatcgctactgctttcgcaatgttgagcctcggtaccaaggccgacacacatgacgagattttggagggcctcaactttaacctaactgagatccccgaggcacagattcacgagggattccaggagctattacggacccttaaccagcctgactcacagctgcaattgacaacgggaaatggactgtttttgtctgagggactgaaattggtcgataaattcctggaggacgtgaagaagctgtatcactctgaggcgtttaccgtgaatttcggcgacacagaagaagcaaagaaacagattaatgattacgtggagaaaggcacgcaaggaaaaattgttgatctcgtaaaagaattggacagagataccgtctttgccctcgtgaattatatcttcttcaaagggaagtgggagcgcccattcgaggttaaggacacggaagaagaggactttcacgtcgaccaggtgaccactgtcaaggtgccgatgatgaaaagactcggaatgtttaacatccagcattgcaaaaagctcagctcatgggtgctgctgatgaaatacctcggaaacgctaccgcgattttcttcctgcctgacgaaggcaaactgcagcaccttgagaatgagctgacccatgacatcataaccaaatttctggagaacgaagatagacgcagtgccagtctgcacctgccgaagctaagtattacggggacttatgacttgaaatccgtgttggggcagctggggattactaaggtgtttagtaatggggccgatctgtcgggagttaccgaggaggcgccgctgaagttgtcaaaagccgttcataaagcagtattgactattgatgaaaagggcacagaagccgccggtgctatgttcctcgaagccatcccaatgtccatccctccagaagttaagtttaacaagccattcgtgtttctgatgatagagcagaataccaaatcccctctcttcatgggtaaggtggtgaacccaacccagaag

SEQ ID NO: 18652 - DNA, 1254 bp, synthetic construct
  misc_feature 1..1254: note = source = /note="Description of Artificial Sequence: Synthetic coding sequence"
  source 1..1254: mol_type = other DNA
atgccgagtagtgtcagttggggaatcctgctcctcgccggcctgtgctgtctcgtgcctgtgtctctcgcagaagacccacagggcgatgctgcacagaaaaccgacaccagtcatcacgaccaggaccacccgaccttcaacaaaatcacacccaacctggctgaattcgctttctctctgtataggcaactggcgcaccagtcaaattccacgaacatcttcttttcgcccgtgagcatcgccacggctttcgcgatgctttcgctgggtaccaaggccgatacgcatgacgagatcctggaggggctaaacttcaatttaacggaaatcccagaggcccagatacacgaggggtttcaggaactgctcaggaccctcaatcagccagactcacaactgcagttgactacaggaaacgggttgttcctgtcggagggtttgaagctggtcgataagttcctggaggacgttaaaaaactttaccattcagaggctttcacagtgaattttggcgacacggaggaggctaaaaaacagattaacgattacgtggaaaaggggacccaaggcaagattgttgatctcgtgaaggaactggatcgcgacactgttttcgcccttgtcaattacatcttctttaaggggaaatgggaacggccatttgaggtgaaagatactgaggaagaagattttcacgtcgatcaagttaccactgttaaggtacccatgatgaagcggctgggtatgtttaatattcagcattgcaaaaaactctcctcttgggtcctgctgatgaaatatctgggcaatgccaccgctatcttcttcctgcccgacgaagggaaactgcagcaccttgagaatgagctgacccacgacataattaccaaattcctcgagaacgaggaccgcagaagcgctagcctccacttgccgaagctatccatcactggcacatacgacctgaaatccgtattgggacagctgggcatcaccaaggttttctctaacggagctgaccttagcggagtcacagaggaggcacccctcaaactgtcaaaggcagtccacaaagctgtgctaaccatcgacgaaaagggtacagaagcagccggagctatgtttctggaagcaatccccatgagcattccacccgaggtgaagttcaataaaccattcgtctttttgatgattgagcagaacaccaaatctccactatttatgggcaaagttgtaaatcccactcagaag

SEQ ID NO: 18653 - DNA, 1254 bp, synthetic construct
  misc_feature 1..1254: note = source = /note="Description of Artificial Sequence: Synthetic coding sequence"
  source 1..1254: mol_type = other DNA
atgcctagctctgtgagctggggtattttgctgctggccggcctgtgctgcttggtgccggtgagcttggcggaagatccacagggcgacgctgcacaaaagactgacacttcccatcatgatcaggaccacccgaccttcaacaagatcacgccaaacctcgccgagtttgcgttcagcctctacagacaactggcccaccagtcaaatagcactaacatcttcttctccccggtgtcaatcgcgacggcattcgcgatgctgtccctgggcactaaagctgatacccatgacgaaatcctggaaggcttgaacttcaatctgactgaaatcccagaggcccaaatccacgagggtttccaagaactcctgagaacgctgaaccagccagacagccaactccaactgaccaccggaaacggacttttcctgtcggaaggcctcaaactggtggataagtttctggaggatgtgaagaagctgtaccactcggaagccttcaccgtcaacttcggagacactgaagaggccaagaagcagatcaatgactatgtggagaaggggactcaagggaaaatcgtggacctcgtcaaggaacttgatagagataccgtgttcgccctggtgaactacattttcttcaaaggaaagtgggagcgcccgttcgaggtgaaggataccgaggaggaagatttccatgtggaccaggtcacgacggtgaaggtgccgatgatgaaacgcttgggaatgttcaacattcaacattgcaagaagctctcgagctgggtattgctgatgaaatacctcgggaacgctaccgcaatattcttcctcccggacgagggaaaactgcaacacctcgaaaacgaattgactcatgatatcatcactaagttcctggaaaatgaggacagaaggtccgcgtcccttcatctgccaaagttgtcgatcactggcacttacgacctgaaatccgtcctcggacagctgggaatcactaaggtgttctccaacggggcggacctttcaggtgtcaccgaagaagcccctctcaaacttagcaaagccgtgcacaaggccgtgctgaccattgacgagaaaggaactgaagccgcgggagcgatgttcctggaggccatccctatgtccatccccccggaagtgaagtttaacaaaccctttgtgttcctgatgatcgaacagaacaccaaatcaccactgttcatgggaaaagtggtcaaccccacccagaag

SEQ ID NO: 18654 - DNA, 1254 bp, synthetic construct
  misc_feature 1..1254: note = source = /note="Description of Artificial Sequence: Synthetic coding sequence"
  source 1..1254: mol_type = other DNA
atgccatcctcagtctcttggggtattcttctcctggcaggactctgttgcctggtaccagtgtcgctagccgaggacccacagggggacgccgcacagaaaaccgatacatcacaccatgatcaagatcatccgacttttaataaaataacccctaacctcgctgaatttgcctttagcctgtaccggcagctggcgcaccaatctaactcgactaacatttttttttcgcctgtgagtatcgctacagcctttgctatgctgtccctgggaactaaagcggacacacacgacgagatactagaggggctgaactttaatttaacagaaattccagaagcccaaattcacgagggcttccaggagcttttgcgcaccctgaaccaaccggattctcaacttcaactgactacaggaaacgggctgtttctgtcggagggactgaagctggtagacaaatttcttgaagacgttaagaaactctaccacagtgaggcgttcactgtcaatttcggcgatacagaggaagcaaagaagcagattaatgactacgttgaaaagggcactcaagggaagattgtggatctggtgaaagagctggacagagatacggtgttcgcgctcgtcaactatatctttttcaagggaaaatgggagcgccccttcgaggtgaaagataccgaggaggaggactttcatgtggaccaggtgactacagtgaaagtgcccatgatgaaacgattgggaatgttcaacatccagcattgcaaaaagcttagttcatgggtcctacttatgaagtacttaggcaatgcaacagcaattttcttcctgcctgacgagggaaaactgcaacacctggagaatgaacttactcacgatatcatcacaaagtttttagagaatgaggacagacgtagcgcgtctctccatctgcccaaattgtcaatcactgggacatatgacttgaaatccgtgctcggccagctgggcattacaaaagtgttctcaaatggcgcagatctgtcaggtgtgaccgaggaggccccactcaaactttcaaaagcggtgcataaagcagtgcttacaattgacgaaaaggggacagaagcagccggagccatgttcctggaggcgatccctatgagtattcctcccgaggttaagttcaataagccattcgtattcctgatgatcgagcagaatactaagtcgcccctgttcatggggaaggtggtgaacccaactcagaag

SEQ ID NO: 18655 - DNA, 1254 bp, synthetic construct
  misc_feature 1..1254: note = source = /note="Description of Artificial Sequence: Synthetic coding sequence"
  source 1..1254: mol_type = other DNA
atgcccagctcggtgagctggggaatactgctgctggccggattatgctgtctggtgcccgtttccctggccgaggatccgcagggcgacgctgcgcagaaaacagacacttcgcaccacgaccaggaccatcctactttcaataagatcactccgaatctagcggagtttgccttctcactgtaccgtcagctggcccaccagagcaactcaaccaatattttcttttcgccggtgtcgattgctaccgctttcgcgatgctttcactcggcacgaaggccgacacacatgacgaaatcttggagggtctgaacttcaacctcaccgagattccggaagcccaaattcatgagggattccaggaactgctccgtacgctgaatcagccggatagccaactacaactcaccacgggtaatggtctgtttctgtcggaaggactgaagctggtggacaagttcctcgaagatgtgaagaaactctaccacagtgaggcctttacggtgaacttcggcgacacggaggaggccaagaagcagataaacgactacgttgaaaagggcactcagggcaagatcgttgatctcgtcaaggaactcgatcgagataccgttttcgctctggtgaattacatattcttcaagggcaagtgggagagaccgtttgaggtcaaagatacggaagaggaggacttccatgtagaccaggtcaccacagttaaggtacctatgatgaaacggcttggaatgttcaacattcagcattgcaaaaagttgagttcctgggtcctgcttatgaagtacctgggtaatgcaaccgctattttcttcctgccggatgagggaaaactgcagcatcttgaaaatgagctgacacacgacatcattaccaagtttctggagaacgaggacaggagaagcgcctccctgcacttaccgaagcttagtatcaccggcacctacgatctgaaatccgtcctcggccagctgggaatcaccaaggtgttttcgaatggcgctgacctgtcaggagtcacggaggaagccccgttgaaactgtcgaaggccgtgcataaggcggttctcacgatcgacgagaagggcacggaggcagccggggccatgttcctcgaggctatcccaatgagcataccacctgaggtaaagttcaataaacccttcgtgttcctgatgatcgagcagaataccaagtctccactgttcatgggtaaagtagttaacccaacgcaaaaa

SEQ ID NO: 18656 - DNA, 1254 bp, synthetic construct
  misc_feature 1..1254: note = source = /note="Description of Artificial Sequence: Synthetic coding sequence"
  source 1..1254: mol_type = other DNA
atgcctagcagcgtgtcatggggtatactgcttctggcaggattgtgttgcctcgtgccagtgagccttgcggaagatccgcagggcgatgcagcacaaaaaactgatacctcgcatcatgaccaggaccatcctactttcaacaagattactccgaacctggcagagtttgccttttctctttatagacaacttgcccaccaatccaactcgaccaacattttcttttcccctgtgtcgattgcaaccgcatttgccatgctttccctgggcactaaggccgatactcatgatgagatccttgagggcctgaactttaacctcactgaaatcccagaggcccagattcatgaaggctttcaagaacttctgcggaccctgaatcaacctgactctcagcttcaacttacgaccggtaatgggctctttttgtccgaagggctgaaacttgtcgataagttccttgaagatgtcaagaagctctaccactcagaagcatttaccgtcaattttggagataccgaggaggcgaagaaacagattaacgattacgtggagaagggtactcaaggtaagatcgtcgaccttgtgaaagaacttgatagagacaccgtattcgccctcgtgaattacatattctttaagggtaaatgggaacgcccttttgaagtcaaggataccgaagaggaggactttcatgtggaccaagtcactaccgtgaaagtgccgatgatgaagaggctgggtatgttcaacattcagcactgtaagaaactttcaagctgggtgctgctcatgaaatacctggggaacgcgactgccatctttttccttcctgatgaaggaaaacttcagcatctggagaatgagctgacgcacgatatcattacgaagttcctggaaaacgaagatcgtcgttcggcgagcttgcatttgcccaaactgtcaattaccgggacctacgatctcaagtcagtgctcggtcagctcggtatcactaaggtgttctcaaatggtgcagatctgagcggtgtgactgaagaagcgccgctgaagctgtcgaaagccgtgcataaagcggtgttgaccatcgacgaaaagggcaccgaggccgctggagcaatgttccttgaggccatacctatgtccattcctcccgaagtgaagttcaataagcctttcgtgttcctgatgatcgagcaaaacactaagtcgcccctgtttatgggaaaggtcgtgaaccctacccaaaaa

SEQ ID NO: 18657 - DNA, 1254 bp, synthetic construct
  misc_feature 1..1254: note = source = /note="Description of Artificial Sequence: Synthetic coding sequence"
  source 1..1254: mol_type = other DNA
atgccttcctcggtgtcctggggtatcctgttgctggccggtttgtgttgtctggtccccgtctcactcgcagaggacccccaaggagacgccgcccaaaagaccgacacttcccaccatgatcaagatcatcctaccttcaacaagataacccccaacttggctgaatttgcattttcactgtacagacagcttgcacatcagtcgaacagcaccaatatcttcttctcgccggtcagcatcgcaaccgcttttgcgatgctttccctcgggacgaaggccgacacccacgatgagattcttgagggactgaactttaaccttaccgaaatccctgaagcccaaattcatgaaggatttcaggaactgctgcgaacccttaaccagccagacagccaacttcagctgactaccggaaacggtctgtttctctcggagggcctgaagctcgtggacaagtttcttgaggatgtgaagaagctctaccactccgaggcattcaccgtcaatttcggtgatactgaggaagccaagaaacaaatcaacgactacgttgagaagggaacccaaggcaaaattgtggatctggtgaaggagcttgatagagatacggtgttcgctctggtgaattacatctttttcaagggtaaatgggaaagaccatttgaggtgaaagacaccgaagaggaagatttccatgtggaccaagtgactactgtgaaggtccctatgatgaaaaggcttgggatgtttaacattcagcattgcaaaaagctgagctcatgggtgctgcttatgaagtacctgggcaacgcgaccgctatcttttttctgcctgatgaaggaaaattgcagcatctggaaaacgagcttacgcatgatatcattaccaaatttcttgaaaatgaggaccgccgctcagcatctcttcaccttccaaagctctcgataaccggtacctacgatctcaagtcggtgctcggacaactgggtattaccaaagtgttttctaacggagccgatctttccggtgtcaccgaagaagcaccattgaagctgtcaaaggcggtgcataaggcagtcttgaccattgacgaaaaaggcactgaagcagccggcgcaatgtttttggaggcaattcctatgtccatccctcctgaagtgaaattcaataagcccttcgtgttcctcatgatagagcaaaatactaaatcccctctctttatgggcaaagtggtcaatcctacccaaaaa

SEQ ID NO: 18658 - DNA, 1254 bp, synthetic construct
  misc_feature 1..1254: note = source = /note="Description of Artificial Sequence: Synthetic coding sequence"
  source 1..1254: mol_type = other DNA
atgccctcctccgtgagctggggaatcctcctcttagctgggctttgctgcctggtgcccgtctccctggccgaagatccccaaggggacgcggcacaaaagaccgatacatctcaccacgatcaggatcatcccaccttcaataagattactcccaatttggcggagtttgctttctctctgtacagacagttggcccatcaaagtaactcaactaacatcttcttcagcccagtgtccatcgccactgccttcgctatgctcagtttaggcaccaaagccgacactcatgacgagatcctggaggggctcaactttaacctcacagagatacctgaagcgcagattcacgaggggtttcaggaactcctaagaacccttaaccagccagattcccaattgcaactgaccacgggcaatggccttttcctctcggaaggactaaaactggtcgacaagttcctggaagatgtcaagaagttataccatagcgaagccttcacagtgaatttcggtgatactgaagaagctaaaaagcagattaatgactacgtggagaagggcacacagggcaagatcgtggatctggtcaaggagctggatcgggacactgtgttcgctcttgtcaactatatcttcttcaagggaaagtgggagagaccatttgaagttaaagatacagaagaggaggacttccacgtcgatcaggtgacgaccgtgaaagtgccaatgatgaaaaggctcggtatgttcaacatccagcattgcaagaaactgtcctcttgggttcttctgatgaagtatctagggaacgcgaccgccatatttttcctaccagacgagggtaagttgcagcacctggagaatgagttgacccatgatattatcaccaaatttctggagaacgaggataggcgatctgcctccctgcacctgcctaagttatcgataaccgggacgtacgatctcaagtccgtactcggtcagttaggaatcacaaaagtgttctccaacggcgccgatctgagcggtgtgactgaagaagcgcctctcaagctgagcaaggccgttcataaggctgtgctgaccatagacgaaaagggcacagaagccgcaggagccatgtttttagaagctatcccaatgagtatacctccagaagtaaagtttaacaaacctttcgttttcttgatgattgagcaaaacactaaatcacctttattcatggggaaggtagtcaatcccacccaaaaa

SEQ ID NO: 18659 - DNA, 1254 bp, synthetic construct
  misc_feature 1..1254: note = source = /note="Description of Artificial Sequence: Synthetic coding sequence"
  source 1..1254: mol_type = other DNA
atgccgtcgtccgtctcgtggggtatcctgctcttggcgggactgtgctgtcttgtgcctgtgagcctggccgaagatccgcaaggcgacgccgcacagaaaacggatacctctcatcacgaccaagatcatccgacgtttaacaaaatcacgcccaatttggcggagttcgcgttcagcctgtacagacagttggcgcaccagtctaactcaactaacatcttcttctctccagtttcgatcgccactgcgttcgcaatgctgagcctgggtacgaaggccgatactcatgacgagatcctcgagggcctcaacttcaacctgactgaaatcccggaagcacagatccacgagggatttcaagagctgctccgcaccctcaatcagccggattcccagcttcaactcaccaccggtaatggattgtttctgtctgaaggtctgaagttggtggacaagttcctggaagatgtgaagaagctctatcactcggaagccttcactgtgaactttggagatactgaagaagctaaaaagcaaatcaacgactatgtcgagaaaggaactcagggcaagatcgtggaccttgtgaaggagctggaccgggataccgtgtttgcgctggtgaattacatattctttaaaggaaagtgggaaagaccgttcgaagtcaaggacaccgaagaggaagatttccacgtggatcaagtgaccactgtcaaggtgcctatgatgaagcggctgggaatgttcaacatccaacactgcaagaagctgtcatcctgggtgctgctgatgaagtacctcgggaatgccaccgccatctttttcctcccagacgaagggaagctccaacacctcgaaaacgaactcacccacgatatcatcactaagttccttgagaacgaggacagaagaagtgccagcctgcacctgcctaagctgtcaattaccggaacgtacgacctgaagagcgtgcttggacaactcggcatcactaaagtgttcagcaatggcgcagacctgtcgggcgtgactgaggaggcacctctcaagttgtcaaaagctgtccataaagccgtgctgaccattgacgaaaagggcaccgaagccgctggagctatgttcttggaggccatcccaatgtcaatccccccggaagtgaaattcaataagcctttcgtctttttgatgatcgaacagaataccaagtcgccactgttcatgggaaaagtcgtgaacccgacgcagaag

SEQ ID NO: 18660 - DNA, 1254 bp, synthetic construct
  misc_feature 1..1254: note = source = /note="Description of Artificial Sequence: Synthetic coding sequence"
  source 1..1254: mol_type = other DNA
atgccgtcgtcggtatcgtggggtatactactactagcgggtttatgttgtttagtaccggtatcgctagcggaagatccgcaaggtgatgcggcgcaaaaaacggatacgtcgcatcatgatcaagatcatccgacgtttaataaaataacgccgaatttagcggaatttgcgttttcgctatatcgacaactagcgcatcaatcgaattcgacgaatatatttttttcgccggtatcgatagcgacggcgtttgcgatgctatcgttaggtacgaaagcggatacgcatgatgaaatattagaaggtttaaattttaatttaacggaaataccggaagcgcaaatacatgaaggttttcaagaattactacgtacgttaaatcaaccggattcgcaactacaattaacgacgggtaatggtctatttttatcggaaggtctaaaattagttgataaatttctagaagatgtaaaaaaattatatcattcggaagcgtttacggttaattttggtgatacggaagaagcgaaaaaacaaataaatgattatgttgaaaaaggtacgcaaggtaaaatagtagatttagttaaagaattagatcgtgatacggtatttgcgttagtaaattatatattttttaaaggtaaatgggaacgtccgtttgaagtaaaagatacggaagaagaagattttcatgtagatcaagttacgacggttaaagttccgatgatgaaacgtttaggtatgtttaatatacaacattgtaaaaaactatcgtcgtgggttctattaatgaaatatctaggtaatgcgacggcgatattttttttaccggatgaaggtaaattacaacatctagaaaatgaattaacgcatgatataataacgaaatttctagaaaatgaagatcgacgttcggcgtcgctacatctaccgaaattatcgataacgggtacgtatgatttaaaatcggtattaggtcaactaggtataacgaaagtattttcgaatggtgcggatttatcgggtgttacggaagaagcgccgttaaaattatcgaaagcggttcataaagcggttttaacgatagatgaaaaaggtacggaagcggcgggtgcgatgtttttagaagcgataccgatgtcgataccgccggaagtaaaatttaataaaccgtttgtttttttaatgatagaacaaaatacgaaatcgccgttatttatgggtaaagtagtaaatccgacgcaaaaa

SEQ ID NO: 18661 - DNA, 1254 bp, synthetic construct
  misc_feature 1..1254: note = source = /note="Description of Artificial Sequence: Synthetic coding sequence"
  source 1..1254: mol_type = other DNA
atgccgtcatccgtgagctgggggattctgctgctggcaggactttgttgtttggtgcccgtatccttggccgaggatccccaaggcgatgccgcgcagaagactgacacaagccatcacgaccaggaccaccccacgtttaataaaatcaccccaaatctggccgaattcgctttttcactgtaccgacagctggctcaccaatcaaattcaactaatatcttcttttcccctgtttcgattgcaacggcattcgctatgctgagccttggaactaaggccgacactcacgacgagatattggagggattaaacttcaatctgaccgagatccctgaagctcagatccacgaagggttccaggaactcctgcggacactgaatcagcccgattctcagctgcagctgaccaccgggaacggactttttttaagtgaaggtctgaaactagtggacaaattcctcgaggacgtcaagaaactttaccactccgaagcctttaccgtgaacttcggtgacactgaagaagccaagaagcagataaatgactatgtcgagaaggggacccaggggaagatagtggatctggtaaaggagttggacagggacaccgtgttcgccctcgttaactatatatttttcaaaggcaagtgggaacggcccttcgaggtgaaggacacagaagaggaggattttcatgtggatcaggtcactaccgtaaaagtgcccatgatgaaaagattggggatgttcaatatacagcattgtaaaaaactttcctcgtgggtgctgttgatgaagtatctgggcaacgcaaccgcgatcttcttcctgcctgatgaaggaaagcttcaacacttagagaacgagctgacacacgatatcattacaaagtttttggagaatgaggacaggcgaagtgccagtttgcatctgcccaagctcagcatcacgggtacctacgatctgaaaagtgtcttggggcaactgggaattactaaggtgttttctaatggggccgacctgtccggggtcaccgaggaggcccccctgaagttgtctaaagcggtgcacaaggctgtgttaacaattgacgagaagggtaccgaagcagcgggagcaatgtttctcgaggccatccccatgtcgataccgcctgaggtcaaattcaacaagccgttcgtctttcttatgattgagcagaacactaaatccccattgttcatgggtaaagtggtaaaccccacgcaaaag

SEQ ID NO: 18662 - DNA, 1254 bp, synthetic construct
  misc_feature 1..1254: note = source = /note="Description of Artificial Sequence: Synthetic coding sequence"
  source 1..1254: mol_type = other DNA
atgccatcgtccgtcagctggggaattctgcttctggccggtctttgctgtcttgtccctgtctctcttgctgaggatccacaaggagacgcagcgcagaaaaccgatacctcacaccacgatcaagaccacccaaccttcaacaagattacgcctaacctcgcagaattcgctttctcactgtaccgtcagctggcccatcagtcgaactccaccaacattttcttttccccagtgtccatcgcaactgcatttgccatgctgtccctgggaactaaggcagacacccacgatgaaatacttgaggggctcaacttcaatcttactgagattcccgaagcccaaattcatgagggcttccaagaacttcttagaaccctgaatcaacctgattcccaactgcaacttaccacgggaaatggtctttttctctccgaaggacttaagctggtggacaagtttctcgaggacgtgaagaaactgtaccattccgaggccttcactgtgaattttggagatactgaggaagcaaagaagcaaatcaatgattacgtggagaagggaacccagggaaagattgtggatcttgtgaaggagcttgatagagatactgtctttgcgctggtgaactacattttctttaagggaaagtgggaacggccttttgaggtgaaggataccgaggaggaagattttcatgtggatcaggtcaccaccgtcaaagttccaatgatgaagagactcggaatgtttaacatacaacactgtaagaaactttcgtcgtgggtgctgctgatgaagtaccttggaaatgcaacggccatctttttcctcccggacgaaggaaaattgcaacacctcgaaaatgagcttacccacgacatcattactaagttcctcgaaaacgaggacaggcgctcggcatctctccatctccctaaactctcgatcaccggaacgtacgacctgaaatccgtcctcggccagcttggcatcactaaggtcttttcaaatggcgctgacctctcgggagtgaccgaagaggcgccccttaaactttcaaaggcagtgcacaaggcagtgcttaccattgatgaaaaaggtactgaagcagcaggtgcaatgtttctggaggccatcccgatgtcgattccacccgaagtgaagttcaataagccctttgtctttctcatgatcgagcaaaacaccaaatcgcctctgttcatggggaaagtggtgaaccctacccaaaaa

SEQ ID NO: 18663 - DNA, 1254 bp, synthetic construct
  misc_feature 1..1254: note = source = /note="Description of Artificial Sequence: Synthetic coding sequence"
  source 1..1254: mol_type = other DNA
atgccatcctcagtgagctggggtatcctgttacttgcgggtctgtgttgtctggtgccagtgagcctggccgaggatccgcaaggtgatgctgcacagaagaccgacacttctcaccacgatcaggatcatccaacattcaacaagattacgccaaaccttgccgagttcgccttttccttataccgccaattggcccaccagagcaacagcacgaacatttttttttctccagttagcattgccacggcgtttgccatgctgtccttaggcaccaaggcggacactcacgatgaaatcctggaggggctgaactttaatctgactgaaatcccagaggctcaaatccatgaggggttccaggagctgctgaggaccttgaaccagcctgattcccaattgcagctgacgaccggcaatggtctgttcctcagcgagggtctgaaactggtggataaattcctggaggacgtcaaaaagctgtatcatagcgaagccttcaccgtgaatttcggtgatacggaggaggcgaaaaagcaaatcaatgactacgttgaaaagggtacccaaggaaagatcgtggacctggttaaggaactagacagggatacagtcttcgcactggtcaattatatttttttcaaaggtaagtgggagcgtccttttgaggtcaaggacacggaagaagaagattttcatgtggaccaagtgaccacggtgaaggtgcctatgatgaagcgcttgggtatgtttaacattcaacactgtaaaaaactctcatcgtgggttctgctgatgaaatatctgggaaatgctacggctattttttttctccctgacgagggcaagctgcaacacttggagaatgagctgacgcacgacattatcaccaagttcctggagaacgaagacagacgcagcgccagcctccacctaccgaaactgagcattactggtacgtacgatctgaaatccgtcctgggccagttaggtatcaccaaggtatttagcaatggtgccgacctcagcggggtcaccgaggaggcgccactcaagctgtccaaggccgtgcataaggcggtgctgaccatcgatgaaaaggggaccgaagccgccggcgcgatgttcttggaggcaatccctatgtcaatcccgccagaggtcaagttcaataaacctttcgtgtttctaatgatcgagcagaacactaaaagccctctgttcatgggtaaggtcgttaacccaacgcagaag

SEQ ID NO: 18664 - DNA, 1254 bp, synthetic construct
  misc_feature 1..1254: note = source = /note="Description of Artificial Sequence: Synthetic coding sequence"
  source 1..1254: mol_type = other DNA
atgccgtctagcgtctcgtggggtatcctgctgctcgcaggattgtgctgcttggtccctgtgagcctcgccgaggacccgcagggagacgccgcccaaaagaccgatacgtcccaccacgaccaggaccatccgaccttcaacaaaatcacgccaaacctggcagaattcgctttctcgttgtatcgccagctggcacaccagtccaactctaccaacatctttttctcgccggtgtcgatcgcgaccgctttcgctatgttgtctctcggtactaaggcagatactcatgatgagattctggagggacttaactttaatcttactgagatcccagaagcgcaaatccatgaaggcttccaagagctgctccggaccctgaatcagccagactcgcagctgcaactgaccaccggaaatggcttgtttctgtccgaaggcctgaaactggtcgacaaattcctggaggatgtgaagaagctgtaccactccgaagccttcactgtcaacttcggcgataccgaggaagcgaaaaaacagattaatgactacgtggaaaagggaacccaggggaagatcgtggacctcgtgaaggaattggaccgggatacggtgttcgcgctggtgaattacatcttctttaaaggaaagtgggagcgcccattcgaagtgaaagacaccgaggaagaggactttcacgtcgatcaggtgactacggtcaaggtgccgatgatgaagcgtttgggaatgttcaacatccaacactgtaagaagctgtcatcttgggtgttgctcatgaaataccttggaaatgcgaccgccatcttcttcctgccagacgagggcaaactgcagcatctggaaaacgaattgacccatgacatcatcactaagttcctggaaaacgaggaccgcaggtcagcatccctccacctgccaaaactgtcgatcactgggacgtacgatctcaaaagcgtgctggggcagctgggaatcacgaaggtgtttagcaacggagcggatctgagcggcgtgaccgaagaggcacctctgaaactgagcaaggccgtccacaaagcggtcctgactatcgacgagaagggaactgaggccgctggagcaatgtttctcgaggcaattcctatgtctattccgcccgaggtgaagtttaacaagccgtttgtgttcctcatgatagagcaaaatactaagtccccgctcttcatggggaaggtggtcaatcccacccaaaag

SEQ ID NO: 18665 - DNA, 1254 bp, synthetic construct
  misc_feature 1..1254: note = source = /note="Description of Artificial Sequence: Synthetic coding sequence"
  source 1..1254: mol_type = other DNA
atgccctcttcggtgtcatggggaattttgctcctggctgggctttgctgcttagtgcccgtgtctctcgccgaagacccacagggagatgcagcacaaaaaactgatacatcacatcacgatcaggatcaccctacatttaacaaaatcacacctaatttagcggaatttgccttttctctatatcggcagttagcacatcagagtaattctacaaatatcttcttttctcccgtgtccattgcgactgctttcgccatgctctctctcgggactaaagcagatactcacgatgaaatacttgaaggactgaattttaatctcactgaaattcctgaagcacagatccatgaagggttccaggaactactgaggactctcaatcagcctgattcacagttgcaactgacaactgggaacggactgttcttatctgaggggctcaaactcgtggataaatttctggaggatgtcaaaaaactctatcactcagaggccttcacagttaatttcggggatacagaagaagcaaaaaagcagataaatgattatgttgagaaaggaacgcagggaaaaatcgtggatctcgtcaaggaactggatcgagatactgtgttcgcactcgtgaattatatcttttttaaagggaaatgggaaagacccttcgaagtgaaagatactgaggaagaagatttccatgttgatcaggtgactactgtgaaagtgcctatgatgaaaagattgggaatgttcaatatacagcattgcaagaaactcagttcttgggtgcttcttatgaaatatctgggaaatgccacagccatcttcttcctccccgacgaagggaagttacagcacttagaaaatgaactgactcatgatataataactaaattcctggaaaacgaagatcgacggtccgcttctctgcaccttcccaagctctctatcacaggaacatatgatctcaaatcagtgctgggacagctaggaattacaaaagttttcagtaacggggctgatttatctggagtaacagaagaagctccactcaaactttctaaagcagtccacaaagctgtacttacgattgacgagaaagggactgaagcggccggagctatgtttttagaagccatacccatgtcaatcccaccagaagtgaagttcaacaaacccttcgtcttcctaatgatcgaacagaatacaaaatcgcctctatttatgggaaaagtagtgaacccaactcagaaa

SEQ ID NO: 18666 - DNA, 1254 bp, synthetic construct
  misc_feature 1..1254: note = source = /note="Description of Artificial Sequence: Synthetic coding sequence"
  source 1..1254: mol_type = other DNA
atgccatcatcagtgtcctggggaattctcctcctcgctgggctctgctgcctggtgcccgtgtcactggccgaggacccgcagggggatgcagcccagaaaactgatacttcccaccacgaccaagaccatccaacctttaacaagatcactccgaatctggccgaattcgccttctccctctaccgccaattggctcaccagagcaattcaaccaacatcttcttctcacccgtgagtatcgcgaccgcattcgctatgctgtccctgggtacgaaggcggatacccacgacgaaatccttgaaggactgaacttcaacctgaccgagatcccggaggcccagattcatgaaggattccaggagctccttcgcaccctcaatcagccagatagccaactgcagcttaccaccggcaatggcctgttcctttccgaaggactgaaattggtcgacaagttcctcgaggatgtgaaaaaactgtaccattccgaggcgttcaccgtaaacttcggagatacggaggaggcgaagaaacagatcaacgactacgtggagaaggggactcagggaaaaatcgtggatctggtgaaggagctggatagagatactgtgttcgccctggtcaactacatctttttcaaggggaagtgggagcgccctttcgaggtgaaggacaccgaagaggaggacttccacgtcgaccaggtgactactgtgaaggtcccaatgatgaaacgccttggcatgttcaatatccagcactgtaaaaagctcagttcctgggtgctgctcatgaagtacttgggaaacgccaccgctatcttctttttgccggacgagggtaaactccaacacctggagaatgaactgactcacgacatcatcactaagtttctcgaaaatgaagatagaagatcggcatccctgcatctgcccaaactgtccattaccggtacctatgatcttaaaagcgtcctcggacagctgggtattactaaggtcttttcaaacggagcggacctctcgggagttactgaagaggccccgctgaaactgtccaaggcagtgcataaggccgtgttgactatcgacgagaagggcactgaagccgcgggagcaatgttcctggaagcgatcccgatgagcatccctcctgaagtgaagttcaacaagccgtttgtgtttctgatgatcgaacagaatactaaatcgcctcttttcatgggaaaagtggtgaatcccactcagaag

SEQ ID NO: 18667 - DNA, 1254 bp, synthetic construct
  misc_feature 1..1254: note = source = /note="Description of Artificial Sequence: Synthetic coding sequence"
  source 1..1254: mol_type = other DNA
atgccttcgtcggtgagctggggtattctccttcttgcaggtctgtgctgtttggtccctgtgtcgctcgcagaggaccctcaaggggatgctgcgcagaaaacggacacctcacatcatgatcaggatcatcctacctttaacaagattactccgaacctggcagagtttgcattttcactgtatcggcaacttgctcatcaatcgaactcgaccaacatctttttctctccagtcagcatcgcaactgcattcgcaatgctttccttgggtactaaagccgacacccacgacgaaatcctggaaggtctgaactttaacttgactgagattcctgaagcgcagatacacgaaggattccaagaactccttcgtactttgaaccagcctgattcgcagcttcagcttactactggcaacggtttgtttctgagcgaaggcctgaagctggtcgataagtttttggaggacgtgaaaaaactgtaccatagtgaagccttcactgtgaattttggagatactgaagaggcaaagaaacaaatcaacgattacgtggagaaaggaacccaaggtaagatagtggacctggtgaaggaactggaccgagataccgtgttcgcactggtcaattacatctttttcaagggtaagtgggaaaggccatttgaagtgaaagatacggaggaggaagatttccatgtcgaccaggtgactactgtgaaggtgcccatgatgaagcggcttggcatgttcaatatacaacactgcaagaagctctcgagttgggtgcttctgatgaagtatttgggtaatgcgactgcgattttctttctcccggatgaagggaaacttcagcacctggaaaatgagcttacccatgacattatcaccaaatttctggagaatgaggatagacgctcagcgtcacttcatctccctaagctgtccatcactggaacctacgatcttaagtccgtgcttggccagttggggatcaccaaggtgttctccaacggtgccgatctctcgggagtgaccgaagaggccccactgaaactttccaaagcagtgcacaaggcagtgcttactattgacgaaaagggaaccgaagcagcaggcgcgatgtttcttgaagcgataccaatgtcgattccacccgaagtcaagttcaataagcctttcgtgttcctcatgattgaacagaacaccaagtcccctctgtttatgggaaaggtagtcaatcccactcaaaag

SEQ ID NO: 18668 - DNA, 1254 bp, synthetic construct
  misc_feature 1..1254: note = source = /note="Description of Artificial Sequence: Synthetic coding sequence"
  source 1..1254: mol_type = other DNA
atgcccagcagcgtgtcctggggcattctgctactagcaggtctctgctgtttagtgcccgtcagccttgccgaggacccgcagggagatgccgcacagaagaccgacactagccatcacgaccaggatcatccaacgtttaataagattacaccaaatctggccgaattcgcattctccctctaccgccagttagctcaccagagcaattctacaaatattttcttttcccccgtctcaattgccaccgcatttgccatgctgtccctgggaaccaaggcagatacccatgatgagatactggagggactgaacttcaaccttacagaaattccagaagcccagatccacgaaggcttccaggagctgttaagaaccttgaaccaaccagattctcaactgcagctcacgaccggcaacgggctatttctgtccgaaggccttaaactggttgacaagtttctcgaagatgtcaagaagctgtatcattcggaagctttcaccgtgaacttcggagacaccgaagaagccaagaagcagatcaacgactatgtcgagaagggtacgcagggaaaaatcgtggatttggtgaaagaactggaccgggacacggtgtttgcgctggtgaattacatcttcttcaaagggaaatgggaaaggccctttgaagtgaaagataccgaggaggaggacttccacgtggaccaggttaccactgtgaaagtcccaatgatgaagaggcttggtatgttcaatatccagcattgtaaaaagcttagttcctgggtcttgttaatgaaatatttgggaaatgcgactgcgatcttttttctcccggacgaggggaaactccagcatttggagaatgagctcacccacgacataattacaaaatttctggagaatgaagacagaaggtcagccagcttacatctacctaaactatccattaccgggacctacgacctcaaaagcgtcctgggacaactaggcattacgaaagttttttctaacggtgcggacttgtctggggtgacagaggaggccccgctgaaactctcaaaggcagtgcataaagccgtgttaactatagatgagaaaggaaccgaggccgcaggcgctatgtttctggaagctattccgatgagcatccccccggaagtcaagtttaataaaccgttcgtgttcctgatgatcgaacagaacacaaaatctcccctcttcatgggaaaggtggtgaaccctacacagaag

SEQ ID NO: 18669 - DNA, 1254 bp, synthetic construct
  misc_feature 1..1254: note = source = /note="Description of Artificial Sequence: Synthetic coding sequence"
  source 1..1254: mol_type = other DNA
atgcctagtagcgtttcctggggcatcctgttactggcaggcctctgctgcctggtgccagttagtttagccgaggatcctcaaggggatgccgcccagaaaaccgataccagccaccacgaccaggaccatcctacgtttaataaaattactcctaatttagccgagttcgcgtttagcctgtatcggcagttggcacaccaatctaactcaaccaacatcttcttctctcccgtcagcatcgctactgcatttgccatgctcagtctgggtactaaagcagacacccacgacgaaattctcgagggcctgaactttaacctcacagagatacccgaagcccagatccacgagggcttccaggaactattgaggacactcaatcaacccgactcacagctccagttgaccacaggcaacggactgttcctgagtgaaggattgaagctggtagacaagttcctcgaggacgtgaaaaagctctaccactcagaagcctttacggtgaacttcggcgacacggaagaagctaaaaaacagattaatgattacgtggaaaaggggactcaaggcaaaatcgttgacctggttaaagagctggatcgtgacacagtgtttgctcttgtgaattacatctttttcaagggcaagtgggaaaggccctttgaggttaaggacacagaagaggaggactttcacgtcgaccaagtgacaaccgtcaaagtgcctatgatgaagcgcttgggaatgttcaatatccagcactgcaagaagctgtcctcatgggtgctgctgatgaaatatctcggaaacgccacagcaatcttttttctgcccgacgagggcaaactccaacacctagagaatgaactcacccatgatataattactaagttcctcgagaacgaggaccgcaggtcagccagcctacaccttccaaaactctcaattaccggaacttatgacctcaaaagtgtgttgggccagctcggaataactaaggtcttctctaatggagcagatttatccggcgtgactgaggaggcccccctgaagctttccaaagccgtacacaaggcagtactcaccatcgacgagaaagggacagaggctgctggcgctatgtttttggaggctatccctatgagtatcccccccgaagttaaattcaacaagccctttgtttttttgatgatcgaacagaacactaagtcaccgctttttatgggaaaggtggtgaacccaacgcaaaag

SEQ ID NO: 18670 - DNA, 1254 bp, synthetic construct
  misc_feature 1..1254: note = source = /note="Description of Artificial Sequence: Synthetic coding sequence"
  source 1..1254: mol_type = other DNA
atgcctagttctgtttcatggggtatcctcctcctcgcaggtctatgctgtctcgtcccagtctcacttgcagaagatccacaaggggatgctgcgcaaaagacggatactagtcaccatgatcaagaccaccctacgtttaacaagatcacccccaatctagcagagtttgctttctccctgtatcgtcagttagcgcatcagtccaattccacaaacatttttttttcgccagttagtatcgccacggcatttgctatgctcagcttggggacaaaggccgatacacacgacgaaatactggaaggtttgaacttcaaccttacggaaataccagaagcccaaatccacgagggctttcaggagctgttgcgaacgcttaaccaaccagattctcaacttcagcttacaacaggaaacggcctcttccttagcgaaggcttgaagctcgtcgacaagttccttgaagacgttaaaaagctgtaccatagtgaggcgttcaccgtcaacttcggagacacagaagaggcaaagaaacagatcaatgactatgtcgagaagggtacacagggaaagatcgtggatttggttaaagaactcgatcgggacacggtattcgctcttgttaactatatctttttcaagggcaaatgggagcgtccgttcgaggtaaaagacaccgaggaggaagacttccatgtcgaccaggtcaccactgttaaggtgccgatgatgaagcggctcggaatgttcaacattcagcattgtaaaaaactgtctagttgggtactcctgatgaaatacctaggcaacgcgacagctatcttttttctccccgacgaaggtaagctgcaacatttagaaaacgaattgacgcacgacataatcacgaagttccttgaaaacgaagatcgccgaagtgcgtccctgcaccttccgaagctatccatcaccggtacttacgatttgaagtcagtgctcggccagctcggaatcaccaaggtgttctcaaatggcgccgatctgtccggtgtgacggaagaggcccctttgaagctctctaaagcggttcacaaagctgtcttgaccattgacgagaaaggtacagaggccgcaggtgcaatgttcctggaggctatcccaatgagcatcccacctgaagttaaattcaataaaccgtttgttttccttatgattgaacagaatactaaatcccctttgttcatgggcaaggttgtcaatcctacccagaag

SEQ ID NO: 18671 - DNA, 1254 bp, synthetic construct
  misc_feature 1..1254: note = source = /note="Description of Artificial Sequence: Synthetic coding sequence"
  source 1..1254: mol_type = other DNA
atgccttcgtcagttagctgggggattcttctcctggccggcctttgttgtctcgtgcccgtgagccttgccgaagatccacagggagatgcagcccaaaagaccgatacttcacatcatgaccaagatcacccgacgtttaacaaaatcactcctaaccttgccgaattcgctttcagcctttaccgccaacttgcacaccagtcaaactcgaccaatatcttctttagcccagtctcaattgccacggcgttcgccatgctttcactgggcaccaaggctgatactcatgatgagattctcgaggggcttaacttcaatctgacggaaatccccgaggctcagatccatgaaggttttcaagaattgctgcggaccctgaaccaacccgattcgcaacttcagctgaccaccggtaacggtttgtttcttagcgaagggttgaaactggtcgacaagtttcttgaagatgtgaagaagctctaccactcggaagcattcactgttaactttggtgacacggaagaggcaaaaaagcagataaacgactacgtggaaaaaggtactcaaggtaagattgtcgatctggtcaaagaactggaccgggataccgtgtttgcactggtcaactacattttctttaagggcaagtgggaacgcccattcgaagtgaaggataccgaggaggaagattttcacgtggaccaagtgacgaccgtgaaggtgcccatgatgaagcggctgggaatgtttaacatccaacactgcaaaaaactttcaagctgggtacttcttatgaaatacctcggcaatgctaccgccattttctttcttccagacgagggaaagctgcaacacctcgaaaacgagctcacccacgatatcattactaagtttctcgaaaatgaggatcggagatccgcatcccttcatctgccaaagctctcaattaccggtacgtatgatctgaaaagtgtgcttggacagctcggaattaccaaggtgttttccaacggagcagacctttccggagtgaccgaagaggctcctctcaaactgtctaaggctgtccataaggccgtgcttacgattgatgagaaaggcactgaagcagcaggtgcaatgttccttgaggcaattcctatgtctattccgccagaggtgaaattcaacaagccttttgtgtttctgatgatagaacaaaataccaaatcccctttgtttatggggaaggtggtcaaccctactcagaag

SEQ ID NO: 18672 - DNA, 1254 bp, synthetic construct
  misc_feature 1..1254: note = source = /note="Description of Artificial Sequence: Synthetic coding sequence"
  source 1..1254: mol_type = other DNA
atgccatcctctgtgtcatggggcattctgctgctcgctgggttatgttgcttagtccctgtatctctggccgaggatcctcagggcgacgcagcacaaaagacagacacatcccatcacgatcaggaccatcccactttcaataagatcacacctaacctagccgagtttgccttttccctttacagacaactggctcaccagagtaactccactaatatattcttcagccccgtgagcatcgctaccgctttcgccatgttgagcttggggaccaaggccgatacccacgacgaaatcctggaaggcctgaacttcaacctaaccgaaattccagaggcccagattcacgagggcttccaggagctactgaggacactaaatcagcccgactcccaattgcagctgacaaccggcaacggcctgtttctgtcagagggcctgaaactggtcgataaattcctggaggacgtgaagaaattgtaccatagcgaagccttcacagtcaactttggggacactgaggaggccaagaagcagattaatgactacgtagagaaaggcacccaaggaaagattgtcgatctggttaaggaattagaccgggataccgttttcgctttagtgaactatatcttcttcaaaggaaagtgggaacgaccatttgaagtcaaggacaccgaggaggaagactttcatgtggatcaggtgaccaccgtgaaggtgcctatgatgaagagactcggcatgtttaatatccagcactgcaaaaaactctcaagttgggtactgctgatgaaatatctgggcaatgctaccgcaattttctttctccccgacgagggtaagttacagcatctggagaacgagctaacccatgacattataacaaagtttctggagaacgaagatcgccgatccgcttcattacacctccctaaactgagcattaccggcacctacgatttgaagagcgtgctgggccagctgggcatcactaaagtcttctcaaatggagccgacctgtccggggtgaccgaagaggcaccactaaagttatccaaagctgtacataaagcagttctgacaattgacgaaaaaggcaccgaggccgctggtgcaatgttcctggaggccatacctatgtcaatacctccagaagtgaaattcaataagccttttgtatttcttatgatcgagcagaacaccaaatctcctttattcatgggcaaggtggtcaatcccacccaaaag

SEQ ID NO: 18673 - DNA, 1254 bp, synthetic construct
  misc_feature 1..1254: note = source = /note="Description of Artificial Sequence: Synthetic coding sequence"
  source 1..1254: mol_type = other DNA
atgccatcatcagtttcatggggaatcctactcctcgctggactttgctgcctcgtcccagtaagtttggctgaagatccacaaggagatgccgctcaaaagacagatacatctcatcacgatcaagaccatccaacatttaataaaatcactcctaatctcgccgaatttgcttttagtttgtatagacagttggcgcatcaatcaaactcaactaacatatttttttcaccagtctctatcgcaaccgccttcgctatgttaagcttgggtaccaaggcagatacgcatgatgaaatcctcgagggactgaacttcaaccttacggagatcccagaagcgcaaatacatgaggggttccaagagcttctgcgtactttgaatcagccagattcacagcttcagctcaccacaggaaacggacttttcttgtcggaaggattaaagcttgttgataaatttcttgaagatgtaaaaaaattgtatcactctgaagcgtttaccgttaatttcggagataccgaggaagctaaaaaacagatcaatgattatgtggaaaagggtacgcaggggaaaatcgtcgatctggtaaaggagctcgatcgtgataccgtgttcgcgcttgttaactacattttctttaagggtaagtgggagagaccttttgaagtgaaggataccgaagaggaagattttcatgttgatcaggtgactaccgtcaaggtcccaatgatgaagagactgggtatgttcaatatccaacattgcaaaaaactttcttcttgggtactccttatgaagtacctgggtaacgccactgccattttcttccttcctgacgaagggaaacttcagcatctggaaaatgaactcacacatgatatcataacaaagttcctagagaatgaggatcggcggtcagcgtccttgcatcttcctaagctctctattacgggtacctatgatcttaaatccgtcctcggtcaactgggaataacaaaggttttttcaaacggtgctgatctgagtggtgttacagaggaagcacccctgaaactatcgaaggctgtgcataaggccgttttgaccatagatgaaaagggaacagaggccgccggagctatgtttttggaggctattcctatgagcattcctccagaagttaaatttaacaaaccatttgtttttttgatgatcgaacaaaataccaagtcccctttgtttatgggcaaggtcgttaatccgacacaaaag

SEQ ID NO: 18674 - DNA, 1254 bp, synthetic construct
  misc_feature 1..1254: note = source = /note="Description of Artificial Sequence: Synthetic coding sequence"
  source 1..1254: mol_type = other DNA
atgccctcctcagttagttgggggattttgctcctggcagggttgtgctgcctagtgccagtgtccttagccgaggatcctcagggggacgcagctcagaagacagatactagccaccatgatcaggatcaccccactttcaataagatcaccccgaatctggcagagttcgctttttccctctatcgccagctggcccaccagagcaatagtacgaacatatttttctctcccgtgtcgattgctaccgccttcgctatgctgagcctggggacaaaagctgacacccatgatgagattctcgaaggtctgaattttaatctcactgagataccagaggcccaaatccacgaaggcttccaggaattgctgcggactctgaaccagccggatagccaactacaattgacaaccggaaacgggcttttcctgagcgaggggctgaagttggtggataaattcctcgaagacgtgaagaaactttaccattccgaggcttttactgtaaattttggggataccgaagaagccaaaaagcagataaacgattatgtggaaaagggtactcagggcaagatcgtagacttggtgaaagagttggatcgagacacagtgtttgccctggtgaactacatattctttaagggtaagtgggagagaccatttgaagtgaaagataccgaggaagaagattttcacgtggaccaggtgactacggtaaaggttcccatgatgaaaaggttgggcatgtttaatatccagcactgtaaaaaattgtcttcttgggtactactgatgaaatatctggggaacgctacagctattttttttttgcctgatgagggaaagctccagcatctggagaacgaactaacccacgacatcatcacgaagttcctggaaaacgaggaccgtcgatcagcatcgttacacttgcctaagctctcaattactggaacatatgatcttaagtctgttcttggacaactcggcatcactaaggttttcagcaatggggctgacctgtccggcgtgaccgaggaggcccccctaaaacttagcaaggcggtgcataaagccgtcctgaccatagacgaaaagggcacagaagccgccggggcaatgtttctcgaagctatccccatgtccattccgcccgaagtcaagttcaacaaaccattcgtttttctgatgattgaacagaataccaaaagcccacttttcatgggaaaggtggtgaatcccacccagaaa

SEQ ID NO: 18675 - DNA, 1254 bp, synthetic construct
  misc_feature 1..1254: note = source = /note="Description of Artificial Sequence: Synthetic coding sequence"
  source 1..1254: mol_type = other DNA
atgccctcatcggtgtcgtggggcatccttctgctggcaggcttgtgctgtctggtcccggtgagcctcgccgaagatccacagggagacgcggcgcaaaagaccgacacgagccaccatgaccaggaccatccgaccttcaataagattactccgaacctcgccgagttcgctttcagcctgtaccgccaactcgcccatcagtcaaactcaacgaatatcttcttcagcccggtaagcatcgccactgccttcgcaatgctgtcgcttggcacgaaggctgatacccacgacgagatcctggagggactcaactttaacctcaccgaaattccagaggcccaaattcatgaagggttccaggagcttttgcggaccctgaaccagccagattcgcaattgcagttgaccaccgggaacggcctcttcctgtccgaaggactcaaactggtggacaaattcctggaagatgtcaagaagctgtatcactccgaagcgttcactgtgaactttggagacaccgaggaggcaaagaagcagatcaatgactacgtcgaaaagggaacccaaggcaagatagtagacctcgtcaaagaactggacagggatactgtattcgccctggtcaactacatctttttcaagggtaagtgggaaagaccgtttgaagtgaaggataccgaggaggaagatttccacgtcgaccaggtgacgaccgtcaaagtgccaatgatgaaacgcctgggaatgttcaatattcagcattgcaaaaagctgtcctcatgggtgctgctcatgaaatacctcggaaacgcgactgctatattcttccttccggacgaaggcaagctgcagcacctggaaaacgagctcactcacgatatcatcacgaagtttctggagaacgaagataggagatcggcttcactgcatctgcctaagttgtccatcaccggcacttacgacctgaagtccgtgttgggacagctcggaatcactaaagtgttctccaatggggcggacctttctggcgtgactgaggaagcaccccttaagctgagcaaagccgttcacaaggccgttctgactatcgatgaaaagggaactgaagccgcgggggcaatgttccttgaggcgatcccgatgtcgatcccgcccgaggtgaagttcaacaaacctttcgtgtttcttatgattgagcagaatactaagtcccctctctttatgggaaaagtggtgaatccaacccaaaag

SEQ ID NO: 18676 - DNA, 1254 bp, synthetic construct
  misc_feature 1..1254: note = source = /note="Description of Artificial Sequence: Synthetic coding sequence"
  source 1..1254: mol_type = other DNA
atgccaagcagcgtctcatggggaatactcctgctggctggcctttgttgcctggtgccagtgtctctggctgaggacccccagggagatgctgctcaaaagactgacacctcccaccacgaccaagaccatcccacctttaacaagatcaccccgaatctggcggagttcgccttttccctttacagacagttggcgcaccagtccaactcaactaatatcttcttttcgccggtgtccatcgccacggcctttgcaatgctgagcctgggaaccaaggcagacactcatgatgagatccttgaagggctcaacttcaaccttacggaaatcccggaggctcagatccacgaagggttccaggaactgctgcggacccttaaccagcctgactcacagctgcagctcaccactggaaacggactctttctctccgagggactgaagctggtcgataagttcctggaagatgtcaaaaaactctaccacagcgaggcctttaccgttaacttcggcgatactgaagaggcaaaaaagcaaatcaatgactacgtggagaagggtactcagggaaagatcgtggatctggtgaaagaactggatcgggacacggtgtttgccctcgtgaactacatcttctttaagggaaagtgggaacggccctttgaggtgaaggatactgaggaagaggatttccatgtcgatcaagtgaccactgtcaaagtcccgatgatgaagcgactgggaatgttcaatattcaacattgcaaaaagttgtcatcgtgggtgctcctgatgaagtacctggggaacgccactgcgatcttctttctgccagacgaaggcaagctccagcacctggaaaatgagcttacccatgacatcatcaccaagttccttgagaacgaggaccgccggtcggcctcgctccacctgccgaagctgtcgattaccggcacctacgatctgaagtccgttctgggacagctgggaatcactaaagttttctccaacggagccgatctgagcggagtgactgaggaagctcccctgaagctgagcaaagcagtgcataaggcagtgctcaccatagatgaaaaaggcacggaggccgccggtgcgatgttcctggaagcgatcccaatgtccatcccgccagaggtgaagttcaataagccgttcgtgttcctgatgatcgagcaaaatactaagtccccactgtttatgggcaaagtcgttaacccgacccagaag

SEQ ID NO: 18677 - DNA, 1254 bp, synthetic construct
  misc_feature 1..1254: note = source = /note="Description of Artificial Sequence: Synthetic coding sequence"
  source 1..1254: mol_type = other DNA
atgccatcgtcagtgtcgtggggaatacttctcctggcaggactgtgctgtcttgtgcctgtgtcgcttgcagaagatccccaaggggacgcagcacaaaaaactgacacctcacatcacgatcaggaccaccctacttttaacaagatcacccctaatctcgccgagtttgccttctcattgtaccgccagctcgcgcaccagtcgaactccactaatatctttttcagcccagtctcaatagcaactgcgtttgcaatgctttccctgggaactaaagccgatacccatgacgagattcttgaaggccttaactttaacctgacggaaatcccagaggctcaaatccatgaggggtttcaggagctgcttcggacccttaaccaacctgactcccaacttcaactgaccactggaaacggtctgttcctgtctgagggactgaaactggtggacaagtttctggaagatgtcaagaagctgtaccactcggaggcatttactgtgaactttggcgataccgaagaggcaaagaagcagataaatgattacgtggaaaagggaacccaggggaagattgtcgatcttgtgaaggaactcgaccgcgatactgtgttcgcactcgtcaattacatctttttcaagggaaaatgggaacgcccttttgaagtaaaggatacggaagaagaggatttccacgtcgatcaggtgactaccgtcaaagtgcctatgatgaagaggcttggtatgttcaacattcaacactgtaaaaagctgtcatcctgggtcctgctcatgaagtacctgggtaacgcgactgcaattttcttccttcccgatgagggaaaactgcagcacctcgaaaacgaacttactcatgatatcataactaaattccttgaaaatgaagatcgccgctccgcctcgcttcatctgccgaagttgtcaattaccggaacttatgacttgaagagcgtcttgggtcagctgggtatcactaaggtgttttcaaacggtgcagacctgagcggtgtcaccgaagaagcgcctctcaagctgtcgaaggccgttcacaaggcagtccttacgatcgatgaaaagggcactgaagcagctggggcaatgtttcttgaagcaatcccaatgtctattccccccgaagtcaaattcaataagccatttgtctttctcatgattgagcagaacacgaagagccctcttttcatgggaaaggtggttaatcctacccaaaag

SEQ ID NO: 18678 - DNA, 1254 bp, synthetic construct
  misc_feature 1..1254: note = source = /note="Description of Artificial Sequence: Synthetic coding sequence"
  source 1..1254: mol_type = other DNA
atgccttccagcgtctcttggggtatcctgcttctggctggtctgtgttgcctggttcctgtgtcactggctgaagatcctcagggagacgccgctcaaaagacagatacatcccaccatgatcaggatcaccctaccttcaacaagatcacacctaaccttgctgaattcgccttctccctctacagacagctggcccaccaatcaaactccaccaatattttcttctctcccgtgtccatcgcaactgctttcgctatgctctctctgggtactaaggccgatacacacgacgagatccttgaaggccttaatttcaatcttacagagattcccgaggcccagatccacgagggattccaagagctgctgaggaccctgaatcagcctgattcacaactgcagctgacaaccggaaacggtctcttcctctcagagggtttgaaactggtcgataaattccttgaggacgtcaagaagctgtatcacagtgaggcctttactgtgaacttcggtgataccgaggaggctaagaaacaaatcaacgactacgtggaaaagggaactcagggtaagatcgttgacctggtcaaagaattggatcgtgacaccgtattcgctctggtgaattacattttcttcaagggcaagtgggagagaccctttgaggttaaagataccgaggaagaggattttcacgttgaccaggtaactaccgtgaaggttcctatgatgaaaaggctgggcatgttcaatatccaacactgcaagaagctgagctcttgggttctgctcatgaaatacctcggcaatgctaccgctattttcttcttgcccgatgagggtaagcttcagcatttggagaatgagcttactcatgacatcatcacaaagtttcttgagaacgaggacagaagatctgcaagtctgcatctgcccaagctctcaattactggtacctacgatctgaagtcagtgctgggccagctcggcatcaccaaagtgttttccaatggcgctgacctgagtggcgtgactgaagaggcccctctgaagcttagcaaggccgttcacaaagcagtactcacaattgacgaaaagggtaccgaggccgccggtgccatgttcctggaagccattcctatgagtattcccccagaggtcaagtttaacaaacccttcgttttccttatgatcgagcaaaacaccaagtccccactgttcatgggaaaggttgtgaatcccactcagaaa

SEQ ID NO: 18679 - DNA, 1254 bp, synthetic construct
  misc_feature 1..1254: note = source = /note="Description of Artificial Sequence: Synthetic coding sequence"
  source 1..1254: mol_type = other DNA
atgcctagcagcgttagttggggtatcttgcttttggcaggcctatgctgtctggtgcctgtcagtctggctgaagatccacagggggatgctgcccaaaaaaccgatactagccaccacgatcaggaccatcccacttttaataagataacccccaatcttgccgaattcgctttctccctgtaccgccaacttgcccatcagagcaactcgaccaatatttttttcagtccggtgtctatcgctacagcctttgctatgctatccttaggaactaaagccgacactcatgacgagatccttgagggattaaattttaatcttaccgagatccccgaagcacagattcatgaaggctttcaggaactcttgagaaccctgaatcagccagattcacagctgcagttgaccacaggtaatggtctgtttctttcggagggcttaaagttggtggacaagtttctggaggacgtaaagaaactttatcactcagaagctttcacagtgaattttggagacaccgaggaagcgaagaagcagattaatgactatgtagagaagggcacccaaggtaagattgttgacctagtcaaggaattggaccgggatacagtgttcgctctggtaaattacatattttttaaaggcaagtgggagcggcctttcgaggtcaaggataccgaggaggaggacttccacgtggatcaagtgaccactgttaaggtacccatgatgaaacgcctagggatgttcaacatccagcactgtaagaagctgagctcatgggtgctgctcatgaagtatctaggaaacgcgacagctatctttttcctgcccgacgaggggaaattgcagcatctggaaaatgaattaacacatgacataataacgaagttccttgagaatgaggaccgcagaagtgcctcattgcacctgcccaaactgtctattacgggcacttacgatttaaagtccgtattaggacagctgggcataacaaaggtcttctctaacggcgcggatcttagtggtgtcaccgaggaggccccgctaaagctcagcaaggccgttcataaagctgttctgaccatcgatgaaaaagggacggaagctgcaggcgctatgttccttgaggccatcccaatgagcattccccccgaggttaaattcaataagcctttcgtcttcctaatgatagagcagaacaccaagagtccgctgtttatgggaaaggttgtgaatccaacccagaag

SEQ ID NO: 18680 - DNA, 1254 bp, synthetic construct
  misc_feature 1..1254: note = source = /note="Description of Artificial Sequence: Synthetic coding sequence"
  source 1..1254: mol_type = other DNA
atgccatcaagcgtctcttggggaattctcctgctcgccggactgtgctgcttagtgccggtttcactggctgaagacccccagggagatgctgcccagaagacagatacctcacaccacgatcaagaccatcctacttttaacaagattacccccaaccttgcagagttcgcatttagcctctacaggcagctggcacaccaaagcaattctaccaatatcttcttcagcccagtctccatcgcgacagcatttgctatgttgagcctgggaacaaaagcagatacacacgatgaaattctagagggtctcaacttcaacctgacagaaatcccagaagcacagatccacgaaggttttcaagaattgttgagaactctgaatcaacccgattcacaactgcagctgaccacagggaacggactctttcttagcgaaggactgaagctggtggataaatttctggaagacgtgaaaaaactttaccactccgaagcttttacagtcaacttcggggatacagaagaagctaaaaagcaaattaatgactatgttgaaaagggaacccagggaaaaatcgtcgatttggttaaagaactggatcgggatacagtgttcgcattagttaattacattttctttaaaggcaaatgggagaggccttttgaggtcaaggacacggaagaggaggactttcacgtagatcaagtgacaaccgtcaaggtcccaatgatgaagaggttaggaatgtttaacatccagcattgcaaaaaacttagttcctgggtccttctgatgaagtaccttgggaatgcaaccgctatcttctttctgcctgacgaggggaagttgcagcacttggagaacgagttgacccatgatatcattacaaagtttcttgagaacgaggaccgtcggtcagctagtctgcatctccccaagctgagcattacaggcacttacgatctgaaaagtgtgctgggacagctgggtatcacaaaagtcttctctaatggagcagacttatccggagtcacagaagaagctccactcaagctgtctaaagcagttcataaagctgtccttaccattgatgagaagggtactgaagccgcaggcgccatgttcctagaagctatccccatgagtattcctcccgaggtaaagtttaacaagccgttcgtgttcctcatgatcgaacagaacaccaagagccctctgttcatgggcaaggttgtgaatccaacacaaaaa

SEQ ID NO: 18681 - DNA, 1254 bp, synthetic construct
  misc_feature 1..1254: note = source = /note="Description of Artificial Sequence: Synthetic coding sequence"
  source 1..1254: mol_type = other DNA
atgcctagcagcgtgtcgtggggcattctgcttctggcgggactgtgctgtcttgtgccggtgtcgctcgccgaggacccgcagggggacgccgctcaaaaaaccgacacgtcccaccacgaccaagatcaccctaccttcaacaagatcaccccgaacctcgccgagttcgccttttcactgtaccggcagttggcgcaccagtctaattcgactaatatctttttcagccctgtgtcgatcgcgacggccttcgcaatgctctcgctgggtactaaagccgatacccatgacgaaatcttggagggactcaacttcaatctcaccgaaatcccagaggcgcagatccacgaaggattccaagagctcctgcgcacccttaaccaaccggacagccaactccagctgactaccggaaacgggctctttctgtcggaaggactgaagctcgtggataagttcctggaggacgtaaagaaactgtaccatagcgaagccttcaccgtcaattttggagacacggaggaagccaagaaacagatcaacgactacgtggagaagggcacgcagggcaagattgtggacttggtgaaggaactcgatagggataccgttttcgccttggtgaactacattttcttcaaagggaaatgggaaagaccatttgaagtcaaggacaccgaagaagaggacttccatgtggaccaggtcaccactgtgaaagtcccgatgatgaagcgcctgggcatgtttaacatccaacattgcaagaagctgtcatcctgggtgctgctcatgaaataccttgggaatgcgactgcgatcttttttctcccggatgaaggcaagttgcagcacctcgaaaatgaactcactcatgacataatcacgaagttcctggaaaacgaggaccgcagatccgcgtcactgcatctcccaaagttgtcaatcactggtacttacgatttgaaaagcgtcctcggacagctcggaatcactaaggtctttagcaatggagcagacctctccggcgtgactgaagaagctccactgaaactgtccaaggccgtgcacaaggccgtgctcaccattgatgaaaagggaactgaagctgcaggcgctatgttcctggaggctatccccatgagcatcccgccggaagtgaagttcaataagcctttcgtctttcttatgatcgagcaaaacactaagtctcctcttttcatgggcaaagtggttaaccccactcaaaag

SEQ ID NO: 18682 - DNA, 1254 bp, synthetic construct
  misc_feature 1..1254: note = source = /note="Description of Artificial Sequence: Synthetic coding sequence"
  source 1..1254: mol_type = other DNA
atgccttcctccgtcagttggggcattctgctgttggcagggctgtgttgtctggtgcctgtatcccttgctgaggaccctcaaggtgatgccgcacagaaaacagatacgtctcaccacgaccaggatcatccaacctttaataagattactcccaacttagcggaatttgccttctcactgtaccggcagcttgcacatcagtctaatagcacaaacattttttttagtccggtatccattgcgactgcatttgctatgttgagcttgggaacaaaagcggatactcatgacgagatcctggaaggcctgaacttcaaccttactgagattccagaagcacagatacacgagggcttccaggaacttctgcgtactctaaatcagccagactctcagttgcaactgaccacaggaaacggactcttcctgtccgaaggtcttaaactggtcgacaaatttttggaggatgtcaagaaactatatcactccgaagcatttaccgttaatttcggggacacagaagaggctaagaagcagataaacgactacgtggagaaaggaacgcagggtaaaatcgttgatctcgtcaaagagcttgatcgcgataccgtgttcgcactggtcaattacattttcttcaaaggcaaatgggaacgaccctttgaggtaaaggacaccgaggaggaggatttccacgtcgaccaagttacgaccgtgaaagtcccaatgatgaagagactgggtatgttcaacatccaacattgcaaaaaactctccagttgggtgctgctaatgaaatatctcgggaatgccaccgctatcttttttctgccagatgagggaaagctccaacacctggaaaatgagttgacccatgatataatcacgaaatttctggaaaatgaggaccgcaggagcgccagcctgcatttacctaagctgagtataaccggcacctacgatctcaagtcggtcctgggccagctcggaatcacgaaggtttttagcaacggcgctgacttgagcggcgtgacggaggaagccccattgaagctgtctaaggccgttcacaaagcagttctcactatagatgaaaaaggaaccgaagccgcaggcgcaatgttcctggaagctatccccatgtcaatacccccagaggtgaagtttaacaaacccttcgtattccttatgatcgagcagaatacaaagtctcctctcttcatggggaaggtcgtgaacccaactcagaag

SEQ ID NO: 18683 - DNA, 1254 bp, synthetic construct
  misc_feature 1..1254: note = source = /note="Description of Artificial Sequence: Synthetic coding sequence"
  source 1..1254: mol_type = other DNA
atgcccagctcagtgtcatggggcatcctgctccttgccggactgtgctgcttggtgcccgtgtccctcgcggaagatcctcaaggtgacgcggcccaaaagaccgatacctcgcaccacgaccaagatcaccccactttcaacaaaatcacgccaaaccttgctgaattcgctttctccctgtatcgccagctggctcaccagtccaactccaccaatatcttcttcagcccagtgagcatcgcgaccgcgttcgcgatgctgtccctcggaaccaaggcggacactcatgacgagatcctggaaggactgaacttcaatctgaccgaaatcccggaagcacagatccacgagggatttcaagagctgctccgcactctcaaccaacctgatagccagctccagttgaccactggaaatgggcttttcttgagcgagggcttgaagctcgtggacaagtttctggaggacgtgaagaagctctaccattccgaggccttcaccgtgaactttggcgacaccgaggaagcaaagaagcaaatcaacgactacgtggagaaaggaactcaaggaaaaatcgtggacctggtgaaggagctcgaccgggacactgtgttcgcgctggtgaattacatcttcttcaagggaaagtgggagcgcccattcgaagtgaaggataccgaggaggaagatttccacgttgatcaggtgactactgtcaaggtgcctatgatgaaaaggctcggtatgttcaacatccagcactgcaagaaactgtcctcatgggtcttgctcatgaaatacctgggtaatgccactgctatcttcttccttcctgacgaaggaaagctccaacacttggaaaatgagctgactcacgacatcatcaccaaattcctcgaaaatgaggatagacgctcagcgtcgctgcacctcccaaagctctcaattactggaacctacgacctgaagtcggtgctgggacaactgggaatcactaaggtcttttcaaatggcgcagacctgtcgggggtgaccgaagaagccccactcaaactctccaaagccgtgcacaaggcggtccttaccatcgacgagaaaggaaccgaggccgcaggcgccatgttcctggaagcgatccccatgtctatcccaccggaggtgaagtttaacaagccgttcgtgttcctgatgatcgagcagaacaccaagtccccactgttcatgggaaaagtagtgaacccgacgcagaag

SEQ ID NO: 18684 - DNA, 1254 bp, synthetic construct
  misc_feature 1..1254: note = source = /note="Description of Artificial Sequence: Synthetic coding sequence"
  source 1..1254: mol_type = other DNA
atgccaagcagcgtctcctggggtattttgctgcttgcgggattgtgctgtctcgtgccagttagccttgccgaagacccgcagggcgatgcagcccagaaaacggatacgtcccaccatgaccaagatcacccaacattcaacaagatcacccctaatctggccgagtttgcattttcgctatacagacagctcgcccatcagtcaaattccactaacatctttttctctccagtctctattgccacagccttcgcaatgctcagtcttggtaccaaagcagacacccatgacgaaattctggagggtctcaactttaatctgacggaaatccccgaagcccagatccacgaagggttccaggagttattaagaaccctgaaccagcccgactcccagcttcagctgaccacagggaacggcctgttcctgtctgaaggactgaagcttgtggacaaatttctggaagacgtgaaaaagctttatcattcggaagcatttacggtgaatttcggcgacaccgaggaggccaaaaagcaaataaacgactacgtcgaaaaggggactcaagggaaaatcgtggatttggtgaaggaattagatcgcgacactgtgtttgctttggtcaactacatattttttaaaggcaagtgggaaagacctttcgaagtcaaggatacagaggaggaagatttccacgttgaccaagtgacgacagtcaaagtgcctatgatgaagcgactggggatgtttaacatacagcattgtaaaaaactgtcttcatgggtgcttctgatgaagtatctgggaaacgcaactgcgatttttttcttacctgacgaaggcaagctccagcacctggaaaatgagctaactcatgatattattacgaaattcctggagaacgaggatcgaaggtcagcctctcttcaccttccgaaactgagcatcacagggacctatgatttgaaatccgtgcttggacagctgggaatcacaaaggtcttttctaacggcgctgatctttctggggtcacggaggaggcaccactaaaattatctaaggctgttcataaagctgtcctgaccatcgatgaaaaagggactgaggcggccggtgccatgttcctcgaggccatcccaatgagtatacctcccgaggtcaagttcaacaaaccttttgtcttcctcatgatcgaacagaacaccaaatcccccctgttcatggggaaggttgtgaatcctacccagaag

SEQ ID NO: 18685 - DNA, 1254 bp, synthetic construct
  misc_feature 1..1254: note = source = /note="Description of Artificial Sequence: Synthetic coding sequence"
  source 1..1254: mol_type = other DNA
atgccgagtagcgtcagctggggcatcctgctcctcgccggtctgtgctgcctcgtccctgtgtcgctggccgaggacccccagggagacgcggcacaaaagaccgacacttcgcatcacgaccaagaccaccctaccttcaacaagatcacccccaacctggcagagttcgccttcagcctgtaccgccagttggcccaccagtccaattctaccaacatcttcttctcgccggttagcatcgctaccgcattcgcaatgctgtccctcggaactaaggcagacactcacgatgaaatcctggaaggacttaacttcaacttgactgagattccggaagcacagatccatgagggcttccaagaattgctgcgcactctgaatcagccggacagccagctccagctgactaccggcaacggactttttctgtcggaggggcttaagctggtggataagttcctggaggacgtgaaaaaactctaccacagcgaagcatttactgtgaacttcggtgataccgaagaagctaagaagcagattaacgattacgtcgagaagggaacgcaaggaaaaatcgtcgatcttgtcaaggaacttgatcgggatactgtgttcgcgctcgtgaactacatcttcttcaaggggaagtgggagcgacctttcgaggtgaaggatactgaagaggaggactttcacgtcgatcaagtcaccaccgtgaaggtcccgatgatgaaaaggctggggatgttcaacatccaacattgtaagaagctctcatcgtgggtgctgctcatgaaatatctcggaaacgccactgcaatcttcttcctcccagatgagggaaagttgcagcatctcgaaaacgaactcactcatgatatcattaccaaattcctggagaacgaggaccgccgctcagcctccctgcatctgcctaaactctccatcaccggaacttacgacctgaaatcagttctcggacaactgggaatcacgaaggtattctccaacggagcagacctgtcgggagtgaccgaggaagcacctctgaagttgtctaaggcggtccacaaggcagtgctcaccattgacgaaaaggggactgaagcggctggagctatgttcttggaagcgatcccgatgtcaatcccgccggaggtcaaattcaataaacctttcgttttcctgatgatcgagcagaacaccaagagcccactgtttatgggcaaggtcgtgaacccaacccaaaaa

SEQ ID NO: 18686 - DNA, 1254 bp, synthetic construct
  misc_feature 1..1254: note = source = /note="Description of Artificial Sequence: Synthetic coding sequence"
  source 1..1254: mol_type = other DNA
atgccctctagtgtttcatggggaatcttacttttggctgggctctgctgtctggtgccagtgtctctcgccgaagatccacagggggatgccgcacaaaaaacggacacaagccatcacgatcaggaccatcccacttttaacaagataacccccaacctcgctgagtttgccttcagcctctatcggcagctggcccatcaatccaacagcaccaacattttctttagccctgtcagcatcgctaccgcttttgcaatgctctctttaggaactaaggccgacacccacgatgaaattctggaggggcttaacttcaaccttacagaaatcccagaggctcagatacatgaggggttccaggagctgctgagaacattgaaccaacctgattctcagctgcagctcaccactggcaacggcctgtttctgtccgaagggctgaaactggtggataaatttctggaagatgtcaagaagctctaccacagcgaggcctttacagtgaactttggggacaccgaggaggctaagaaacagatcaacgactacgtcgaaaaaggaactcaggggaagatcgtcgatctggtcaaagaactcgaccgagatacagttttcgccttggttaactacatatttttcaagggcaaatgggagagacctttcgaggtgaaggacaccgaggaagaagattttcatgtggatcaggtaactaccgtgaaagtgcctatgatgaagcgcctgggcatgttcaatattcaacattgtaaaaaactctcttcgtgggttttactgatgaagtatcttggcaacgccaccgctatcttcttcctgcctgatgaaggcaaactgcagcacttagagaacgagctcacccatgacattatcactaaatttttggaaaatgaggatcgtcgcagcgcatccctgcacctgcccaagctgtccatcaccggaacatacgatttgaagagcgtcctgggacagttgggcattacaaaggtgtttagtaacggagccgatctcagcggagtgaccgaggaggcccctctgaagctctctaaggcagtccacaaagcagttctgacgattgacgaaaagggcaccgaagcagctggagccatgtttcttgaggccataccgatgtcaattccaccagaggtcaaatttaacaaacctttcgtctttttgatgattgagcaaaacaccaaatcaccgctgttcatgggtaaggtggtgaacccgacccagaag

SEQ ID NO: 18687 - DNA, 1254 bp, synthetic construct
  misc_feature 1..1254: note = source = /note="Description of Artificial Sequence: Synthetic coding sequence"
  source 1..1254: mol_type = other DNA
atgccgtcttctgtttcttggggcattctgctcctggcagggctgtgttgtctagtgccagtgtccctggccgaggaccctcagggcgacgcggctcaaaaaacagatacctctcaccacgatcaagatcatccgactttcaataagattacccccaatctagctgaatttgcattcagtttgtatagacagctcgcccaccagtcaaattccacgaatatattctttagtccggtcagcatagctacggccttcgctatgctgtctctgggaaccaaggcagacacacatgacgagatccttgaagggctaaactttaacttaacagagatccccgaggcacaaatccacgagggctttcaggaactcctgcgcactctgaaccagccagacagccagttgcagctcaccaccggaaatgggctctttttgagtgaggggctcaagttggttgataagtttctagaggacgtgaaaaagctctaccactcagaggctttcaccgttaatttcggagacacggaggaggctaaaaaacagataaatgactatgtggagaaaggtacccaaggcaagattgtggatctcgtaaaagagcttgatcgcgatacggtttttgctctggttaactacatcttctttaagggaaagtgggaacgtcctttcgaggtgaaagataccgaggaggaggatttccacgtggaccaggtgacaactgtgaaggtgcctatgatgaaaaggctggggatgtttaacattcagcactgtaagaagttgtcttcttgggtgctgcttatgaagtacttggggaatgcgactgctattttcttcttgcccgatgagggtaagctgcaacacctggagaatgagcttactcatgacatcattacaaaatttctcgaaaacgaggaccgcaggagtgcgtccctacacctgccaaagctgtccattacggggacatacgacctgaagagcgtgttagggcagttgggcatcactaaagtattttcaaatggtgcagacttatccggagtgaccgaggaggccccgttgaaactgtctaaagctgttcacaaagcagtgctgacgatcgacgaaaaggggactgaagcagcaggtgccatgtttctggaggctatcccaatgagcatcccccccgaggtgaagttcaacaaaccattcgtcttcctgatgatcgagcagaacaccaagagtccactctttatgggtaaagtggtcaatccaacccagaag

SEQ ID NO: 18688 - DNA, 1254 bp, synthetic construct
  misc_feature 1..1254: note = source = /note="Description of Artificial Sequence: Synthetic coding sequence"
  source 1..1254: mol_type = other DNA
atgccttcgtccgtgtcctggggaatccttctgttggcagggctttgctgtcttgtgcctgtgtccctggcagaggatccccagggggatgcggcgcagaaaactgatacttcccatcatgaccaagaccatcccacgttcaacaaaatcaccccgaacctggcagaattcgcattttcgctttacagacaacttgcccaccaaagcaatagcacgaacatattctttagcccagtgagcatcgcgactgcattcgcaatgctttccctcggtaccaaggcagacacccatgatgaaatactggaaggacttaactttaacctgactgagattccagaagcgcaaattcacgaaggattccaagaactgctgagaactctgaaccaacctgattcccaactgcagctgactactggaaacggactgttcctgagcgagggtcttaaacttgtcgataagttcctcgaggatgtgaagaaattgtaccacagcgaggcgttcaccgtgaatttcggcgatactgaggaagcaaaaaagcagataaatgactacgtcgagaagggaacgcaaggtaagatcgtggatctcgtcaaggaactggatcgagatactgtgtttgcgcttgtgaattacatcttctttaaaggaaaatgggaaagaccttttgaagtgaaagacaccgaggaagaggactttcacgtggatcaggtgacgactgtcaaggtgccaatgatgaaacggcttgggatgtttaacattcagcactgtaagaagctgtcatcctgggtgctgctgatgaagtacctggggaacgcaaccgccattttctttctccccgatgaaggcaagctgcaacatcttgagaatgagctgactcatgacataatcaccaagttcctggaaaatgaagataggagatccgcatccctccatctcccaaagctgtccataaccggaacttacgatcttaagagcgttctgggacagttgggaattacgaaagtcttttcgaacggcgcagatctgtcaggagtgaccgaagaagcgcctcttaagctctcaaaggccgtgcataaagcagtgctcactattgatgaaaagggaaccgaggcagcaggcgcaatgtttctcgaagcaatccccatgtccatccctcccgaagtgaagtttaacaagccttttgtgttcctgatgatcgaacaaaacaccaagtctccgctcttcatggggaaggtagtcaatccaactcagaag

SEQ ID NO: 18689 - DNA, 1254 bp, synthetic construct
  misc_feature 1..1254: note = source = /note="Description of Artificial Sequence: Synthetic coding sequence"
  source 1..1254: mol_type = other DNA
atgccctctagtgtgtcctgggggatcttgctgctggccggcctctgctgcttggtgcccgtgtccctcgctgaagatccacagggggatgctgctcagaagaccgatacctcccaccatgatcaagaccaccctacgttcaacaagattacacctaacctggcagagttcgccttttccctttatcgacaactggcccaccagtccaattccactaatatctttttttcccctgtaagcattgcaaccgccttcgcaatgctgagcctgggtacgaaagcggacacccacgacgagatactggagggcctgaacttcaatcttacggagattcctgaggcccagattcacgaggggtttcaggaactgctgagaactcttaatcagccagactctcagctccaactaaccacaggtaacggtctctttctcagcgaggggctcaagctggtggacaagttccttgaggacgtaaagaagctgtatcacagcgaagctttcactgttaacttcggagacacagaggaggcgaaaaaacagattaacgattacgtggagaaaggaacccaagggaagattgtcgatctagttaaagagctggatcgggataccgtcttcgccttagtgaattatatcttcttcaagggtaagtgggagcgaccgtttgaagtgaaagacaccgaggaagaggattttcatgtggaccaggttaccacagttaaagttcctatgatgaaacgcctgggcatgtttaacattcagcattgcaaaaagctgagctcctgggtcctcttgatgaaatatctgggcaacgctaccgccatcttcttcctgcctgacgaaggtaaattgcagcatctcgagaacgagttaacacatgacataattacaaaatttctggagaatgaggatagaaggtccgcttctctgcacctcccgaagctcagtataacagggacttacgatcttaaaagcgtgcttgggcagttgggcataacaaaggttttctccaatggagccgacctttccggggtgacagaggaagcccctctcaaactctccaaggcagtgcacaaggcagtgctaaccattgatgagaagggaactgaagctgcaggtgcaatgttcctggaagcgataccaatgtctattcccccagaggtcaaatttaataaaccattcgtgtttctgatgattgagcagaataccaagtcccctctttttatggggaaggtcgtcaatccgacgcaaaag

SEQ ID NO: 18690 - DNA, 1254 bp, synthetic construct
  misc_feature 1..1254: note = source = /note="Description of Artificial Sequence: Synthetic coding sequence"
  source 1..1254: mol_type = other DNA
atgccttcaagcgtgagctggggtattctgttgctagcaggcttgtgttgtctggtgcctgtgtccctcgctgaagatccacagggagacgccgcccagaaaacggatacatcacatcacgaccaggaccaccccactttcaataaaattactccaaacttggcagaattcgccttcagtctctatcggcaacttgcccaccagagcaatagtacgaatatattcttctccccagttagcatcgcaacggcttttgcaatgctgtctctgggcaccaaggccgacacccatgatgaaattctcgaaggcttgaatttcaatctaaccgagattcctgaggctcagatccacgaggggtttcaagaactattgcgcaccctgaaccagcctgacagtcaactccagctaaccactggtaatggactcttcctatcagaaggccttaagcttgtcgataagttcttggaagatgtcaaaaagctttatcacagcgaagccttcacagtcaacttcggcgatacggaggaggcaaagaagcaaattaacgattacgtagaaaaagggactcaagggaaaatcgttgacctggtgaaagaattggatcgagatacagtgtttgcccttgttaactatattttttttaagggtaaatgggaaagacctttcgaggtaaaggatactgaagaggaagatttccatgtggatcaggtcaccacggtgaaggtccccatgatgaaacgcctggggatgttcaacatccagcattgcaagaagctgagctcatgggtgctcctgatgaagtacttaggaaatgccacagcaatattctttctgcccgatgagggcaagctacagcatctagaaaacgaattgactcatgacatcatcactaagtttctcgagaacgaggacagaagaagcgcctctctgcacctgccaaaattgtccatcacggggacttacgaccttaagtcggtcctcgggcagttaggcatcaccaaggttttcagcaatggagccgatctgagcggcgtgactgaagaggcaccgctcaagctgagcaaagccgtgcacaaggccgtgttaactatcgatgagaaaggtactgaagccgcaggcgcaatgtttctggaagcgatccctatgagtattcccccggaagtgaagtttaacaagcccttcgtctttttaatgatagagcagaacactaaatctccactgttcatggggaaggttgttaacccgacacagaaa

SEQ ID NO: 18691 - DNA, 1254 bp, synthetic construct
  misc_feature 1..1254: note = source = /note="Description of Artificial Sequence: Synthetic coding sequence"
  source 1..1254: mol_type = other DNA
atgccttcctctgttagctggggtatactactgctggcgggactttgttgtctagtgccagtgagtttggcagaggatccgcaaggggacgctgcccagaagaccgacacatcccatcacgaccaggaccatcctacattcaataagataacaccaaacctggcagagtttgccttctctctgtacaggcaactggcgcatcagagtaattccaccaacatcttcttttctccagtgtcgattgctacagcattcgccatgctttcattggggacaaaagccgacacacacgacgagattctagagggcctaaactttaatctcactgaaatacctgaagctcagattcacgaagggtttcaggagttacttagaacactgaatcagccagactcacagctacagcttacaacaggaaatgggttattcctctccgaaggactgaaactggtggacaagttcttggaagatgtcaaaaaactgtatcattctgaggcttttacggtcaatttcggggacacggaagaggctaagaagcaaattaacgattatgttgagaagggaacacagggaaaaattgtggatctcgtcaaggagctggatcgagatacagtgttcgccctagttaactacatcttcttcaaggggaaatgggaacgccctttcgaggtaaaagacactgaagaggaagatttccatgtcgaccaggtgactacagtgaaagtcccaatgatgaagcgtctgggtatgttcaatattcagcattgcaagaagctgtcctcctgggtcttactgatgaagtacctcgggaatgcaaccgctatattctttttacctgatgaaggcaaactgcagcacctggagaatgaactgacccacgatatcataaccaagttcttggaaaatgaggaccgcagaagcgcctccctgcatctgccaaagctgtcaatcactggaacttatgacctcaagagcgtgctgggacagttgggcataacaaaagtgttctctaatggtgccgatctgtccggcgtcaccgaggaagcaccactgaagctgagtaaggctgttcataaagccgtgctcacaatcgatgagaaagggactgaagccgccggggctatgttcctagaagccatcccgatgtctatcccccccgaggttaaatttaacaagccctttgtgtttttaatgatcgaacagaacacgaaatctcccctcttcatgggaaaggtcgtgaaccccacccagaaa

SEQ ID NO: 18692 - DNA, 1254 bp, synthetic construct
  misc_feature 1..1254: note = source = /note="Description of Artificial Sequence: Synthetic coding sequence"
  source 1..1254: mol_type = other DNA
atgccttcatccgtctcatgggggattctcctgctggcgggcctctgctgtttagtgccagtgtcactagcggaggatccacagggggatgcggcccagaaaacagacacaagccatcacgaccaagatcatccgaccttcaataaaattacccctaatcttgccgaatttgctttttctttatataggcaactcgctcatcaaagcaactctacaaacatctttttttctccagtgagcatagctacggctttcgccatgttgtctttgggcactaaagccgatacgcatgacgagatactcgagggtcttaattttaatctgaccgaaattcctgaggcgcagatccatgaaggctttcaggaattgctgcgcactctgaaccagccagactctcagttacagcttactacgggaaatgggttatttctgtccgaaggattaaaattagtggacaaatttcttgaagacgttaaaaaattatatcatagcgaagcatttaccgtgaattttggcgacacagaagaagcgaaaaagcagataaatgactatgtggaaaaagggacacaggggaagattgtcgatttagtcaaggaattagaccgggataccgtttttgccctggtgaactacatcttttttaaaggaaaatgggaacgcccgtttgaagtaaaggatacggaggaagaagactttcatgtagatcaagttacaacggtcaaagttccaatgatgaaacgcctgggaatgttcaacattcaacattgtaagaaacttagctcctgggtactgctgatgaaatacttaggaaatgcgacagccattttctttctgccagacgaaggcaaacttcaacatctagaaaatgaacttacgcacgatattatcacaaaattcttggaaaacgaagatcgccgaagcgcatctcttcacctgccgaaactttctatcacaggtacgtatgatttaaagtctgttctgggtcaactcgggattacaaaggtcttttcgaatggcgctgacctgtctggggtgactgaagaagcgccgttgaaactttctaaagccgtccacaaagcagttctgacaattgacgaaaagggcacagaggccgctggcgcgatgtttctggaagctattcccatgagcattccaccagaagtaaagttcaataaaccgtttgtatttcttatgattgaacagaacacgaagtcaccactttttatgggcaaagtcgttaacccaacacaaaaa

SEQ ID NO: 18693 - DNA, 1254 bp, synthetic construct; identical to SEQ ID NO: 18635
  misc_feature 1..1254: note = source = /note="Description of Artificial Sequence: Synthetic coding sequence"
  source 1..1254: mol_type = other DNA

SEQ ID NO: 18694 - DNA, 1254 bp, synthetic construct
  misc_feature 1..1254: note = source = /note="Description of Artificial Sequence: Synthetic coding sequence"
  source 1..1254: mol_type = other DNA
atgccaagtagcgtgagttggggaatcctcttacttgccggtctatgttgtctggttccagtatcactggccgaagacccgcaaggcgatgcagcacaaaagaccgatacatcccaccatgatcaggaccatcctacattcaacaagataacccccaacctcgccgagttcgccttttcactataccgccagctcgcacaccagagcaattccactaacatattcttttcgcctgtaagcattgctaccgcttttgcaatgttaagcctcggaaccaaggctgacacccacgatgagattttagagggactgaatttcaacctcaccgaaatccctgaggcacagatacatgagggcttccaggaactgctgagaaccctcaatcagcctgatagccaactccaattgactactggcaacgggctctttctttccgagggattaaaactggttgataagtttttagaggacgtgaaaaaattatatcactccgaggccttcactgttaattttggtgacaccgaagaggccaaaaagcaaatcaacgattacgtggaaaagggaacccagggcaaaattgttgacttagtcaaggaacttgatagggacacagtgttcgccttggtgaattacatattctttaagggcaagtgggaaagaccatttgaggtgaaggacactgaagaagaagatttccacgtggatcaggtgacgacagtaaaggtcccgatgatgaaaagactgggcatgtttaacatccaacattgtaagaaactgtcctcatgggttctgctgatgaagtaccttggcaatgccactgccattttctttcttcccgacgaaggaaagctccagcacctggagaacgagctcactcacgacatcatcaccaaattcctggagaacgaggaccgccggagcgcatcacttcacctgcccaagcttagcattactggaacatatgatcttaaaagtgtcctcggacagcttggtatcactaaggtgttcagcaacggcgccgatctgagtggagttacagaagaggcacccctcaaactgagcaaagccgttcataaagctgttctgaccatagacgagaaggggactgaagccgcaggagccatgtttttggaggcaatccccatgagcattccccctgaggtgaagtttaacaagccgttcgtattcttgatgatcgagcagaacaccaagtcgccactcttcatgggtaaggtcgtcaaccccacccagaag

SEQ ID NO: 18695 - DNA, 1254 bp, synthetic construct
  misc_feature 1..1254: note = source = /note="Description of Artificial Sequence: Synthetic coding sequence"
  source 1..1254: mol_type = other DNA
atgccaagtagtgtgagctgggggattttgctgctggctgggctgtgctgtttagtgcctgtatccttggctgaagaccctcagggtgacgctgctcaaaagacggacacatctcatcacgatcaggaccatccaacatttaacaagattactcccaatcttgctgagttcgcattctcgctctaccggcagctggctcatcaatccaacagcacaaacatttttttctctccggtcagtattgccacggccttcgccatgctttcactgggaactaaggctgacacccacgacgagatccttgagggactgaattttaaccttactgagatcccagaagcccagatccacgaagggttccaggagttgcttaggacactgaaccagcctgattcacagcttcaactgactacgggcaatggcctctttctctctgaaggcctcaaactcgtggacaaatttcttgaagacgtgaagaaactctatcattccgaagcctttaccgttaattttggggatactgaagaggccaagaagcagatcaacgattacgtggagaagggaacccagggcaaaatcgtggatctagtcaaggagctggatcgagacactgtctttgccctagtcaactacatctttttcaaaggcaagtgggaaaggccgtttgaggtgaaagacaccgaagaggaggattttcacgtcgatcaggttacaactgtcaaagtgccaatgatgaagcgtctgggaatgtttaacatacaacattgcaagaagctatcttcgtgggtgctcttaatgaagtatctcggaaacgccaccgccatcttctttctgccagatgaagggaagctacagcacctggagaacgagcttacccacgacatcatcacgaagttcctcgagaacgaggaccgtcgctctgcttcactccatcttcctaagctgagcatcaccggcacttacgatttgaagtccgtactgggccagctgggaattactaaggttttcagtaacggggccgacctcagcggcgtcactgaggaggccccactcaaattgagcaaagctgtccacaaggccgtgttaactatcgacgagaaaggaacggaggctgcaggcgctatgttcctggaggcaatccccatgtcgattcctcctgaagtgaaatttaacaagccctttgttttcctgatgatcgagcagaacaccaagagtcccctcttcatgggtaaggtggtaaatcccacccagaag

SEQ ID NO: 18696 - DNA, 1254 bp, synthetic construct
  misc_feature 1..1254: note = source = /note="Description of Artificial Sequence: Synthetic coding sequence"
  source 1..1254: mol_type = other DNA
atgcctagctcggtcagctgggggattctgctgctggccggtctttgctgtttggttcctgtgtcgcttgccgaagatcctcaaggagatgcggcacaaaagaccgatacgtctcatcatgaccaggatcatcctacttttaacaagatcactcctaacctggccgagttcgcatttagcctgtaccgtcagctcgcccatcagagcaactcaaccaacattttcttctcgccagtgtcaatcgcaactgcatttgcgatgctgtcacttggtaccaaagcagacactcacgatgaaattctcgaaggactgaatttcaacttgaccgaaattcctgaggctcaaatacatgaaggtttccaggagctgttgagaaccctcaaccaaccagactcgcaactgcaactgaccactggaaacggactgtttctttcggagggtcttaagctggtggataagttcttggaggacgtgaagaaactttaccactccgaagcatttactgtcaattttggagacactgaagaggcgaagaagcaaatcaatgattacgtggagaaaggcactcaaggcaaaattgtcgaccttgttaaggaacttgatcgtgatactgtctttgcccttgtcaattacatattctttaaaggaaagtgggaacggcctttcgaagttaaggacaccgaagaggaagattttcacgttgatcaggtcactactgtcaaggtccccatgatgaaaaggctcgggatgtttaacattcagcattgtaagaaactcagctcatgggtcctgttgatgaaatatctgggcaatgcaaccgccatattcttccttccggatgaaggaaaacttcaacacctggaaaacgaactgacgcatgatatcatcactaagtttcttgaaaacgaagatcggagatcggcttctctgcatcttcctaagctgtcaattacgggaacttacgacttgaagtccgtccttggtcaacttgggattactaaggtgttctcaaacggagctgacctgtcgggagtcaccgaagaagcaccgctcaagctctccaaggccgtccacaaggcagtgctcaccatagacgaaaaaggtaccgaagcagcaggtgcgatgtttcttgaagcaatcccaatgtcaattcctccagaggtgaagtttaacaagccttttgtctttctgatgatagagcaaaacaccaaaagcccgctcttcatgggcaaggtagtcaatccaacccaaaaa

SEQ ID NO: 18697 - DNA, 1254 bp, synthetic construct
  misc_feature 1..1254: note = source = /note="Description of Artificial Sequence: Synthetic coding sequence"
  source 1..1254: mol_type = other DNA
atgccttcctcggtgagctggggcatccttttgctggcaggtctgtgttgtcttgtcccggtgtccctcgcagaagatcctcaaggtgacgcagcccaaaaaactgacaccagccatcatgatcaggatcaccctacctttaacaagattacgcccaatctggcggaattcgcattttcgctgtatcgccaactggcccaccagtcgaactcaaccaatatcttcttctcccctgtgtccattgccaccgcatttgcaatgctttctcttggtaccaaagccgacacccatgacgaaatcctcgagggactgaatttcaacctcaccgaaataccagaggcccaaatccacgaagggtttcaagaactgctgcgtaccctgaaccagccggattcacaactgcagcttaccaccggaaatggtctttttctctctgaaggccttaagctcgttgacaagtttcttgaagatgtgaagaaactttaccattcggaggcattcaccgtcaactttggtgatactgaggaggcaaagaaacagataaatgactacgtggaaaagggcacccagggaaagattgtcgatcttgtgaaagaacttgatcgagacaccgtgttcgcactcgtgaattacatattcttcaagggcaagtgggaaagacctttcgaagtcaaggataccgaagaggaggattttcacgtggatcaggtcacgactgtgaaggtcccaatgatgaagcgcctgggtatgttcaacattcagcattgcaagaaattgtcgagctgggtgcttctgatgaagtatctgggaaacgctacggctatcttctttctgccagacgaggggaagctgcaacatctcgaaaacgaactgacgcatgacatcatcactaagttcctcgagaacgaagatagaaggagcgcatcgttgcaccttccgaagctctctattactggcacctacgatctgaagtcagtcctgggacaactcgggatcactaaagtgtttagcaatggtgcagatctgtcgggagtgaccgaggaggcccccctcaagctcagcaaagccgtgcataaagcggtgctgactatagacgaaaagggaactgaggctgcaggagccatgtttcttgaagcaattccaatgagcatacccccggaagtcaagtttaacaaaccgtttgtctttctgatgattgagcaaaatactaaatcgccacttttcatgggcaaggtggtgaacccaactcaaaag

SEQ ID NO: 18698 - DNA, 1254 bp, synthetic construct
  misc_feature 1..1254: note = source = /note="Description of Artificial Sequence: Synthetic coding sequence"
  source 1..1254: mol_type = other DNA
atgccctcctccgtgtcctggggaatcttattactcgcaggtctctgctgtctggtacccgtttcactggcagaggatccccagggagacgcagcacagaagacggatactagccaccatgaccaggaccaccctaccttcaacaagatcactcccaatctcgcggaatttgcattttcactgtatcgccagctggctcaccagtcaaactccaccaatattttcttcagccccgtaagcattgccaccgcttttgccatgttgagtctgggcactaaagcagacactcacgatgagatcctggagggcctaaactttaacctgacagagatccctgaagcacaaattcacgaaggatttcaggagcttctgaggacacttaatcagccagatagtcaactgcaactcactactggtaacggcctctttctgtccgaagggcttaaactcgtggacaaattcttagaagacgtgaagaaactgtaccacagcgaggcctttaccgtcaattttggggacacagaagaagccaagaaacaaatcaatgattacgtggaaaagggcactcaaggcaaaatagtcgacctggtcaaggaacttgacagagatactgtgttcgcgcttgtcaactacatcttctttaagggaaagtgggagaggcctttcgaggttaaggacaccgaagaggaggattttcatgttgatcaggtgacaaccgtaaaagtaccaatgatgaaaaggttgggaatgttcaacattcagcattgtaaaaaactgtccagctgggtcctgctgatgaagtatctgggtaacgcaaccgccatcttcttccttcctgacgaagggaaactccagcaccttgagaatgagcttacacatgacataattaccaaattcctcgagaatgaggaccgtcggagcgcaagtctacacctgcccaagctttctattaccgggacgtatgaccttaagtctgtcctgggccaacttgggattacaaaggtgttctcgaatggggcagacctgtcgggagttaccgaggaagcaccattgaaactgagtaaggctgtacacaaggcagttttgaccatcgacgagaagggtacagaggccgccggggccatgtttctggaggccatccctatgagcattcctccggaagtaaaatttaataagcctttcgtattcctcatgattgagcagaatacaaagtcaccactcttcatggggaaggtcgtcaaccctactcagaaa

SEQ ID NO: 18699 - DNA, 1254 bp, synthetic construct
  misc_feature 1..1254: note = source = /note="Description of Artificial Sequence: Synthetic coding sequence"
  source 1..1254: mol_type = other DNA
atgcctagcagcgtgagctggggtattcttcttctcgccggcctttgctgtctagtgcccgtgtcactggctgaggaccctcagggtgacgcagcccagaaaactgatacttcgcaccacgaccaagatcaccctacttttaacaagattacccctaatctggcagagttcgccttctccctgtaccggcaattggcccatcagtccaactcaacaaacatcttcttctccccggtgagtatcgcaacagcattcgcaatgctaagcctcgggacaaaggcagatacacacgatgagatccttgaagggctcaatttcaatctgacagagataccggaggcccagatccacgaggggttccaggagctgctgagaacactcaaccagcctgattcgcagctgcaactgacgaccggaaatggccttttcctgtctgagggtttaaagttagtcgacaaattcttggaggacgtcaaaaaactgtaccactccgaggcgtttacagtgaacttcggcgatacagaagaagccaagaagcagatcaatgactacgtggaaaagggcacccagggcaaaattgtggacttggtcaaggagcttgaccgagacactgtgtttgcgctggtgaactacatcttctttaaggggaagtgggagcggcccttcgaagtgaaagacaccgaggaggaggatttccacgtggaccaggtcaccacagtgaaggtgcctatgatgaagcgactggggatgttcaatatccagcactgtaaaaagctgtcctcatgggtcctgctaatgaagtacttaggaaatgccacggcaattttttttctcccagatgagggaaagcttcagcatctggaaaatgagcttacccatgacatcatcaccaaattcttggagaacgaggatcgccggtctgcgtccctgcatcttcccaagttgtccataaccgggacatacgatctcaagagcgtcctggggcagttgggtatcacgaaagttttctcgaacggtgcagacctttccggggtcacggaggaagcccctctgaaactctcaaaggctgtccacaaagcagttttaactatcgatgaaaaggggaccgaggctgccggagcaatgtttctagaagccatacctatgagtatcccacctgaagttaagttcaacaagccattcgtattcctcatgattgagcagaacaccaagtcccccctgtttatgggtaaagttgtcaatccgacccagaag

SEQ ID NO: 18700 - DNA, 1254 bp, synthetic construct
  misc_feature 1..1254: note = source = /note="Description of Artificial Sequence: Synthetic coding sequence"
  source 1..1254: mol_type = other DNA
atgccctccagcgtgtcctgggggattttgctcctcgcgggcttatgttgccttgtgcccgttagtttagcggaagaccctcagggggatgccgctcagaagacagacacctcccaccacgatcaggaccaccccacttttaataagatcacccccaatctcgcagagtttgctttttccctataccggcagttggcgcaccagtccaacagtaccaacattttcttctcgccggtcagcattgcaactgcctttgccatgctttcactcggcaccaaagccgatacgcacgacgagatccttgagggactcaacttcaacttgaccgagatcccggaggcccagatccatgaggggtttcaggagctcttgcgtacccttaaccagcctgactcccagttacagctcaccaccggcaatggcttgtttctgtccgagggtctgaagctggtcgacaaattcctggaggacgttaagaagctctaccattctgaggctttcaccgtcaactttggcgataccgaggaggctaagaagcaaataaacgactatgtggagaaggggactcaaggcaagatcgtcgatttagtcaaggaactggaccgcgacaccgtcttcgcacttgtcaattatattttcttcaaaggcaagtgggaacgccctttcgaagtcaaggacacggaggaagaggactttcacgtcgatcaggttaccacggttaaagtacccatgatgaagaggctcggcatgttcaacatacagcactgcaagaagcttagttcctgggtcttgttgatgaagtaccttgggaatgctacagccatcttcttcttgccggatgagggcaagctgcagcaccttgaaaatgaactgacccatgatatcattacgaagttcttggagaatgaggatcgtcgctccgcaagcctgcacttgcccaagctctccataactggtacctacgatcttaagtctgttctgggccagctggggattacaaaggtgttctcaaacggtgcggacctctccggcgttacggaggaagcccccctgaagctgtctaaggccgtgcacaaggcggtgcttactatcgatgagaaaggtacggaggcggctggcgcgatgtttctcgaagcaattccgatgagtatcccccctgaggtcaagtttaacaagccctttgtgttcctcatgattgagcagaacactaaatccccgctgttcatgggcaaggttgtcaaccccacccagaaa

SEQ ID NO: 18701 - DNA, 1254 bp, synthetic construct
  misc_feature 1..1254: note = source = /note="Description of Artificial Sequence: Synthetic coding sequence"
  source 1..1254: mol_type = other DNA
atgccaagttcagtgtcttggggtatcctgctgctggccgggctttgttgtctggtgccagtgtccctggccgaggatcctcagggcgatgcagcgcagaagactgacaccagtcatcacgatcaggaccacccgacattcaataagatcacccccaacctggccgaattcgcattcagtctgtatcgacagttggcccaccagtctaacagcaccaacatcttttttagtcccgtgagtatcgccactgcttttgcgatgttgagcctcgggacaaaggctgacacccacgacgagattttggaaggacttaactttaaccttaccgaaatcccagaagcacagatccatgagggttttcaggaactgctgcggaccctgaaccagccagactctcagttgcagctgacgactggcaatggattgtttctgtccgaggggctcaaactggtggataagtttctcgaagacgttaaaaaattgtaccacagcgaggcatttacagtgaacttcggcgacaccgaagaggccaaaaaacagatcaacgactatgtggaaaagggcacacaaggcaagattgtggatctggttaaggagttggacagggacaccgtatttgccctggtgaactacatcttcttcaaggggaagtgggaacgcccgttcgaggtgaaagacaccgaggaggaagacttccatgtcgaccaggtcaccaccgtcaaggttcccatgatgaaacgcctgggtatgttcaacatccagcactgcaagaaattgagcagctgggtattgctgatgaagtatctgggcaacgccaccgccattttttttcttcctgatgagggaaagttgcaacacctggagaacgaactgacccacgacataatcactaaattcctcgaaaatgaagatagacggtcagcctccttgcatctcccaaaactcagcattacgggcacttacgacttgaagtccgttttgggtcagttgggcatcactaaggttttctcaaacggcgcagacttgtctggcgtgactgaagaggctccactgaagttgtccaaagccgttcacaaggccgttctgaccatcgatgagaagggaacggaggctgccggtgcgatgttcctggaagccattcctatgtccattccccccgaggtgaaattcaacaaaccttttgtttttctgatgatcgaacagaacacaaaatccccactgttcatggggaaagtggttaacccgacccagaag

SEQ ID NO: 18702 - DNA, 1254 bp, synthetic construct
  misc_feature 1..1254: note = source = /note="Description of Artificial Sequence: Synthetic coding sequence"
  source 1..1254: mol_type = other DNA
atgccctccagtgtgtcttggggtattctgcttcttgccgggctttgctgtctcgtccccgtgagtttggctgaggacccacagggagatgcagcccagaaaacagatacatctcaccatgatcaggaccacccgacatttaataagattacccctaacctggcagaatttgccttttctctgtacagacaactcgcccaccagagcaactctactaacatcttcttttctccagtctcaatagctactgcttttgccatgctctccctggggactaaggctgatacacacgacgaaatcctggagggactgaactttaacctcactgaaattcccgaggctcaaattcacgaaggcttccaggagctcctccggaccttgaaccagccagactcccaactgcagctgaccaccggcaatggactgttcctctctgaaggtctgaagctcgtggacaaattcttggaggatgttaaaaagttgtatcacagtgaagctttcacagtcaactttggtgacactgaggaagccaaaaagcagatcaatgactacgtggaaaaagggacccaggggaagatcgtggacttggtgaaggagcttgacagggataccgtgttcgccctggttaactacattttcttcaaaggaaagtgggaaaggcctttcgaggtcaaagacactgaagaggaagatttccacgtcgaccaggtgaccacagttaaggtccccatgatgaaacggttgggtatgttcaatatccaacattgtaagaaattgagctcatgggttctgctcatgaaatatctgggaaacgctacagcaattttttttctgcccgacgagggaaaactgcagcatctcgaaaatgaattgacccatgatatcataaccaagtttctggagaacgaagacaggcgcagcgcaagtctgcacttgcccaaactctcaattacaggcacttacgaccttaaaagcgtgctgggacagttgggcatcacgaaggtcttttccaatggcgccgacctgagcggtgtgacggaagaagcccctctcaagttgagcaaggctgtccacaaggcagtacttacaatcgacgaaaaaggaaccgaagctgccggcgccatgtttctggaggccatacctatgagtatcccccccgaagtgaagttcaacaagccctttgtcttcttgatgatagagcagaataccaagtctcccctgttcatggggaaggtagtgaaccccacccagaaa

SEQ ID NO: 18703 - DNA, 1254 bp, synthetic construct
  misc_feature 1..1254: note = source = /note="Description of Artificial Sequence: Synthetic coding sequence"
  source 1..1254: mol_type = other DNA
atgccttcttcagtctcctggggaatcctccttctggcgggactttgctgtttggtgccagtgtcccttgcggaagatcctcagggcgatgcagcacaaaaaacggatacctcccaccatgatcaagatcatcccacttttaacaagattactcccaacttggccgaatttgcgttcagcctgtaccgccagcttgctcatcaatccaactcgactaacattttcttcagccctgtatcgattgctaccgcgtttgcaatgctttcccttggcaccaaggcagatactcacgacgagattctggaaggactgaatttcaaccttactgaaattccagaagcacagatacatgagggatttcaagagctgctgaggaccctgaatcagcctgactcacagctccaacttactactggaaacgggctttttctctcggaaggccttaagctcgtggataagtttctcgaggatgtcaagaaattgtaccatagcgaggcgtttactgtgaattttggcgataccgaggaagcgaagaagcagataaatgactacgtggaaaaagggactcaaggaaagattgtggatcttgtgaaggaacttgacagagatactgtgttcgcacttgtcaactacatctttttcaaggggaagtgggaacgacccttcgaggttaaagataccgaagaggaggacttccatgtggatcaagtgactaccgtgaaggtgcctatgatgaagaggcttggaatgtttaacatccagcattgcaaaaagctgtcgtcatgggtccttctcatgaagtacctgggaaacgcaactgccattttctttcttcctgatgaaggcaaacttcaacatctcgaaaacgaactgacccacgacattatcacgaaattcctggaaaatgaagatcgaagatccgcaagcctccatctgcccaagttgtcgatcaccggaacctacgacctgaagtctgtgctcggccagctggggattaccaaggtcttttctaacggtgcagatctttcgggtgtgaccgaagaagcacctttgaagttgtcgaaggcagtgcataaggcagtcttgactattgatgaaaagggaaccgaagccgcaggtgctatgtttttggaagccattcctatgtcaattccccctgaagtcaagttcaataaaccttttgtgtttctgatgattgaacagaacaccaaatccccacttttcatgggaaaggtggtgaatccaactcagaag

SEQ ID NO: 18704 - DNA, 1254 bp, synthetic construct
  misc_feature 1..1254: note = source = /note="Description of Artificial Sequence: Synthetic coding sequence"
  source 1..1254: mol_type = other DNA
atgccctcctccgtctcatggggtatcctcctgctggccggactgtgctgccttgtcccagtctcccttgcggaggacccccagggagacgcagcacagaagaccgatactagccatcacgaccaagaccatcccaccttcaacaagatcactcccaaccttgccgagttcgcttttagtctgtaccggcagctcgctcaccaatcaaactctaccaatatctttttctcacctgtgtcgatagctaccgcattcgctatgcttagcctgggaaccaaagccgatactcacgacgaaattctcgaaggcctaaactttaacctgaccgagataccggaagcccagatccatgaaggatttcaggagctgctgaggactttgaatcagcctgacagccagcttcagctgaccactgggaacggtctgttcctgtccgagggcctgaagctggtggataagtttctcgaggacgtgaagaagctgtaccattctgaggcttttacagtgaacttcggcgacacggaagaggccaaaaagcaaatcaacgactacgtggagaagggaacacagggaaagatcgtggacctagtcaaggaactggatagagatactgtgttcgcactcgtgaactacatcttctttaaggggaagtgggagcgcccttttgaggtaaaggacactgaagaggaggatttccacgtggatcaggtgacgacagtgaaggtacccatgatgaagagactgggcatgtttaatatacagcactgcaagaagctgtcctcctgggtgctgcttatgaagtaccttggcaacgctaccgccatcttctttcttcctgatgaggggaagctacagcacctcgagaatgagctgacgcatgacatcatcaccaaattccttgaaaacgaggaccggaggtccgccagtctccatttacctaagctttcgatcaccggaacctatgaccttaagtccgtgcttggccagttgggcataaccaaggtgttctctaacggtgctgacttaagtggggtcacagaagaggcgcctcttaaactcagcaaagcggtgcataaggctgttcttactatcgacgagaagggcacagaagctgcgggggccatgtttctggaagccatccccatgtctattccgcctgaagtgaagtttaataagccattcgtgttccttatgattgagcagaataccaagtctcccttgttcatggggaaagtggtgaaccctactcagaaa

SEQ ID NO: 18705 - DNA, 1254 bp, synthetic construct
  misc_feature 1..1254: note = source = /note="Description of Artificial Sequence: Synthetic coding sequence"
  source 1..1254: mol_type = other DNA
atgccctccagcgttagttggggcatccttttgctggcgggcctgtgctgtttggtccccgtaagtctcgccgaggatcctcagggagacgcagcgcagaagacagacacttcccaccatgaccaagaccatccaacattcaataagattactccaaacctggcagagtttgcgttctccctgtaccgccaattggcccaccagtccaatagtaccaatatttttttttccccggttagtatcgcaacagcctttgccatgctctcccttggaaccaaggccgacacacacgacgaaatcctcgagggattgaatttcaacctgactgagattcccgaggctcagatccacgagggttttcaggagttgctgcgcacgctgaatcagcctgattcccagctccagttgacaacgggaaatggtctgttcctgtctgagggtttgaaattggttgacaaatttcttgaggacgtgaagaaactgtaccattccgaggctttcacagttaacttcggcgacacagaggaagctaagaagcaaatcaatgactacgtggaaaaaggtactcagggtaagattgtcgacttggtcaaggagcttgaccgcgacacggtttttgctctcgttaattacatcttcttcaagggtaagtgggagagacctttcgaagtaaaggacactgaggaggaggactttcacgtggatcaggtgactactgtcaaggtgcccatgatgaagaggctgggcatgtttaatatccagcactgtaagaagctgagctcttgggtcttgctgatgaagtacctgggcaatgcgaccgctatcttctttctgcccgacgagggcaaattgcagcacctggagaacgaactgacgcatgacataattaccaagtttctggagaacgaagacaggagatccgcatctcttcatctgcccaagctctctatcacgggaacctacgaccttaaatcagtgcttggccaactgggcattaccaaggtatttagcaacggtgcagacttgagcggagtgacagaggaggcacccctcaaattgagcaaggctgtgcacaaagcagtgcttacaattgatgagaagggcaccgaagccgcaggcgccatgttcctggaagctattccaatgtccatcccaccagaggtgaagtttaacaaaccattcgtgttccttatgatagagcagaacacaaagagccctttgttcatgggaaaagtggtgaatccgacacaaaaa

SEQ ID NO: 18706 - DNA, 1254 bp, synthetic construct
  misc_feature 1..1254: note = source = /note="Description of Artificial Sequence: Synthetic coding sequence"
  source 1..1254: mol_type = other DNA
atgccgtcatccgtgtcctggggaatcctgctcctggcaggactgtgctgcctcgtgcccgtctcgctggcagaggacccccaaggagatgctgcacaaaagactgacacctcgcaccatgaccaagatcacccgacctttaacaaaatcactccaaacctcgccgaattcgcgttctcactctaccggcagctcgcccaccaatcgaattccactaatatcttcttcagcccagtgtcgatcgcgactgctttcgccatgctgtccctcggaactaaggctgatactcacgatgaaatcctggaaggactgaactttaacctcaccgaaatcccggaagctcaaatccatgagggcttccaggaacttctgcgcacgctgaatcagccggactcccagctccaactcaccacgggaaatggactgttcctctcagaagggctgaaacttgtcgataagttcttggaggacgtcaaaaagctgtaccatagcgaagcgttcaccgtcaacttcggagacactgaggaggcgaagaagcaaatcaacgattacgtcgagaagggcacccaaggaaagatcgtggacctcgtcaaagaactcgatcgggatactgtgttcgcgctcgtgaactacattttcttcaagggaaagtgggaaagaccgttcgaggtgaaggacaccgaagaagaggattttcacgtggatcaggtgaccactgtgaaagtgccaatgatgaaacggttgggtatgtttaacatccagcattgtaaaaagctgtcaagctgggtgctcctgatgaagtacctcgggaacgcaactgccatcttcttcctgcctgacgaaggcaaactgcagcacttggagaacgaactgactcacgacatcatcaccaaattcctggaaaatgaggacaggcgctcggcaagcctccatctgccaaaactgagcatcaccggcacttacgacctcaagtcagtgctgggacaactgggtatcaccaaagttttctcgaacggagccgacctgtcaggcgtgactgaggaagccccattgaaactgtccaaggccgtccacaaggcggtcctgaccatcgacgaaaagggaacggaagcggccggagcgatgtttctcgaggctatcccaatgagcatcccgccggaagtgaagtttaacaaaccgttcgtgtttctgatgatcgaacagaacactaaatcgcccctcttcatgggaaaggtggtcaacccaactcagaag

SEQ ID NO: 18707 - DNA, 189 bp, synthetic construct
  misc_feature 1..189: note = source = /note="Description of Artificial Sequence: Synthetic coding sequence"
  source 1..189: mol_type = other DNA
atgccttccagcgtctcttggggaatcctccttttagcaggtttgtgctgtctcgtgcccgtctccctcgcccacggcgagggcacatttacatctgatcttagtaagcagatggaagaggaggccgtgagactcttcatcgaatggttgaagaacgggggaccatcctctggggctcctcctccttca

SEQ ID NO: 18708 - DNA, 189 bp, synthetic construct
  misc_feature 1..189: note = source = /note="Description of Artificial Sequence: Synthetic coding sequence"
  source 1..189: mol_type = other DNA
atgccttcatcggtgtcgtggggcatcttgctgttggcaggactgtgctgtcttgtgcccgtaagtctggctcatggcgagggtactttcacctcggatctctccaagcaaatggaagaagaggcagtcagactgtttattgaatggctcaaaaacggtgggccatcctcaggagcccctcccccgtcg

SEQ ID NO: 18709 - DNA, 189 bp, synthetic construct
  misc_feature 1..189: note = source = /note="Description of Artificial Sequence: Synthetic coding sequence"
  source 1..189: mol_type = other DNA
atgcccagttccgtgtcgtgggggattttgctcctggccgggctgtgttgcctggtgcccgtttcattggcacatggagagggaacctttacatctgacctgtcaaagcagatggaggaagaggccgtacggctcttcatcgagtggctgaagaacggaggacctagctctggggccccccccccatcc

SEQ ID NO: 18710 - DNA, 189 bp, synthetic construct
  misc_feature 1..189: note = source = /note="Description of Artificial Sequence: Synthetic coding sequence"
  source 1..189: mol_type = other DNA
atgccgtcgtcggtatcgtggggtatactattattagcgggtttatgttgtttagtaccggtatcgctagcgcatggtgaaggtacgtttacgtcggatttatcgaaacaaatggaagaagaagcggtacgattatttatagaatggttaaaaaatggtggtccgtcgtcgggtgcgccgccgccgtcg

SEQ ID NO: 18711 - DNA, 189 bp, synthetic construct
  misc_feature 1..189: note = source = /note="Description of Artificial Sequence: Synthetic coding sequence"
  source 1..189: mol_type = other DNA
atgcctagctcggtgagctgggggattctgcttcttgcaggcctgtgttgccttgtgcccgtctcacttgcacatggagaaggtacgttcactagcgatttgagcaagcaaatggaagaagaggccgtccgactctttatcgagtggcttaagaatggcggcccttcctccggggcacccccaccatcc

SEQ ID NO: 18712 - DNA, 189 bp, synthetic construct
  misc_feature 1..189: note = source = /note="Description of Artificial Sequence: Synthetic coding sequence"
  source 1..189: mol_type = other DNA
atgccgagctctgtctcgtgggggatcctcctcctggctggtctctgctgtcttgtgcctgtctccctggcccacggcgaggggactttcacctcagatctatcaaaacaaatggaggaagaggccgtcagactgtttattgagtggcttaagaatggaggcccgagctctggggccccccccccgtcg

SEQ ID NO: 18713 - DNA, 189 bp, synthetic construct
  misc_feature 1..189: note = source = /note="Description of Artificial Sequence: Synthetic coding sequence"
  source 1..189: mol_type = other DNA
atgccatcctccgtgagctggggaatcctgttgctggccggtctttgttgtctggtccctgtctccctggcgcatggagagggcacttttacgtctgatctctcgaagcaaatggaagaagaggcagtgcgcctgttcattgaatggctcaaaaacggtggcccctcaagcggtgctcctccgccttcg

SEQ ID NO: 18714 - DNA, 189 bp, synthetic construct
  misc_feature 1..189: note = source = /note="Description of Artificial Sequence: Synthetic coding sequence"
  source 1..189: mol_type = other DNA
atgccaagttcagtctcctggggtatccttctgctcgcgggcctgtgttgcctggttccggttagcctggctcacggcgaaggcacctttacctccgacctgtcaaagcagatggaagaagaagccgtccgcctgttcattgagtggctgaaaaatggcggacctagttctggagctccacctccttcg

SEQ ID NO: 18715 - DNA, 189 bp, synthetic construct
  misc_feature 1..189: note = source = /note="Description of Artificial Sequence: Synthetic coding sequence"
  source 1..189: mol_type = other DNA
atgccgtcgagcgtttcgtggggaatcctgctgcttgccggactgtgctgcctcgtgccggtgtcactcgctcacggcgaaggtacgttcacctcagatctctccaaacagatggaagaagaggcagtcaggctgtttatcgagtggctgaagaatggggggccgtcatcaggtgcaccacccccatcc

SEQ ID NO: 18716 - DNA, 189 bp, synthetic construct
  misc_feature 1..189: note = source = /note="Description of Artificial Sequence: Synthetic coding sequence"
  source 1..189: mol_type = other DNA
atgccttctagcgttagttggggcattctgttactggctgggctatgttgcctggtgcctgtcagcctcgctcacggcgaggggacattcacatcagacttatctaaacagatggaggaagaggccgttcgtctgtttattgaatggctaaagaacggcggcccttctagcggtgccccaccaccatct

SEQ ID NO: 18717 - DNA, 189 bp, synthetic construct
  misc_feature 1..189: note = source = /note="Description of Artificial Sequence: Synthetic coding sequence"
  source 1..189: mol_type = other DNA
atgccaagttccgtttcctgggggatcctgctgctggccggactgtgttgcctagtgccagtatcactcgcccatggagagggaacctttaccagcgacctgagcaagcagatggaggaggaagcagttaggctgtttattgaatggctgaaaaacggaggtccctctagtggcgccccccccccttcc

SEQ ID NO: 18718 - DNA, 189 bp, synthetic construct
  misc_feature 1..189: note = source = /note="Description of Artificial Sequence: Synthetic coding sequence"
  source 1..189: mol_type = other DNA
atgccatctagcgtaagctgggggattcttttattggctgggctttgttgccttgtgccagtctccctggcccacggggagggaaccttcacttccgatttgtccaaacagatggaggaagaagccgtgagactctttattgagtggctgaagaatggtggtccttcttctggcgctcccccaccgtcc

SEQ ID NO: 18719 - DNA, 189 bp, synthetic construct
  misc_feature 1..189: note = source = /note="Description of Artificial Sequence: Synthetic coding sequence"
  source 1..189: mol_type = other DNA
atgccaagctccgtgtcatggggtattttgctgctggccggactctgctgcctcgttccggtttcgctggcacatggcgaaggcactttcacaagcgaccttagcaaacaaatggaggaggaagcagtccgtctcttcattgagtggcttaaaaatggcgggccctcatctggcgcccctcccccttct

SEQ ID NO: 18720 - DNA, 189 bp, synthetic construct
  misc_feature 1..189: note = source = /note="Description of Artificial Sequence: Synthetic coding sequence"
  source 1..189: mol_type = other DNA
atgcccagctctgtgagctgggggatactgctgcttgcgggactctgttgtctagttccggtctctctggcccacggagaaggaacgtttacatcagatctgtcgaagcagatggaggaggaggctgtccgtctgttcatcgagtggctgaagaatggggggccaagcagtggtgcaccacctccgtct

SEQ ID NO: 18721 - DNA, 189 bp, synthetic construct
  misc_feature 1..189: note = source = /note="Description of Artificial Sequence: Synthetic coding sequence"
  source 1..189: mol_type = other DNA
atgccatcttccgtgtcctgggggattttgctgctggctggtctgtgctgtctcgtccccgtgtcgctggctcacggcgaaggaacctttacgtcggatttgtccaaacagatggaggaggaggccgttagactttttattgagtggctcaagaacggaggcccatcttctggggctccaccgccgagt

SEQ ID NO: 18722 - DNA, 189 bp, synthetic construct
  misc_feature 1..189: note = source = /note="Description of Artificial Sequence: Synthetic coding sequence"
  source 1..189: mol_type = other DNA
atgccgtctagcgtaagctggggcatcctactgctcgccggcctgtgctgccttgtgccagtgtcccttgctcacggagagggcacttttactagtgatctttcgaaacagatggaagaggaggctgtgcgattgtttattgagtggttgaagaacggggggccctctagcggcgccccgcccccttcc

SEQ ID NO: 18723 - DNA, 189 bp, synthetic construct
  misc_feature 1..189: note = source = /note="Description of Artificial Sequence: Synthetic coding sequence"
  source 1..189: mol_type = other DNA
atgccatcgtcggtcagctggggaattctgcttctggcgggtctttgctgtttggtcccagtgtcactggcacatggggaaggaacctttaccagcgatctgtccaagcagatggaggaagaagccgtgagattgtttatcgaatggctcaaaaacggcggtccttcatcaggtgcacctccgccgtcg

SEQ ID NO: 18724 - DNA, 189 bp, synthetic construct
  misc_feature 1..189: note = source = /note="Description of Artificial Sequence: Synthetic coding sequence"
  source 1..189: mol_type = other DNA
atgccctcaagcgtatcctgggggattttactattggctggtctgtgctgtctggtgccggtatctttggcgcatggtgaagggacgtttacgtcagatttgagcaaacagatggaggaggaggcggtccgtttatttattgagtggcttaaaaatggcgggcccagttctggagctcctccaccctca

SEQ ID NO: 18725 - DNA, 189 bp, synthetic construct
  misc_feature 1..189: note = source = /note="Description of Artificial Sequence: Synthetic coding sequence"
  source 1..189: mol_type = other DNA
atgccaagtagtgtctcctggggtattttgctgcttgcagggctatgttgtcttgttcccgtaagtctcgcccatggagaaggcacttttacttcagacctgagtaaacaaatggaagaggaagccgttcgcctgttcatcgaatggctgaagaacgggggcccgtctagcggagcgcccccgcccagc

SEQ ID NO: 18726 - DNA, 189 bp, synthetic construct
  misc_feature 1..189: note = source = /note="Description of Artificial Sequence: Synthetic coding sequence"
  source 1..189: mol_type = other DNA
atgccgtcgagcgtgagctggggtatccttcttttggccggattgtgctgccttgtgccagtgtcgctggcacacggtgagggcacttttacctcagatctttccaagcagatggaagaagaagcggtgcgcctgtttattgaatggctgaagaatggcggtccttcgtccggagcacctcccccttcg

SEQ ID NO: 18727 - DNA, 189 bp, synthetic construct
  misc_feature 1..189: note = source = /note="Description of Artificial Sequence: Synthetic coding sequence"
  source 1..189: mol_type = other DNA
atgccctcgtccgtcagctggggaattcttctgctggcaggcctctgttgtctcgtccctgtgagcctggcccacggcgaaggaacgttcacttccgatctttccaaacaaatggaagaagaagcagtgagactgtttatagagtggcttaagaatggagggcctagtagcggagcaccacctccgtcc

SEQ ID NO: 18728 - DNA, 189 bp, synthetic construct
  misc_feature 1..189: note = source = /note="Description of Artificial Sequence: Synthetic coding sequence"
  source 1..189: mol_type = other DNA
atgccaagcagcgtgtcatggggaatccttctgttggcaggactctgttgtcttgtgcctgtctcgcttgcacacggcgaagggacttttacctctgatctttcgaaacaaatggaggaggaggcggtccgactctttatcgagtggctgaagaatgggggaccatcatccggtgctcctccccctagc

SEQ ID NO: 18729 - DNA, 189 bp, synthetic construct
  misc_feature 1..189: note = source = /note="Description of Artificial Sequence: Synthetic coding sequence"
  source 1..189: mol_type = other DNA
atgccaagcagcgtgtcatggggcatcctcctgctggccggactctgttgtctggtacccgtgagcctcgcacatggcgagggaactttcaccagcgatctgtcaaagcaaatggaagaggaagcagtccgcttgttcatcgagtggctgaagaacggaggaccttcatctggtgccccgccacccagc

SEQ ID NO: 18730 - DNA, 189 bp, synthetic construct
  misc_feature 1..189: note = source = /note="Description of Artificial Sequence: Synthetic coding sequence"
  source 1..189: mol_type = other DNA
atgccatcttcagtatcatggggtattcttcttttagctggtttatgttgtttagtaccagttagtttagcacatggagaaggtacatttacaagtgatttatcaaaacaaatggaagaagaagccgtaagacttttcattgaatggttaaaaaatggaggtcctagttccggagcaccaccacctagt

SEQ ID NO: 18731 - DNA, 189 bp, synthetic construct
  misc_feature 1..189: note = source = /note="Description of Artificial Sequence: Synthetic coding sequence"
  source 1..189: mol_type = other DNA
atgccttcctccgtgtcgtggggtatactccttcttgctgggctgtgctgtttggtgccagtgtcgctggctcatggagagggcacttttaccagcgatctgtcaaagcaaatggaggaagaagcagttagactgttcatcgaatggcttaagaacggtggcccttccagtggtgcccctcccccttcg

SEQ ID NO: 18732 - DNA, 189 bp, synthetic construct
  misc_feature 1..189: note = source = /note="Description of Artificial Sequence: Synthetic coding sequence"
  source 1..189: mol_type = other DNA
atgccatctagtgtgtcttggggaattctattacttgccggactctgttgccttgtcccagtcagcttggctcatggagagggaacctttacatctgatttgtcgaaacagatggaagaagaagcagtaagattatttatagagtggcttaaaaacggaggaccatcgtccggtgccccgcctccgtcc

SEQ ID NO: 18733 - DNA, 189 bp, synthetic construct
  misc_feature 1..189: note = source = /note="Description of Artificial Sequence: Synthetic coding sequence"
  source 1..189: mol_type = other DNA
atgccttcctcggttagctgggggatcctcttgcttgctgggctttgctgcctggtgcccgtcagtttggcgcacggagagggtacctttacatctgatctgagcaagcagatggaagaggaggccgtacggttgttcatcgaatggctaaagaacggagggccatcttccggagccccaccccctagt

SEQ ID NO: 18734 - DNA, 189 bp, synthetic construct
  misc_feature 1..189: note = source = /note="Description of Artificial Sequence: Synthetic coding sequence"
  source 1..189: mol_type = other DNA
atgccatcgagcgtatcttggggtattctgctgctcgccggtttgtgctgcctcgtccctgtgagtctggcccacggagagggtacgttcacttcggacctatcgaagcagatggaggaggaggcggttcgcctcttcatcgagtggcttaagaacggcggcccgtcgtccggagctcccccgccgtcg

SEQ ID NO: 18735 - DNA, 189 bp, synthetic construct
  misc_feature 1..189: note = source = /note="Description of Artificial Sequence: Synthetic coding sequence"
  source 1..189: mol_type = other DNA
atgccctcatccgtgtcgtggggaatacttctcctggcgggcctttgctgtcttgtccctgtgtcgcttgcacatggggaaggaacgtttacttcggacctttccaagcaaatggaagaagaggcagtgagacttttcattgaatggttgaagaacggaggaccatcaagcggggcacctcctcccagc

SEQ ID NO: 18736 - DNA, 189 bp, synthetic construct
  misc_feature 1..189: note = source = /note="Description of Artificial Sequence: Synthetic coding sequence"
  source 1..189: mol_type = other DNA
atgccctcatccgtatcctggggcatcctcctgcttgccgggttgtgctgtctggtgccagtgagcctcgcacacggtgaaggtaccttcacaagtgacctgagtaaacagatggaagaagaggcagttcgactctttatcgaatggcttaagaatggaggcccctccagcggtgctcctcctccctca

SEQ ID NO: 18737 - DNA, 189 bp, synthetic construct
  misc_feature 1..189: note = source = /note="Description of Artificial Sequence: Synthetic coding sequence"
  source 1..189: mol_type = other DNA
atgccctcttccgtctcctggggtatactgctcctggcaggattgtgttgcttggtgcctgtcagcctggcgcacggtgaaggcacttttacttcggatctttccaagcaaatggaagaggaagcagtgagactcttcattgagtggcttaagaacggagggccatcgtcaggggcgcctccacctagc

SEQ ID NO: 18738 - DNA, 189 bp, synthetic construct
  misc_feature 1..189: note = source = /note="Description of Artificial Sequence: Synthetic coding sequence"
  source 1..189: mol_type = other DNA
atgccatcatccgtttcatggggaatacttcttcttgctgggctatgctgtcttgtccccgtgtcactagctcatggagaagggacgttcacatcagatttgtcaaaacaaatggaggaggaagcagtccgacttttcatcgagtggctgaaaaatggggggcctagttctggtgcgcctccaccaagc

SEQ ID NO: 18739 - DNA, 189 bp, synthetic construct
  misc_feature 1..189: note = source = /note="Description of Artificial Sequence: Synthetic coding sequence"
  source 1..189: mol_type = other DNA
atgccatccagcgtgtcctgggggatccttttgctggctggcctgtgttgtctagttcccgttagcctggcccacggcgaaggcacctttacgagcgatctgtccaaacagatggaagaggaggccgtgcgcctgttcatcgaatggctcaagaatggcggaccttcgtccggcgccccaccgccctcc

SEQ ID NO: 18740 - DNA, 189 bp, synthetic construct
  misc_feature 1..189: note = source = /note="Description of Artificial Sequence: Synthetic coding sequence"
  source 1..189: mol_type = other DNA
atgccttcttccgtctcctgggggatcctcctgctcgccgggctctgttgcctggttcccgtctctctcgctcatggagaggggactttcacaagtgatctctcaaaacagatggaagaagaagcagtaagactatttattgaatggctaaaaaacggagggccatcttctggagcacctcctccatcc

SEQ ID NO: 18741 - DNA, 189 bp, synthetic construct
  misc_feature 1..189: note = source = /note="Description of Artificial Sequence: Synthetic coding sequence"
  source 1..189: mol_type = other DNA
atgccgtcaagcgtgtcctgggggatcctgctgctggcgggcctctgttgcctggtgccagtgtcccttgcacacggcgaaggaactttcacctcagacttgtcgaaacagatggaagaggaagctgtccgcctgtttatcgagtggctcaagaacggtggacctagctcgggagccccgccgccctcg

SEQ ID NO: 18742 - DNA, 189 bp, synthetic construct
  misc_feature 1..189: note = source = /note="Description of Artificial Sequence: Synthetic coding sequence"
  source 1..189: mol_type = other DNA
atgccttcaagcgtgtcatgggggatcctcctgctcgccggcttgtgttgtcttgttccagtgtcgctggcgcatggcgaaggaacctttacatctgacttatctaagcagatggaggaggaagccgtccggctgtttatagagtggttgaaaaatgggggcccttcctccggtgcccctccaccaagt

SEQ ID NO: 18743 - DNA, 189 bp, synthetic construct
  misc_feature 1..189: note = source = /note="Description of Artificial Sequence: Synthetic coding sequence"
  source 1..189: mol_type = other DNA
atgccatctagcgtgtcttggggtattctcttgctggcgggcctgtgttgcctcgtgcccgtatctctggcgcacggcgagggaacattcacctccgacttgtccaaacagatggaagaggaggctgtgcggctgttcatcgaatggctgaagaatggcggtcctagcagcggggctccacctcccagt

SEQ ID NO: 18744 - DNA, 189 bp, synthetic construct
  misc_feature 1..189: note = source = /note="Description of Artificial Sequence: Synthetic coding sequence"
  source 1..189: mol_type = other DNA
atgccctccagcgtctcctggggaatcctgttgctcgcagggctgtgctgcctcgtcccggtgtccctggctcacggcgagggaacttttaccagcgatctctccaaacagatggaggaggaagctgtgcggctctttatcgaatggctgaagaatgggggtccttccagtggagctcctccccccagt

SEQ ID NO: 18745 - DNA, 189 bp, synthetic construct
  misc_feature 1..189: note = source = /note="Description of Artificial Sequence: Synthetic coding sequence"
  source 1..189: mol_type = other DNA
atgcccagttccgtgagttggggaatacttctgctcgctgggttgtgctgtctagtgcctgtgtctcttgcccatggggaagggacatttacttccgatctaagtaaacagatggaggaagaggccgtcagactatttattgaatggctgaagaacggagggcccagttccggggcgcctccaccatcc

SEQ ID NO: 18746 - DNA, 189 bp, synthetic construct
  misc_feature 1..189: note = source = /note="Description of Artificial Sequence: Synthetic coding sequence"
  source 1..189: mol_type = other DNA
atgccaagcagcgtatcatggggtattctacttctagccggtctctgctgtctggtcccagtctcacttgcgcacggggaagggacttttacatcagatctgagtaaacaaatggaagaggaagctgttcgactgtttattgagtggctgaagaacggggggccgagtagcggcgcccccccgccctct

SEQ ID NO: 18747 - DNA, 189 bp, synthetic construct
  misc_feature 1..189: note = source = /note="Description of Artificial Sequence: Synthetic coding sequence"
  source 1..189: mol_type = other DNA
atgccatcgtcagtgtcatggggtatcctgttgcttgccggactttgttgccttgtcccggttagcctggcgcatggggaggggacttttacctccgatctgagcaagcaaatggaggaagaagctgtgaggctcttcattgaatggcttaagaacggtggcccgtcgtctggcgcccctccacccagc

SEQ ID NO: 18748 - DNA, 189 bp, synthetic construct
  misc_feature 1..189: note = source = /note="Description of Artificial Sequence: Synthetic coding sequence"
  source 1..189: mol_type = other DNA
atgccttcaagtgtgtcctggggcattcttcttcttgcaggactgtgttgtctcgtcccagtgtccttggctcacggcgaggggaccttcacgtctgacctgtcgaagcagatggaggaggaagccgtgagactgttcattgagtggctgaaaaatggaggtccaagtagcggagctcctccaccgagt

SEQ ID NO: 18749 - DNA, 189 bp, synthetic construct
  misc_feature 1..189: note = source = /note="Description of Artificial Sequence: Synthetic coding sequence"
  source 1..189: mol_type = other DNA
atgccgtcgtccgtgtcatggggaatcctgctcctggcaggcctgtgctgcctggtccctgtctctctggcgcacggagaaggaactttcacctctgacttgtcgaagcagatggaagaagaagccgttagacttttcattgaatggctgaagaacggagggccatcgagcggggcgccgcccccgtcc

SEQ ID NO: 18750 - DNA, 189 bp, synthetic construct; identical to SEQ ID NO: 18739
  misc_feature 1..189: note = source = /note="Description of Artificial Sequence: Synthetic coding sequence"
  source 1..189: mol_type = other DNA

SEQ ID NO: 18751 - DNA, 189 bp, synthetic construct
  misc_feature 1..189: note = source = /note="Description of Artificial Sequence: Synthetic coding sequence"
  source 1..189: mol_type = other DNA
atgccgtcatcggtgtcatgggggatcttgctgttggcagggctttgttgcctcgtgcctgtgtcgcttgcccatggcgaaggaacttttaccagtgatttgtccaagcagatggaggaagaggcagtgcgccttttcattgaatggctgaaaaatgggggacccagctccggtgcgcctcctccttcg

SEQ ID NO: 18752 - DNA, 189 bp, synthetic construct
  misc_feature 1..189: note = source = /note="Description of Artificial Sequence: Synthetic coding sequence"
  source 1..189: mol_type = other DNA
atgccaagctccgtgtcatggggaattctccttctcgccggcctgtgctgcctggtccccgtctccctggcgcacggagaaggaactttcacttctgacctgtcgaaacagatggaggaggaggctgtgcgcctgttcatcgaatggctcaagaatggagggcccagctcgggcgccccaccgccatcg

SEQ ID NO: 18753 - DNA, 189 bp, synthetic construct
  misc_feature 1..189: note = source = /note="Description of Artificial Sequence: Synthetic coding sequence"
  source 1..189: mol_type = other DNA
atgccttcgtctgtctcctggggtatcctcctcttggcggggctgtgctgcctggtgccagtgtcacttgcccacggagagggcaccttcacttccgacctcagcaagcagatggaagaggaggccgtgcgcctgtttatcgaatggttgaaaaacggcggtccgagctcgggggcaccgcctccctcc

SEQ ID NO: 18754 - DNA, 189 bp, synthetic construct
  misc_feature 1..189: note = source = /note="Description of Artificial Sequence: Synthetic coding sequence"
  source 1..189: mol_type = other DNA
atgccgtccagcgtgagttgggggatcttgctcctcgcgggcctgtgctgcctggtccctgtgtcgctggcccacggagaggggaccttcacctccgacttgtcgaagcagatggaggaggaagccgtgagactgtttattgaatggctgaaaaacggtggaccttcatcaggcgcacctcccccatcg

SEQ ID NO: 18755 - DNA, 189 bp, synthetic construct
  misc_feature 1..189: note = source = /note="Description of Artificial Sequence: Synthetic coding sequence"
  source 1..189: mol_type = other DNA
atgccctcttccgtctcgtggggcatcctcctgctggcaggactctgctgccttgtcccggtgagccttgctcacggggagggcactttcacctcggatctttcaaagcagatggaggaagaagcagtgaggctgtttatcgagtggttgaagaacggagggccatcaagcggagccccacccccgagc

SEQ ID NO: 18756 - DNA, 189 bp, synthetic construct
  misc_feature 1..189: note = source = /note="Description of Artificial Sequence: Synthetic coding sequence"
  source 1..189: mol_type = other DNA
atgccatctagtgttagttggggaatccttcttctggccggcctgtgctgccttgtcccggtgagtctggcacatggtgaaggaacctttacttcggacctatccaagcagatggaggaagaagctgtgcgactgtttatagagtggctgaaaaatggcggcccgtcgagtggcgcacctccgccatct

SEQ ID NO: 18757 - DNA, 189 bp, synthetic construct
  misc_feature 1..189: note = source = /note="Description of Artificial Sequence: Synthetic coding sequence"
  source 1..189: mol_type = other DNA
atgcccagcagcgtctcgtggggaatcctgttgctggccggcctgtgttgcctcgtgcctgtgtcccttgcacatggtgagggaacttttaccagcgatcttagtaagcagatggaagaggaagcagtcagacttttcattgaatggctcaaaaacggcggaccatcgtctggggctccgcctccttca

SEQ ID NO: 18758 - DNA, 189 bp, synthetic construct
  misc_feature 1..189: note = source = /note="Description of Artificial Sequence: Synthetic coding sequence"
  source 1..189: mol_type = other DNA
atgccttcctcagtttcttggggcatacttctgctggctggtctgtgctgtctcgtccccgtgtcgcttgctcatggtgagggaacctttaccagcgacctcagcaaacagatggaggaggaagcggtcagactatttattgaatggcttaaaaacggaggacccagctccggtgctccaccccccagc

SEQ ID NO: 18759 - DNA, 189 bp, synthetic construct
  misc_feature 1..189: note = source = /note="Description of Artificial Sequence: Synthetic coding sequence"
  source 1..189: mol_type = other DNA
atgccatcttcggtgtcctggggaattctgttgctggcaggattgtgctgtctggtgccagtctcactggcgcacggggaggggacttttacctcggatctttcgaagcagatggaagaagaggccgtccggctctttatcgaatggctcaagaatggaggaccgtcctcgggagccccacctccttcg

SEQ ID NO: 18760 - DNA, 189 bp, synthetic construct
  misc_feature 1..189: note = source = /note="Description of Artificial Sequence: Synthetic coding sequence"
  source 1..189: mol_type = other DNA
atgccgtctagtgtgagctggggaatactgctgctggctggtctttgctgcctcgtgcccgtgtccttggcccacggggaagggaccttcactagcgacctgtcaaagcaaatggaggaagaggccgtgaggttgtttatagaatggctcaagaacggcggccccagtagcggcgccccacctccaagc

SEQ ID NO: 18761 - DNA, 189 bp, synthetic construct
  misc_feature 1..189: note = source = /note="Description of Artificial Sequence: Synthetic coding sequence"
  source 1..189: mol_type = other DNA
atgcccagctcggtgagttggggtatcttgctgctcgcgggattgtgttgccttgtgcccgtctcactcgcccacggtgaagggactttcacctcggatctgtcaaagcagatggaggaagaggcagtgcggctgttcatcgaatggctgaagaacggaggaccgagtagcggcgcccctcctccgtca

SEQ ID NO: 18762 - DNA, 189 bp, synthetic construct
  misc_feature 1..189: note = source = /note="Description of Artificial Sequence: Synthetic coding sequence"
  source 1..189: mol_type = other DNA
atgcccagtagtgtgtcctggggaatcttgctccttgctggattgtgctgcctggtgcccgtgagcttagctcatggagaaggtaccttcacgagtgatctgagtaagcagatggaagaagaggccgtgcgcttgtttattgagtggctgaagaatggcggcccgtcaagtggggcacccccaccttcc

SEQ ID NO: 18763 - DNA, 189 bp, synthetic construct
  misc_feature 1..189: note = source = /note="Description of Artificial Sequence: Synthetic coding sequence"
  source 1..189: mol_type = other DNA
atgccgtcgtcggtgagctggggcatcctgctcctcgcaggattgtgctgcctcgtgccggtgagcttggcccatggggaaggaacctttacctcggatctctccaagcaaatggaggaagaagccgtgcggctgttcattgaatggctcaagaatggcggaccatcctccggcgccccaccaccgtcc

SEQ ID NO: 18764 - DNA, 189 bp, synthetic construct
  misc_feature 1..189: note = source = /note="Description of Artificial Sequence: Synthetic coding sequence"
  source 1..189: mol_type = other DNA
atgccgtcctcggtgtcgtggggcatccttttgctcgccggactgtgctgtctcgtgccggtgtccctggcccacggagagggaacctttaccagcgacctgtccaaacagatggaagaagaggcagttcgcttgttcatcgagtggctgaaaaatggcgggcccagctcgggagcaccgccaccatca

SEQ ID NO: 18765 - DNA, 189 bp, synthetic construct
  misc_feature 1..189: note = source = /note="Description of Artificial Sequence: Synthetic coding sequence"
  source 1..189: mol_type = other DNA
atgccctcgtctgtttcatgggggatcctcctcctggccggactttgctgtctggtccctgtgtccctggcccacggcgaaggtactttcacgtcggacctcagcaagcagatggaagaagaggcggtgaggctgttcatcgagtggctcaagaacggcggaccgtcatcaggcgcaccgccgccaagc

SEQ ID NO: 18766 - DNA, 189 bp, synthetic construct
  misc_feature 1..189: note = source = /note="Description of Artificial Sequence: Synthetic coding sequence"
  source 1..189: mol_type = other DNA
atgccgtcctccgtgagctggggaatccttcttcttgcaggactgtgctgtctggtccccgtcagccttgcccacggagagggaactttcaccagcgacctgtcaaaacagatggaggaagaagcagtgcgcctcttcatcgaatggctcaagaacggcggcccgtcctcaggcgcccctccgccatcc

SEQ ID NO: 18767 - DNA, 189 bp, synthetic construct
  misc_feature 1..189: note = source = /note="Description of Artificial Sequence: Synthetic coding sequence"
  source 1..189: mol_type = other DNA
atgccgtcaagcgtatcctggggaatccttctgcttgccggactgtgttgcttggtcccggtgtccctcgcgcacggcgaaggaactttcacctcggacctcagcaagcagatggaggaggaagctgtgagactctttatcgaatggctgaaaaacggtggcccctcctcgggtgcaccaccgccaagc

SEQ ID NO: 18768 - DNA, 189 bp, synthetic construct
  misc_feature 1..189: note = source = /note="Description of Artificial Sequence: Synthetic coding sequence"
  source 1..189: mol_type = other DNA
atgccttcttccgtgagctgggggattctgctgcttgccgggttgtgttgtctggtcccagtctccctggcacatggcgaagggacatttacttcagatctcagcaaacagatggaagaagaagctgtgcgcctgtttattgagtggctcaagaatggcggccccagctctggggcacctccaccgtca

SEQ ID NO: 18769 - DNA, 189 bp, synthetic construct
  misc_feature 1..189: note = source = /note="Description of Artificial Sequence: Synthetic coding sequence"
  source 1..189: mol_type = other DNA
atgccatcctcggtgtcatggggcatcctgctgctcgcaggactgtgctgtttggtgcctgtatccctcgcgcacggagaggggactttcacctcggacctgagcaaacagatggaggaagaagccgtccgcctctttatcgaatggcttaagaacggaggtccgagctccggcgcaccccctccgtcc

SEQ ID NO: 18770 - DNA, 189 bp, synthetic construct
  misc_feature 1..189: note = source = /note="Description of Artificial Sequence: Synthetic coding sequence"
  source 1..189: mol_type = other DNA
atgccatccagcgtcagctggggcatcttgttgctcgccggcctttgttgtctagtcccagtctcactagcccacggcgagggcacttttacctctgacctgtctaaacagatggaagaggaagccgtacgcctgttcatcgaatggttaaagaatggcggacccagttcaggtgccccgcctccaagt

SEQ ID NO: 18771 - DNA, 189 bp, synthetic construct
  misc_feature 1..189: note = source = /note="Description of Artificial Sequence: Synthetic coding sequence"
  source 1..189: mol_type = other DNA
atgccatcctccgtgtcatggggtattctgctcttggccggactgtgttgcttggttcctgtgtcccttgcacatggagaaggaaccttcactagcgatctctcgaaacaaatggaggaagaagcagtccgactgtttatcgagtggcttaagaacggtgggccatcgtctggagctccgcccccttca

SEQ ID NO: 18772 - DNA, 189 bp, synthetic construct
  misc_feature 1..189: note = source = /note="Description of Artificial Sequence: Synthetic coding sequence"
  source 1..189: mol_type = other DNA
atgccctcgtcggtgagctggggcatcctgctgcttgcgggtctttgttgtttggtccctgtgtccctggcccacggtgaaggaaccttcaccagtgacctgtcaaagcaaatggaagaggaggcagtccgcctctttattgaatggctgaagaatggtggaccaagcagcggcgcgccacctccttcg

SEQ ID NO: 18773 - DNA, 189 bp, synthetic construct
  misc_feature 1..189: note = source = /note="Description of Artificial Sequence: Synthetic coding sequence"
  source 1..189: mol_type = other DNA
atgccgtccagtgtgagctggggcatattgcttcttgccggtctgtgctgcctcgtacccgtgagtctggcccacggcgagggtacttttactagtgatctgtccaagcagatggaagaagaggccgtgcgtttgtttatcgaatggctgaagaacggcggcccctcctcaggggctcccccccctagt

SEQ ID NO: 18774 - DNA, 189 bp, synthetic construct
  misc_feature 1..189: note = source = /note="Description of Artificial Sequence: Synthetic coding sequence"
  source 1..189: mol_type = other DNA
atgccttcgtccgtgtcgtgggggatcctgctccttgcaggtctttgttgccttgtgcctgtttcacttgcgcacggtgaaggcacttttacctccgacctttcgaagcaaatggaggaggaagcagtgagattgttcatcgaatggctcaaaaacggtgggcccagctcgggagcacctccaccatca

SEQ ID NO: 18775 - DNA, 189 bp, synthetic construct
  misc_feature 1..189: note = source = /note="Description of Artificial Sequence: Synthetic coding sequence"
  source 1..189: mol_type = other DNA
atgccatcctcagtgtcatggggtatcctgttgttggctggactttgttgtctcgtgcccgtgagtctggcccacggcgagggcaccttcaccagtgacctgagtaagcagatggaagaggaagcagttaggctgttcatcgagtggttgaagaacggaggtccatctagtggtgcccctcctccctca

SEQ ID NO: 18776 - DNA, 189 bp, synthetic construct
  misc_feature 1..189: note = source = /note="Description of Artificial Sequence: Synthetic coding sequence"
  source 1..189: mol_type = other DNA
atgccttcaagcgttagctgggggatcttattactggccggcctgtgctgtctggtgcccgtgagtctcgcccacggagagggaacattcactagcgacctcagtaagcagatggaagaggaggcagtgagactctttattgagtggcttaagaatggtggtccttcctccggcgcgcccccaccatca

SEQ ID NO: 18777 - DNA, 189 bp, synthetic construct
  misc_feature 1..189: note = source = /note="Description of Artificial Sequence: Synthetic coding sequence"
  source 1..189: mol_type = other DNA
atgcctagctccgtctcatggggaattctgcttctcgcgggtctttgctgcctggtgcctgtgagcctggcccatggcgaggggactttcacttcggacctctccaagcaaatggaggaagaagccgtgcgcctcttcatcgagtggctgaagaacggtggcccttcgtccggagccccgcctccgtct

SEQ ID NO: 18778 - DNA, 189 bp, synthetic construct
  misc_feature 1..189: note = source = /note="Description of Artificial Sequence: Synthetic coding sequence"
  source 1..189: mol_type = other DNA
atgccgtcctcggtgtcgtggggaatcctgctgctggccggactctgctgcctcgtgccagtgtcattggcacacggggaaggaacctttacctcagatctgtccaagcaaatggaggaagaagctgtccgcctcttcatcgagtggctgaagaatggtggcccatcctctggtgcgccgcccccgtcc

SEQ ID NO: 18779 - DNA, 189 bp, synthetic construct
  misc_feature 1..189: note = source = /note="Description of Artificial Sequence: Synthetic coding sequence"
  source 1..189: mol_type = other DNA
atgccatcttcagtcagctgggggattctcctcctggccggactttgttgccttgtgcctgtgtcccttgcacatggtgaagggacctttacttccgatcttagtaaacaaatggaagaagaggctgtgcggctcttcatcgaatggcttaagaacggaggtcccagcagtggcgcgccgcctccttca

SEQ ID NO: 18780 - DNA, 189 bp, synthetic construct
  misc_feature 1..189: note = source = /note="Description of Artificial Sequence: Synthetic coding sequence"
  source 1..189: mol_type = other DNA
atgcctagctcagtttcatgggggatactgctgctcgccggattgtgctgcctggtcccagtcagtcttgcacacggggaagggacttttacctctgacctttcaaagcaaatggaagaggaagccgtacgactattcatcgagtggttgaaaaatgggggtccctccagcggcgctcctccaccctcc

SEQ ID NO: 18781 - DNA, 189 bp, synthetic construct
  misc_feature 1..189: note = source = /note="Description of Artificial Sequence: Synthetic coding sequence"
  source 1..189: mol_type = other DNA
atgccatcctctgtaagttggggaatcctgctgctggcagggctgtgttgcctggtgccagtctctctcgcgcacggcgagggaactttcacaagtgacctctccaaacagatggaggaggaagccgtgcgtctgttcattgagtggctcaaaaacggaggtccttcctccggtgcccctcctccatcc

SEQ ID NO: 18782 - DNA, 189 bp, synthetic construct
  misc_feature 1..189: note = source = /note="Description of Artificial Sequence: Synthetic coding sequence"
  source 1..189: mol_type = other DNA
atgccatcatccgtgtcatggggaatacttctgttggctggtctgtgctgtctagtccctgtgtcactcgcccatggcgagggcacctttacctctgacctgtcaaaacagatggaagaggaggcagtacgcttgttcattgagtggctgaagaacggtggaccctcaagcggcgcacccccaccatct

SEQ ID NO: 18783 - DNA, 189 bp, synthetic construct
  misc_feature 1..189: note = source = /note="Description of Artificial Sequence: Synthetic coding sequence"
  source 1..189: mol_type = other DNA
atgccatcttcggtgtcgtgggggatactcctcctcgcaggcctctgctgcctagtccctgtgtccctggcccatggtgagggcacattcactagcgatctgagtaagcagatggaagaggaggctgtgcgcctgttcattgagtggctgaagaacggcggtcctagcagcggcgccccgcctccctca

SEQ ID NO: 18784 - DNA, 189 bp, synthetic construct
  misc_feature 1..189: note = source = /note="Description of Artificial Sequence: Synthetic coding sequence"
  source 1..189: mol_type = other DNA
atgccttcttcagtctcttggggaattctcttgttggctggcctgtgctgtctggtacctgtctctttagcccacggggaaggaacttttactagcgatctctccaagcagatggaggaggaggctgtgagactgttcatcgagtggctcaaaaacggtgggccaagcagtggcgccccccctccctct

SEQ ID NO: 18785 - DNA, 189 bp, synthetic construct
  misc_feature 1..189: note = source = /note="Description of Artificial Sequence: Synthetic coding sequence"
  source 1..189: mol_type = other DNA
atgccctcttctgttagctggggaattcttcttctggcaggcctctgttgtctcgttcccgtgtcactggctcatggtgaggggacatttacctcagatctaagcaaacagatggaagaagaggcagtgagactgtttatagaatggctgaaaaacgggggacctagctccggggcccctcccccttct

SEQ ID NO: 18786 - DNA, 189 bp, synthetic construct
  misc_feature 1..189: note = source = /note="Description of Artificial Sequence: Synthetic coding sequence"
  source 1..189: mol_type = other DNA
atgccgagctctgtatcttgggggatattactactggcaggactatgttgcctggttcctgtgtccctcgcccatggtgagggaaccttcactagtgatctgtctaagcaaatggaggaagaggccgtcagattgtttatcgagtggctgaaaaatgggggcccgtcgagcggggcccctcctcccagt

SEQ ID NO: 18787 - DNA, 189 bp, synthetic construct
  misc_feature 1..189: note = source = /note="Description of Artificial Sequence: Synthetic coding sequence"
  source 1..189: mol_type = other DNA
atgccttcgtctgtttcctggggtatattgctgctggctgggctatgctgcttagttcctgtgtcccttgcccacggagaaggaacgtttacatcagacttgtctaaacagatggaggaggaagccgttagactgtttatcgagtggttgaaaaacggcggtccatcatctggggcaccaccccccagc

SEQ ID NO: 18788 - DNA, 189 bp, synthetic construct
  misc_feature 1..189: note = source = /note="Description of Artificial Sequence: Synthetic coding sequence"
  source 1..189: mol_type = other DNA
atgccttccagcgtttcctgggggattctgctgctcgccgggctgtgttgtcttgttcctgtgtccttggctcacggcgaggggaccttcacttctgacctctcgaagcagatggaggaagaggccgtcaggctgttcattgagtggctcaaaaacggtggccccagctcaggggctcctccaccgtct

SEQ ID NO: 18789 - DNA, 189 bp, synthetic construct
  misc_feature 1..189: note = source = /note="Description of Artificial Sequence: Synthetic coding sequence"
  source 1..189: mol_type = other DNA
atgcctagcagcgtgtcctggggaatcttgctactggccggcctgtgttgtctggtccctgtttccctagctcatggggagggcaccttcacctccgacctttctaagcaaatggaggaggaggctgttaggttgtttatcgagtggctaaaaaatgggggcccttcaagtggcgcaccacctccttcc

SEQ ID NO: 18790 - DNA, 189 bp, synthetic construct
  misc_feature 1..189: note = source = /note="Description of Artificial Sequence: Synthetic coding sequence"
  source 1..189: mol_type = other DNA
atgccctccagcgtctcctggggcattctcctcctggctggattgtgctgcctggtcccggtttcacttgcacatggagaaggaaccttcactagcgacctgtcgaagcagatggaggaggaggcagtgagactcttcatcgaatggctgaaaaacggaggtccttcgtcgggagccccaccgccgtcg

SEQ ID NO: 18791 - DNA, 189 bp, synthetic construct
  misc_feature 1..189: note = source = /note="Description of Artificial Sequence: Synthetic coding sequence"
  source 1..189: mol_type = other DNA
atgccatcatcagttagctggggcatcctcctgctggccgggttgtgttgtcttgtgcctgtgtccctcgcgcacggggagggcacatttaccagcgacttaagcaagcaaatggaggaggaggctgtgaggctgtttatcgagtggttgaaaaacggagggccgtcatcaggggcacccccaccctca

SEQ ID NO: 18792 - DNA, 189 bp, synthetic construct
  misc_feature 1..189: note = source = /note="Description of Artificial Sequence: Synthetic coding sequence"
  source 1..189: mol_type = other DNA
atgccatcgtccgtgtcatgggggatcctgctcttggcgggactgtgttgtttggtgccagtcagccttgcacacggagagggcaccttcactagtgatctgtcaaaacaaatggaggaagaggccgtgcggctgtttatcgaatggctcaaaaacggcggaccctcctccggggcacctcctccgagc

SEQ ID NO: 18793 - DNA, 189 bp, synthetic construct
  misc_feature 1..189: note = source = /note="Description of Artificial Sequence: Synthetic coding sequence"
  source 1..189: mol_type = other DNA
atgccctccagtgtgtcatgggggattctgttgctggctgggctttgctgtctggtgcccgtgagcctggcacacggagagggtacctttacgtccgacttgtccaaacagatggaggaggaggcagttagactctttattgagtggttgaagaatggcggcccttccagcggagctcctcccccatcc

SEQ ID NO: 18794 - DNA, 1392 bp, synthetic construct
  misc_feature 1..1392: note = source = /note="Description of Artificial Sequence: Synthetic coding sequence"
  source 1..1392: mol_type = other DNA
atgtattccaacgtgattggtaccgtcacgtccgggaagaggaaggtgtacctgctgtccctgttgctcatcggcttttgggactgcgttacctgtcacggcagcccagtcgacatttgcacagccaagccgcgcgacatccctatgaaccctatgtgcatctaccggagcccagaaaaaaaagctactgaagacgaggggtctgagcagaagatccccgaagccaccaatcgcagagtctgggaactgagtaaggccaactcccgcttcgccaccacattttaccagcaccttgccgactccaagaatgacaatgacaatatctttctgtctcccctgtcaatttccaccgcgtttgcaatgaccaagctgggcgcctgcaacgataccttgcagcaactcatggaggtttttaagttcgacaccataagcgaaaagacatccgatcagatccacttcttctttgcaaaattgaactgccggctttatcggaaggccaacaagagctccaaattggtctctgctaatagattgttcggggacaaaagcctgacgttcaatgaaacgtatcaggatatctccgagcttgtgtatggcgccaaattgcaaccgcttgatttcaaggaaaacgccgagcaatccagagctgccataaacaagtgggtttccaacaaaacagaagggaggatcactgacgtgattccaagcgaggcaatcaatgagctgaccgtgcttgtgttggttaatacaatctatttcaaaggcctctggaagtcaaaatttagtcccgagaatacccgcaaggagcttttctataaggctgacggtgaaagttgttcagccagtatgatgtatcaggaggggaaatttcggtaccgccgggtggcagaaggaacccaggtccttgagctgccatttaaaggtgacgatatcactatggtgctcatcttgccaaagccagagaagtccctggccaaagttgaaaaggaactgacacccgaggtattgcaggaatggctcgatgaactggaagagatgatgctcgttgtgcacatgccaaggttcagaattgaggacgggttcagccttaaggagcagctgcaggacatgggtcttgtcgacttgtttagtcccgaaaaaagcaaacttccagggattgtggccgaaggtagggatgacctgtacgtgtccgacgcgtttcacaaggcctttttggaggtgaatgaggaaggcagtgaggccgcagcaagcactgctgtggtgattgcaggacgatcactgaacccaaacagagtgacctttaaggctaacaggccctttctcgtgttcatacgagaagtgcccctgaataccattatttttatgggcagagtggccaacccctgcgtgaag

SEQ ID NO: 18795 - DNA, 1392 bp, synthetic construct
  misc_feature 1..1392: note = source = /note="Description of Artificial Sequence: Synthetic coding sequence"
  source 1..1392: mol_type = other DNA
atgtactcgaacgtgatcggaacggtgacaagcggcaagcgcaaggtgtacttgctgtctctacttctgattggattttgggactgtgtaacgtgtcacgggagtcctgtggatatatgtaccgctaaacctcgcgatatccccatgaatccaatgtgcatctatcgttccccggaaaagaaggcaaccgaggatgaaggatctgagcagaagatcccagaggccactaatagacgagtgtgggaactttctaaggctaattccagattcgcaactacattttatcagcatttggccgatagcaagaacgacaatgataacattttcctgtcccccctttcaatcagtacagcctttgcgatgaccaaactcggtgcatgtaacgacactctgcagcagcttatggaggtgtttaaattcgacacaatatctgaaaaaacctcagatcagatccatttcttttttgctaagcttaattgtcgattataccgtaaagccaataagtcatcaaaactcgtgagcgcaaataggctattcggcgacaagtcattgaccttcaatgagacctaccaggatattagcgaactggtttatggggccaagttgcagccactggatttcaaggaaaacgctgagcagagccgtgccgcaattaacaagtgggtgtcgaataagaccgagggcagaattacagatgttatcccaagtgaagctatcaacgagctgactgtgctcgtgctcgttaataccatctattttaagggtctgtggaagagcaaatttagccctgaaaatacccgcaaagagttgttctacaaggccgacggggagtcttgctctgcatccatgatgtaccaggaggggaaattcaggtacaggagggttgctgaaggcactcaggtcctggagctccctttcaagggagacgatatcaccatggtgctgattctacccaagcctgagaaaagcctcgccaaggtggagaaggagctcactccagaggttctgcaggagtggttagatgaactggaagagatgatgctcgtcgtccatatgcctaggttcaggatcgaagatggttttagcctaaaagagcagttgcaggatatgggactggtcgacctgttcagtccagaaaagagtaaattaccagggatcgtggctgaggggcgtgacgatctgtatgtgagtgacgcctttcacaaggcattcctggaggtgaacgaagaaggctctgaagcagccgccagtactgctgtggtgattgctggacggtctctgaatcctaatcgggttactttcaaggccaacagacctttcctggtgttcatcagggaggtgcccctgaatactatcatctttatggggcgggtcgcaaacccctgcgtcaaa

SEQ ID NO: 18796 - DNA, 1392 bp, synthetic construct
  misc_feature 1..1392: note = source = /note="Description of Artificial Sequence: Synthetic coding sequence"
  source 1..1392: mol_type = other DNA
atgtactcgaacgttattggtacggtcacatcgggtaaacgtaaagtgtatctcttaagtcttcttttgatcggtttctgggattgtgtgacgtgtcacgggtctcctgttgacatttgcactgcgaaacctcgtgatattccaatgaacccaatgtgtatctatcgaagcccagaaaagaaagctactgaagatgaaggaagtgaacagaaaatcccagaagcaacaaacaggcgtgtttgggagttgagtaaagccaatagtcgatttgcgacaacgttttaccagcaccttgccgattctaagaatgataatgataatatttttctgagtcccttgagcatttcaactgcgttcgctatgacaaagcttggtgcttgtaatgatacacttcaacagctcatggaagtgttcaaattcgatactatttctgaaaaaacaagcgatcaaattcacttttttttcgcgaagcttaattgcagactttacagaaaagcaaacaagtcatcaaaactagtctcggcaaaccggcttttcggagataagagcctgaccttcaacgagacatatcaagatatttctgagctcgtgtatggggccaagttacaacctctcgatttcaaagaaaatgctgagcaatctagagccgcaataaataagtgggttagtaataagacggaaggaagaattactgatgtaattccatcggaggcaatcaatgaactgacggtgctcgtgctggtgaatactatttactttaaaggtttgtggaagagtaaattcagcccggagaacactagaaaggaattgttctataaagctgatggagaatcatgttctgccagtatgatgtatcaggaaggcaagtttaggtatcgacgggtcgcagaaggtacccaagtgttggagctcccgttcaagggtgatgacattacaatggttctgattctcccgaaaccagagaaatctctagcaaaagtggagaaagaactcactccggaagttttgcaggagtggctcgatgagctagaggaaatgatgcttgtggtacacatgccaagatttcgtattgaagatggatttagcttgaaagaacaattacaagacatgggacttgttgacctgttttcaccagaaaagagtaaattaccaggtatagttgcagaaggtcgtgacgatctatacgtctctgatgcctttcacaaagcattcttagaggtgaatgaagaaggatctgaagcggcagcttccacagcggttgttattgccgggagatcgcttaatccaaatcgtgttactttcaaagcaaatagaccatttctagtttttattcgagaagtgccgttaaataccattattttcatgggacgagttgccaatccatgtgtcaag

SEQ ID NO: 18797 - DNA, 1392 bp, synthetic construct
  misc_feature 1..1392: note = source = /note="Description of Artificial Sequence: Synthetic coding sequence"
  source 1..1392: mol_type = other DNA
atgtactcaaatgtcattgggactgtgacctccgggaagcggaaagtctacctgctgtcgctgctgctcattggattttgggattgcgttacctgtcatgggtccccagtcgatatctgtacggcaaagcctcgggatattccaatgaacccaatgtgtatttaccgtagcccggagaaaaaggcaaccgaagatgaaggatcagaacaaaagattcccgaagcgaccaatcggcgtgtgtgggagctgtccaaggcaaacagcaggttcgcgactaccttttaccaacatttggccgatagcaagaacgataacgacaatatctttctgtcgccgctgtctatttcgactgcatttgcaatgactaagctcggagcatgcaacgatactcttcagcagctgatggaagtgtttaagtttgacaccatctcagaaaagacctccgatcaaattcactttttctttgcaaaactcaactgtcgcctgtaccgcaaggcaaacaaatcgagcaagctcgtctcagcgaatcggctgtttggtgacaagtccctgacttttaacgaaacctaccaagacatttccgagctcgtctacggagctaaacttcagcctctggactttaaggagaacgcagagcagtccagagcagccattaacaaatgggtgtcgaacaagactgaaggaagaattacggatgtgataccttccgaagctattaacgagcttaccgtgctggtcctcgtcaacaccatctacttcaaagggttgtggaaatcaaagttctcccctgaaaacacccgaaaggagcttttctacaaggccgacggggaaagctgctcggcctcgatgatgtaccaggaaggcaagttccgatatagacgcgtcgccgaaggaacccaggtgctggaacttccctttaaaggagatgatattactatggtcctgatactgccaaagcctgagaaaagcctcgcgaaggtagaaaaagaattgacgccagaagtcctgcaagaatggcttgatgagctggaggagatgatgttggttgtccacatgcccagattcagaattgaggatggattttcacttaaggagcaacttcaggatatgggtttggtcgatcttttttcgcccgagaagtcaaagctcccagggattgtcgccgaaggccgggacgatctgtacgtgtccgacgcttttcacaaagcattcctcgaggtcaatgaggaggggtccgaggcagcagcatccaccgcagtggtgatcgcagggagatcactgaaccctaacagggtgacgtttaaagcgaacagacctttcctggtgtttattcgggaagtgcctctgaacacgataatctttatgggacgagtggcaaacccatgtgtgaag

SEQ ID NO: 18798 - DNA, 1392 bp, synthetic construct
  misc_feature 1..1392: note = source = /note="Description of Artificial Sequence: Synthetic coding sequence"
  source 1..1392: mol_type = other DNA
atgtactcaaacgttatcggaactgtgacctcaggaaagcgtaaggtctacctcctctcgcttcttctgattggattttgggattgtgtgacctgccatgggagcccagtcgatatctgtactgcgaagccccgagatattcctatgaaccctatgtgcatctaccgctccccagaaaagaaggcaactgaggatgaaggatctgaacagaagatacccgaggcaacgaacaggagggtgtgggagctttccaaagcgaactcccggtttgcgaccaccttctaccagcacctggcagactctaagaatgacaacgacaacatctttctgagccctctttccatctcgaccgcctttgctatgaccaagctgggtgcatgcaacgacaccctgcagcagctcatggaagtgttcaagtttgatacgatttcggaaaagacgagcgatcaaattcacttctttttcgcaaagctgaattgtcgactgtataggaaggcgaacaagtcatcgaagctggtcagcgctaaccgcctcttcggcgacaaaagcctgacttttaacgaaacctaccaggatatctccgaactggtgtacggggcgaagttgcaacccctggactttaaagaaaacgccgaacagagccgagcagcaatcaacaaatgggtgagcaacaagaccgaaggaaggatcaccgatgtcattcctagcgaggcaattaacgaacttactgtgctggtccttgtcaacaccatttacttcaagggcctctggaagtccaaattctcgcctgaaaatactaggaaggaacttttctataaagccgacggcgagtcctgttcagcatccatgatgtaccaggagggtaagttccgctaccgtcgggttgcagaaggtacccaggtgcttgaacttcctttcaagggagacgatatcactatggtgcttattctccctaagccggagaagagcctggcaaaggtcgaaaaggaacttactcctgaggttctgcaggaatggcttgatgaacttgaagagatgatgcttgtcgttcacatgcccagatttcggatcgaggacggtttctcgctgaaggaacaactccaggatatgggtcttgtggaccttttctcaccagaaaaatccaaactgccggggatcgtggcagagggacgtgatgacctctacgtctcggatgctttccataaggctttcctggaggtgaacgaggagggaagcgaagccgcagcctccactgccgttgtgatcgcaggtagatcgttgaatcctaaccgagtcacctttaaggcaaatcgccccttccttgtgtttatcagagaagtgccattgaacaccataatctttatgggaagagtcgcgaatccctgtgtgaag

SEQ ID NO: 18799 - DNA, 1392 bp, synthetic construct
  misc_feature 1..1392: note = source = /note="Description of Artificial Sequence: Synthetic coding sequence"
  source 1..1392: mol_type = other DNA
atgtactcaaacgtgatcgggaccgtgactagcggaaagagaaaggtgtacctcttgtcgctgctgctgattggcttttgggactgcgtcacttgccacgggtcaccagtggacatctgcactgccaagccacgggatattccgatgaaccccatgtgcatctaccgcagcccagaaaagaaggcaactgaagatgaaggcagcgagcagaagatcccagaagctaccaatcggcgggtctgggagctgtcgaaagcgaattccaggttcgcgaccaccttctaccagcatctggccgactcgaagaacgacaatgacaacatctttctgtcccctctgagcatttcgaccgcattcgccatgaccaagctgggggcatgcaacgacactctgcagcagcttatggaagtgttcaagtttgatactatctccgagaaaaccagcgaccaaatccacttcttttttgccaagctgaactgtcgcctgtaccgcaaggctaacaagtcctccaagctggtgtcggccaacagattgttcggcgataagtcccttacttttaacgaaacctaccaggacatctccgaactggtgtatggggccaaactccagccgctggatttcaaggagaatgctgaacaaagccgcgcagccatcaacaagtgggtgtcaaataagaccgaaggtagaatcactgacgtgattccaagcgaggccatcaacgaactgaccgtcctggtgctggtcaacaccatctacttcaagggactttggaaatccaagttctccccggaaaacacgcggaaggagctcttctacaaggcagatggagaatcatgttcggcctcgatgatgtaccaagaaggaaagttccgctaccgcagagtcgccgaaggcacccaggtgctggagttgccgttcaagggagatgacatcactatggtcctcattctgccgaagccggagaagtccctggccaaggtggagaaggagctgaccccagaagtgcttcaggagtggctcgatgaactggaagaaatgatgctggttgtgcacatgcctcgcttccgcatcgaggacggatttagcctcaaggaacagctccaggacatgggactcgtggacctgttttcacccgaaaagtcgaaactgcctggaatcgtggccgaaggccgcgatgacctttacgtttccgacgcattccataaggcattccttgaagttaacgaagagggctccgaagccgcggcctcgaccgccgtcgtcatcgcgggtcggtcgctcaaccctaatcgcgtgaccttcaaggcgaataggccctttctggtgttcatccgggaagtgcctttgaataccatcatctttatgggacgagtcgcgaacccgtgtgttaag

SEQ ID NO: 18800 - DNA, 1392 bp, synthetic construct
  misc_feature 1..1392: note = source = /note="Description of Artificial Sequence: Synthetic coding sequence"
  source 1..1392: mol_type = other DNA
atgtactctaatgtaataggcactgtcacttccggtaaacggaaggtctatctgctatctctgttgctcatcggcttctgggactgcgtcacctgccacgggtctccagtggacatctgcaccgccaagcctagagatatccctatgaaccccatgtgtatctaccgctctcctgagaagaaagccacagaggacgagggtagcgaacagaaaatccccgaggccaccaacagacgggtatgggagctcagcaaggctaatagtagattcgcaacgacgttttatcagcacctggctgatagcaagaatgacaacgataacattttcctgtcacccctgagtatatcaacggcatttgccatgaccaagttgggcgcatgtaatgacaccttgcagcagttgatggaagtcttcaaattcgatacgatctccgaaaagacatcagaccaaatccacttcttcttcgcgaagttgaactgccgtttgtatcgcaaggccaacaaatcttccaagctcgtgagcgccaatcggctgtttggggacaagtctttaacatttaatgaaacctaccaagacatttctgaacttgtctatggcgcaaaacttcagcccttagatttcaaagagaatgccgagcagtcccgcgctgcaattaataagtgggtcagcaataagaccgaaggccggattaccgacgtgatcccttctgaggccattaatgaactgactgtcttggtgttggtcaacaccatttacttcaagggcttgtggaagtctaagttttcaccagagaacacaaggaaagaattgttttataaagccgacggggagtcttgttctgcaagcatgatgtaccaagagggaaaattccgctatcgtagagtggctgagggaactcaagttctcgagctgccctttaagggggacgacattactatggtgcttatcttgcctaaacctgaaaaatcattggcaaaggtggagaaagagttaaccccggaggttctccaggagtggctggatgaactcgaggagatgatgctcgtagtccatatgccccggtttcgtattgaggatggattttcgctgaaggagcagttgcaagatatgggcctggtggacctgttttctcccgagaagtcaaagcttccgggcattgttgccgaaggccgagacgatctctacgtatcagatgccttccacaaggcattcctggaagtgaacgaggaaggaagcgaggcagcagcctctaccgccgtcgtaatagcagggaggtccctcaatcctaatcgcgtgacattcaaggccaaccgaccgtttcttgtcttcattagagaggttcccctcaacaccataatcttcatgggcagagtagccaatccttgcgtgaag

SEQ ID NO: 18801 - DNA, 1392 bp, synthetic construct
  misc_feature 1..1392: note = source = /note="Description of Artificial Sequence: Synthetic coding sequence"
  source 1..1392: mol_type = other DNA
atgtactccaacgtgatcggcaccgtcacaagcgggaagcgaaaggtctatctcctgtctctgttactgataggtttttgggactgcgtgacgtgtcacgggtctcctgttgacatttgcacggcaaaaccaagggacatcccaatgaacccaatgtgcatctatagatcccccgaaaagaaggccaccgaggacgaaggctcagaacagaagatccccgaagctaccaaccggagagtgtgggaactgtcaaaagcgaactcccggttcgcgaccactttttatcagcacttggccgatagtaaaaatgacaatgacaatatctttctatcacccctcagcatttcgaccgcattcgccatgactaagctcggggcttgtaacgacaccttacagcagttgatggaagtgtttaaattcgacacgatttcagaaaagactagcgatcaaattcacttttttttcgctaagttgaactgccgactgtatcgcaaggcgaacaagtcctccaaattagtctcagccaacaggctttttggagacaaatctctgacttttaatgagacataccaggacatctcagagctggtctacggagctaagctgcagcccttggattttaaagagaacgctgagcaaagcagggcagcaatcaacaaatgggttagcaacaagactgaaggccgaatcaccgacgttattcctagtgaggcgattaatgaactgaccgttctggttctggtgaatacgatctattttaaaggattgtggaagagcaaattctcacccgaaaataccaggaaagaattgttctacaaagccgacggcgaaagctgtagcgcaagcatgatgtaccaggagggtaagtttcgctatcggagggtggccgagggtacccaggtgctggagcttcctttcaaaggcgacgacattacgatggtccttatcctgcccaagcctgaaaaatctctggccaaggttgaaaaagaacttacaccagaagtactgcaggagtggttggatgagttggaagaaatgatgctagttgtccacatgccccgtttcaggatagaagatgggttcagtctgaaggaacagctacaagacatggggctggtagacctcttttcacccgagaaatccaagctgcccgggatcgtcgccgagggccgagacgacctgtatgtctctgacgcatttcacaaggcctttcttgaagtgaacgaagaagggagcgaggctgccgcctctacagcagtggtgatcgccggcaggtcactcaatcctaacagggttacatttaaggccaatagaccattccttgttttcatccgggaggtgccgcttaataccattatttttatggggagggtggccaacccttgcgttaaa

SEQ ID NO: 18802 - DNA, 1392 bp, synthetic construct
  misc_feature 1..1392: note = source = /note="Description of Artificial Sequence: Synthetic coding sequence"
  source 1..1392: mol_type = other DNA
atgtattctaatgttatcggcacagttacatccggcaaaaggaaggtgtacctcttgagtctgctgctcattggcttctgggattgcgtgacttgtcacggctcccctgtggacatctgcacggcaaagccccgcgatattccgatgaaccctatgtgtatctacaggagccccgaaaagaaagccacagaagatgagggctctgagcagaaaataccagaagccaccaacaggcgagtgtgggagctgagcaaagcaaatagccggttcgcgacgacattttatcagcacctggccgattctaagaacgacaatgataacatatttttgtctcctctaagcatctccacggcctttgccatgactaaactgggggcctgcaacgacaccctgcagcaacttatggaagtatttaaattcgatacaatttccgaaaagacatccgaccagatccacttcttcttcgccaagctgaactgtagactatacaggaaggccaataaatcctcgaagttggttagcgcgaatcgattgttcggagacaaatctttaactttcaacgaaacttaccaagacatatctgagctggtttacggagccaagctgcagccactggattttaaagagaatgccgagcagagtcgcgctgccataaacaagtgggtgtccaataagactgagggtaggattaccgacgtcatacccagcgaggccatcaatgaactaaccgtgctggtgctcgtgaacactatttatttcaaaggactttggaagagcaaattctcacccgagaatacacgtaaggaactgttctataaagccgacggagaatcgtgtagtgcaagtatgatgtatcaggagggtaaatttaggtataggagggttgcggagggaacacaagttctggaactcccattcaagggagatgacattaccatggtactaatcctacctaagcccgaaaaatcactggccaaagtagagaaggagctgacacctgaggtcctgcaggaatggctcgatgagttggaagaaatgatgctggtcgtccatatgcctagatttaggatcgaggacggcttcagccttaaggaacagctccaggatatgggattggttgatctgttctcccccgagaaatcaaagttgccaggaattgtcgcggagggtcgtgacgacctatatgtgtcagacgctttccataaggcctttctagaagtgaacgaagaaggttcggaggctgctgcctcgaccgcggtagtgatcgcaggacggagcctcaatccaaacagagtgactttcaaagcaaatagacctttccttgtgtttatccgcgaggtccccttaaacacaatcatatttatgggcagagttgctaacccctgtgtcaaa

SEQ ID NO: 18803 - DNA, 1392 bp, synthetic construct
  misc_feature 1..1392: note = source = /note="Description of Artificial Sequence: Synthetic coding sequence"
  source 1..1392: mol_type = other DNA
atgtattctaatgtgataggcacggtcacaagcggcaaaagaaaggtgtacttgctgtctcttctcctgattggattttgggattgtgtaacttgccacggaagccccgtggatatctgcactgcaaaacccagggacattcctatgaacccaatgtgcatctaccgaagccccgaaaaaaaggcaaccgaagacgaagggtctgagcaaaagattcctgaagcaactaataggagggtgtgggagctgtcgaaagctaatagtaggtttgcaaccaccttttatcagcatctagccgactcaaagaatgacaacgacaacatcttcctgtccccactcagtatatccaccgccttcgccatgaccaaattgggggcttgcaatgatacactacaacagcttatggaggtgttcaagttcgacactatttctgaaaaaacatcagatcagatccatttcttctttgcaaaactgaattgccgcttgtacagaaaggctaacaagtcgtctaaacttgtgagcgcgaaccgactttttggggataaatctcttaccttcaacgaaacatatcaggacatctccgaattggtgtatggggcgaagttgcaacctctggacttcaaggagaacgcagagcagagccgagccgctattaataaatgggtatctaacaagactgagggtcgaatcactgacgtgataccgtccgaggccatcaatgagttgaccgtgcttgtgctggtcaacaccatatacttcaaaggtttatggaagtccaagttctctcccgagaatacgcggaaagaactgttttacaaagcagatggcgaaagttgctctgcctccatgatgtaccaggagggcaaatttaggtataggcgtgtggccgaagggacccaggtcttagaactgccattcaaaggcgatgatataaccatggtgttgatactgcccaagcccgaaaagtccctggcgaaagtggagaaagaactgactcccgaagtactccaggagtggctggacgagcttgaggaaatgatgctggttgtccacatgcccaggttccgaatcgaggacggtttttccttaaaagaacagcttcaggatatggggcttgtggacctgttctccccagaaaaaagcaagctgcccgggatcgttgcggaaggccgagacgacctgtacgtgagcgacgcattccataaggcctttctcgaagtcaacgaagaaggtagcgaagctgcagccagtacagcagtggtgatagccggccgatcactcaatcctaacagagttactttcaaggcaaaccgtccgttcctggttttcatcagagaggtgcctctgaatacaattatcttcatgggacgtgtcgctaacccttgcgtgaag

SEQ ID NO: 18804 - DNA, 1392 bp, synthetic construct
  misc_feature 1..1392: note = source = /note="Description of Artificial Sequence: Synthetic coding sequence"
  source 1..1392: mol_type = other DNA
atgtatagtaatgttattggtacggtgacaagcggcaaacgaaaagtgtatttgctgtctctgctccttattggattttgggactgcgttacttgtcatggcagccccgtagacatttgtacggctaaaccgagggatatcccgatgaacccgatgtgcatttatagatcccctgagaaaaaagctaccgaagacgagggatctgaacagaaaatcccagaggcgactaatagaagagtgtgggagctgtctaaagcaaattcgaggtttgccacaacattttaccagcatttagccgactcaaaaaatgacaatgataatatttttctttcgccgttatctatctccacggcttttgctatgacaaaattaggggcctgcaatgacactttacagcaactgatggaggtcttcaaatttgatacgatttctgaaaaaacatcagatcaaatccatttctttttcgctaaactgaattgtcgattgtacaggaaagcgaataaatcaagcaaactggtgtctgcgaatagactctttggtgacaagtcattgacttttaatgagacgtatcaagatatttcggaacttgtgtatggagcgaaactccaaccgctggacttcaaagaaaatgcagaacagagcagggcagctatcaataaatgggtctcaaataagactgagggcagaataacagacgtaattccatcagaagcgatcaacgaactgaccgtcctggttcttgttaatacgatttattttaaaggactgtggaagtcgaaattctcaccggagaacactcgaaaggaactgttttataaagcggatggagaaagttgctccgcatctatgatgtaccaggaaggcaagttccgataccgcagagttgcggaagggacacaagttctggagttaccgtttaaaggagatgatattacgatggtcctgatcctccccaaacctgaaaaatcattagcgaaagtggagaaggagctaacaccagaagttcttcaagagtggctggatgagctcgaggaaatgatgctggtcgtacatatgccaagattcagaatcgaagatggcttttctctcaaggagcagcttcaggatatggggttggtagatctgttttcacctgaaaaatctaagctgccgggaatcgttgcggaaggtcgagacgacttatatgtgtccgatgcgtttcacaaagcctttcttgaagtcaacgaagagggcagtgaggctgcggcatcaaccgctgtggtcatcgctgggcgatcattaaaccctaatcgtgtgaccttcaaggcgaaccgtccgttcctggtttttattcgggaagtaccactaaacacaatcatttttatgggtagagtcgctaacccctgtgtgaag

SEQ ID NO: 18805 - DNA, 1392 bp, synthetic construct
  misc_feature 1..1392: note = source = /note="Description of Artificial Sequence: Synthetic coding sequence"
  source 1..1392: mol_type = other DNA
atgtactccaatgtcattggaacggtgaccagtggaaagaggaaggtgtacctgctctcactccttctgatcggattttgggactgtgtgacttgtcatggcagcccagtggacatttgcaccgccaagccacgggatatcccaatgaaccctatgtgcatctaccggtcgccagaaaagaaggcaacggaagatgagggttcggaacagaagattcctgaggcaactaatcgacgggtctgggagctctcaaaggcaaactccagattcgccactaccttctaccaacacctggcagacagtaagaacgataatgataacatttttctgagccctcttagcatctccactgcatttgctatgaccaagctgggtgcatgcaacgatacgctccagcaacttatggaggtgttcaaatttgataccatttcagaaaagacctccgatcagatacacttctttttcgcaaagctgaactgtaggctttatcgtaaggcaaataagtcgtccaaactggtgtccgcaaatcggctcttcggtgacaagtcgttgacctttaacgaaacctaccaagatatttcggaacttgtgtacggagcgaagctgcaacctctggatttcaaagagaatgctgagcaatccagagcagcaattaacaaatgggtgtcgaataagaccgagggccgcatcacggatgtcattccaagcgaggccatcaatgaactgactgtccttgtgctcgtcaataccatctacttcaagggactttggaagtctaagttttcccctgagaacactcgaaaagagttgttctacaaggcagacggcgaaagctgttccgcctccatgatgtaccaagaggggaaatttcgttaccgtcgggtggctgagggaacccaggtgcttgaactgccctttaagggcgatgacatcaccatggtgttgattctgccaaagccggaaaagtcccttgcgaaggttgaaaaggaacttacgcccgaagtgctgcaggaatggcttgacgaacttgaagagatgatgctggtcgtgcacatgcctagattccgcatcgaggatggattctctctgaaggaacaactccaggacatgggactggtggaccttttttcgcccgagaaaagcaagttgcctggtatcgtcgccgaaggtcgcgacgatctctacgtcagcgatgcgttccacaaagcctttcttgaagtcaacgaagaaggaagcgaagcggccgcatccaccgcagtggtgattgcgggtcgctcccttaaccctaacagagtcaccttcaaggcgaatcgccccttccttgtgttcatccgagaagtgcccctgaataccatcatattcatgggccgcgtcgcaaacccttgcgtgaaa

SEQ ID NO: 18806 - DNA, 1392 bp, synthetic construct
  misc_feature 1..1392: note = source = /note="Description of Artificial Sequence: Synthetic coding sequence"
  source 1..1392: mol_type = other DNA
atgtattcgaacgtcatcggtacggtcacgtcgggcaaacgtaaggtgtacctgctgtccctcttgctgatcggcttttgggactgtgtcacctgccatggcagtccagtggatatctgcacggcgaagccgcgagatatcccaatgaaccctatgtgtatctatcggagccctgagaagaaggctacggaagatgaaggttctgagcaaaagattccagaagccacgaaccgtcgcgtttgggaactctccaaagccaattccaggtttgccaccaccttctaccaacaccttgcggactcgaagaacgacaacgacaatatcttcctcagccctctgtccatcagcacggctttcgcaatgactaagctgggagcctgcaatgataccttgcaacagctaatggaagtgtttaaatttgacaccattagcgagaagacctcggatcagatccactttttctttgccaagctcaactgccgtctctatcggaaagccaacaagtcgtccaagttggtctcagcgaataggctgttcggtgacaagtctctgaccttcaacgaaacctaccaggacatctcagagctcgtctacggcgcaaagctgcagcctttggacttcaaggagaacgctgagcagtcccgcgccgccatcaataagtgggttagtaacaagaccgagggcaggatcaccgatgttattccatccgaggctatcaacgagttgaccgtcctagtccttgtcaacaccatctactttaagggactctggaaatcgaagttctctccggagaatacgagaaaggagctcttctacaaggccgacggcgagagctgctccgctagcatgatgtatcaagaggggaagttccgatatagacgcgtcgctgagggtacccaagtgctggagcttcctttcaagggggacgacatcaccatggtcctaatcctcccgaaacctgagaagagcctcgccaaggtcgagaaggagctgactcccgaggtcctccaggagtggttggatgaactcgaggaaatgatgttggtcgttcacatgccgcgtttccgcattgaggatggcttcagcctgaaggagcaactgcaagatatgggccttgttgacctgttcagccccgaaaagtccaagctgccaggtatcgtcgctgagggaagggatgacctttacgttagcgacgccttccacaaggcctttctggaggtcaacgaggagggttccgaggccgcagccagcactgcagtcgtcatcgccggccgctctctgaacccgaacagagtcactttcaaggcgaaccgccctttcctggttttcattcgggaagtcccgctcaacaccataatcttcatgggtcgggtggcgaacccatgtgtcaag

SEQ ID NO: 18807 - DNA, 1392 bp, synthetic construct
  misc_feature 1..1392: note = source = /note="Description of Artificial Sequence: Synthetic coding sequence"
  source 1..1392: mol_type = other DNA
atgtacagcaacgtgatcggcactgtgacttcgggtaagagaaaggtgtacctgctgtctcttttgctgattggcttctgggactgtgtgacctgccatggaagcccagtcgatatatgtacggccaagccacgcgatatcccaatgaaccctatgtgtatctaccgctcgccggaaaagaaggccactgaagatgagggttctgaacaaaagatcccggaggcaactaaccggcgcgtgtgggaactgagcaaggcaaattccagattcgcaaccaccttttaccagcacctcgccgactctaagaacgataacgacaacatctttcttagccctctttcgattagcactgcgtttgcaatgacgaaacttggagcctgtaacgataccctccaacaactcatggaagtgttcaaattcgacacgatttcagaaaaaacctccgatcagatacatttcttttttgcaaagctcaattgcagactttaccggaaggcgaataagtcgtcgaagctggtgtcagctaatcggctgttcggggataagtcactgacgtttaacgagacttaccaagacatctccgagcttgtgtacggggcaaagctccagccactcgatttcaaggaaaacgctgagcagtcccgcgcagcgattaacaagtgggttagcaacaagaccgaaggaaggattaccgacgtgattccctccgaggccattaatgaacttactgtccttgtgcttgtgaatactatctactttaaaggtctttggaaatctaaattctcacctgagaatacccggaaggagctgttctacaaggccgatggagaatcctgtagcgcatcgatgatgtaccaggaaggcaagtttcgatatagacgggtcgcggagggcactcaagtcctcgaactgccgtttaaaggagatgatattaccatggtgctcatcctcccaaaacccgaaaagtcgctggcaaaggtggaaaaggaacttactcctgaagtactgcaagaatggctcgacgagttggaggaaatgatgctcgtggtgcacatgcctcggttcaggatcgaagatgggtttagcttgaaggagcaacttcaggatatgggacttgtggatctgttttcaccggagaaatcgaagctccccggaattgtggcggagggtagagacgacttgtatgtgtcggatgcctttcataaagcatttttggaagtgaacgaagaagggtcggaagccgcagcctccactgcagtcgtgattgccggacggtcacttaaccccaatagggtcacttttaaggcaaataggccctttctggtgttcattagggaggtgccgctgaataccattatctttatgggacgtgtggcgaacccctgcgtgaaa

SEQ ID NO: 18808 - DNA, 1392 bp, synthetic construct
  misc_feature 1..1392: note = source = /note="Description of Artificial Sequence: Synthetic coding sequence"
  source 1..1392: mol_type = other DNA
atgtactcaaatgtgatcggcactgtcacttcgggcaagcgcaaagtgtacctcctgagcctgttgctgattgggttctgggactgcgtgacctgccacgggagcccagtggatatttgcaccgcgaaacctagagacatcccaatgaacccaatgtgtatctatcgctccccagaaaagaaggcgactgaggacgaaggctcggagcagaaaatcccggaggctaccaatcggcgcgtgtgggaactctccaaggccaattcacgcttcgccactaccttctaccagcacctggcagattccaaaaatgacaatgacaacatctttctgagcccattgagcatctcgaccgctttcgcaatgactaagctcggcgcatgcaacgacaccctccagcagctgatggaggtgttcaagtttgatactattagcgaaaagactagcgatcagatccatttcttcttcgccaaactgaattgccggctctaccgcaaggccaataagtcctcgaagctggtgtcagccaaccggttgttcggagataagagcctcaccttcaacgaaacctaccaggacattagcgaactggtgtacggagccaagctccaacctctggatttcaaggagaacgcggaacaatcccgggcggcaatcaataagtgggtgtccaacaagacggaaggccggatcacggacgtgatcccgagcgaggccattaatgaactcactgtgctggtcctggttaacaccatctacttcaagggactgtggaagtccaaattctcgccggagaataccaggaaagagctcttctacaaggcggatggcgaatcatgctcggcctcgatgatgtaccaggagggaaagttccgctaccgcagagtcgccgaggggacccaagtcctggagctgccctttaagggagacgacatcactatggtcctcatcctgccaaaacctgaaaagagcttggccaaagtggagaaggagctcactcctgaggtgcttcaagaatggctggatgagctggaggaaatgatgctggttgtgcacatgccgcggtttcgcatcgaggacggtttctcattgaaagaacaacttcaggacatgggactggtcgacctgttttcgccggaaaaatcaaaacttccgggaatcgtggcggagggacgcgacgacctgtacgtgtcagatgccttccacaaggccttcctggaagtgaacgaggaaggtagcgaggccgcggcaagcaccgcagtggtgattgcagggcgctccctcaacccaaatagagtgacgttcaaggccaatcgcccatttttggtctttatcagagaggtgccgctgaacacgataatcttcatgggaagagtcgccaatccatgcgtaaag

SEQ ID NO: 18809 - DNA, 1392 bp, synthetic construct
  misc_feature 1..1392: note = source = /note="Description of Artificial Sequence: Synthetic coding sequence"
  source 1..1392: mol_type = other DNA
atgtactccaacgtgattggaactgtgacttcaggaaaacggaaagtctacctgttgtccctcctgttgatcggattctgggactgcgtgacttgtcacggaagtccagtagacatctgtactgctaagccacgcgacatccccatgaacccaatgtgcatttacaggtcgccagagaagaaggccactgaagatgagggatcagaacaaaagatcccagaagccaccaatcggcgtgtctgggagttgtcgaaggcgaactcacgcttcgccactaccttttaccagcatttggccgattccaagaacgataatgataacatctttctctcaccgctgtctatctcgaccgcctttgcgatgaccaagctcggcgcctgtaatgatacgctgcagcaactcatggaggtgttcaagttcgacacgatctcggagaaaacttcagatcagattcactttttcttcgccaaactcaactgcagactgtacaggaaggcgaataagagctccaagctggtgtcggcaaatcggttgttcggggacaaatcgctgacgtttaacgaaacctaccaggatatctctgaactcgtgtacggcgctaagctgcaacctctggatttcaaagaaaacgccgagcagtcacgcgcggccatcaacaaatgggtgtccaacaagactgaaggacgcatcaccgacgtcattccctccgaagccatcaacgagctgactgttctggtgctggtgaatacgatttacttcaagggactgtggaagtcgaagttttcgccagaaaacacccgcaaagagctgttctacaaagcggacggcgaatcgtgctcggcgagcatgatgtatcaagaagggaagttcagataccggagggtggcagagggtacccaagtcctggaacttccgttcaagggagacgacatcaccatggtgttgatcctccctaagccagaaaagtccctggcaaaggtcgaaaaggaactgaccccggaagtgttgcaggagtggctggatgaactggaggaaatgatgctggtcgtgcatatgccgcggttccggatcgaggacgggttctccctcaaggaacagttgcaggacatgggccttgtggatctgttttcgccggaaaagagcaagttgcctggaatcgtggctgaaggacgggacgacctctacgtctccgacgccttccataaggctttcctggaagtgaacgaggaaggatctgaagcagcagcctcaaccgccgtcgtcatagccggcagatcgctcaacccgaaccgggtgaccttcaaggccaacaggccattccttgtattcatccgggaggtgccgctcaacactatcatctttatgggccgggtcgctaacccgtgcgtgaaa

SEQ ID NO: 18810 - DNA, 1392 bp, synthetic construct
  misc_feature 1..1392: note = source = /note="Description of Artificial Sequence: Synthetic coding sequence"
  source 1..1392: mol_type = other DNA
atgtacagcaacgtgataggcactgtgacctctggcaaacgtaaggtttacctgctctccctcctccttattggcttctgggactgcgttacatgccacggcagtcctgtggacatctgcacagccaaacctcgtgacatccccatgaatccaatgtgtatctacaggtctccagagaagaaggctaccgaagatgagggatctgaacagaagatcccagaagctacaaacagaagagtgtgggaactcagcaaggctaactctaggttcgctactacattctaccagcacctggccgattctaaaaacgacaacgacaacatcttcctgtcccccttgtccatctcaaccgctttcgccatgactaaactgggtgcttgcaatgacacccttcaacagctgatggaggtttttaagttcgatactatctccgagaagacatccgatcagatccacttcttcttcgccaaattgaactgcaggctctaccgtaaggctaacaagagctcaaagttggtgagcgcaaatagactgttcggagataagtcactgacattcaatgagacctaccaagacatctccgagttggtctacggtgccaagctgcaacccctggattttaaagagaatgctgagcaatccagagccgctatcaataagtgggtgtccaataagaccgagggccgtataaccgacgtcatcccttctgaagccatcaacgagctcacagtgcttgtgctggtaaacacaatctacttcaagggtttgtggaagtctaagtttagcccagaaaacacacgcaaggaactcttctataaggcagacggagagtcttgctcagcttccatgatgtatcaggaaggtaagttccgttacagaagagtggccgagggcacccaagttctggaacttccattcaaaggagacgacatcacaatggtgttgattctccccaagcccgaaaagagcttggcaaaggtagagaaggagcttacaccagaggttctgcaggaatggctggacgagctggaggagatgatgttggtagtccatatgcctcgttttaggatcgaagacggtttctctcttaaggagcagctccaggatatgggattggtggatttgttctctcccgagaagtcaaagctgcccggcattgtggccgagggtcgcgatgacctgtatgtgagcgacgctttccataaggcttttctggaggtgaatgaagagggtagcgaggccgcagcatctacagctgtagtgatcgccggtcgcagcctgaatcctaaccgcgttaccttcaaggctaataggccatttttggtctttattcgcgaagtgcccctgaataccattattttcatgggcagagtggcaaacccttgtgtgaag

SEQ ID NO: 18811 - DNA, 1392 bp, synthetic construct
  misc_feature 1..1392: note = source = /note="Description of Artificial Sequence: Synthetic coding sequence"
  source 1..1392: mol_type = other DNA
atgtactcaaacgtcatcggaaccgtgactagtggtaagaggaaagtctacctcttgtcattgttgctgatagggttctgggactgtgtcacatgtcacgggtcacctgtggacatatgtaccgcaaagccacgcgatattcccatgaatcctatgtgtatctaccgatccccagagaaaaaggcaacagaagatgaagggagtgaacaaaagatccccgaggccactaacagaagggtgtgggagctcagcaaagctaatagtaggtttgccacaactttctatcagcacctcgctgattccaagaacgacaatgataacatttttcttagcccactcagtattagtacagcttttgctatgactaagttaggagcctgtaatgatacccttcagcaacttatggaggtttttaagttcgatactatatcggaaaagacctccgaccaaatacacttcttctttgcaaaattgaactgccgcctgtacaggaaagctaacaagagttcgaaactcgtgagcgccaaccgactctttggcgataaatccctgacctttaatgagacataccaggacatatccgagctagtgtacggagccaagctgcaacccctcgattttaaggaaaacgccgagcagagtcgggcagcgattaataaatgggtgtctaataagactgaggggcgcatcactgatgtgattccaagtgaggccatcaacgaactgacggtgctggtactcgtcaatacaatttattttaagggcctatggaaatcaaagttcagtccggagaacacacggaaggagcttttctacaaggcagatggcgaatcttgctctgctagtatgatgtaccaggaaggaaagttcagataccggcgagtggcggaaggcacgcaggttcttgaactgcctttcaagggggacgatattaccatggttctcattctgcctaaaccagaaaagtcactcgccaaagtggaaaaagagctcacccctgaagtattgcaggagtggcttgacgaattagaggagatgatgctcgtagttcacatgcctagattccgaatagaggatggcttctccctcaaggagcagttacaggacatggggctggtggacttattttcccccgaaaaatccaagcttcctggcatagtggctgagggccgggatgacctgtacgttagtgacgcgttccataaggcattcctggaagtaaatgaggagggatcagaagcggccgcttccacggccgtggtcatagcaggccgctcgcttaacccaaatcgagtgacatttaaggccaataggccattcttagtgttcattagagaggtgcccttgaacactattatctttatgggcagggtcgcgaatccatgcgtgaag

SEQ ID NO: 18812 - DNA, 1392 bp, synthetic construct
  misc_feature 1..1392: note = source = /note="Description of Artificial Sequence: Synthetic coding sequence"
  source 1..1392: mol_type = other DNA
atgtactcgaatgtgattggaaccgttacgtctggaaagcggaaggtctaccttttgtcactgcttcttatcggcttttgggactgtgtcacctgtcatggatcccccgtggatatttgcaccgctaagccacgtgacataccaatgaaccctatgtgcatctataggtcccccgaaaagaaggcaaccgaggatgagggtagtgaacaaaagattcctgaagccacgaaccgtcgcgtatgggagctctcgaaggcaaatagcagatttgcaactaccttctaccagcacttggcagatagtaagaatgacaacgataacatttttctgtcacccctctcaatttccaccgcctttgcaatgaccaaacttggcgcgtgtaatgacactctgcagcaactgatggaggttttcaagtttgataccataagcgaaaaaactagcgatcagatccatttcttctttgcaaaactgaactgtcggctctacagaaaagctaataagtcgagcaaacttgtgtccgcgaatcgcctgtttggtgacaagtcactgacgtttaacgaaacttatcaagacatcagcgagctcgtctacggagcaaaactgcaaccacttgacttcaaagagaacgcagaacagtcgcgcgcagcaattaacaagtgggtgagtaacaaaactgaaggtcgcatcactgatgtcattccttcagaagcgattaatgagcttaccgtcctggtgcttgtcaacactatctactttaaaggattgtggaaaagcaagttttcgccagaaaacaccaggaaggaacttttctacaaggccgatggtgaatcatgctcggcatccatgatgtaccaagaggggaagttcagatacagacgagtcgccgaagggacgcaggtgctggaactgcctttcaaaggtgatgatatcaccatggtcctcattcttcctaagccggagaagagtctggccaaggtggagaaggagctgaccccagaagtactgcaggaatggcttgacgagctggaagaaatgatgctcgtggtgcatatgcctcggttccgtattgaagatggattctccctgaaggaacaactgcaagatatgggactcgtggatcttttttccccggaaaagtcaaagctcccagggatcgtggccgagggaagggacgatctttacgtgagcgacgcctttcacaaagcatttcttgaagtgaacgaagaggggtcggaagctgcggcatcgacggcagtggtgattgcgggccggtccctcaatcccaatagggttactttcaaggccaacagacctttccttgtgtttattcgcgaagttccactcaacaccatcatattcatgggcagagtcgcaaacccttgtgtgaag

SEQ ID NO: 18813 - DNA, 1392 bp, synthetic construct
  misc_feature 1..1392: note = source = /note="Description of Artificial Sequence: Synthetic coding sequence"
  source 1..1392: mol_type = other DNA
atgtactccaacgtcattggtaccgtcacgtccggaaaaagaaaagtttacctgctttcgctcctcttgataggtttttgggattgcgtgacctgtcatggttcacctgtggatatctgcaccgcaaagccaagagatattcctatgaatccaatgtgcatttaccggagccctgagaaaaaagccactgaggatgaaggctccgagcaaaagattcccgaggctaccaacagacgagtgtgggaacttagcaaggcgaactcgcggttcgcaaccaccttttaccaacatctggcggactccaaaaacgacaatgacaacatatttctgagcccccttagcatttccactgcattcgcgatgaccaaactgggcgcctgtaatgacactcttcaacaactgatggaagtgttcaagtttgatactatatcggaaaagacctcagaccagatccatttcttttttgcaaaacttaattgtagactctacagaaaggcaaataagtcctccaagctggtgtccgctaacaggcttttcggcgataagagcttgacctttaacgagacttatcaggatatctcagaattggtctatggagcaaagctccaacctcttgactttaaggaaaacgccgaacaatccagagccgcaatcaataagtgggtcagcaacaagactgaaggaaggatcaccgatgtgattccatcggaggcaatcaacgagctgacggtccttgtgcttgtgaatactatatacttcaaggggttgtggaagagcaagttctcgcctgaaaacacgcgcaaggagttgttttacaaggcggatggcgaatcatgctcagcatcgatgatgtaccaggaagggaagttccgttacaggcgggtcgcagaggggactcaggtccttgaactgccctttaaaggtgacgatataactatggtcctgattcttcccaagccagaaaagtcgcttgcgaaggtggaaaaagaactgaccccagaagtcctgcaagaatggctggacgaattggaagaaatgatgctggtggtccatatgccgagatttagaatcgaagatggctttagcctgaaagaacagctgcaagatatgggtcttgtcgaccttttttcaccagagaaatctaagctgcctggtatcgtagcagagggtcgcgacgacttgtacgtgtcggacgcatttcataaggcgtttcttgaagttaatgaagagggttccgaagcagcagcatcaaccgctgtggtgatcgcaggtcgctcacttaaccctaatcgggtcacttttaaggcaaaccgccctttcctggtgtttattcgggaagtgcccctgaatacgatcatctttatgggaagggttgcaaatccttgcgttaaa

SEQ ID NO: 18814 - DNA, 1392 bp, synthetic construct
  misc_feature 1..1392: note = source = /note="Description of Artificial Sequence: Synthetic coding sequence"
  source 1..1392: mol_type = other DNA
atgtactccaatgttattggcactgttacttctggaaagaggaaggtttatttgctttctcttctcctcattggattttgggattgcgtgacctgtcacggtagtcctgtagatatctgcacagccaagccgcgtgatattccaatgaacccaatgtgtatatatcgcagccctgagaagaaggccacagaagatgaaggttcagagcaaaagattccagaggcaactaatcgcagggtttgggagctttctaaggcaaattcccgtttcgctactacattttatcagcacctcgctgactcaaagaatgacaacgataacatatttctgagccctttaagtatctctactgcctttgccatgactaagctaggtgcctgcaacgacacgcttcaacagctaatggaggtttttaagttcgatactatttcagagaaaacctcagatcaaattcatttcttctttgcaaagttgaactgcaggctgtacagaaaggcgaacaagagttcaaagctggtttcagctaatcgtctatttggtgataaatctctcactttcaacgaaacgtatcaagatatatccgaattggtttacggagcaaagctgcagcctctggattttaaggaaaatgccgaacagtcaagggccgctataaacaaatgggttagcaacaaaacggaaggtaggataactgacgttatcccttcagaagctataaatgagttgactgttttggtcctggttaacacaatttatttcaaaggtctttggaagtccaagttttctccggagaatactcgtaaggagcttttctataaagccgacggtgagtcctgctcagcttccatgatgtaccaagagggtaagttcagatatcgcagggtcgctgaagggactcaggtgcttgagttaccttttaagggagacgatatcaccatggttctgatcctcccaaagcctgagaaaagccttgctaaagtggaaaaagaactaacccctgaggttcttcaggagtggctcgatgaacttgaagaaatgatgctcgttgtgcatatgcccagattcaggatcgaggatggattctccctgaaggaacaattgcaggatatgggtttggtggacctcttcagtcctgagaaatctaagttgccaggaatagtggccgagggtcgagatgacttgtatgtgagtgatgcctttcacaaagctttcttggaggtgaacgaggagggtagcgaagcagcggccagtacggcagtggtaatcgctggtcgttctctgaatcctaaccgtgttacgttcaaagccaaccgaccgtttttggtttttatcagggaagtacctcttaacactattattttcatgggtagagttgcgaatccttgtgtcaag

SEQ ID NO: 18815 - DNA, 1392 bp, synthetic construct
  misc_feature 1..1392: note = source = /note="Description of Artificial Sequence: Synthetic coding sequence"
  source 1..1392: mol_type = other DNA
atgtactcaaacgtcatcggtaccgtcacttccggtaaacgaaaggtgtaccttctgtcgcttctgcttatcggtttctgggactgtgtgacctgccatggatccccggtcgatatctgcactgcaaagcctagagacatacccatgaatccaatgtgtatttacagatctcccgaaaagaaagcgaccgaagatgagggaagcgagcagaagattccagaagcaactaatcgcagggtgtgggaactctccaaggcaaactcccggtttgcaaccactttctaccaacatcttgccgactccaaaaacgataacgataacattttcttgtcgcctctcagcatttcaaccgcctttgcaatgaccaaactcggcgcatgcaacgatacgcttcagcagctcatggaggtgtttaagttcgatactattagtgaaaaaaccagcgaccagattcatttcttttttgcaaaactcaattgtcggctctatcggaaggcaaacaagagctcgaagctggtgtctgcaaacagactttttggtgataagtcccttacctttaacgaaacttaccaggatataagcgagctggtgtacggagccaaacttcaaccgctcgacttcaaggaaaatgcagagcagtctagggcggcaatcaacaagtgggtgtcaaacaagaccgagggacgcatcactgatgtgatcccctccgaggctatcaatgaacttactgtgctcgtgctggttaacactatctactttaagggtttgtggaagagtaagttcagcccagaaaatactagaaaggaattgttttacaaggcagacggagaatcatgttcggccagcatgatgtaccaagaagggaagtttcggtacagacgtgtggcggagggcacccaggtccttgaactgccctttaagggagatgacataaccatggtgctgatccttcccaagccagaaaaaagcctggcaaaggtcgagaaggaattgaccccagaagtgctgcaggaatggttggatgaacttgaagaaatgatgctcgtggtgcatatgcctcgctttagaatagaagatggatttagcctgaaggaacaactgcaggacatgggactcgtcgatcttttctcacctgagaaatcgaagctgcccggtattgtagcagaaggacgggatgatctgtatgtctcagatgcatttcataaggcattcctggaagtgaacgaggagggctccgaggctgcagcgtcgaccgcagtggtgatagcaggacgctcacttaatcccaatagagtcactttcaaggcgaatagaccctttctcgtctttattcgcgaggtgccactgaacactatcatctttatggggagggtggccaacccatgtgtcaaa

SEQ ID NO: 18816 - DNA, 1392 bp, synthetic construct
  misc_feature 1..1392: note = source = /note="Description of Artificial Sequence: Synthetic coding sequence"
  source 1..1392: mol_type = other DNA
atgtatagcaacgtaatcggaaccgtgacttctggaaagagaaaagtctacctgctctccctgctgcttattggtttttgggactgtgtgacgtgccacggttcccccgtagacatatgcacagcaaaaccacgcgatataccgatgaacccaatgtgtatatataggagtcctgagaagaaagctaccgaggacgaaggtagcgagcagaaaatccccgaggcaacgaatcgcagggtgtgggagctctctaaagccaattctaggttcgcaaccactttttatcaacacctggcggattccaaaaatgacaacgacaatatctttctttcccctttgtctatctcaactgcctttgccatgacaaagctcggagcttgtaatgatacgcttcagcaacttatggaggtattcaaatttgatactatctccgagaagactagcgatcagattcacttcttcttcgctaaacttaattgtcgcctctacaggaaggcaaacaagagcagcaaacttgtctctgccaacaggcttttcggcgataagtccctgacttttaatgagacttaccaagacattagtgagcttgtgtacggcgcgaagctccagccactggacttcaaggaaaacgctgagcagtcaagagcggctatcaataaatgggttagtaacaagaccgagggaaggattaccgatgttatcccctccgaagctattaacgagctcaccgtgctggtgctggttaacaccatctattttaagggtctttggaagtcaaagttctctcccgagaatactagaaaggaattgttctacaaagcagacggcgagtcatgtagcgccagtatgatgtaccaagagggaaagttcaggtacaggcgcgtcgccgagggtactcaagtcttggagcttccattcaagggcgacgacatcactatggtactgatcctccccaagcctgagaagtccctggctaaagtcgagaaggagctgacgcccgaggttctccaggagtggcttgatgaattggaggagatgatgctcgtcgtacacatgcccagatttcgcatcgaggatggattctcacttaaggaacagctgcaggacatgggactggtagacttgttcagccccgagaaatcaaagcttcctggaattgttgctgaaggtagggacgatctctacgtttcagacgcttttcacaaggccttcctcgaggtaaacgaggagggatcagaggctgcggcttccacggccgtggtgatcgcgggaagatcccttaaccccaacagggtaacgttcaaagcaaatagacccttccttgtgttcatcagagaggtccccttgaatactatcatattcatgggccgcgtggcaaatccatgcgtaaag

SEQ ID NO: 18817 - DNA, 1392 bp, synthetic construct
  misc_feature 1..1392: note = source = /note="Description of Artificial Sequence: Synthetic coding sequence"
  source 1..1392: mol_type = other DNA
atgtactcgaatgtgatcggcactgtcaccagcggaaagagaaaagtgtacctgctctcgctgctcttgatcggcttttgggactgtgtgacctgccacggatcgccggtagatatttgcactgcaaagcctagagatatccctatgaatcctatgtgcatctaccgctcacccgaaaagaaggcgaccgaggacgaaggatccgagcaaaagatcccagaggcaaccaacaggcgggtgtgggaactcagcaaggcgaactcgaggtttgcaactactttctaccaacacctggccgattccaagaacgacaacgacaatatcttcctctcgcccctctcaatcagcacggcctttgcaatgaccaagttgggcgcttgcaatgacactctgcagcaactgatggaagtgttcaagttcgacactatctccgagaaaactagcgaccaaattcacttcttctttgccaagttgaactgtaggctgtaccgaaaagcgaataagtcctccaagctggtgtcagccaatagactctttggagataaaagcctgaccttcaacgagacttaccaggacatctcggagctggtgtacggcgctaaactccaaccattggacttcaaagaaaatgccgaacagagcagggcggccattaacaagtgggtgtccaacaagactgagggccgcatcactgatgtgatcccgtcagaggcaatcaatgaactcactgtgttggtcctggttaacaccatctacttcaaaggcttgtggaagtcgaagttctcgccggaaaacactagaaaagagctgttctataaggccgatggagagtcctgcagcgcgtcgatgatgtaccaggaaggaaagttccgctataggagggttgccgaaggaacccaggtcctggaactgccgtttaaaggtgacgatatcaccatggtgctgatccttccaaagccggagaaatccctggccaaggtggaaaaggagctgaccccagaggtcctgcaggaatggcttgatgaactcgaggagatgatgcttgtcgtccatatgccgcgcttccggatcgaggacggcttctccctgaaggagcagctgcaggatatgggcctggtggacctgtttagtccagagaagtcgaagctgccgggcatagtggcggaagggcgggacgatctgtacgtctccgacgcctttcataaggctttcctggaagttaacgaagagggatcggaagccgcggcctcaactgcggtcgtaattgccgggcgctcgctgaacccaaaccgagtgacgttcaaggccaacaggccttttctggtgtttatcagagaggtgcctcttaacactatcatcttcatggggcgcgtcgctaatccgtgcgtcaag

SEQ ID NO: 18818 - DNA, 1392 bp, synthetic construct
  misc_feature 1..1392: note = source = /note="Description of Artificial Sequence: Synthetic coding sequence"
  source 1..1392: mol_type = other DNA
atgtacagcaacgtaatcggtaccgtgacctcaggaaagcggaaagtgtacctgctgtccctgctcctgatcggattttgggattgcgtcacttgccatggcagcccggtcgatatctgcactgctaaaccgcgggacatcccaatgaacccgatgtgcatctaccgttctccggaaaagaaggcgactgaggacgagggttccgaacaaaagattccagaagccactaacaggagagtgtgggaactctccaaggctaacagcagattcgcaaccaccttctatcaacacctggcagactccaagaacgacaacgataacatcttcctgagccccctgtcgatctcgaccgcctttgcgatgactaagctcggggcatgcaacgacacgctgcaacaactgatggaagtgttcaagtttgacaccatctccgaaaagacgtccgaccaaatccacttcttttttgcgaaactgaactgtcggctctacagaaaggccaacaaatcctccaagttggtcagtgccaatcgcctctttggcgataagtccttgactttcaatgagacgtaccaggacatctcggaactcgtctacggagccaaacttcaaccacttgactttaaggagaacgcagagcagtcccgcgccgccatcaacaaatgggtttcgaacaagactgagggtcgcatcactgacgtgatcccttcggaggcgatcaacgaactgacggtgctggtgctcgtgaacaccatctacttcaagggactctggaaaagcaagttctcgcccgaaaatactcgcaaagagctcttctacaaagcggacggagagtcatgttcggcttcgatgatgtaccaggaaggaaagttcagataccgccgcgtggctgagggtacccaggtgctcgagctccctttcaaaggagatgatatcactatggtgctgatcctgccgaagcctgagaagtccttggccaaagtggaaaaggagttgactccggaggtgctgcaggaatggttggatgaactcgaagaaatgatgctggtggtgcacatgccacggttccggattgaagatggattttccttgaaagagcaacttcaggacatgggactcgtggacctgttttcgccggagaagtctaagctgccgggaatcgtggcggaaggcagagacgatctctacgtgagcgacgcttttcataaggcgttcctggaagtgaacgaagaaggatcggaagccgccgcatcgactgccgtggtcatcgcgggacggtccctcaacccaaatcgcgtgaccttcaaggcaaaccgcccatttctcgtgtttatcagagaagtgccactgaacaccatcatcttcatgggaagggtcgcaaacccgtgcgttaag

SEQ ID NO: 18819 - DNA, 1392 bp, synthetic construct
  misc_feature 1..1392: note = source = /note="Description of Artificial Sequence: Synthetic coding sequence"
  source 1..1392: mol_type = other DNA
atgtattctaatgtaattggaactgttacatctggaaaacgtaaagtttatttattatctcttttgttaattggattttgggattgtgttacatgtcatggatcaccagttgatatttgtactgctaaaccaagagatattcctatgaaccctatgtgtatatatagatcacctgaaaagaaagcaactgaagatgagggttcagaacaaaaaattccagaagcaactaataggagagtatgggagttatctaaagctaattccagatttgctactacattctatcaacacttagcagattccaaaaatgataacgataatattttcttatcaccactttctatttctactgcatttgcaatgacaaagttaggagcatgtaatgatactcttcaacaacttatggaagtttttaaatttgatacaatttcagaaaaaacaagtgatcaaattcattttttctttgctaaattaaattgtagattatatagaaaagctaataaaagttctaaacttgttagtgcaaatagattatttggtgataaaagtttaacttttaatgagacttatcaagatatttcagaattagtatatggagcaaaacttcaaccacttgattttaaagagaatgctgaacaatcaagagcagcaattaataagtgggtttctaataaaacagaaggaagaattactgatgttataccaagtgaggctattaatgaacttactgttcttgttttagttaatactatttacttcaaaggtttatggaagagtaagtttagcccagaaaatactagaaaagaacttttttataaagcagatggtgaatcttgttccgcatcaatgatgtatcaagaaggaaaatttagatatagaagagtagcagaaggaactcaagtcttggaactaccatttaaaggagatgatattacaatggtattaattttaccaaagccagaaaaatctcttgcaaaagtggaaaaagaattaactccagaagttcttcaagaatggttagatgaattagaagaaatgatgttagtggttcatatgccaagatttagaattgaagatggatttagtttaaaagagcaattacaagacatgggactagttgatttattttcaccagaaaaatcaaaacttccaggaattgttgcagaagggagagatgatttgtatgtatcagatgcattccataaggcatttttagaagttaatgaagagggatctgaggctgcagcatctactgcagtagttatagctggaagatctttaaatcctaatcgagttacatttaaagctaatagaccatttttagtttttattagagaagttccattaaatacaattattttcatgggtagagtagcaaacccatgtgtaaaa

SEQ ID NO: 18820 - DNA, 1392 bp, synthetic construct
  misc_feature 1..1392: note = source = /note="Description of Artificial Sequence: Synthetic coding sequence"
  source 1..1392: mol_type = other DNA
atgtactccaacgtgatcggaactgtcacttcaggcaagcgcaaggtctacctcttgagcctcctgttgattggtttctgggactgcgtgacctgccacggatcccccgtggacatttgcactgcgaaaccgcgcgatattccaatgaacccaatgtgcatctaccgctccccggaaaagaaagcgaccgaggacgagggctcagaacaaaagatccctgaagctactaacagaagagtctgggaactctcaaaagccaacagccgattcgcgactacgttctaccagcacctcgcagacagcaagaatgacaatgacaacatctttctctcgccgctttcgatttccaccgcctttgccatgaccaaactcggcgcgtgcaacgatactcttcagcaactgatggaggtgttcaagtttgacaccatctcagaaaagactagcgatcagatccacttcttcttcgccaagctgaactgccggctgtaccgcaaagccaacaagtcctcgaagctggtgtcagccaaccgcctgttcggagacaagagcttgacttttaacgaaacctatcaggatatctcagagttggtttatggagccaaactgcagcccctggacttcaaggaaaacgcagaacagtcacgcgcggccatcaataagtgggtcagcaacaagaccgaaggacggatcactgacgtgatcccgtccgaggccatcaatgaactgaccgtgctcgtgctcgtgaatactatctacttcaagggcttgtggaagagcaagttcagcccggagaatacccggaaagaactcttttacaaggctgacggggaatcatgttcagcgtccatgatgtaccaggagggaaagtttagatatagacgggtggcagaagggacgcaagtgttggaactgccattcaagggtgacgacattaccatggtcctcatcctcccaaagccggagaaatcattggccaaggtggagaaggagctcacccctgaagtcctgcaggaatggttggacgaactggaggaaatgatgcttgtggttcatatgccgagattccgcatcgaggatggattctcacttaaagaacagcttcaagacatgggcctggtggacctcttctctccagaaaaatccaaactcccaggcatcgtcgccgaggggcgcgacgatctgtacgtgtcagatgcgttccacaaggcatttctggaagtgaacgaagaaggatccgaagcagcggcctcaaccgctgtggtcattgcaggccggtcactgaaccctaaccgcgttactttcaaggccaatcggcccttcctggtgttcattcgggaagtgccactgaacacgatcatctttatgggaagagtggccaacccgtgcgtcaag

SEQ ID NO: 18821 - DNA, 1392 bp, synthetic construct
  misc_feature 1..1392: note = source = /note="Description of Artificial Sequence: Synthetic coding sequence"
  source 1..1392: mol_type = other DNA
atgtattcaaacgtgatcggcacagttactagcggtaaacggaaagtttatctgttaagcttgctcctgattggattctgggactgcgtcacatgtcacggaagtcctgtggatatctgtactgccaaaccccgggacattccaatgaatcccatgtgtatctaccgctccccagagaagaaagccacggaagacgagggctctgaacagaaaattccggaagccactaatagacgggtgtgggagctctctaaagccaactcccgctttgccacaaccttttaccaacaccttgctgactctaaaaatgacaatgataacatcttcctgagccctctctcaatttctactgcctttgcaatgacaaaactaggcgcatgcaatgacaccctgcagcagctcatggaagttttcaagttcgatactatatccgaaaaaacgtccgaccagatccatttcttctttgccaaattgaattgtagattgtatcggaaagccaataaatcctccaagctggtctcggctaatcgtctgtttggcgataaatcactgacattcaatgaaacctaccaagacatttccgaactggtctacggggccaagctgcagccactggactttaaggagaatgcggaacaatcccgggccgctatcaacaagtgggtttcaaacaaaacagaaggaagaattaccgatgtgataccctccgaagccattaacgagctgaccgtactcgttctggtgaacacaatttattttaagggtctatggaaatctaagttttccccagagaatacgcggaaagagctgttctacaaggctgacggggagtcctgttcagcctccatgatgtaccaggaagggaagttccgttatcgaagagtcgctgaagggacccaagttctggagttgccatttaagggcgatgatatcacaatggtgctgatactgccaaagccggagaagtctctcgctaaagtcgagaaggagcttacaccggaggtcctacaggagtggttggacgaactcgaagagatgatgctcgtggtacacatgcccagattcagaatcgaagatgggttttctttaaaggagcagcttcaggacatgggcttggtggaccttttttctccggagaaatcaaagctgccagggatcgtcgccgaagggagggatgacctgtacgtcagtgatgccttccacaaagcattcttggaggttaacgaggagggatccgaagcggccgcgtcaacagccgtagtgattgccggaaggtccctaaaccccaatagagtgacatttaaggctaatcgcccatttctggtctttatacgggaagtgcctcttaatactattattttcatgggacgagttgcaaatccttgcgtaaag

SEQ ID NO: 18822 - DNA, 1392 bp, synthetic construct
  misc_feature 1..1392: note = source = /note="Description of Artificial Sequence: Synthetic coding sequence"
  source 1..1392: mol_type = other DNA
atgtacagcaacgtcatcgggaccgtgacttccgggaaaaggaaggtgtacttattaagccttttgctcatcggtttttgggactgcgtcacctgccacggatccccagtggacatttgcaccgccaagccgcgggatatccctatgaatcccatgtgtatatatcggagtcccgaaaagaaggccacagaggatgaaggttctgaacagaagatcccagaagctacaaatcgcagagtatgggagctatccaaagcaaatagccgctttgcaactaccttctaccaacatctcgccgactccaaaaatgacaacgacaatattttccttagcccgttgtctatcagtactgcgtttgccatgacaaaactgggggcttgcaacgataccctgcaacagctcatggaagtgtttaaattcgatacaatttcagagaaaacctcagaccagatccatttctttttcgccaaacttaattgcaggctttatcgcaaagctaataaaagttcgaagctcgttagcgccaatcggctgttcggggacaaatccttgacgttcaacgagacctatcaggacattagtgagctggtatacggggcaaaactgcaacccctggacttcaaggaaaacgccgaacagtcccgcgcagctatcaacaagtgggtgagtaacaaaacggaggggcgcattaccgacgtgatccccagcgaagccataaatgaactgaccgtgctggtccttgtaaacacaatctacttcaaagggctgtggaagtccaagttttcccctgagaatactcgcaaagaactgttttacaaggctgacggtgagtcatgctctgcatctatgatgtaccaagagggaaagttccgctacaggcgcgtcgccgagggcacccaagtgctggaattgccatttaaaggggatgatattacaatggtgttgattctccccaagcccgaaaagagccttgcaaaggtggagaaagaactgactcccgaagtactccaggagtggctggacgagctcgaagagatgatgttggtagttcatatgcctcggttccgaattgaggacgggtttagccttaaggagcagttgcaggatatgggacttgtggatctgttctcccccgagaagtccaagttacccgggattgttgctgaggggcgggacgacctgtacgttagcgacgcattccataaagctttccttgaggtcaatgaggaaggctcggaggccgctgcatctactgcagtcgttattgccgggcggagcctgaatcccaatagagtgacttttaaggccaatcggccctttctagtgtttatccgagaagtaccactgaataccataattttcatgggacgggtggcgaacccctgtgtaaag

SEQ ID NO: 18823 - DNA, 1392 bp, synthetic construct
  misc_feature 1..1392: note = source = /note="Description of Artificial Sequence: Synthetic coding sequence"
  source 1..1392: mol_type = other DNA
atgtactcaaatgtgatcggaaccgtgacgtcgggaaagcgcaaagtgtacctgctttcattgctgctcatcggattttgggactgcgtgacctgccacgggtcaccggtcgacatctgcacggctaaaccccgagacatcccaatgaacccgatgtgcatctaccggtcaccagagaagaaagcaacggaagatgaaggcagcgagcagaaaatcccggaagcaactaatcgacgcgtctgggaactgtccaaagccaacagcagattcgcaacgaccttttaccagcacctcgcagactcaaagaatgacaatgataacatcttcctctcgccgttgagcatttccactgcgttcgcaatgaccaagctcggggcgtgtaatgatactctgcagcaactgatggaggtgttcaagtttgacaccatctccgaaaagacctcggaccaaatccactttttctttgctaaactcaactgtagactgtatcgcaaagccaacaagtcgtccaagctggtgtccgcaaatcggctcttcggggacaagtcgctgactttcaatgaaacctaccaagacatctccgaactggtctatggtgccaagctccagccgctggacttcaaagagaacgcggaacagagccgcgcagctataaacaagtgggtgtcgaacaagaccgagggacgcatcaccgacgtgattccttcggaagccatcaacgagctcactgtgctcgtgctcgtcaatactatctactttaagggactttggaagtcgaagttctccccggagaataccaggaaagaactcttttacaaagcagacggcgaatcgtgtagcgcgtccatgatgtaccaggaaggcaagtttaggtaccgcagagtggccgaaggaacccaggtcctggagctccccttcaagggggacgatatcactatggtgctgatacttccgaagccggaaaagagccttgcaaaggtggaaaaggagctgacccccgaagttcttcaggagtggctggatgaactggaagaaatgatgctggtggtccatatgcctcgcttcaggatcgaagatggattctccctgaaggaacagctgcaagatatgggcctggtggacttgttctcacctgagaagtctaaactgcccggaattgtcgccgaagggcgagatgacctgtacgtcagcgatgcgtttcacaaagccttcctggaagtgaacgaagaaggttcggaggccgcggcttctacggctgtggttatcgccggaagatccctgaacccaaatcgtgtgaccttcaaggccaaccgaccattcctggttttcatcagggaggtgcctctgaacactattatctttatggggcgtgtcgcgaatccatgcgtgaag

SEQ ID NO: 18824 - DNA, 1392 bp, synthetic construct
  misc_feature 1..1392: note = source = /note="Description of Artificial Sequence: Synthetic coding sequence"
  source 1..1392: mol_type = other DNA
atgtactcaaacgtcattggcacagttacctccggtaaacgcaaggtctatctgttgagcctgctgctgattggcttttgggattgcgtgacctgccacggtagcccggtcgatatctgcaccgctaaaccgcgtgacatcccgatgaacccaatgtgtatctacaggagcccggagaagaaggcaactgaggatgagggttctgagcaaaaaatacctgaagcgacgaatcgccgcgtgtgggagctgtccaaggctaacagccgctttgccacgactttttaccagcacctggcggattccaagaacgataatgacaatattttcctgtcccctctgtccatcagtaccgcatttgcgatgacaaagctcggcgcttgtaacgataccctgcagcaactgatggaggtgtttaaattcgataccattagcgaaaaaacctccgaccagatccatttcttttttgctaagctgaactgtcgtttgtacagaaaagccaacaagagctccaagctggtgagcgcgaaccgcctgttcggtgacaagagcctgacctttaatgaaacttaccaggacatctcagaactggtttatggcgcaaagctgcaaccactagatttcaaggagaacgccgagcagtcccgcgcggccataaataaatgggttagcaataagactgaaggacgcatcacggatgtgattccgtctgaggcaataaacgagttgaccgtgctggttctcgtgaatactatctacttcaaaggcctttggaaaagcaaattctctccagaaaacacccgtaaagagctgttctataaagcggatggcgaatcttgcagcgccagcatgatgtaccaggaaggtaaattccggtatagacgcgtggcggagggcacgcaggtgctggagttaccattcaagggcgatgatatcaccatggttctgattctgccgaagccggagaaaagtttagcaaaagtggagaaagaactgaccccagaagtgttacaggaatggttggacgagctggaggagatgatgctggtggtccacatgccccgtttccgtattgaggacggcttcagcctcaaggagcaattgcaagacatgggcctggttgacctgttcagcccggagaaaagcaagctgccaggtatcgtcgcggagggtcgcgacgatctttatgttagcgatgcgtttcacaaggcgttcctggaggtgaacgaggagggtagcgaggcggctgcgtctacggcggtcgtcattgctggtcgctcccttaacccaaaccgtgtcacctttaaagcgaacaggcctttcctggtgttcatccgcgaagtacctctgaatactatcattttcatgggtcgcgttgcaaatccctgtgtcaag

SEQ ID NO: 18825 - DNA, 1392 bp, synthetic construct
  misc_feature 1..1392: note = source = /note="Description of Artificial Sequence: Synthetic coding sequence"
  source 1..1392: mol_type = other DNA
atgtatagcaatgtgataggaaccgtgaccagcggaaagaggaaagtctacctgctgtcgttgctgctcatcggcttttgggactgcgtcacctgccacgggtccccagtggatatctgtaccgcaaagcctagggatattccgatgaatcctatgtgtatctacagatcccctgagaaaaaagcaaccgaagatgagggtagcgaacaaaagattccggaagctactaacagaagagtgtgggaactgtccaaggctaattcacggtttgccactaccttttatcagcatctggcagattcgaagaatgataatgacaacatctttctgtcgccactctcgatctcaactgccttcgccatgacgaagctgggcgcatgtaatgacaccctgcaacagcttatggaagtgtttaagtttgatactataagcgaaaaaacctcagatcagattcatttcttcttcgcaaaacttaactgcagactctaccgcaaagcaaacaagtcaagcaaacttgtgtccgccaaccgactgtttggagacaagtccctgaccttcaatgaaacgtaccaggatattagtgaacttgtgtatggagcaaagctgcagccacttgatttcaaagagaacgctgaacagtcacgcgcagccatcaataagtgggtgtcgaacaagactgaaggtcgaattaccgacgtcattccctccgaagcgatcaatgagttgaccgtgttggtgttggttaacacgatatacttcaagggcctttggaagtccaagttctcgcccgaaaatactcgaaaggagctcttctacaaggccgatggcgagtcgtgtagcgcgtccatgatgtaccaagagggaaagttcagatacagaagggtcgcagaggggacccaagtgttggaactccctttcaagggcgacgatattacgatggtcctgattcttccaaagcctgaaaagtctctggcgaaagtggagaaagaacttactcctgaagtgcttcaggaatggcttgacgaactcgaggagatgatgctcgtcgtgcatatgccaagatttcggattgaggatggattcagtctgaaagaacaactccaagatatgggattggtagatctgttttcgcccgaaaagtcgaagctgcctggtattgtggctgaaggaagagatgacctgtacgtctctgatgcctttcacaaagcctttcttgaggtgaacgaggaaggctccgaggcagctgcatccactgctgtggtaattgcgggacgcagcctcaacccaaacagagttacctttaaagcgaaccgcccttttctggtctttatccgcgaggtccctcttaatacgatcattttcatgggccgtgtcgccaacccctgcgtgaaa

SEQ ID NO: 18826 - DNA, 1392 bp, synthetic construct
  misc_feature 1..1392: note = source = /note="Description of Artificial Sequence: Synthetic coding sequence"
  source 1..1392: mol_type = other DNA
atgtatagcaacgtcatcgggaccgtcacaagtggtaagaggaaagtgtatctcctttccttgctgttaatcggattttgggattgcgtcacctgccacggatctcccgtggacatttgcactgccaagccaagagatatcccgatgaaccctatgtgtatttaccggtccccagagaagaaagccacggaagacgagggctccgagcagaaaatcccggaagctaccaaccgtagagtgtgggagctctctaaggcgaattcacggttcgccacaacattttaccagcatctcgcagattctaagaacgacaacgacaatatattcctttcccctctgtcaatcagtacagccttcgctatgacgaagctcggtgcatgtaacgacacgctacagcaattgatggaagtgtttaaatttgacactatctccgaaaaaaccagtgaccagatccactttttttttgcaaaactgaattgcaggctatacaggaaggccaacaagtctagcaagctggtttcggccaacaggctgttcggcgacaagtcattgacatttaatgagacctaccaggatatcagcgaattggtatacggggccaagttgcaaccattggattttaaggaaaatgccgaacagagtcgagctgctattaataaatgggtgtcaaataagactgagggtcgaatcactgacgttatcccaagcgaagccataaatgagctgacagtcctggttctcgtaaataccatctacttcaaaggcctttggaaatctaagtttagcccggagaacactaggaaggagctattctataaagccgatggcgagtcatgcagcgcctcgatgatgtatcaggaaggtaaattcaggtacaggagggtggcagagggcactcaggtactggagcttcccttcaaaggcgacgacatcactatggttctcatactgccaaagcctgagaaatcgctggccaaagtggaaaaggagctgactccagaagtgcttcaggagtggctcgacgaattagaagaaatgatgctggtggttcacatgccgcggttcaggatagaagatggcttctccttaaaagaacaactgcaggacatgggactcgttgacttgttcagccccgagaagtctaaattaccgggcatagtagccgaaggccgggacgacctgtacgttagcgacgccttccataaggcctttctggaggtgaacgaggagggatccgaggctgctgcatccaccgcagtggtcattgcgggaagatccctgaaccctaatcgcgttacgttcaaggcgaatcgcccgttcctggtcttcattcgtgaagtgcccctgaacacaattatctttatgggacgcgtggctaacccatgtgtgaaa

SEQ ID NO: 18827 - DNA, 1392 bp, synthetic construct
  misc_feature 1..1392: note = source = /note="Description of Artificial Sequence: Synthetic coding sequence"
  source 1..1392: mol_type = other DNA
atgtatagcaacgttatcggcacagtaaccagcgggaaaaggaaagtctatctgttgagcctgctcctaataggattctgggactgcgtaacttgtcatgggtccccagtggatatctgcacagccaaaccccgtgacattcctatgaacccgatgtgtatatatagaagcccagaaaagaaggctaccgaagacgaaggcagtgagcagaagattcccgaggctacaaaccggagagtctgggagctttctaaggccaactctcgattcgccaccacattttatcagcaccttgcggactctaaaaacgataatgacaatatatttctctcacctcttagcatttcgacggccttcgcaatgacgaaattgggagcctgtaacgatacccttcaacagctcatggaggtcttcaagttcgacaccatctctgaaaagacatctgaccagattcacttttttttcgcaaagttgaactgcagattatataggaaagccaacaaatctagtaagttagtctcagcaaataggctctttggggataagtctctgaccttcaatgagacctatcaagacattagcgaactcgtgtacggcgcaaaacttcagcctctggactttaaagagaatgctgagcagagccgggccgcaatcaataaatgggtgtcaaataaaacagagggacgtatcacagacgtgattcccagcgaggccattaacgagctgaccgtgctcgtgctagtgaacacaatctactttaagggcctgtggaagtctaagttctcccccgaaaatactcggaaagagttattctataaggccgatggcgagagctgtagcgctagcatgatgtatcaggaagggaagtttagatatcggcgcgtcgcagaagggacacaggtgctggagctccccttcaagggtgacgatattactatggtcctcatcctaccgaagcctgagaagtctttagccaaggtggagaaagaactgactcctgaagtgctccaagagtggctggacgagcttgaagaaatgatgcttgtggtgcatatgccgcggttcaggatcgaagacgggttctcactgaaagagcagctgcaggacatgggcctggttgacctgttcagtcccgaaaagtctaagctacctggcattgtagccgaaggccgcgacgatctctacgtcagcgatgcctttcataaagcatttctggaagtgaacgaagaaggcagcgaagctgctgcctcaaccgcagtcgtcattgctggccgttctctgaaccccaatagggtaacctttaaagccaatcgacctttcttggttttcattcgcgaagtgcctctcaacacgattattttcatgggccgcgttgcgaacccctgcgtcaaa

SEQ ID NO: 18828 - DNA, 1392 bp, synthetic construct
  misc_feature 1..1392: note = source = /note="Description of Artificial Sequence: Synthetic coding sequence"
  source 1..1392: mol_type = other DNA
atgtactcaaacgtcatcggcaccgtcacctctggaaagcggaaggtttatctgctgagcctgctcctgattggcttctgggattgcgtcacatgccatggttctcctgtcgatatatgcacggccaaaccacgagatattccgatgaaccccatgtgcatttaccggagccccgagaagaaggcaacggaggacgaggggtcggaacagaaaatccccgaggccaccaatcgaagggtttgggagctcagtaaggccaatagcagatttgccaccactttctaccaacacctggccgactctaagaacgacaatgacaacatctttctgagccctctctctatctcgacagcatttgccatgactaagttaggcgcgtgtaatgataccctgcagcagttgatggaagttttcaaatttgacacaattagtgagaagacctccgaccagatacactttttcttcgccaagttgaattgtcggctgtaccggaaggccaacaagtctagcaagctagtcagtgcaaaccgcctgtttggcgataagtctctaacctttaatgagacataccaggacatcagcgagttagtctacggagctaaactgcaaccgttagatttcaaggagaatgctgaacagtctagggcagctatcaataagtgggtgagtaacaagactgaaggacggatcaccgacgtgatcccctctgaagccataaacgagctgaccgtactcgtactcgttaacacgatctattttaagggcctgtggaaaagcaaattctcccccgaaaataccagaaaggagctgttctacaaagccgatggggaatcctgtagcgcttccatgatgtatcaagaaggcaagttcagatatcgacgcgtggctgagggtacccaggtccttgagctgccgttcaagggcgacgatataacgatggtactgatcttaccaaaacccgagaagagtctggccaaagtggagaaagagctgactcccgaagtcttgcaagagtggctcgacgagctggaggagatgatgcttgtggtgcacatgcctagatttcgcatcgaggatggcttcagcctgaaggagcagctgcaggacatgggtctggtcgatctgttttcccctgaaaaatctaagctgccaggaatcgtggccgagggcagggatgacctatatgtgagtgacgcattccacaaagccttcctggaagtgaacgaggagggatcggaggcggccgcgtctacagcggtagtgatcgctgggaggagccttaaccccaacagagttaccttcaaagccaacaggccatttctggtgtttatccgggaggtaccactgaacacgataatcttcatgggccgtgtggccaacccctgcgtgaag

SEQ ID NO: 18829 - DNA, 1392 bp, synthetic construct
  misc_feature 1..1392: note = source = /note="Description of Artificial Sequence: Synthetic coding sequence"
  source 1..1392: mol_type = other DNA
atgtattctaatgtgatcgggaccgtgacctcgggaaagcgcaaagtctacctcttgtctttattgctaattggattttgggattgcgtgacttgccacggaagtccggtcgacatttgtaccgccaagccccgtgacatcccaatgaatcccatgtgcatttatagatcacccgaaaaaaaggccactgaggatgaaggcagcgagcagaagattccagaggcgactaaccgcagagtatgggagctgtcaaaagccaattctcgatttgcgacgacattctaccagcatctcgccgactctaagaacgacaacgataacatcttcctctctcctctcagcatttctacggcgttcgccatgacaaaattgggagcctgcaatgacactttgcagcagttgatggaagttttcaaatttgatactattagtgagaaaacatctgatcagatccactttttctttgcaaagctgaactgccggctgtaccggaaggctaacaaaagcagtaagctggtgtccgccaatagacttttcggagacaagagcctcactttcaacgagacctaccaagatatttctgaactggtatacggcgccaaactccaacccctcgatttcaaagagaacgccgagcaaagcagggcagccataaataagtgggtgtccaataaaacagaagggaggattacagatgtcattccgtcagaagctatcaacgaattaaccgtactggttctcgtgaacaccatatattttaagggattgtggaagagtaaattctctccagagaacaccaggaaggagctgttttataaagcggatggggaatcatgttccgcatctatgatgtatcaggaaggcaaattcaggtacaggcgagtcgctgaaggcactcaggtgctagagctgccttttaagggggacgacatcacaatggtcctaattctcccaaagcctgaaaagtccctggcaaaggtggagaaagaacttacgcccgaagtgctgcaggagtggcttgatgagctcgaggaaatgatgctcgttgtacatatgccaagatttagaatcgaagacggcttctctcttaaggagcagctgcaagacatgggcctggtggacctgtttagccctgaaaagtccaagcttccaggaatcgtagcagagggccgggacgatctgtacgtctccgatgcttttcacaaggcctttttggaggtgaatgaggaaggcagcgaagcagccgcgagcaccgcggttgtaatagcaggtcgatctttgaacccaaacagagtgacctttaaagctaaccgcccatttttggtcttcatcagagaggtccccctaaatacaattatttttatgggtagggttgccaacccttgcgtgaag

SEQ ID NO: 18830 - DNA, 1392 bp, synthetic construct
  misc_feature 1..1392: note = source = /note="Description of Artificial Sequence: Synthetic coding sequence"
  source 1..1392: mol_type = other DNA
atgtatagcaacgttattggaaccgtaaccagcggtaagaggaaggtgtatttgttatccctgttgttaatcggcttctgggactgcgtgacctgccacggtagccctgtagacatttgtacagccaagccccgtgatataccgatgaatcctatgtgtatttaccgcagtcccgagaagaaggccaccgaggatgagggttcggagcagaaaattcctgaggccaccaatcgccgcgtatgggagcttagtaaggctaattcacgattcgccaccaccttttaccagcaccttgccgacagtaagaatgacaatgataacatcttcttgagcccattgagcatctccactgcctttgcaatgacaaagctaggcgcctgtaatgatactttgcagcagctgatggaggtgttcaagttcgataccatttcggagaaaacatcagatcaaatccacttcttctttgctaaactgaattgcagactgtacaggaaggccaacaaatcgagcaagttggtatcagccaaccggttgttcggcgataagagcttgacgttcaacgaaacctaccaagatatatcggagctggtgtatggtgcgaagctccaaccattggactttaaagagaatgcggaacaatcacgtgcggccataaataagtgggtgtccaataaaaccgaaggccgcatcaccgatgtcattccaagcgaggccattaatgaactgaccgtgttggtgctggtgaacaccatttattttaagggcttgtggaagtcgaaattctcccccgagaacacgcgtaaggaacttttctacaaggccgacggtgagagctgctctgcatccatgatgtaccaggagggaaaattccggtaccgccgagtagccgaaggcactcaggttctggaactgcccttcaagggagatgacatcaccatggtactgattctgccaaaaccagaaaaaagcctggccaaggttgagaaggagctcactcctgaggtcctgcaggagtggttggacgagctggaggagatgatgctggttgtccacatgccgcgcttcagaatagaggatggatttagcctaaaagagcagttgcaggacatgggtctagttgacctgttttctccagagaagtccaagcttccaggcattgtggccgaaggacgcgatgacctctatgtgagcgatgcatttcataaggccttcctggaagtgaatgaggagggaagtgaggcagccgcatccactgcggtggtgattgccggcagaagcctgaacccaaaccgtgtaaccttcaaggcaaataggccttttctcgtgttcattcgggaagtcccgcttaacacgattatcttcatgggacgtgtggccaatccatgcgtgaag

SEQ ID NO: 18831 - DNA, 1392 bp, synthetic construct
  misc_feature 1..1392: note = source = /note="Description of Artificial Sequence: Synthetic coding sequence"
  source 1..1392: mol_type = other DNA
atgtactccaacgttatcggcactgtgacgtccgggaagcggaaagtgtatctcctctccctcctccttatcggcttttgggactgcgttacctgtcacgggtcgccagttgatatctgcacggcgaagccacgcgacatccccatgaaccccatgtgcatataccggtctccggagaagaaggcaaccgaagacgagggttccgagcagaagattcccgaggccacgaatcgcagagtatgggaactgtccaaggctaattcccgctttgctaccaccttttaccagcacttagctgactctaaaaacgacaacgataatattttcctctcccccctttctatctcaaccgcctttgctatgacaaagcttggtgcctgtaacgataccctacagcagctgatggaggtgttcaaattcgatactatatcagagaaaacctcagatcagattcatttttttttcgccaagcttaattgtcgcttgtatcgcaaggccaacaagagcagcaagctcgttagcgcgaatcgcctgtttggagataagagcctgacatttaatgaaacataccaggatatctcagaactggtgtacggcgctaagctccagcccctcgatttcaaggagaacgcagaacaatcgcgagctgccatcaacaagtgggtcagtaacaagacggaggggagaatcactgatgttataccctccgaagctatcaatgaactgacggtacttgtgctagtgaacacaatctattttaaaggtctatggaagtctaaattctcccctgagaatacacggaaagagcttttctataaggcagacggcgaaagttgcagcgcatcgatgatgtatcaggaggggaagtttaggtatcggcgtgtggccgagggtacccaggtgctagagttgccctttaagggagacgacatcactatggtgcttattctgcccaaaccagagaagagcttggcaaaagtcgagaaggaacttactcccgaggtgctacaagagtggctggacgagctcgaggagatgatgctggtggtgcacatgcctagatttcgcatagaggacggcttctcacttaaggaacaactacaggacatggggctggtcgatctgttctcccctgaaaagtccaaacttcctggaatcgtcgctgagggacgagacgatctgtatgtttctgatgccttccacaaagcttttttagaggtgaatgaggagggaagcgaggcagctgcttcaaccgccgtggtgattgcagggaggtccctgaaccctaaccgcgtgactttcaaggctaacagaccctttctcgtttttattagggaagtgcctcttaacaccataattttcatgggcagagtggccaatccctgcgtcaag

SEQ ID NO: 18832 - DNA, 1392 bp, synthetic construct
  misc_feature 1..1392: note = source = /note="Description of Artificial Sequence: Synthetic coding sequence"
  source 1..1392: mol_type = other DNA
atgtattctaacgtcatcggtaccgtcacaagcggaaagcggaaggtctacttgctgtccctactgctcatcggcttttgggactgcgttacatgtcacggaagccctgtcgacatttgtaccgcaaagccccgggacattcctatgaaccctatgtgtatttaccggtcgcctgaaaaaaaagctactgaggacgaaggcagcgagcagaagatacctgaggccactaaccggagagtgtgggaattgtcaaaggctaacagccggttcgccacaacattttaccaacacttagccgactctaagaatgacaatgacaacatttttctctccccactgtcaatttctaccgccttcgcaatgacgaagctcggcgcttgcaatgatacattgcagcaattgatggaagtcttcaagttcgacacgatcagtgagaaaactagcgaccagatccacttcttttttgcgaaactcaactgccgactgtaccgaaaagcaaataaatcctccaagctcgtgagcgccaacagattgttcggagataagtctctgaccttcaatgaaacctatcaggacatcagcgagctggtctatggagccaaattgcagccgcttgacttcaaggaaaacgccgagcagtctagggctgctattaacaaatgggtcagcaacaaaacagaaggaaggatcaccgacgtgatcccttccgaggccatcaatgagctgacggtgctggtgctggtgaacaccatctattttaagggactgtggaagagcaaattcagtcccgagaacactagaaaagaactgttttacaaagctgatggggagtcttgttcggcctcgatgatgtaccaggagggaaagttccgttatcgacgcgttgccgaagggactcaagttcttgagttaccttttaaaggagacgacatcacgatggttctgattctgccaaagcctgaaaagtcactggctaaggtcgagaaggagctcactcctgaggtgctgcaggagtggctggatgagctggaggagatgatgttagtcgtgcatatgcctagattccgtatcgaagatggtttctcactgaaggagcagttgcaggatatgggccttgtggacctcttctctcctgagaagagcaagcttccaggcattgtggccgaaggtcgggatgatctgtacgtcagtgacgctttccacaaagccttcctggaagtcaacgaggagggatccgaggccgcggctagcaccgctgtcgttatagccgggcgatcgcttaaccccaatagggtaacatttaaggccaaccgcccatttctggttttcatacgagaagtgcctctcaataccattattttcatggggcgggtagcgaacccctgcgtaaaa

SEQ ID NO: 18833 - DNA, 1392 bp, synthetic construct
  misc_feature 1..1392: note = source = /note="Description of Artificial Sequence: Synthetic coding sequence"
  source 1..1392: mol_type = other DNA
atgtacagtaatgtgataggcactgttaccagcggaaagcggaaggtgtatctcctgtctctcctcctgatcggcttctgggattgtgtcacctgccatggcagtccggttgatatttgtactgccaaaccccgcgatatccctatgaacccaatgtgtatctataggtctccagaaaagaaggccacagaagatgaggggtccgaacagaagattcctgaggccaccaacaggagggtttgggagctgtctaaggccaattctagatttgccaccacgttctaccagcatctcgctgactctaagaacgataatgataatatcttcctgtctcccctgtctatcagcactgcgttcgctatgaccaagctgggggcctgcaatgacacacttcagcaacttatggaggtgttcaaattcgacacgatatccgagaagacaagcgaccagattcacttcttctttgctaagctgaattgccgcctttacaggaaggctaacaagagtagtaagttggtaagcgctaatagactgttcggcgataagtcacttacgtttaatgagacgtatcaagacatttcagagctggtttacggcgctaaattgcaacccctggacttcaaggaaaatgcggaacagtcacgcgcggccattaacaaatgggtcagcaacaaaaccgaagggagaataacggatgttatacccagtgaagccatcaatgaactgacagtgcttgtccttgtgaacaccatttatttcaagggcctttggaaatcaaagtttagcccagaaaatacaagaaaggagctcttctacaaggctgacggcgagagctgctccgcaagcatgatgtaccaggagggcaagttccgctacaggagagtggccgagggcactcaagtgctggagctgccttttaagggggacgacataacaatggtgctgatcctgcctaagccggaaaagtccctggctaaagtagagaaagaacttacacccgaggtcctgcaggaatggctggatgaattggaggaaatgatgcttgttgttcatatgcccagattcagaatcgaggacggatttagcctcaaagagcaactgcaggatatgggcctcgtggatctctttagtcccgagaagagcaaactgccagggattgtggctgaggggagggatgacctctatgtctctgatgcttttcacaaggcattcttggaggtgaacgaggaggggtctgaggcggcagcttcaacagctgtagtgatagccggccggagtctgaaccctaatcgggtgacatttaaggccaatagaccatttctggtgtttatcagggaggtgccccttaacaccatcatcttcatgggtcgggtggccaacccgtgcgtgaag

SEQ ID NO: 18834 - DNA, 1392 bp, synthetic construct
  misc_feature 1..1392: note = source = /note="Description of Artificial Sequence: Synthetic coding sequence"
  source 1..1392: mol_type = other DNA
atgtactctaacgtaattggaacagtgacctccggtaaacgaaaggtttatttgttgagcctgctgctgataggcttttgggactgtgtgacctgccatggctcacctgtcgatatctgcactgcgaagcctcgcgacatccccatgaaccccatgtgtatttaccgatctcccgagaagaaggctaccgaagatgagggatctgagcagaagatcccagaggccacaaatcgaagagtgtgggaactgtcaaaggccaattcccgcttcgcaaccaccttctatcaacacttagccgattcgaaaaacgataacgataatatattcttatctcccttatccatcagtacagcttttgcaatgactaaactgggtgcctgcaacgatacgttacagcagctgatggaggtatttaagttcgacaccatcagcgaaaaaaccagtgaccagattcacttcttcttcgctaagctgaactgtagattgtatagaaaagccaataaatcttccaaactggtgagcgctaatcgtctgtttggggacaagtcactgaccttcaacgaaacttaccaggatatttcagagttagtgtatggggctaaactccagcctctggactttaaagaaaatgcagagcaaagccgcgcagccattaataagtgggtgtctaacaagacagaagggcggataactgacgtaattccctccgaggccatcaacgagttgacggtcttggtgctggtgaataccatttatttcaaaggactttggaagagcaagttttctcccgagaacacccgcaaagaactattctataaagcagacggcgagtcctgtagcgcttcaatgatgtatcaggaggggaagtttagataccggagggttgccgagggaacccaggttctggaactccccttcaaaggggacgatatcactatggttctaattcttcccaagccagagaagtctttagccaaggtggagaaggagctcacaccggaagtcctgcaggaatggttggatgagctggaggagatgatgctcgtggtccacatgccccgatttcgaatcgaagacgggttctctttgaaggaacagttgcaggacatgggcttggtggatctcttctctcctgaaaagtccaaactgccggggattgtcgcggaagggagggatgatctgtacgtatccgatgcctttcacaaggcctttctggaggtgaatgaggagggtagcgaggccgcagcatctactgctgttgtgatcgccggacggtcgttgaaccctaatcgcgtcacattcaaagctaatcgcccttttttagtgttcatccgagaagtccccttaaacactattatttttatgggtcgagtcgctaatccctgtgtgaag

SEQ ID NO: 18835 - DNA, 1392 bp, synthetic construct
  misc_feature 1..1392: note = source = /note="Description of Artificial Sequence: Synthetic coding sequence"
  source 1..1392: mol_type = other DNA
atgtacagtaacgtgatcgggacagtcacctctggtaaaagaaaagtctaccttctgtcacttctgcttattggattttgggactgtgtcacctgccatgggagccccgttgacatctgcactgcaaaaccacgggatatcccgatgaaccctatgtgcatataccgaagcccagagaagaaggcaaccgaagacgagggaagcgaacagaaaattcccgaagcaacaaacagacgagtctgggaattgagcaaagccaactctcgcttcgcgactacattctatcaacacctggctgactccaaaaacgataacgataacatctttttgtcccccctcagcattagtactgcctttgctatgaccaaacttggagcttgcaacgacacactgcagcagcttatggaggtcttcaagtttgatactatcagcgaaaagaccagcgatcagatccacttcttttttgctaaattgaattgtagactctatcgcaaggccaacaagtcctccaaattggttagtgcaaacagattgtttggtgataaatctctcacctttaacgagacataccaggacatttccgagctggtctatggcgctaagctgcaacctctcgattttaaggagaacgccgaacaatctcgtgccgctatcaataagtgggtaagcaacaagactgagggcaggataacagacgtgatcccgtcggaggctatcaacgaactcaccgtcctcgtgctggtgaacacaatttatttcaagggcctctggaaatcaaagttcagccccgagaatacgcggaaagagctgttctacaaagctgacggtgaaagttgtagtgcctctatgatgtaccaagagggaaaattccgttaccgcagggtggcggagggaactcaggtgctggagctgccatttaaaggggatgatataaccatggtccttatcttaccaaagccggaaaaaagtcttgccaaggtcgaaaaagagttgactcccgaagtgctacaagagtggctcgatgagctggaggagatgatgcttgtggtgcacatgcctaggttcaggatcgaggacgggttcagccttaaagagcaacttcaggatatgggactggtggacctctttagccccgagaaatctaagctgcctggcatagtagctgaaggtcgtgacgacctttacgtttcagatgcgtttcataaggcctttctggaggtgaatgaagaaggatccgaggctgcagccagcacagcagtcgttatagctggcagaagcctgaaccctaacagggtgacatttaaggccaacaggccctttttggtttttatcagggaagtgccactgaacacaatcatctttatgggcagggtggctaacccatgcgtgaaa

SEQ ID NO: 18836 - DNA, 1392 bp, synthetic construct
  misc_feature 1..1392: note = source = /note="Description of Artificial Sequence: Synthetic coding sequence"
  source 1..1392: mol_type = other DNA
atgtacagcaatgtgattgggaccgtgacctcgggaaagcggaaagtttatttgctttctttgctcctgattgggttctgggattgcgtgacgtgccatgggagccccgtggatatttgtacggccaaaccacgggacattcctatgaacccaatgtgcatctacagatcaccagagaagaaagctaccgaggacgagggttctgaacagaagattccggaggccaccaataggcgagtttgggaacttagtaaggcgaactcacggttcgctacaaccttttatcagcacctggccgactctaaaaacgacaatgacaacatattcctgagcccactttctatttccacagcctttgcaatgacgaagttgggggcgtgtaatgacaccttgcagcagttgatggaggtttttaaatttgatacaatcagcgagaaaacatctgaccaaattcacttttttttcgcaaagctgaactgcagactgtaccgcaaggctaacaagagctctaaactggtctctgctaaccggttattcggggataagtcgctgacgttcaatgagacctatcaggatatcagcgagttggtctatggagcgaagcttcagccactggactttaaagaaaacgcagaacagtcgcgtgcagccatcaacaagtgggtaagcaataaaaccgagggccggatcaccgatgttatcccgtcagaagccatcaacgaacttacagtactggtgttggtgaacaccatatattttaaaggtctgtggaagtctaaattctcacccgaaaatactcggaaggaattattttacaaagccgacggggagtcctgcagcgcctctatgatgtaccaggaagggaaatttcggtatcggcgggtggctgagggcactcaagtgctcgagctaccattcaagggcgacgacatcacaatggtgttgatcctgcctaaacccgagaaatccctggccaaagtggagaaagagctaacgcccgaagttctgcaagaatggctggacgaactggaggaaatgatgctggtcgtccatatgcctaggtttagaatcgaagatggtttctctctgaaggagcagttgcaagatatggggctcgtcgatcttttctcccccgaaaagtccaagctaccaggcatcgtagcagagggcagagacgacctatatgtgagcgatgctttccacaaggccttccttgaggtaaatgaggagggtagtgaggccgctgcttccaccgctgttgtgattgctggccgtagtctgaatcccaatcgggtgacatttaaagcaaatagaccttttctggtgtttattcgagaggtcccattgaatactatcatctttatgggacgggtagccaacccttgtgtgaaa

SEQ ID NO: 18837 - DNA, 1392 bp, synthetic construct
  misc_feature 1..1392: note = source = /note="Description of Artificial Sequence: Synthetic coding sequence"
  source 1..1392: mol_type = other DNA
atgtattcaaacgtgattggaactgtaacttctggtaagcgaaaagtctatttgcttagcctgcttttaatcgggttttgggattgtgtcacatgtcacggctccccggtggatatctgcaccgccaagccccgagatatcccaatgaatccgatgtgcatctataggagtcccgagaagaaggctaccgaagacgagggctctgagcagaagatcccagaggctacaaatcgacgggtatgggagctgagcaaggccaattcacgcttcgcaaccaccttctatcagcatctcgccgacagtaagaacgacaacgacaatatcttcctgtcacctctgtccatatctaccgccttcgctatgacgaaactgggtgcatgcaacgataccttacagcagctgatggaggttttcaaatttgacaccatcagcgagaagacgtccgatcagatccattttttttttgctaaactgaactgccgtctctaccggaaagccaacaagtctagtaaactggtttctgctaatcgtctttttggcgataaatcattgacgtttaacgagacctaccaggacatatcagaattggtctacggggctaagttgcagcctctggattttaaggagaacgcagagcagagccgcgccgctataaataagtgggtgagtaacaagacagaaggaaggatcaccgacgttataccatccgaagccataaatgagctgacagtcctcgtgctggtgaatactatctactttaagggtctgtggaaatcgaagttttctcccgagaacacaagaaaagaattattttataaagctgacggcgaatcatgcagcgcatccatgatgtaccaggaagggaagttccgctataggagggtggccgagggcacccaggtcctggaactgccgtttaaaggagatgacataaccatggtgctgatcttaccaaagcccgaaaaaagtcttgccaaggtggaaaaggagctcacgccagaagttctgcaagaatggctggacgaactggaagaaatgatgctggtggtccacatgccccggttccggatagaggatgggttttctctcaaagagcagctacaggacatgggcctcgtggatctgttttccccagaaaagtcgaaattgcccggaattgttgccgagggaagagatgacctatatgtgtctgatgctttccataaagccttcctagaggtcaacgaggaagggtccgaggcagcggcctcgactgcagtggtaattgccggcaggtcgctcaatcctaacagggtaacattcaaggccaatcgtccttttttggtgtttatccgagaagtgcccttaaatacaataattttcatgggccgggtggctaatccctgcgtgaaa

SEQ ID NO: 18838 - DNA, 1392 bp, synthetic construct
  misc_feature 1..1392: note = source = /note="Description of Artificial Sequence: Synthetic coding sequence"
  source 1..1392: mol_type = other DNA
atgtactccaatgtcatcgggactgtgacctcaggaaagagaaaggtttaccttctgtccctgttgctcatcggattctgggactgcgtgacgtgccacggatctcctgtggacatctgtaccgccaaaccacgggatatccccatgaacccaatgtgcatttatcgctctcctgagaaaaaggcgaccgaggatgagggatcagagcagaaaatcccggaggccaccaaccggagagtatgggaactgtccaaggccaacagcagatttgctacgaccttctatcagcatctggccgactccaagaacgataacgacaatatcttcttgtcgccgctctctatctcgactgcattcgccatgaccaagctgggggcgtgcaacgacactcttcagcagcttatggaagtgttcaagttcgacactatcagcgaaaagacttcggatcagatccatttctttttcgcaaaactgaattgccggctgtacaggaaggctaacaaaagctcgaagctggtgtctgcaaaccgcctctttggagacaagtctctgactttcaacgaaacttaccaggatatttcagagctcgtgtacggagcaaaacttcaaccgctggactttaaagaaaacgctgagcagtcgcgggcggcgatcaacaagtgggtcagcaataagactgaaggacgcattaccgatgtgatcccttcggaggccatcaacgagctgaccgtcctggtgctcgtcaatacgatttacttcaaaggactttggaagtcgaagttcagccctgagaatacccgcaaagaactgttctacaaggctgacggagagagctgcagcgcatccatgatgtaccaagaagggaagtttcgctacagacgagttgctgaagggacccaggtcctggagctcccctttaagggcgacgatatcaccatggtgctgattctcccgaagccggagaaatccctcgccaaagtagagaaagagctcactcctgaggttcttcaggaatggctggacgaactggaggaaatgatgctcgtcgtccatatgccgaggttcagaatcgaagatggctttagcctcaaggagcaactgcaggacatgggcctcgtggacttgttcagccccgaaaagtccaagctgccgggaatcgtggcggagggtcgggacgatctgtacgtctcggacgccttccacaaagcattcctggaagtgaacgaggaaggatcagaagccgccgcgtccaccgccgttgtgatcgccggccggtcacttaatccgaacagagtcactttcaaggcgaatagaccgttcctggtgttcatccgcgaggtgccactcaatactatcatctttatgggacgggtggcgaacccctgcgtgaaa

SEQ ID NO: 18839 - DNA, 1392 bp, synthetic construct
  misc_feature 1..1392: note = source = /note="Description of Artificial Sequence: Synthetic coding sequence"
  source 1..1392: mol_type = other DNA
atgtatagtaatgtgattgggacggtcacaagcggtaagaggaaagtgtatctgttgtcattgctcttaatcgggttttgggattgtgtcacatgccatgggtcacccgtggatatttgcaccgcaaagcccagggatatccccatgaacccaatgtgcatttataggtcacctgagaaaaaagctactgaggacgaaggaagcgagcagaagatccccgaggccacaaatcgacgggtgtgggaactgtcgaaggctaacagtcgctttgccacaaccttttatcaacatctggccgactcaaagaatgacaatgacaatatcttccttagccccttgagcatcagtaccgccttcgccatgacgaagctcggcgcgtgtaatgacactttgcaacagttgatggaggtgtttaagtttgatacgatctcagagaaaacgagtgaccagattcattttttctttgccaaattaaattgtcgcctctacaggaaagctaacaaatcctcaaaactcgtgagcgccaatagattgtttggtgataagagccttacatttaacgagacctaccaagacatcagtgaactcgtttacggcgccaagttgcagccattggacttcaaggagaacgccgagcagtcacgggccgcaatcaataagtgggtgagtaataaaaccgaagggcgcatcacagatgtaattcctagtgaggcaataaatgaacttaccgttctagtgctcgttaatacgatttactttaagggtctgtggaagtccaagtttagccctgagaatacacggaaggagctattctacaaagcagacggtgaatcctgcagtgcctcgatgatgtatcaggagggaaaattcagatataggagagtggccgagggcacccaggtcctcgaactaccctttaaaggtgatgatattacaatggtgcttatattgcccaaaccagaaaagtcccttgcgaaggtggagaaagagctgactccagaagtccttcaggagtggctcgacgagttagaagaaatgatgttggtggttcacatgccaagattccgcattgaagacgggttctccctgaaggagcaactgcaggatatgggattggtggacttgttctcgcccgaaaagtcaaagctacccgggatcgttgctgaaggccgtgatgatctgtatgttagtgacgccttccacaaggccttccttgaagtaaatgaggaaggctccgaggcagccgcctcaacagcggttgttatagctggacgctcgttgaaccccaaccgcgtaacttttaaagcaaataggccattcctggtctttattagggaagtaccccttaatacgataatattcatgggacgggtggccaatccttgtgtcaaa

SEQ ID NO: 18840 - DNA, 1392 bp, synthetic construct; identical to SEQ ID NO: 18795
  misc_feature 1..1392: note = source = /note="Description of Artificial Sequence: Synthetic coding sequence"
  source 1..1392: mol_type = other DNA

SEQ ID NO: 18841 - DNA, 1392 bp, synthetic construct
  misc_feature 1..1392: note = source = /note="Description of Artificial Sequence: Synthetic coding sequence"
  source 1..1392: mol_type = other DNA
atgtactcgaatgtgattggtactgtgacttctggaaaacggaaggtgtatcttttgtcactgttgctcatcgggttttgggattgtgtgacttgccacggctctcctgtcgacatctgtaccgctaagcctagggatattcccatgaatcctatgtgtatttaccgatcacccgaaaagaaggccacggaagatgagggatcagaacagaaaattccagaagcgaccaatagacgcgtttgggaactgtccaaagcaaacagccgattcgccaccactttctaccagcatcttgctgatagcaagaatgacaatgataacatattcctttcacctttgtccatctctaccgcgtttgcgatgaccaaactgggcgcatgcaacgatactcttcaacaactgatggaggtgttcaagtttgataccatttccgaaaaaacgagcgatcagatccatttcttctttgcgaaacttaattgtagactctacagaaaggcaaataagtcctcgaaactggtgtcggcaaaccgcctcttcggagacaagtcgttgaccttcaacgaaacctaccaagacatctcggagcttgtgtacggtgcaaagttgcagccgctggatttcaaggaaaacgcagagcaaagccgagcagcaattaacaaatgggtgtccaataagactgaggggcggattactgatgtcatcccttccgaggcgattaacgagctcactgtgctcgtccttgtgaatactatctactttaagggtctgtggaagtcaaagttttcgcccgaaaacacgagaaaggagttgttttacaaggccgatggagaaagctgctccgcaagcatgatgtaccaagaaggaaagttcagatacaggcgtgtggcagaaggtactcaggtcctggagttgccgtttaagggagacgacatcactatggttctgattctgccaaagccagaaaagtcgctcgcaaaggtggagaaggaactgactcccgaagttctgcaagagtggctggatgaacttgaagagatgatgctggtcgtccatatgcctaggttcagaatagaagatggattttcactcaaggaacagctgcaagatatgggactcgtcgatttgtttagccccgagaaatcaaaattgcctggtatcgtggcagaaggccgggacgacctgtatgtctccgacgcatttcacaaggcatttcttgaagtgaacgaagaagggtcagaagccgccgcctctaccgctgtggtcatagcaggacggtcgcttaatcccaaccgggtcacctttaaggcaaatcgaccattcctggtgtttatacgagaggtgcctctgaataccattatctttatgggtagagtggctaatccatgtgtgaag

SEQ ID NO: 18842 - DNA, 1392 bp, synthetic construct
  misc_feature 1..1392: note = source = /note="Description of Artificial Sequence: Synthetic coding sequence"
  source 1..1392: mol_type = other DNA
atgtactctaatgtgatcgggactgtcacctccggcaagagaaaggtgtacctgttgtcccttctccttattggattttgggattgtgttacttgccatggatcccccgtggacatctgtactgccaagccacgcgatataccaatgaatcctatgtgtatatacagatcaccagagaaaaaggctaccgaagatgaagggtccgagcagaagataccagaagcgactaaccggcgggtctgggaactgtcaaaggcaaacagccgatttgcgactaccttctaccagcatcttgcagattccaagaatgacaatgacaacatcttcctttcccctctttcaatttcaactgccttcgcaatgaccaagttgggagcgtgtaacgacaccctccagcagttgatggaggtctttaagttcgacaccatatccgagaaaacttcagatcagatccatttcttctttgccaaattgaattgtcgtctctacagaaaagcaaacaaatcgtctaaacttgtctcggcgaataggctgtttggggacaagagccttacgtttaatgagacttaccaagatatctcggaactcgtgtacggagccaaacttcagcccctggacttcaaggaaaacgcagaacagtcgcgcgcagcaattaacaagtgggtgtccaataagaccgaaggcaggatcaccgacgtgattccttcggaggcaattaacgaacttaccgtgctggtgctggtgaatactatttactttaagggactgtggaagtcgaagtttagccccgaaaatactcgcaaagaacttttctacaaggcggacggggagtcctgctctgcctccatgatgtaccaggaaggaaagtttcgttaccgacgggtggcagagggaacccaagtgctggagctgccttttaagggggatgacattactatggtcctgattctgccaaaacctgaaaagtctcttgcaaaagtggaaaaggaattgactcccgaagtgcttcaagaatggctggatgaactggaagaaatgatgcttgtggtgcacatgccgagattcagaattgaagatggtttttcgttgaaggaacaactgcaagatatgggtcttgtggacctgttttcacctgagaagtccaaactcccaggaattgtggccgaaggacgcgacgatctctacgtctcggacgcatttcacaaggcatttttggaagttaacgaagaaggaagcgaagcagcggcaagcaccgcagtggtcatcgcagggagatcgttgaacccgaacagggtcaccttcaaggcaaatcggcccttcctggtgttcatcagagaggtgcctctgaataccatcattttcatgggtcgcgtggccaacccatgtgttaag

SEQ ID NO: 18843 - DNA, 1392 bp, synthetic construct
  misc_feature 1..1392: note = source = /note="Description of Artificial Sequence: Synthetic coding sequence"
  source 1..1392: mol_type = other DNA
atgtactcgaatgtgatcggtactgttacctcaggaaagagaaaggtgtacctgctgtcacttctgctcatcggcttctgggactgtgtcacgtgccatggatctccagtggacatctgcactgctaagccgcgcgatatcccaatgaacccgatgtgcatctacaggtcgcccgagaagaaggctacggaagatgaaggctcagaacagaaaattccggaggctactaaccgccgggtgtgggagctgtcgaaggcaaattcacggttcgcaactactttttaccaacaccttgccgactccaagaacgacaacgacaacattttcctctcccctctgtccatcagcacggccttcgcaatgactaagttgggagcctgcaacgataccctgcaacagctgatggaagtctttaagttcgacaccatctcggaaaagaccagcgaccagatccatttcttcttcgcgaagttgaattgccggctttaccgcaaggcaaacaaatccagcaagctcgtgtccgcgaacaggttgttcggagataagtccctgactttcaatgaaacctaccaggacattagcgaacttgtctacggtgcaaagctccagccgctcgatttcaaagagaacgcagaacagtcacgggccgcaatcaataagtgggtgtccaacaagaccgagggaagaattactgacgtgatcccgtctgaggccatcaacgagctcacggtcctcgtccttgtcaacactatctatttcaagggcctgtggaaaagcaaattctcgccggaaaacaccagaaaagagctcttctataaggccgacggagagtcttgctcggcgagcatgatgtaccaggagggaaagttcaggtacaggcgcgtggcggagggaacccaggtgctggaattgcccttcaagggagacgatatcaccatggttctcatcctgccgaagcccgaaaagtcgctcgccaaagttgagaaagagctgaccccggaagtgctgcaggaatggctggatgagctggaggagatgatgctggtggtgcacatgccacggttccgcatcgaggacgggttctctctgaaggagcaactccaagatatgggactggtggatctcttcagtccagaaaaatctaagctgccggggattgtcgcagaaggacgcgacgatctgtacgtcagcgacgcttttcataaagcgttcctcgaagtcaatgaagagggatccgaggcggctgccagcaccgccgtggtgattgccggacggtcgctgaatccaaaccgggtgacgttcaaagcgaatcgcccgtttctggtgttcatcagggaggtccctctgaatacgatcatcttcatgggtcgggtcgcgaacccatgtgtgaaa

SEQ ID NO: 18844 - DNA, 1392 bp, synthetic construct
  misc_feature 1..1392: note = source = /note="Description of Artificial Sequence: Synthetic coding sequence"
  source 1..1392: mol_type = other DNA
atgtactccaacgtgattggaaccgtgaccagcgggaaaagaaaagtctacctccttagtttgcttctcatcggattttgggattgtgtgacttgccatggcagccctgtcgatatttgtactgccaagcccagggatattcccatgaatccaatgtgtatttacagatcgcctgaaaagaaggcgaccgaagatgagggaagcgagcaaaagatcccagaagctaccaaccggagagtttgggaactctcgaaagcaaactcccgctttgcaacgaccttttaccagcatttggcggattccaaaaacgacaacgacaatatcttcctttccccactgtcaatttcaaccgcgttcgcgatgactaaacttggtgcatgcaatgacactcttcaacaattgatggaagtgttcaagtttgacaccatttccgaaaagacctccgaccaaattcacttcttttttgctaagctgaactgtagactctacagaaaagcaaacaagtcatccaaactggtgtccgcaaaccgactcttcggtgacaagagcctgacctttaacgaaacgtaccaagacatctcagagcttgtctacggcgcaaaactgcagcccttggactttaaggaaaacgctgagcaatcgcgtgcagccatcaacaagtgggtgtcgaacaagactgaaggacgcattactgacgtcattccctcggaagcaatcaacgagctgaccgtgctggtgcttgtcaacaccatttactttaaaggactctggaagtcaaagttctcacctgaaaacaccagaaaggaactgttctacaaggcagatggagaaagctgttcggcatccatgatgtaccaggaaggcaagtttcgctaccgcagagtggcagaaggtacccaagtgctggaactgcctttcaagggagatgatattactatggtgctgattcttccaaagcccgagaaatcgcttgcgaaagtcgaaaaggagctgactccagaggtgctgcaagaatggcttgatgaacttgaagaaatgatgctggtagtgcatatgccacggtttcgcatagaggatgggttctcactcaaagaacaactgcaagatatgggcctcgtggatctgttttcgccggagaagtcgaaacttccgggaattgtggccgaaggaagggacgacctttacgttagcgatgcgtttcataaggctttccttgaagtgaacgaggaagggtccgaggcagcagcgtcgaccgcagtcgtgatcgcagggcggagcttgaatccaaaccgggtgaccttcaaagcaaacagaccttttttggtgtttatccgcgaagtgcctctgaacactatcatctttatgggcagagtcgcgaacccatgcgtgaag

SEQ ID NO: 18845 - DNA, 1392 bp, synthetic construct
  misc_feature 1..1392: note = source = /note="Description of Artificial Sequence: Synthetic coding sequence"
  source 1..1392: mol_type = other DNA
atgtactccaatgttatcggaactgtgacgagcggaaagcggaaagtgtaccttttgtcgctgctgctgatcggtttttgggactgcgttacctgccacggatcgcccgtggacatctgcaccgcgaagccccgcgacatccccatgaacccaatgtgtatctaccggagccccgagaaaaaggccactgaggatgaaggatctgaacagaagattccggaagctactaatagacgggtctgggagctctcgaaggcaaactcaaggttcgctaccactttttaccaacatctggccgattccaagaatgataacgacaacatatttctgtcgcctctgagcatcagcaccgcatttgccatgaccaaacttggagcgtgcaacgacacccttcagcaattgatggaagtgttcaaatttgacactatctcggagaaaacctctgaccaaatccacttctttttcgcaaaactgaactgtcgcctctaccgcaaagcgaacaagagctcgaagctcgtgagcgccaaccgcctgttcggcgataagtccctcaccttcaacgagacttatcaggacatctccgagctcgtctacggcgctaaacttcagccgctggatttcaaggaaaatgccgaacaatcacgcgcggccataaacaagtgggtgtctaacaagaccgagggacggattactgacgtcatccctagcgaagctattaacgagctgactgtgttggtgctggtcaataccatttacttcaagggtctgtggaagtcaaagttttccccggagaataccaggaaagaactcttttacaaggccgatggcgaatcctgctccgcatccatgatgtaccaggaaggcaagttccggtataggagggtcgctgaaggaacgcaggtgctggaactgccgtttaagggcgatgacatcacgatggtgctcatcctgccaaagccagagaaatccctggccaaggtcgagaaggagctgaccccggaagtgctccaagaatggctggacgaattggaagaaatgatgttggtcgtgcatatgccacggttccgcatcgaagatggattctcacttaaggagcagctgcaggacatgggactggtcgatctgttctcaccggagaagtcaaaactgccgggaatcgtggccgagggtagagacgatttgtacgtgtcggacgcattccacaaggccttcctcgaagtgaacgaagagggatcggaggccgccgcgagcactgcggtggtcatcgctgggcgatcgctcaatccgaaccgcgtgaccttcaaggcaaaccggcctttcctggtgttcatccgggaagtgcctctcaatacgatcatattcatgggacgagtggcaaatccctgcgttaag

SEQ ID NO: 18846 - DNA, 1392 bp, synthetic construct
  misc_feature 1..1392: note = source = /note="Description of Artificial Sequence: Synthetic coding sequence"
  source 1..1392: mol_type = other DNA
atgtattccaacgtcattggaacagtcacgtcaggtaagagaaaggtctacctcctgtctcttctgttgatcggcttctgggactgcgtgacctgccacggttccccagttgacatctgtacagcaaagcctcgcgatatccccatgaatcccatgtgcatatacaggagccccgagaaaaaagccaccgaagatgagggatctgaacagaagattccggaggccactaatcgacgtgtctgggagttgtccaaggctaacagtagatttgctaccaccttttaccagcatttggctgattccaaaaatgataatgataatatcttcttgtcccctctgtccatcagcaccgccttcgcgatgacaaaactgggggcatgtaacgataccctccaacaactgatggaggtcttcaaattcgataccatcagtgagaaaacttccgaccagattcactttttctttgccaagctgaattgccggctctatcgtaaggccaacaagtccagtaagctcgtcagcgctaataggctatttggcgacaagtctctcacattcaatgaaacctatcaggatatttcggagctcgtatatggagccaaactacaacctttagatttcaaggaaaacgccgagcagtctcgagccgcgataaataaatgggtgtccaataagacggagggccgaatcactgatgttataccctccgaggccattaatgaattgacagtcctggtactggtcaatactatctacttcaagggactctggaagtcaaaattttctcccgaaaatacaaggaaagaacttttctataaggcggatggggaaagctgctcggcttctatgatgtaccaggaagggaaattccgttaccgacgtgtggcggagggaacccaagtattggagctccccttcaaaggcgacgatataactatggtgctgattctgccgaagccagaaaaaagtctagcgaaggtggagaaggagctgacacccgaggtgttacaggagtggttggatgagctcgaagagatgatgctggtagtgcacatgccgaggtttcgaatagaagacggctttagcctgaaggaacagcttcaggatatggggttggtcgatctctttagtcctgagaagtcgaagctgccgggcatagtcgccgagggcagagacgacttgtacgtttcggatgctttccataaagccttcctggaagttaacgaagaaggctcagaagctgccgcgtctaccgccgtggtcattgcagggaggagcttgaaccccaaccgagtcacttttaaagctaaccggcccttccttgtttttatcagagaagtgcccctgaacacgataatttttatgggtagggtcgccaatccatgtgtcaaa

SEQ ID NO: 18847 - DNA, 1392 bp, synthetic construct
  misc_feature 1..1392: note = source = /note="Description of Artificial Sequence: Synthetic coding sequence"
  source 1..1392: mol_type = other DNA
atgtacagcaacgtgatcggcactgtgacgtctgggaaacgcaaagtgtacctcttgtcgctgctgctgattggtttctgggactgcgtgacgtgccatggctcgccggtcgacatctgcactgcaaagccacgagacatcccgatgaacccgatgtgcatttaccgctcacccgagaagaaggctaccgaagatgaaggatcggagcagaaaatccccgaagcgactaatcggcgcgtgtgggagctctcgaaggcgaattcacggttcgcgaccactttctaccagcatcttgccgatagcaaaaatgataacgacaacatctttctctctccgctgtccatctcgaccgcctttgccatgaccaagttgggcgcgtgtaatgacaccctgcagcagcttatggaagtctttaagttcgacactattagcgaaaaaacctctgaccagatccacttcttctttgcgaagttgaactgccgcctgtacaggaaagccaacaagtcctcgaaactcgtgtcagcaaaccggctgttcggagacaaatccttgaccttcaatgagacgtaccaggatatctcggaactggtgtacggagcaaaattgcaaccactggactttaaggagaatgcagaacagtcccgcgcagccatcaataagtgggtgtcgaacaagacggaaggccggataactgatgtgatcccgtcggaagccataaatgagctcaccgtgctggtactggttaatacgatctactttaaggggctctggaagagcaagttcagcccagaaaacactcgcaaagagctgttttacaaggctgatggagaatcctgcagtgccagcatgatgtatcaagaaggaaagttcagatacagacgggtggcggaaggtactcaggtccttgaacttccattcaagggcgatgatatcaccatggtcctgatcctgccgaagcctgagaaatccctggcgaaggtggaaaaagagctgacccctgaggtcctgcaagaatggctggacgaactggaggaaatgatgctcgtggtgcacatgcctcgctttagaattgaggacggattctccctcaaggagcaactccaagatatgggattggtggacttgttctcaccggagaagtccaagctgccgggaatcgtggctgaaggtagagacgacttgtacgtcagcgatgctttccacaaggcattccttgaggtaaacgaggaggggtcagaggctgccgcttcaactgctgtcgtaattgcaggaaggagcctcaacccgaatagggttaccttcaaggccaacaggcctttcctcgtgttcatccgcgaagtccctctgaacactatcatcttcatgggacgtgtcgccaacccttgtgtgaag

SEQ ID NO: 18848 - DNA, 1392 bp, synthetic construct
  misc_feature 1..1392: note = source = /note="Description of Artificial Sequence: Synthetic coding sequence"
  source 1..1392: mol_type = other DNA
atgtattcgaatgtaataggtacggtaacgtcgggtaaacgaaaagtatatttactatcgctactactaataggtttttgggattgtgttacgtgtcatggttcgccggtagatatatgtacggcgaaaccgcgagatataccgatgaatccgatgtgtatatatcgatcgccggaaaaaaaagcgacggaagatgaaggttcggaacaaaaaataccggaagcgacgaatcgtcgtgtttgggaattatcgaaagcgaattcgcgttttgcgacgacgttttatcaacatctagcggattcgaaaaatgataatgataatatatttctatcgccgctatcgatatcgacggcgtttgcgatgacgaaattaggtgcgtgtaatgatacgttacaacaactaatggaagtttttaaatttgatacgatatcggaaaaaacgtcggatcaaatacattttttttttgcgaaattaaattgtcgactatatcgtaaagcgaataaatcgtcgaaactagtttcggcgaatcgactatttggtgataaatcgttaacgtttaatgaaacgtatcaagatatatcggaattagtatatggtgcgaaattacaaccgttagattttaaagaaaatgcggaacaatcgcgagcggcgataaataaatgggtatcgaataaaacggaaggtcgtataacggatgtaataccgtcggaagcgataaatgaactaacggttttagtactagttaatacgatatattttaaaggtttatggaaatcgaaattttcgccggaaaatacgcgtaaagaattattttataaagcggatggtgaatcgtgttcggcgtcgatgatgtatcaagaaggtaaatttcgttatcgacgagttgcggaaggtacgcaagtattagaattaccgtttaaaggtgatgatataacgatggtattaatattaccgaaaccggaaaaatcgttagcgaaagtagaaaaagaattaacgccggaagtattacaagaatggctagatgaattagaagaaatgatgttagtagtacatatgccgcgatttcgaatagaagatggtttttcgctaaaagaacaactacaagatatgggtttagtagatctattttcgccggaaaaatcgaaactaccgggtatagtagcggaaggtcgtgatgatttatatgtatcggatgcgtttcataaagcgtttctagaagtaaatgaagaaggttcggaagcggcggcgtcgacggcggtagtaatagcgggtcgatcgctaaatccgaatcgagtaacgtttaaagcgaatcgtccgtttttagtttttatacgagaagtaccgctaaatacgataatatttatgggtcgtgtagcgaatccgtgtgttaaa

SEQ ID NO: 18849 - DNA, 1392 bp, synthetic construct
  misc_feature 1..1392: note = source = /note="Description of Artificial Sequence: Synthetic coding sequence"
  source 1..1392: mol_type = other DNA
atgtactcgaacgtgattggaaccgtgacctctggtaagcgcaaggtctacctcctgtcgctgcttttgatcggattttgggactgcgtgacctgccatggttcccccgtggatatttgtacggcaaagcctcgagatatcccgatgaatcctatgtgcatttacagatcacctgaaaagaaggccactgaagatgagggatcggagcaaaagatcccagaggccactaatcggagagtctgggaactgtcgaaggcgaacagccgctttgccactacgttctaccaacatttggcggactcaaagaatgacaacgataacatttttctctccccgctgtccatttccactgcatttgccatgaccaagctcggcgcttgtaacgatacccttcagcagctgatggaagtgttcaaatttgatacgatctctgagaaaacgtccgatcagattcacttctttttcgcaaagttgaactgccggctgtaccggaaggcaaacaagagctcaaaacttgtctcagcaaatcgactttttggagataagtcgctgacgtttaatgaaacctaccaggatatatcggaactggtgtacggagcaaaattgcaacctctggatttcaaagagaatgcagagcaatccagggctgcaattaacaagtgggtgtcgaacaagactgaaggtcgcatcaccgatgtcatcccatcggaggcgatcaacgagctgaccgtgctggtgcttgttaatactatttactttaaaggcctgtggaaatcgaaattcagcccggagaacactaggaaggaacttttctacaaggcggatggggaaagctgctcggcatccatgatgtatcaggagggcaagtttcgatacaggagagttgccgagggaactcaggtccttgaactgcctttcaagggagacgatattaccatggtgcttatactgccaaagcccgaaaagtcgctggccaaggtcgaaaaagaactgaccccagaagtgctccaagaatggcttgacgaacttgaagaaatgatgcttgtggtgcacatgcctaggttcaggattgaggatggcttttctcttaaagaacagcttcaagatatgggactcgtggacctcttctcacccgagaagtcaaagctgccagggattgtggcggaaggaagagacgatctttacgtctcggatgcatttcataaggcatttctggaggtaaatgaagaaggatcggaggcagccgcgtcaaccgcagtggtgattgcaggcaggagtcttaaccctaatagggtgacctttaaggcaaaccggcctttcctggtgttcattagagaagtccccctcaacaccatcattttcatgggcagggtcgctaacccgtgtgtgaaa

SEQ ID NO: 18850 - DNA, 1392 bp, synthetic construct
  misc_feature 1..1392: note = source = /note="Description of Artificial Sequence: Synthetic coding sequence"
  source 1..1392: mol_type = other DNA
atgtacagcaacgtgatcggaaccgtcactagcggcaagagaaaggtgtacctgctctcactgctcctcatcggtttctgggattgtgtgacctgccacggaagcccggtcgatatctgcactgctaagccccgcgatatccctatgaaccccatgtgcatctaccggtcaccggaaaagaaagcgaccgaggacgagggctcggagcagaagatccccgaggctactaaccgaagagtgtgggaactctccaaggctaactccaggttcgcgacgaccttctaccagcatctggccgattccaaaaatgacaacgacaacattttcctttccccgttgagcatctctaccgccttcgcaatgacgaagctcggagcctgcaatgacaccctgcaacagctcatggaagtgtttaaatttgacactatttcggaaaaaacctcggaccaaattcacttcttcttcgcaaagctgaattgccggctgtaccgcaaagccaataagtcatcaaagctggtgtccgctaaccggctcttcggagataagagtctgacctttaatgaaacctaccaagacattagcgagctggtgtacggagccaaacttcaaccactcgacttcaaagagaacgcggaacagtcgcgcgcagctatcaataagtgggtgtcgaataagactgaagggcgcatcactgacgtgatcccttccgaggcaatcaacgagctgaccgtgctggttctggtgaatactatctacttcaaaggactgtggaagtccaaattctcaccagagaacactagaaaggaactgttttacaaggccgatggagaatcgtgcagcgcgagcatgatgtaccaggagggtaagttccggtacaggcgcgtggccgaggggacccaagtactggaattgccattcaagggtgacgatatcactatggtccttatcctgccgaagccggagaagtcccttgccaaggtggaaaaagaactgaccccggaggtgctccaggaatggctcgacgaacttgaagagatgatgctggtggtccacatgcctaggtttcgcattgaggacgggtttagcctgaaggagcagttgcaggatatgggactggtcgatctgttctcgccagaaaagtcgaaactcccgggaatcgtcgctgaaggacgggatgacttgtatgtctcggacgcatttcataaggccttcctggaggtcaacgaagaaggctcagaagcggcggcgtcgacggccgtggtgatcgccggccgctccttgaacccgaaccgggttactttcaaggcaaaccgtcctttcctggtgttcatcagagaagtgccgctcaacaccatcatctttatgggccgggtggccaatccatgtgtcaaa

SEQ ID NO: 18851 - DNA, 1392 bp, synthetic construct
  misc_feature 1..1392: note = source = /note="Description of Artificial Sequence: Synthetic coding sequence"
  source 1..1392: mol_type = other DNA
atgtactccaatgtgatcggcacggtcactagtggaaagagaaaagtgtaccttttgtcactgctcttaattgggttctgggactgtgtgacctgccatggatccccggtggacatttgcaccgcaaagccccgagatataccgatgaaccctatgtgcatttatcgcagtcccgagaagaaggcaactgaggacgaagggtcagaacagaaaattcctgaagccacaaatagacgagtttgggagctgtcaaaggccaactcaaggttcgcaacaacattctaccagcatttggccgattcgaagaacgataatgataatatattcttgtctcccctgagcatttcgacggcttttgcaatgaccaagttaggagcttgcaatgataccttgcagcaactaatggaggttttcaaattcgataccatcagtgagaaaaccagcgatcagattcacttctttttcgcaaagctgaactgtagattataccggaaagcaaacaaatcttccaagttagtgagcgcaaaccgcctgtttggagataagtcactgacatttaacgagacatatcaagacatatctgagcttgtgtacggagctaagttacagcctctcgattttaaggagaatgctgagcagtcccgggcggctatcaacaagtgggtcagcaataaaacagaaggccgtattaccgacgtgatcccctctgaggctataaacgaattgaccgtgctggtgcttgtgaacacaatttatttcaagggactgtggaagagtaagttttcacccgagaacacaaggaaagagctcttttataaggcggatggcgagtcttgttccgcatcaatgatgtaccaggaagggaagtttaggtacagacgggtggccgaaggcactcaggtgctggagcttccttttaaaggtgacgacatcacaatggtgctgattctccctaagccagagaagtcactcgccaaagtggagaaggagcttactcctgaggtgctgcaggagtggttggacgagctggaggagatgatgcttgtggtccacatgccaagatttagaatcgaagacggattttccctgaaggaacagctgcaggacatggggctcgtggatcttttctctcccgagaagtcaaaactccctggcatcgtggctgagggaagggatgacctatatgtgtcagacgcctttcataaggctttcctggaagtgaacgaagaaggtagcgaagcagccgcttctactgccgttgtgattgccggccggtctctaaaccctaatagagtgacatttaaggccaaccggccatttctagtgtttatcagggaggtacccctgaacacaattatctttatgggccgggtggcaaatccctgtgtcaag

SEQ ID NO: 18852 - DNA, 1392 bp, synthetic construct
  misc_feature 1..1392: note = source = /note="Description of Artificial Sequence: Synthetic coding sequence"
  source 1..1392: mol_type = other DNA
atgtattcaaacgtgataggaactgtcacttccggaaagcgaaaggtctaccttctctcgctgctgctgatcggcttctgggactgtgtgacatgccacggatctccagtagatatttgcactgccaagcctagggatatcccaatgaaccctatgtgtatctacagaagtccagaaaaaaaggctactgaggatgaggggagtgaacagaagataccagaggccactaaccgccgagtgtgggagctgtccaaggccaactcaaggtttgcgaccaccttctaccagcatctagccgattctaagaacgataatgacaatatctttttgagtcccctgtctatcagcaccgcttttgcaatgaccaaactgggcgcctgtaatgacacgctgcaacagcttatggaggtattcaaatttgacaccatctccgagaaaacctctgaccagatacatttcttctttgcaaagcttaattgtcgcttatataggaaggccaataaatcctcgaagttagtgtccgccaacagactgttcggagacaaatccctgaccttcaatgaaacgtaccaggatataagtgaactcgtgtatggcgcaaaattgcagcctctggatttcaaagagaatgcggaacagtctcgtgccgctatcaacaagtgggtgtctaacaaaaccgagggaagaattacagatgttataccgtccgaggcaattaacgagttgactgtgctcgtcctagtcaatactatttattttaaggggctctggaagagcaaattcagccctgagaatacccggaaggagctgttctataaagccgacggcgaatcctgctcagcctctatgatgtatcaggaggggaagttcaggtaccgaagggtggccgaaggaacccaggtcctggaacttccattcaagggagacgatattactatggtactgatcctgcctaagcccgagaaaagcctggcaaaggttgaaaaagaacttaccccggaggtcctccaagagtggctggacgagctggaagaaatgatgctagtggtccatatgccaagattcaggatcgaggatggcttctccctgaaggaacagctgcaggatatgggcctagtggacctgttcagtcctgaaaagtctaagctacctggaatcgtcgcagaaggccgcgatgatctctacgtcagtgatgcctttcacaaggcctttcttgaagtcaatgaggaaggctcagaagcggcggcgagtactgccgtcgtcatcgccggccgcagcctgaacccaaatcgggtgacttttaaggccaatagaccgttcttagtattcataagagaggttcccctgaacactatcatattcatgggcagggtcgccaacccctgcgtaaag

SEQ ID NO: 18853 - DNA, 1392 bp, synthetic construct
  misc_feature 1..1392: note = source = /note="Description of Artificial Sequence: Synthetic coding sequence"
  source 1..1392: mol_type = other DNA
atgtattccaatgtcattggaacagtgaccagcggtaagcgcaaggtctatctgctgagcctgttattaattggattctgggactgcgttacctgccacggatctcccgtcgacatctgtaccgctaagcccagagatatccctatgaatcccatgtgcatctacaggagcccagagaaaaaggccactgaagatgagggctccgaacaaaagattccagaagccaccaatcggcgagtttgggaactgtctaaggctaacagtcgatttgccaccacgttttaccagcacttggccgactccaaaaatgataatgacaacattttcctgagccccctgagtatttcaacagccttcgccatgaccaagttgggtgcatgcaacgatactctgcagcagctaatggaggtcttcaaatttgacaccatcagtgaaaagaccagcgaccagattcacttcttttttgcaaaactgaactgcagattgtatcgcaaagccaacaaatcttcaaagctggtttcagctaatagattgtttggcgacaaatcactaaccttcaatgagacataccaggatatttctgagctggtgtatggtgccaagctgcagcctctcgattttaaagagaatgccgagcagtctcgagccgcgatcaataagtgggtctctaataagacagagggccgcattacagatgtaattccttccgaagcaataaacgagctgaccgtgcttgtacttgtaaacacgatctactttaaagggctttggaaaagcaagttttcacctgaaaatacgaggaaagaacttttctataaagctgacggggaatcctgctctgcctccatgatgtaccaagagggaaagttcaggtaccgtagggtcgccgagggcacacaggttttagaactgcccttcaaaggcgacgacattaccatggtgctgattttacctaaacctgaaaagtcattagccaaggttgaaaaggagctgaccccagaggtgctgcaggaatggcttgatgaactggaggagatgatgcttgtagtgcatatgcctcgatttcggattgaagacggcttttcactgaaggaacaactgcaagatatgggcctggtagatctcttctcccccgagaagtcaaaactaccagggattgttgcagagggaagggacgatttgtacgtgtctgatgctttccacaaggcttttctagaggtgaacgaggaggggagcgaagcagctgccagcactgctgtggtaatcgccggccggagcttgaaccctaacagggtgacattcaaagccaacaggccttttctcgtgtttatccgagaggtaccgctgaataccataatctttatggggagagtcgcaaacccatgcgttaag

SEQ ID NO: 18854 - DNA, 1392 bp, synthetic construct
  misc_feature 1..1392: note = source = /note="Description of Artificial Sequence: Synthetic coding sequence"
  source 1..1392: mol_type = other DNA
atgtactcgaatgtgatcggcactgtgaccagtggtaagcggaaggtgtacctcctgagcctgctgctgatcggtttttgggactgcgtcacttgtcacggatcaccagtggacatatgcactgccaagccaagagatattccgatgaatcccatgtgcatctacagatcgcctgaaaagaaagcaaccgaggacgagggaagcgagcaaaagatcccggaggcgaccaacagacgggtgtgggagctctcgaaggcgaactcgcgatttgcgaccactttctatcaacatctggccgacagcaagaacgataacgacaacatattcctgtcgccgttgtcaatctccacggctttcgcgatgaccaaacttggtgcctgcaacgataccctgcagcagctcatggaggtgttcaaattcgacaccatctctgagaaaacttccgaccagatccatttcttctttgcgaaacttaactgccggctgtaccggaaggcgaacaagtcgtcgaagctggtgagcgccaacagactgttcggcgataagtcgctgactttcaatgaaacctatcaggatatctccgaactggtctacggagcaaagctccagcccctggatttcaaggagaatgccgaacaatcccgggcagcaatcaacaaatgggtgtcaaataagaccgaaggccgcattactgatgtaatcccatccgaggccattaacgaactgactgttctggtcctcgtgaatactatttacttcaagggtttgtggaaatcaaagttttccccggagaacaccagaaaagagctgttctacaaggcggacggggaaagctgtagcgcaagcatgatgtatcaagaaggaaagttccggtatcgccgggtggcggagggcacccaggtgctggaactgcctttcaaaggagatgacatcactatggtcctgatcttgccgaagccggaaaagtcgctggcgaaggtcgaaaaagagttgaccccggaagtcctgcaagaatggttggatgaactcgaggaaatgatgctcgtggttcatatgcctcggttccgcatcgaggacggattctccctgaaggaacagctgcaggacatgggcctggtcgacctcttctcgccagaaaagtcgaagttgccgggaatcgtggcagaaggtcgggacgacctctacgtgtcagatgcgtttcataaggctttcctcgaggttaacgaagaaggcagcgaggcagcggcttccactgccgtggtcatcgccggccgctcgctgaaccctaacagggtgaccttcaaagctaaccgcccattcctggtctttatcagggaagtcccactgaacaccatcatcttcatgggaagagtggctaacccttgtgtgaag

SEQ ID NO: 18855 - DNA, 1392 bp, synthetic construct
  misc_feature 1..1392: note = source = /note="Description of Artificial Sequence: Synthetic coding sequence"
  source 1..1392: mol_type = other DNA
atgtattccaacgtgatcggaactgtgacctcgggtaaaaggaaggtctatctcctcagccttctcctgatcggattctgggactgcgtcacgtgccatggatctcctgtggatatttgcaccgctaagccgcgcgatatccccatgaatccgatgtgtatctaccgatcgccggaaaagaaagccaccgaggacgagggatcggaacagaagatcccagaagccactaaccgtcgggtctgggaactgtcaaaggcgaacagccgattcgccacgactttctaccagcacttggccgattcgaaaaacgataacgacaatatcttcctgtcgccgctctcgatctccaccgcgttcgccatgactaaactgggggcctgcaacgacaccctgcaacagctgatggaggtgttcaagttcgacaccatttctgaaaagacctcagatcaaattcacttctttttcgctaagctcaactgtcgcctttacaggaaagcgaataagtcgtcaaaattggtttcagccaatagattgttcggcgacaaatcccttactttcaacgagacttaccaagacatttctgaactggtgtacggtgcaaagctgcagccgctggactttaaagagaacgcagaacagtctcgcgcggctatcaacaagtgggtgtcaaacaagaccgaggggagaatcaccgacgtgataccatccgaagcaatcaacgagctgaccgtccttgtcctggtgaataccatctactttaagggcttgtggaagtcgaagttcagccctgagaacacccggaaagagctcttctacaaggccgacggagaatcctgctcggcaagtatgatgtaccaggaaggcaagtttcggtaccggagagtcgcggagggcactcaggtgctcgaactccctttcaagggggacgatatcactatggtgctcatcctgcctaaaccggaaaagtcgctggcgaaggtggagaaggaactgaccccagaagtgctccaagaatggttggacgaactcgaagagatgatgctcgtcgtccatatgccgcgctttcgcatagaggatggtttcagtctgaaagaacaactccaggacatgggactggtcgatctcttcagtcccgaaaagtcgaaattgcctggaattgtcgctgaagggagagatgatctgtacgtgtcggacgcctttcacaaggcattcctggaggtaaatgaggagggttcagaggcggccgcatcaaccgccgtagtgatcgcgggacgcagcctgaacccgaatagagtgactttcaaggccaaccgcccgtttctcgtgtttatcagggaagtgccgctgaacactatcatcttcatgggaagggtggccaatccatgcgtgaaa

SEQ ID NO: 18856 - DNA, 1392 bp, synthetic construct
  misc_feature 1..1392: note = source = /note="Description of Artificial Sequence: Synthetic coding sequence"
  source 1..1392: mol_type = other DNA
atgtactctaatgtcattggcaccgttacatccggaaagagaaaggtatatctcttgtcattgttattaatcggattctgggactgcgtgacttgccatggcagtccagtggatatctgcactgccaaacccagggatatccccatgaaccccatgtgcatataccggagccctgagaaaaaagcgacagaagatgaaggcagcgagcaaaagatccccgaggccaccaataggcgtgtgtgggagttgtcaaaggccaatagccggttcgctacaactttttaccagcatctggctgatagcaagaacgataatgacaacatcttccttagcccactgagcatcagcaccgcatttgctatgactaagctcggagcatgcaatgataccctgcaacagcttatggaggtgttcaaattcgataccatttcagaaaagacttcagaccagatccacttttttttcgccaaattgaattgtaggctctaccgcaaagccaacaagtcaagcaaactggttagtgccaaccgtctgttcggtgacaaaagcttgaccttcaatgagacctaccaggacatcagcgagttagtgtacggcgctaagcttcagccactcgatttcaaggagaacgcggagcagtcgcgcgccgctattaacaagtgggttagtaataaaaccgaaggtcgcatcacagatgtcatcccttccgaggcaatcaacgaactgacagtcctggtactcgtcaacacaatctatttcaagggcctttggaagtcaaagtttagcccagagaatacaagaaaggagctcttttataaagccgacggcgaaagctgctctgcatccatgatgtaccaggaagggaagttccgatatcggagggtggccgagggaacccaggtacttgaactcccgttcaaaggagatgatatcacaatggtgttgattcttcccaagccagagaagtctttagctaaagtggagaaggaactcacaccagaggtgctccaggaatggctggacgagttggaagaaatgatgctcgtagtacacatgccacgcttcaggattgaggatggttttagcttaaaagagcagctgcaagatatgggacttgtcgatctcttcagcccagagaaaagcaagctcccaggcattgtggcagaaggccgcgacgatctctacgtgtcagacgctttccacaaggccttcctggaagtcaatgaggagggaagcgaggcagccgccagtactgccgtggtcatcgccggcaggagcctcaaccctaaccgggtcacattcaaggcaaatcgtcctttcctggtattcatccgggaggtaccgctgaacactatcatttttatgggcagagtggcgaatccatgcgtgaag

SEQ ID NO: 18857 - DNA, 1392 bp, synthetic construct
  misc_feature 1..1392: note = source = /note="Description of Artificial Sequence: Synthetic coding sequence"
  source 1..1392: mol_type = other DNA
atgtactcgaatgtgatcggaactgtcacttccggtaagcgtaaggtgtatctgctcagtctccttctcattggtttttgggattgtgtgacttgtcatggcagcccagtggatatttgcactgcgaagccgagagacatccctatgaacccaatgtgtatctaccggtcacctgaaaagaaagctaccgaagatgaaggatctgaacaaaagattcctgaagcaacgaaccgacgagtgtgggagctgagcaaggcaaactccagattcgcaaccactttttaccaacatcttgcagactcgaagaatgataacgataacatatttctgtcgcccctttcgatcagcactgctttcgcaatgactaagttgggtgcatgcaatgataccttgcagcaacttatggaagtgtttaagtttgacactatatcggagaaaacttcggaccagattcatttcttctttgcaaaactgaattgcagactgtaccgaaaggcaaataagtcctcgaaactggtttcggcaaacagattgtttggtgataaatccctgacctttaacgaaacctaccaggatatatccgaattggtgtacggagcgaagctgcagcctctggacttcaaagaaaatgcagagcagtcgcgcgcagctattaacaagtgggtgtccaataagaccgaaggacggattaccgatgtgatcccgtctgaggcaatcaacgaactgaccgtccttgttctcgtgaacaccatctactttaagggcctttggaaaagcaagtttagccctgaaaacacgaggaaagagcttttctacaaggccgatggagaatcatgttcagcatcgatgatgtaccaagaaggcaaatttcgatatcgacgagtggctgagggaacgcaagtgcttgaactcccatttaagggagacgatatcaccatggtcctcatcctgcctaaacctgaaaaatcgctcgcaaaggtggaaaaggagcttactccagaagtgcttcaagagtggctggatgagctggaggagatgatgcttgtggtgcacatgccacgatttcgtattgaggacggtttttccctgaaggaacagctccaggatatggggctcgtggatctcttctcacccgaaaagtccaaactgccaggaatcgtcgcagaagggagggatgacctgtacgtttccgatgccttccacaaggcatttcttgaagtgaatgaagagggttcggaagcggcagcaagcacggcagtcgtgatcgcaggacgtagcttgaacccgaacagagtaaccttcaaagcaaaccgcccctttcttgtctttatccgggaagtcccactcaacactatcattttcatgggtcgagtggccaacccctgcgtgaaa

SEQ ID NO: 18858 - DNA, 1392 bp, synthetic construct
  misc_feature 1..1392: note = source = /note="Description of Artificial Sequence: Synthetic coding sequence"
  source 1..1392: mol_type = other DNA
atgtacagtaatgtgatcggaacagtcacatctgggaagcgaaaggtatacctgttgagcttattattgatcggtttttgggactgcgtcacttgccatgggtctccggtcgatatttgcacagccaagccgagggatatacctatgaacccaatgtgcatttatcgctccccagaaaagaaagccactgaggatgaaggatcagagcagaagatccctgaagccaccaatcgacgggtctgggaactgtctaaagcaaactccagattcgctactactttttaccagcacctcgcggattccaagaacgataacgataatatcttcctctcgccactcagtatcagtacagcctttgccatgacaaagctgggggcctgcaatgacacgttgcagcaactcatggaggtcttcaaattcgatacaatcagcgagaagacctcggatcaaattcacttttttttcgccaagctgaactgcagattgtaccggaaggcgaacaaatcctcgaagcttgttagtgctaatcgactctttggcgataaatcccttacgttcaatgaaacgtaccaggacataagcgagctggtgtacggtgctaagctgcaacctctcgactttaaagagaacgcagagcaatctagagcagccatcaacaagtgggtttcgaacaagacagagggtcgaattacagatgtcattcccagcgaagcaattaatgaactcaccgtgcttgtgttggttaataccatctattttaagggtttatggaaatccaagttcagcccagagaacaccagaaaagaattattctataaagccgatggagagagttgctccgcatctatgatgtaccaagaaggtaagttcagatatcgcagggttgccgaaggcacacaggtccttgagttaccttttaaaggtgatgacatcacgatggttcttatcctcccaaagccggagaagtccctcgcaaaggttgagaaggagctaacgccggaagtgctacaagagtggctagacgagttagaggaaatgatgcttgtggttcatatgcctaggttcaggattgaagacggtttttcgcttaaggagcagctccaggacatgggccttgtggatcttttctctcctgaaaagtcaaaattgccaggtatcgtcgcggaagggcgcgacgacctttacgtctccgatgcattccataaggctttccttgaagtaaatgaggaaggaagtgaggccgctgcttccaccgccgtggttatagccggtcgtagtctgaatcccaaccgagtcacattcaaggcgaatcgacctttcttggtcttcattcgggaagtcccactgaataccattatcttcatgggacgtgtggcaaatccatgtgtgaag

SEQ ID NO: 18859 - DNA, 1392 bp, synthetic construct
  misc_feature 1..1392: note = source = /note="Description of Artificial Sequence: Synthetic coding sequence"
  source 1..1392: mol_type = other DNA
atgtactccaacgtgatcgggacggtgacctccggaaagcgaaaggtgtacctgttgtcgctgcttctgattggattctgggactgcgtcacctgtcacggaagcccggtggacatctgcactgcaaagccccgcgacataccgatgaatcccatgtgcatctaccgctctccagagaagaaagctaccgaggatgagggatcggaacagaagatcccggaggcgactaaccgacgggtctgggaactttcaaaggcaaactccagatttgccactactttctaccaacatctggcggattcaaagaatgacaacgataacattttcctgagcccgctgagcatctccaccgctttcgctatgaccaagctgggtgcttgcaacgatactctgcaacagttgatggaagtgttcaagtttgataccatctccgaaaagacctcggaccagatccacttcttcttcgccaagctgaactgccgcttgtaccggaaagcaaacaaatcatccaaactcgtgtccgccaatcggctgttcggggataagtctctcacgtttaacgagacttatcaggacatctcggaactcgtgtacggcgccaagttgcagccactggacttcaaggaaaacgcggaacagtcgcgggcggccatcaacaagtgggtttccaacaaaactgagggtcgaatcactgatgtcatcccgtcggaagccattaatgaactgaccgtgctcgtgctggtcaataccatctacttcaagggcctgtggaagagcaaattctcaccagagaatactcgcaaagagctgttctacaaggccgacggagagtcatgctcggcgtcgatgatgtaccaggagggaaagtttcggtatcgccgcgtcgcggagggcactcaggtgctcgaacttcccttcaaaggcgatgacatcactatggtgctcatccttcctaaaccggagaagtctttggcgaaagtcgagaaggaattgacccccgaggtccttcaggaatggctggatgagctcgaagaaatgatgctcgtggtccacatgccacgcttccggattgaggacgggttttccctcaaggaacagctccaagacatgggtcttgtggatctgttttcgccggaaaagagcaagctgccgggaatcgttgcagaaggacgcgacgacctgtacgtgtcggacgcatttcataaggccttcctggaagtcaacgaagaaggcagcgaagcggcggcatcgactgccgtggtcattgcgggacgctcgctgaacccgaatcgcgtgaccttcaaggccaacagaccttttcttgtgttcatccgggaagtgcctctgaacaccatcatctttatggggagagtcgccaacccatgcgtgaag

SEQ ID NO: 18860 - DNA, 1392 bp, synthetic construct
  misc_feature 1..1392: note = source = /note="Description of Artificial Sequence: Synthetic coding sequence"
  source 1..1392: mol_type = other DNA
atgtactctaatgtaatcggcaccgtgacctccggaaaacgcaaggtttatctgctcagcttactgctgattggtttttgggactgcgttacgtgtcacgggtcccccgtggatatctgcactgcaaagcctcgagacatccccatgaaccccatgtgcatatatcgaagtcctgaaaaaaaggcaaccgaggacgaggggagcgagcaaaagatcccggaggcaacaaaccgtagagtgtgggaactttctaaggcgaatagtcgatttgccacaacattctaccagcacctggctgacagtaagaatgataacgacaacatattcctgtcaccgctcagcatctccacagcatttgccatgacaaagctaggagcttgcaacgataccttgcagcaactaatggaggttttcaagttcgacaccataagtgaaaaaacgtccgatcaaatacactttttctttgccaagctgaattgccggctttacaggaaagctaacaaaagctcaaagctcgtctccgctaaccggttgttcggcgacaagagtttaaccttcaacgagacctaccaggacatttcggaattggtgtacggggccaagttgcaacctctcgatttcaaggagaatgccgaacagagtcgggccgccatcaacaagtgggtatcgaataagacggaaggtcgaatcaccgatgttattccctcagaggccattaacgagctcaccgtgctagtattggtgaacactatctacttcaaaggcctttggaagagcaaattctcaccggaaaacacgagaaaggagctcttctacaaggccgatggagagtcttgctctgcttcgatgatgtatcaggagggcaaattccgctatcgtagggttgccgagggaacccaagtcctggaacttccttttaagggcgacgacatcacgatggtcttaatcctgcctaagcctgaaaagtcactggctaaagtggaaaaggaacttactcctgaggttctccaggagtggctggacgaacttgaagaaatgatgctcgtcgtgcatatgcctagatttcggattgaagacggtttctcactgaaagaacaactgcaggacatggggcttgtggacttgttctcccccgagaagtcgaagctgcccggcatagtcgctgaggggcgcgacgacctctatgtcagtgatgcctttcacaaagcctttctggaagttaacgaggaggggagcgaggccgccgcctcaactgcagtcgtgatcgcaggcaggtccttaaacccaaaccgggttacgtttaaagccaacagaccttttctggtcttcattcgggaggtacccctgaacactataatttttatgggaagggtcgctaacccctgtgtgaaa

SEQ ID NO: 18861 - DNA, 1392 bp, synthetic construct
  misc_feature 1..1392: note = source = /note="Description of Artificial Sequence: Synthetic coding sequence"
  source 1..1392: mol_type = other DNA
atgtactcgaacgtgataggaaccgtcacgtctggaaagcggaaagtctacctgctgtcactgctgcttatagggttttgggattgtgtcacctgccatggctcacctgtggatatttgtaccgccaagccacgagatattcccatgaatcctatgtgtatctacagatccccggaaaagaaggcaactgaagatgaaggttcggaacagaaaattccagaggcaactaataggagggtctgggagctttccaaagcaaactcgaggtttgcaactaccttctaccaacatcttgcagattcgaaaaacgataatgataacatatttctgtcacctctgtcaatctcgaccgcatttgctatgacgaaacttggtgcctgcaatgacactctgcagcagcttatggaagtctttaagttcgataccatttcggaaaagacctcggatcagattcatttcttttttgcgaagttgaattgcagactttacagaaaggcaaacaagtcctccaaacttgtgtcggcaaacagactgttcggagataagtcattgacctttaacgaaacttaccaggatatttcagaactggtctacggtgcaaaactgcagccacttgactttaaggaaaacgccgagcagtccagagcagcaatcaataagtgggtttctaataagactgaagggcgcattacggacgtgattccgtccgaggctatcaatgagcttaccgtcctggtgctcgtgaataccatctacttcaaggggctctggaagtccaaattctcgcctgaaaacactcgcaaagaactgttttacaaggcagatggtgaaagctgctcagcgtccatgatgtaccaagagggtaagtttcgctacagaagagtggcagagggtacccaagttctggaactgcccttcaagggtgatgatattaccatggtgcttattctgcctaaaccagagaagtcgcttgcaaaggttgaaaaggaacttactccggaagtgctgcaagagtggcttgacgagctcgaagaaatgatgctggtggtgcatatgcctagattcaggatcgaagatggattctcacttaaagagcaactccaggatatgggattggtggatctcttttcccccgaaaagtcaaaactgcccggaatcgtggccgaaggcagagacgatctctacgtctctgatgcatttcataaggcctttctggaggttaacgaagaagggtccgaagcagcggcaagcaccgcggtggtgatagcaggccgctcccttaaccctaacagagtgacttttaaggcaaacagaccatttctcgtgttcattcgtgaagtccccctcaacactatcattttcatgggacgtgtggcaaatccttgtgtgaag

SEQ ID NO: 18862 - DNA, 1392 bp, synthetic construct
  misc_feature 1..1392: note = source = /note="Description of Artificial Sequence: Synthetic coding sequence"
  source 1..1392: mol_type = other DNA
atgtacagcaatgtgatcggaaccgtgacttccgggaagcggaaggtctacctgctgtccctccttcttatcggtttctgggactgcgtgacttgtcatggctccccggtcgatatctgtaccgccaagccgcgagatatcccaatgaacccgatgtgcatctaccggagcccggaaaagaaggcgaccgaagatgagggctccgaacaaaagatcccagaggctactaatcgcagagtttgggagctcagcaaggctaacagcagatttgccacgaccttctaccagcacctcgccgattccaaaaacgataatgataacatttttctttccccactgtcgatttcgactgccttcgcaatgactaagctgggggcatgcaacgacacgctccagcaactcatggaggtgtttaagttcgacactatttcagaaaaaacttcagaccaaatccactttttctttgcgaaacttaactgcagactgtatcgcaaggccaacaaatcgtccaagctggtgagcgctaatcgcctgttcggagataaatctctgacgttcaatgaaacttaccaggatatctcggagctggtctacggtgcaaaactgcagccgctcgactttaaggaaaatgccgaacaatcgagagcggcgatcaacaaatgggtatcgaataagaccgaggggagaatcactgacgtcatcccaagcgaggcaatcaacgagcttacggttctggtcctcgtcaacaccatttacttcaagggactttggaagtccaagttctccccagagaacactcggaaggagctgttttacaaggccgatggagagagttgctccgcttctatgatgtaccaggagggaaagttccggtaccgccgggtggccgagggaacccaagtgctggaactgccattcaagggagatgacatcaccatggtgttgatcctgccaaagcctgagaagagcctcgccaaagtggagaaggaactgactcccgaagttctgcaagagtggctggatgaattggaggaaatgatgctcgtggtgcacatgccgcggttccgcattgaggacggtttctcattgaaggaacagctccaggacatgggactcgtcgacctcttttcgcctgaaaaatcgaaacttccggggattgtggctgaaggacgcgacgacttgtacgtctcagatgcattccataaggccttcctggaagtgaatgaagaaggcagcgaagctgccgcctcaactgccgtggtgattgctgggcgatcactcaatcccaaccgcgtaaccttcaaggcgaaccgacctttccttgtgttcatcagagaagtgccgctgaacactatcattttcatgggacgcgttgctaacccatgcgtgaaa

SEQ ID NO: 18863 - DNA, 1392 bp, synthetic construct
  misc_feature 1..1392: note = source = /note="Description of Artificial Sequence: Synthetic coding sequence"
  source 1..1392: mol_type = other DNA
atgtattccaacgtcatcggtaccgtcacaagcggaaagcgaaaagtctatctcctttctctcctgttaatcggattctgggactgtgtgacttgccatggaagtccggttgatatttgcaccgccaagcctagggacatacccatgaatcctatgtgtatttatcggtctccggagaaaaaggctactgaagacgaggggtccgagcagaaaatcccggaggccacaaataggcgggtctgggaactctccaaagccaacagccgattcgctacaaccttttaccaacatctggccgacagcaagaacgataacgacaacatcttcctgagcccattgagcatatccactgccttcgcgatgacaaaactgggggcttgcaacgatactctccagcagctcatggaggtctttaagttcgataccattagtgaaaagacctccgatcagatccactttttttttgctaagctgaattgccgactgtacagaaaagcaaacaagtcatcaaaactcgtctctgctaacagactcttcggcgataaaagcctcacttttaacgagacctatcaggatatttctgagctagtttacggggcgaagttacagcctctggacttcaaggagaacgccgaacagagtagagccgccattaataaatgggtgtcaaataaaacagaaggacggattactgacgtgataccaagcgaagccataaacgagctgaccgttctagtcctggttaacactatctattttaaaggactgtggaagtcaaagttctccccagaaaatacacgaaaagagctcttttacaaagccgatggagaatcctgcagtgcctccatgatgtatcaggagggaaagttcagatatcgcagagtggccgagggaacccaggtacttgaactgcctttcaaaggagacgatattaccatggtgttgatattgccaaagcctgagaaatctctggccaaagtggagaaagagctcacacccgaagtgcttcaagaatggctggatgaattagaagagatgatgctggttgttcacatgcctagattccggatcgaggacggcttctcccttaaagagcagctgcaggatatggggctcgttgatctcttctccccggaaaaaagcaaactgcctggtatagtcgctgagggtcgtgatgacttatatgtgtcggatgccttccacaaggctttcttggaggtgaatgaggagggatccgaagctgccgcctccactgccgtggtaattgccggtaggagcttgaacccaaatagagtgaccttcaaagccaataggccctttctcgtcttcatcagagaggtaccgctgaacactatcatttttatgggaagagtggccaacccatgtgttaaa

SEQ ID NO: 18864 - DNA, 1392 bp, synthetic construct
  misc_feature 1..1392: note = source = /note="Description of Artificial Sequence: Synthetic coding sequence"
  source 1..1392: mol_type = other DNA
atgtactccaacgtcatcggaaccgttacctccggtaagcgcaaagtgtaccttctgtcgctgctgctgatcgggttctgggactgcgtgacgtgccatggaagcccggtggatatctgtactgcgaagccgcgagacattccgatgaacccgatgtgcatctatcggtcgcctgaaaagaaagctaccgaggacgaggggagcgagcaaaagatcccagaagctactaatagaagggtgtgggagttgagcaaggccaattcaagattcgctactacgttctaccagcacctggccgattcaaagaacgacaatgataacatctttctctctcctttgtcgatctcgactgccttcgcaatgacgaagctcggagcttgcaatgacacccttcagcagctcatggaggtattcaagttcgataccatctcggagaaaacttccgaccagattcacttcttcttcgcgaaactgaattgtagactgtaccgtaaagcgaacaagtcctctaagctcgtgtcagcaaaccgcttgtttggcgacaagtcgctcacctttaacgaaacctaccaggatattagcgaactggtgtacggcgccaaacttcaaccgctcgatttcaaggaaaacgcggagcagtcccgggctgccatcaataagtgggtttctaataagactgagggacggatcactgacgtgatcccgtccgaagccatcaacgaattgactgtcctcgtgctggtgaataccatctatttcaagggcctgtggaaatcgaaattctccccagaaaacactagaaaggagctcttttacaaggctgatggcgaatcatgtagcgcatcgatgatgtaccaagaaggcaagtttcgctaccggagagtggccgaaggaacccaagtccttgagcttccattcaaaggtgacgatattacgatggtgctgatcctcccaaagccggagaagtcgctggccaaggtcgaaaaggaactcactccggaagtgcttcaggaatggctggacgaactcgaggaaatgatgctcgtggtccacatgccgcgcttccggatcgaggacggattttctctcaaagagcaactccaggacatgggattggtcgatctgttcagcccggagaagtcaaagttgccaggaatcgtggccgagggcagagacgacctgtacgtgagcgatgcgttccataaggcgttcctggaagtgaacgaggagggatcggaagctgctgcatcaactgctgtggttatcgccggacgctccctcaatccaaaccgggtcaccttcaaggcaaacagacctttcctcgtgttcatccgcgaagtaccgctcaataccatcatattcatgggacgggttgcaaacccatgcgtcaaa

SEQ ID NO: 18865 - DNA, 1392 bp, synthetic construct
  misc_feature 1..1392: note = source = /note="Description of Artificial Sequence: Synthetic coding sequence"
  source 1..1392: mol_type = other DNA
atgtatagcaatgtgataggcactgtaacttctggcaagagaaaagtgtacttactatctctgctgcttatcgggttttgggattgtgtcacttgccatggctccccagtggatatatgtacagccaaacctcgcgatatacctatgaacccaatgtgcatttaccgtagccccgagaaaaaggctaccgaggatgaaggatctgaacaaaagatccctgaggccactaaccgacgggtgtgggagctgagcaaggctaattcccgttttgccactaccttctaccagcacttagccgactctaaaaacgataacgacaatatttttctgagtcctctgtccatctctaccgcctttgctatgaccaagctgggagcctgcaatgacactcttcaacaactgatggaggtgtttaagtttgacaccataagcgaaaagacttcagatcagattcatttctttttcgctaagttaaactgcaggttatacagaaaagcaaacaagagcagtaagctcgtatccgccaatcgcctatttggcgacaagtcattaacatttaacgagacataccaagatataagcgagctggtgtacggcgctaaactacagcccttagacttcaaggaaaacgccgagcagtctcgggctgctattaacaaatgggtttcaaacaaaaccgagggcagaataaccgatgtgataccaagcgaagctatcaatgagctgaccgtgctagttctggtgaacacaatttattttaagggactgtggaagtctaaattctcaccagaaaatacaaggaaagagctattttacaaggctgatggcgagagttgctccgcttctatgatgtaccaagaaggcaagttcaggtaccgacgagttgccgaaggcacacaggtgctggagttaccctttaaaggcgatgacatcactatggttctaatattacccaagccagagaaatctctcgctaaagtggaaaaagaattgactccagaggtgctccaggagtggctggacgagttagaagagatgatgctcgtggttcacatgccacgcttcaggatagaggacggattttctctgaaggaacagctgcaggatatgggcctcgttgacctgtttagtcccgagaaatcaaaactgccaggtattgtggctgaaggccgggatgacctctatgtctctgatgccttccataaggctttcctggaggtgaacgaggagggatccgaggctgccgctagtacagccgtggttatagcaggccggagcctgaaccccaatcgtgttacctttaaggccaacagacctttcttggtgttcatacgcgaggtgcctcttaacaccattatctttatgggccgtgtagctaatccctgtgttaag

SEQ ID NO: 18866 - DNA, 1392 bp, synthetic construct
  misc_feature 1..1392: note = source = /note="Description of Artificial Sequence: Synthetic coding sequence"
  source 1..1392: mol_type = other DNA
atgtatagcaacgtgattggtacagtgacctctgggaagcgcaaagtgtacctgctgtccctgctgctgatcggcttttgggactgcgtgacctgccacggatcacctgtcgacatctgtacagcaaagcccagggacatccctatgaacccgatgtgcatttatcgcagtcccgaaaaaaaggctaccgaagatgaaggcagcgaacaaaagattcccgaggccaccaaccgcagagtgtgggaactctcaaaggccaattccaggttcgcgacaaccttttaccagcatctggctgactccaagaacgacaacgacaacatcttcctctccccattgtctataagtacagcgtttgccatgaccaagctcggggcctgcaatgacactctacagcaactcatggaagtctttaagtttgataccatcagcgagaaaaccagcgaccagatccacttttttttcgcaaaactcaattgtagactttaccgcaaggccaacaaatcaagcaaattagtatcggcaaatcgactgtttggagataagtcgttgacgttcaacgaaacgtaccaggatatttccgaactggtttatggggccaaactgcagccacttgacttcaaggaaaacgccgaacaaagccgagccgctatcaataaatgggtgagtaacaaaaccgagggcagaatcaccgatgtcattccatcagaggctattaatgaactgaccgtgttagtgttggtaaacacgatctactttaagggtttgtggaagtctaagttctcgcctgagaacacacgcaaggagttgttttacaaggctgacggcgaatcctgtagtgcgtctatgatgtaccaggaggggaagtttaggtatagacgggtggccgagggcacgcaggttttggaactccctttcaagggcgacgacatcacaatggtcctcatcttgcccaaacctgaaaagtccctggccaaggtggaaaaagaactcactcccgaggtcctgcaggaatggctggacgaattggaggagatgatgcttgtcgtgcacatgcctcggttcaggatagaggatgggtttagcctgaaagaacagctgcaggacatgggactggtcgacctgttctctcccgagaaatccaaactgccagggattgtggccgaaggacgcgacgacctctacgtctccgatgcctttcataaggccttcctggaggtgaacgaagaaggctcagaagctgccgcatccacagctgtggttatcgccggccgttccctgaatccaaaccgggttaccttcaaagccaaccgcccctttctggtttttattcgggaagttcccctgaacactatcattttcatgggtcgggtggccaatccctgtgttaaa

SEQ ID NO: 18867 - DNA, 1392 bp, synthetic construct
  misc_feature 1..1392: note = source = /note="Description of Artificial Sequence: Synthetic coding sequence"
  source 1..1392: mol_type = other DNA
atgtatagcaacgtgattggaaccgtaacttctggaaaacggaaggtgtacttgttgtcactcctgctcattggattctgggactgtgtgacttgtcatggcagtccagtggacatctgtactgcgaaacctagggacatccctatgaatcctatgtgcatctatagatctccagagaaaaaggcgacagaggacgagggatccgagcagaaaattcccgaagccactaaccgcagggtgtgggaacttagcaaagctaacagtaggtttgcgactactttttaccagcacctggccgacagtaagaacgataacgacaatatctttctttcccccctttctatatcaaccgcattcgctatgacaaagctgggggcctgtaatgatacgctgcagcagctcatggaggtcttcaaattcgataccatttccgagaaaacctctgatcagattcacttctttttcgccaagttgaactgccggctgtacagaaaagctaacaaatcctccaagctggtctccgcgaaccgccttttcggcgacaaaagtctgacattcaacgaaacctatcaggatatttcagaactggtgtatggggctaagctgcaacctctggactttaaagaaaacgctgaacagtcacgggccgcaatcaacaagtgggtgtccaataaaaccgaagggcgcataaccgacgttatcccaagcgaagcaattaatgagttgaccgttcttgtgctggttaacacaatttacttcaagggattgtggaaatctaaattctccccggaaaacaccagaaaagagttgttctacaaagccgatggggagtcctgttctgcatccatgatgtaccaggaaggtaaatttagatatagaagagtagcggagggcacgcaggtgctcgaactgccattcaagggcgatgacattacaatggtcttgatcctgcctaaacccgagaaaagcctagccaaggtcgagaaagagcttacaccggaggtgctgcaggagtggctcgacgagctagaggaaatgatgctagtcgtgcatatgccacggtttcgaatagaagatggttttagcctgaaggagcaactgcaggatatggggctggtagacctgtttagccccgagaaatcaaaactgcctggaattgtggccgagggccgggacgatctgtacgtctccgatgcttttcacaaggcttttttagaggtaaacgaggaaggcagcgaggccgcagcctcgactgcagttgtcatagctgggcgaagcctcaatcccaatagagtgacattcaaagcgaacagacccttcttggtctttattcgcgaggtgcccctgaatacaatcatattcatgggccgtgtggccaacccctgtgtcaaa

SEQ ID NO: 18868 - DNA, 1392 bp, synthetic construct
  misc_feature 1..1392: note = source = /note="Description of Artificial Sequence: Synthetic coding sequence"
  source 1..1392: mol_type = other DNA
atgtacagcaatgtcatcggcacggtaacttctggcaagcggaaggtgtacctgctgtcactgttgctgataggattttgggactgtgtcacctgccacggctctccagtggacatatgcaccgccaaaccaagggatatcccgatgaatccaatgtgtatctaccgctcaccggagaaaaaagctacagaggatgagggcagtgagcaaaagatacccgaagcgacaaaccgaagagtgtgggagctgtctaaagctaacagccgattcgcaactactttttatcagcatctggccgatagcaaaaacgataacgacaacatcttcctgagtcctttgtctatctctaccgcctttgccatgacgaagcttggcgcctgcaacgacacactgcagcagcttatggaagtgttcaagtttgatacgattagcgagaagacgtcagaccagatccacttttttttcgccaaactgaattgccgcttgtaccgcaaggccaacaagtcttctaagcttgtgtctgccaacaggctgttcggtgacaagtctctcacatttaacgagacatatcaggatatttcagagctggtgtatggagccaagctccagcctctggacttcaaggagaatgctgagcagtccagggcagccatcaacaagtgggtaagcaacaaaactgagggcagaattacagatgtgataccctccgaggctattaacgaacttacagtcctggttttggtcaacacaatttactttaagggcctgtggaagtctaagttttcccccgaaaacacacgcaaggagttgttctacaaggctgatggggagtcttgttctgccagcatgatgtatcaggagggaaaattcaggtatcgacgcgttgctgaagggacccaggttctcgagctccctttcaaaggggatgatatcaccatggtgttgatcttgcctaagccagaaaaatccctggcgaaagtggaaaaggagctcacgcctgaggtgcttcaggaatggcttgacgagctggaagaaatgatgctggtcgtgcacatgcctaggtttagaatcgaggatggcttctccctcaaggagcagctgcaggacatggggctcgtagacctgttctctcccgaaaagagcaaactccccggcattgtagctgagggacgcgacgacctttatgtgtccgacgctttccacaaagcttttttggaagtcaatgaagaaggatccgaagccgccgccagtactgccgttgtgattgctggccgctccctgaatcccaaccgagtgacatttaaggcgaatcggccatttctggttttcattagggaggtgccattgaacaccatcattttcatgggtcgggtggccaacccatgcgtgaag

SEQ ID NO: 18869 - DNA, 1392 bp, synthetic construct
  misc_feature 1..1392: note = source = /note="Description of Artificial Sequence: Synthetic coding sequence"
  source 1..1392: mol_type = other DNA
atgtattcaaacgtcatcgggacagtgacaagtggaaaaaggaaagtgtatcttctgtctttgcttctcatcggattctgggattgtgtcacctgccacggttccccagtcgacatctgcaccgcaaaaccgcgcgacatccctatgaacccaatgtgcatctaccgttcccctgagaaaaaggccacagaggatgaggggtcagagcagaagataccagaagccacaaatcgtagagtgtgggagctctcaaaagccaattctaggtttgcgacaacattttatcagcaccttgcagatagcaaaaatgataacgataatatttttctgtcccctttaagcatcagcactgccttcgccatgacgaaactgggtgcctgcaatgacactttgcagcagctgatggaggtatttaaattcgacaccatttctgagaaaactagcgatcagatccactttttcttcgccaagctgaattgtcgtctctaccggaaagctaataagtcctccaagctcgtgtcggccaacaggctctttggtgacaagtccttgacttttaacgagacttatcaggatatatccgagttagtgtacggcgccaaacttcagccactggactttaaggaaaacgcggagcagagtagagcggccataaacaagtgggtgtcaaacaagacggagggcagaatcacagatgtgataccaagtgaggcaataaatgagttaactgtgttggttttagtgaatactatttacttcaaaggcctgtggaagagcaaattctcaccggagaacaccagaaaagagctgttttataaggccgatggtgagagctgcagcgcttcaatgatgtaccaagaaggtaaatttaggtaccgccgcgtggcggaaggaacacaagttctcgagcttcccttcaagggcgatgatatcacaatggtgctcattttgcccaagcctgagaagtcattggctaaggtagaaaaggaactcacccctgaagtgctgcaagagtggctagacgaattagaggagatgatgctggtcgtgcacatgccccgctttaggatcgaggacggcttttctctcaaggaacagctacaggatatgggcctcgtggacctgtttagccccgaaaaatccaagttaccaggcattgtcgccgaggggcgtgatgatctgtacgtgagcgacgcattccataaagccttcctggaagtgaacgaggaagggtcagaggccgccgcctctacggctgtagtcattgctggccggtctctgaacccgaaccgggttaccttcaaagccaatcgtccctttttggtttttatcagagaggtacctctgaacaccattatctttatggggagggtggcaaacccttgtgttaaa

SEQ ID NO: 18870 - DNA, 1392 bp, synthetic construct
  misc_feature 1..1392: note = source = /note="Description of Artificial Sequence: Synthetic coding sequence"
  source 1..1392: mol_type = other DNA
atgtactcgaacgtcatcggaaccgtgacctcaggaaagagaaaggtatacctgttgtcactcctcctgattggattctgggactgcgtgacctgccatggatcgccggttgacatttgtactgcgaagccgagagacatcccgatgaacccaatgtgcatctaccggtcaccggagaagaaagcaacggaagatgagggatcggagcagaaaatccccgaagccactaatcggagagtgtgggaacttagcaaggctaattcccgcttcgcgactaccttctaccagcacttggcggactcgaagaacgataacgataacatctttctctctccattgtcgatctcaaccgccttcgctatgaccaagctgggagcatgtaacgacactctccaacagcttatggaggtctttaagttcgacaccatctcagaaaagactagcgaccagatccactttttcttcgccaaactgaattgcagactttacagaaaggccaacaagtcgtccaagctggtcagcgcgaacaggctgttcggtgataaatctctgacgtttaatgagacttaccaggacatcagcgaactggtctacggggcaaagctccagcctctcgatttcaaagagaatgcagagcaatcacgggctgccatcaacaaatgggtgtcaaataagaccgaaggtcgcatcactgacgtcatcccgtcagaggccatcaatgagctgaccgtgctggtgctcgttaacactatatactttaaaggactttggaagtctaagttctcgccagaaaacacccggaaggaactgttctataaagcagacggagaatcctgctccgcgtcaatgatgtaccaagaaggcaaattcagatacagaagggttgccgaaggaacccaagtcttggaactgccattcaagggagacgatattactatggtgttgatacttccaaaaccggagaagagcttggccaaggtggagaaagagctcacgcccgaggtcctccaagaatggctcgatgagctggaggagatgatgctggtggtgcatatgcctcgcttcaggattgaggacggcttttccctgaaggaacagcttcaggacatgggattggtggacctgttctcgcccgagaagtcgaagctcccgggcatcgtcgcagaagggagggacgatctctatgtgtcggacgcctttcacaaggcgtttctcgaggtgaacgaagagggatccgaagccgcggcaagtacggctgtcgtgatcgcaggccgctcattgaatccgaatagagtgactttcaaagccaatcggccatttctcgtgttcatcagagaagtgccccttaacaccatcatcttcatgggcagggtcgccaacccctgcgtgaag

SEQ ID NO: 18871 - DNA, 1392 bp, synthetic construct
  misc_feature 1..1392: note = source = /note="Description of Artificial Sequence: Synthetic coding sequence"
  source 1..1392: mol_type = other DNA
atgtattccaacgtgattggaaccgtgaccagcggtaaacgaaaggtgtatctgctctcacttttgctgattggcttttgggattgtgtgacttgccacgggtcccctgtggatatctgtaccgcaaaaccgcgggacattcctatgaaccctatgtgtatttacagaagccccgaaaagaaagcgaccgaagatgaaggatcagaacagaaaatacccgaagccaccaacagacgtgtctgggaattgtccaaggcaaacagccgatttgcaactaccttctaccaacatcttgctgactcgaagaacgataatgacaacatcttcctttcccccctgtcaatctcaaccgcgttcgcgatgactaagctgggggcatgcaacgacacgcttcaacagctcatggaggtgttcaagttcgacactatctcggaaaagacgagcgaccagatccatttcttttttgctaaacttaactgtagactgtaccggaaagccaacaaaagctccaagttggtgtcggcaaaccggctgttcggcgataagtcgctgacctttaacgagacttaccaggatatttcggaactggtgtacggggccaagctgcaacctcttgatttcaaggaaaatgctgaacaatcccgtgcagccatcaacaagtgggtgagcaacaagactgaaggcagaattaccgacgtcatcccatccgaagctatcaatgagctcaccgtcctggtgctggtgaataccatctactttaagggtctttggaagagcaagtttagcccagaaaataccagaaaggagttgttttacaaggcggatggagaatcgtgttccgcatccatgatgtaccaggagggtaagtttaggtaccgtcgcgtggcagaaggaacccaagtgcttgaactgccgtttaaaggtgacgatattactatggtcttgattcttccaaagcctgaaaaatcactggccaaagtggaaaaggagctcacccccgaagtcctgcaagaatggctggacgagctcgaagaaatgatgttggtggtgcatatgcctaggttccggatcgaggacggattctcactcaaggagcagctgcaggacatgggtctggtcgacttgttttcacctgaaaagtcgaagctgcccggtattgtcgcggaagggagagacgacctgtacgtgtcggatgcatttcataaggcatttctcgaagtcaacgaagaagggtccgaggcagcagcgtccaccgcagtggtcattgcaggtcgttcgcttaaccccaaccgcgtcacgtttaaagcaaaccggcccttcctcgtgtttattcgcgaggtgccgctgaataccataatctttatgggtcgagtggcgaacccttgtgtcaag

SEQ ID NO: 18872 - DNA, 1392 bp, synthetic construct
  misc_feature 1..1392: note = source = /note="Description of Artificial Sequence: Synthetic coding sequence"
  source 1..1392: mol_type = other DNA
atgtacagcaacgtgattggtaccgtgaccagtggcaagaggaaggtgtatctgctgagccttctcctgattggtttttgggattgtgtgacctgtcacggttcacccgtggatatttgtacggcaaagccacgagacattccaatgaatcccatgtgtatttacagatcgcctgaaaagaaggcaaccgaagatgaaggctccgagcagaaaattccagaagctactaaccgcagagtgtgggagctgtccaaggcaaacagccgatttgccactactttctaccaacatctggcagacagcaagaacgataatgataacatatttctgtcgcccctgtcgatctccactgcattcgcgatgaccaagctgggagcatgtaatgacactcttcaacagcttatggaggttttcaagtttgataccatctctgagaaaacgtcagaccaaattcatttcttctttgcaaaacttaactgtcggctgtaccgtaaggcgaataagtcctctaaactcgtgtcggcaaataggctctttggggacaagtcattgactttcaacgaaacctaccaggacatatcagaacttgtctacggagccaaacttcaaccattggatttcaaggagaacgcagaacagtcccgcgcagcaattaacaaatgggtgtcgaacaaaaccgaaggcagaattactgacgtgattccctcggaggcaattaacgaactgaccgtgcttgtcttggtgaacaccatctactttaaaggtctttggaaatcaaagttttcgcctgaaaacactcgaaaggaacttttctataaggctgacggagaatcctgctctgcaagcatgatgtaccaagaagggaagtttcggtaccggcgagtcgccgaaggtactcaagtcctcgagctgccctttaagggcgatgatattaccatggtgcttatcctgccgaaacctgaaaaaagccttgcaaaagttgagaaggaacttactccagaggttctgcaagaatggcttgacgaattggaggaaatgatgctggtcgttcacatgcctcgttttaggatcgaagatgggttctccctgaaggagcagcttcaagatatgggtctggtggacctcttttcaccagagaagagcaaacttcctggtatcgtggcggagggcagagatgacctgtacgtgagcgatgcgtttcataaggcatttttggaagtgaatgaagaaggtagcgaagcagcggcatccaccgctgttgtgattgcaggacgttctctgaacccaaatcgggtgacgtttaaagcgaacagaccctttcttgtgttcatccgcgaagtgccattgaataccattatcttcatgggcagggtggctaatccctgcgttaag

SEQ ID NO: 18873 - DNA, 1392 bp, synthetic construct
  misc_feature 1..1392: note = source = /note="Description of Artificial Sequence: Synthetic coding sequence"
  source 1..1392: mol_type = other DNA
atgtacagcaacgtgatcggaaccgtcacctcgggaaagaggaaggtgtacctgctgtcactgttgctcatcggcttctgggactgcgtgacttgtcatggctcgccggtggacatctgtactgcaaagccgcgcgatatcccgatgaaccccatgtgcatctacaggtcaccggaaaagaaagcgaccgaggacgaggggtcagagcaaaagatccctgaggcgaccaatcgccgggtgtgggaactgtctaaggcgaactcccggtttgccaccaccttctatcagcacctggcggactctaagaatgataacgacaatatctttctctcccccctctcgatctccactgccttcgccatgactaaacttggcgcgtgcaacgatactctccagcagctcatggaggtgttcaaatttgacaccatctcggagaagacctccgatcagatccacttcttcttcgcaaaactcaactgtcggctgtacagaaaggcaaacaaaagctctaaactcgtcagcgccaaccgcctgtttggggacaaatcgctgactttcaacgagacttaccaggacatctcagaacttgtgtacggagcgaagttgcaacccttggacttcaaagagaatgcagagcagagccgggcagcgatcaataagtgggtttcgaacaaaaccgagggacggatcaccgacgtgatacccagcgaggcaatcaacgaattgactgtgctggtccttgtcaatacgatctacttcaaagggctgtggaaatctaagtttagcccggaaaatactcgcaaggaactcttctacaaggccgacggtgaatcctgctcggcctcgatgatgtaccaggaaggaaagttcagataccgcagagtggcagaaggcactcaggtgctggaactgccttttaaaggagacgacattacgatggtgctgatcctgccgaaaccggagaagagcttggccaaggtggaaaaggagctcacccccgaagtgctgcaagagtggctcgacgaactggaagaaatgatgctcgtggtccacatgccgcgcttccggatcgaagatggtttctccttgaaggagcagctgcaagacatgggtcttgtggacctgttttccccggaaaaaagcaagctgccaggcattgtcgctgagggcagagacgatctttacgtctcagacgctttccataaggcattcctggaagtgaatgaagaaggcagcgaggctgcggcaagcaccgctgtcgtcatcgcgggacggtcgctcaatccaaaccgcgtgaccttcaaagctaacagaccctttctcgtcttcatccgggaagtccctctgaataccatcatcttcatggggcgggttgccaacccgtgcgtgaag

SEQ ID NO: 18874 - DNA, 1392 bp, synthetic construct
  misc_feature 1..1392: note = source = /note="Description of Artificial Sequence: Synthetic coding sequence"
  source 1..1392: mol_type = other DNA
atgtactctaacgtgatcggcaccgtgacatctgggaaacgcaaagtctatcttttgtctctgctgctgatcggcttctgggattgcgttacctgtcacggttcccccgtcgatatctgtacagctaagccccgcgatattcccatgaatcccatgtgtatctacaggtcacccgaaaagaaggcaacagaggacgagggatcagaacagaagatccccgaagccacaaatcgccgggtgtgggagctcagcaaggccaactcgcgatttgcgaccacgttttaccagcacctcgcggactccaagaacgacaacgacaacattttcctgtctccgttatccatcagtacggcctttgcaatgacgaaactcggggcgtgcaacgatactttgcagcagctgatggaagtatttaaattcgacacaatttctgagaaaaccagtgatcagatccatttctttttcgcaaagctgaactgtcggctgtaccggaaagcgaataagtcgtctaagcttgtgtcagcaaacaggctgttcggggataaaagcctgacattcaatgaaacataccaggacatcagcgagcttgtgtatggagccaaactgcagccactggacttcaaggagaacgcagagcagagcagggccgcgatcaacaaatgggtgtccaacaaaactgagggacggatcactgatgtaatcccttctgaagcaatcaacgagttgacagttctggtcctcgtcaatacaatctattttaaaggtctttggaagtccaaattctcccctgaaaacacccggaaagagttattctacaaggcagatggtgaaagctgttctgcctctatgatgtaccaggaaggcaagttccggtatagacgggtcgcggagggaacacaggtgttggaacttcctttcaagggtgacgatattaccatggtcctgattttgcccaagccggagaagagtctcgctaaggtggaaaaggagctgaccccggaagttctgcaagagtggctcgacgaactggaggaaatgatgctcgtggttcacatgcctcgattccgtatagaggacggattttcccttaaggagcagttgcaggacatggggttggtggacttattctcccccgagaagtctaagctccctggaatcgtcgcggaggggcgggacgacctgtacgtgtccgacgcctttcacaaagcctttctcgaagttaacgaagagggaagtgaggcagctgcttccacggcagttgtcatcgccggaaggtcactgaatcctaatcgggttacatttaaggctaaccggccgttcttggtctttattcgggaggtaccgctgaacacaattatctttatgggcagggttgcgaatccatgtgtgaag

SEQ ID NO: 18875 - DNA, 1392 bp, synthetic construct
  misc_feature 1..1392: note = source = /note="Description of Artificial Sequence: Synthetic coding sequence"
  source 1..1392: mol_type = other DNA
atgtactctaatgtgatcggcacggttacctcaggaaagcgaaaagtgtatctactgagcctattgctcataggtttttgggattgtgtgacttgtcacggatctcctgtggatatatgtactgcaaagcccagagacatccctatgaaccctatgtgcatttatcgtagtcctgagaagaaagcaacggaagatgaagggagtgaacagaaaatccccgaagccaccaaccggcgggtttgggaactgtctaaagctaatagtcgttttgcgaccactttttatcaacatctggcagactctaaaaacgataatgataacatcttcttgtcacccttgagcatctcaactgcctttgctatgaccaaactgggcgcatgcaacgataccttgcagcaactgatggaggtgttcaagtttgacactatctcggagaagacatctgatcaaattcacttctttttcgccaaactgaattgcaggctttatagaaaagccaacaaatctagtaagcttgtgtccgcaaaccgcttgttcggggacaagagtctcacatttaatgaaacttaccaagatatttcagagttagtctatggagcaaagctgcagccgttagatttcaaggaaaatgctgagcagagccgggcagcaatcaataagtgggtgtccaataaaaccgaaggacggattaccgacgtgatcccttcagaggccataaacgagctgacggttttggtccttgtcaataccatttacttcaaggggctctggaaaagtaaattctcccctgaaaacaccagaaaagagctattctacaaagccgacggtgaaagttgctcagccagtatgatgtaccaggaaggcaagtttcggtacagaagggtggcagaaggaacacaggttctggaactgcctttcaagggagatgacattacgatggtactgatcctcccgaaaccggaaaaatctttggcaaaggttgaaaaagaattgacgcctgaagtgttacaggaatggcttgatgaacttgaggagatgatgctggtagtacacatgcctcgatttcgcatcgaggacggtttctctctgaaagaacaactgcaggatatggggttggtggaccttttctcgccagagaagagcaaactgcctggtatcgttgcagaaggtagagacgatctgtacgtgagcgacgctttccacaaggctttcctagaagtcaatgaggaggggtcagaggcagcagcatctacagccgtcgtcatcgctggtaggagcctgaatcctaatcgagtcacgttcaaggcaaaccgtccatttctcgtgttcatccgcgaggtccccctgaatacgatcatattcatggggcgcgtagccaacccttgcgtaaag

SEQ ID NO: 18876 - DNA, 1392 bp, synthetic construct
  misc_feature 1..1392: note = source = /note="Description of Artificial Sequence: Synthetic coding sequence"
  source 1..1392: mol_type = other DNA
atgtatagcaacgtgatcgggacggtgacctcaggaaagcgaaaggtgtacctcctttccctgctactaattggtttttgggactgcgtaacgtgtcacggctcacccgtcgatatctgtaccgctaagccacgcgatattccaatgaaccccatgtgtatctaccggagcccagaaaagaaagctaccgaagatgagggctctgagcagaagatccccgaagcaaccaatagaagggtatgggaactgtccaaggctaatagtcgcttcgccacaaccttttaccagcacttagccgattccaagaacgataatgacaacatcttcctatcacctctgagtatttcaaccgcgtttgcgatgacaaagttgggagcttgtaacgataccttacagcaactgatggaggtgttcaagtttgacacaatttctgagaaaacttcggatcagatccattttttcttcgctaagcttaattgtcgtctgtataggaaagcgaataaaagttcaaaactggtctcagccaatagactgtttggtgacaagtcgctaacattcaacgagacatatcaggatatctccgagcttgtgtacggcgccaagctacagccactcgacttcaaggagaacgcagagcagagtcgggctgccatcaacaagtgggtgtctaataagaccgaggggaggattacagacgtcatacccagtgaggccattaatgagctgactgtgttggttctcgtgaatacgatatacttcaagggactttggaagtccaagttttctcccgaaaatacgcggaaggaactattttacaaggctgacggtgagagctgtagtgcatcgatgatgtaccaggagggtaagtttaggtaccgcagagtggctgaaggcactcaagtgttagagctaccttttaagggagacgacatcaccatggtcttgatactgcccaagccagagaagagcctcgctaaggtggagaaagagctgactcccgaggtgcttcaggagtggcttgatgaattggaagaaatgatgctggtggttcatatgccaagattccgcatcgaagatggcttttccctgaaagaacagctgcaggatatggggctggtggaccttttcagccccgaaaaatccaagcttcccggaattgtcgcagagggccgcgacgacctgtacgtgtctgacgcattccataaggcctttctggaggtgaatgaagaaggctcagaggccgcggcatccacggccgtggtcatcgcggggcgatccctcaacccgaacagggtaaccttcaaggctaaccgaccctttctggtgttcatccgggaagtgcccctcaataccattatttttatgggtagagtggcaaacccatgtgtcaaa

SEQ ID NO: 18877 - DNA, 1392 bp, synthetic construct
  misc_feature 1..1392: note = source = /note="Description of Artificial Sequence: Synthetic coding sequence"
  source 1..1392: mol_type = other DNA
atgtattctaacgtcattggcaccgtgacctcaggcaagcgcaaagtgtatctgctcagtttactgttaattggattctgggactgcgtaacttgtcatggatcccccgtggacatttgcactgccaagccgagggacattcccatgaacccaatgtgcatatacagatcccccgaaaagaaagcgacagaggatgagggatctgagcagaaaattcccgaagctacaaaccgtcgagtctgggagttgagcaaggctaactctaggttcgctacaacattctatcagcacctggcggattccaaaaacgacaatgataacatatttcttagcccgctcagcatcagcacggctttcgccatgactaagctgggagcctgtaatgatacacttcagcagttgatggaggtctttaagtttgataccatctcagaaaagacatccgatcagatccatttcttttttgccaagctgaattgtaggttatatcggaaagcaaacaagtcgtcaaagctggtgtccgcaaacaggctgttcggtgacaaatcacttactttcaacgagacatatcaggatatctcagagttagtgtatggagctaagctccagccactggactttaaagaaaatgccgagcaaagccgggctgccattaacaaatgggtctctaataagaccgagggcaggatcactgatgtaatcccttccgaggccattaacgagttgaccgtgctggtgttggtcaataccatttatttcaaaggactgtggaagagtaagtttagccccgagaacacccgcaaggaactgttttataaggcagatggtgagagttgctccgcgtccatgatgtatcaggagggcaaatttcggtataggcgcgtcgcggaaggaacccaggtgctggagttgccattcaaaggcgatgacatcacaatggtgctgattctgcctaaacctgagaagtcgctggcgaaagtagagaaggaattgactcctgaggttctgcaggagtggcttgacgagctcgaggaaatgatgctcgtcgtccacatgccacgcttccgcattgaggatggatttagcctgaaagagcagctgcaagacatggggcttgtggaccttttctctcctgaaaaatccaaacttccagggatagtcgcagaagggagggatgatctttatgtgtctgacgcctttcataaagcatttttggaggtgaatgaagagggctctgaggccgccgcctccacggcagtcgtgatagcgggtcgatccctgaatcccaaccgggtgacttttaaggctaaccgtccctttctggtattcattagagaggtgccattgaatacaatcatattcatgggtagagtagccaacccttgtgtcaag

SEQ ID NO: 18878 - DNA, 1392 bp, synthetic construct
  misc_feature 1..1392: note = source = /note="Description of Artificial Sequence: Synthetic coding sequence"
  source 1..1392: mol_type = other DNA
atgtattcaaacgtcatagggactgttacaagtgggaaacgcaaggtctacctcctgagtttactgctgatcggattttgggattgtgtaacatgtcatggatcacccgtggatatctgcactgctaaaccaagggatatacccatgaacccaatgtgtatttatcggagtcccgaaaaaaaggctacagaagatgagggatcagaacagaaaatacccgaagcaacgaatcggcgcgtgtgggagctttctaaagctaatagtaggttcgctactactttctatcagcacctagccgactctaaaaatgataatgataatatcttcctttcgcccttatccatctctacagcatttgcaatgactaaactcggggcttgcaatgacactcttcagcagctcatggaggtttttaaattcgatacaataagtgagaaaacttctgaccagatacatttctttttcgcgaaattgaattgtcggttatataggaaagctaacaagtcttccaaactagtttccgctaaccgactatttggagacaagtcactcacttttaatgaaacataccaggatatctccgaactagtgtatggggcaaagctacagcccctagatttcaaagaaaatgctgaacagtcccgtgctgctataaacaaatgggtgtcaaataaaactgaagggagaattactgatgttattccttctgaggcaataaacgagctaactgttttagtgctcgtaaatactatctacttcaaagggctctggaaatcaaagttttctcccgaaaatactagaaaggaactattctacaaggcagatggagaatcgtgttccgcttccatgatgtatcaggaaggaaaatttcgatatcggcgcgtagccgagggaacacaggtccttgagctccctttcaagggagatgatatcacaatggtgctcatcctgccaaaacccgagaaaagtctggctaaagtggaaaaagagctaacacctgaagtgctacaagagtggcttgatgaactggaagaaatgatgctggtcgtacacatgccccggttcaggatcgaagacgggttttcactgaaagaacagctccaggacatggggttagttgatctgttctcacctgagaaatctaaactgccaggaatagtggccgagggaagagatgatctctacgtgtctgatgcctttcataaggcttttttggaagtaaacgaagaagggtctgaagccgctgcttccactgcagtggtaatagccgggcggtccctcaacccaaatcgagtaacgtttaaagccaaccgaccctttctggtgtttatcagagaagtaccactaaacacaataatatttatgggaagggtagcaaacccctgtgtaaaa

SEQ ID NO: 18879 - DNA, 1392 bp, synthetic construct
  misc_feature 1..1392: note = source = /note="Description of Artificial Sequence: Synthetic coding sequence"
  source 1..1392: mol_type = other DNA
atgtactcaaacgtcattggaactgtcacctcgggcaagagaaaagtttacctcctgagcctgctgctgatcggtttttgggactgcgtgacctgtcatggttcgccagtcgatatctgtacggcaaaacctcgagatattcctatgaacccaatgtgcatttaccggtccccagaaaagaaggcaaccgaagatgaaggctcggagcagaagatccctgaagcaactaaccgaagggtgtgggaactttcaaaagcaaattcccgcttcgccaccaccttctaccaacaccttgcggactccaagaatgacaacgacaacatcttcctgtcgcccctgtcgatttcaaccgcttttgccatgaccaagttgggtgcatgtaacgacaccttgcaacagctgatggaagtgtttaagttcgatacgatctccgaaaaaactagcgatcagatacatttcttttttgcaaaattgaattgtaggctttacagaaaggcaaataagtcgtcgaagctggtcagcgccaacagactgtttggagataaatccctgaccttcaacgaaacgtatcaggatatatctgaactcgtgtacggcgctaaactgcaacctctggatttcaaggaaaacgctgaacaaagccgggctgccattaacaagtgggtgagcaataagaccgaggggcgtattaccgacgtgattccctccgaagcgataaatgagctgaccgtcctcgtccttgttaacacgatctactttaaaggcctctggaagagcaaattctcaccggaaaatactagaaaagaattgttttacaaggcagacggagagtcctgtagcgcttccatgatgtatcaagaaggaaagttcaggtaccggcgggtggccgagggaacccaagtcctggagctccctttcaagggagacgatatcactatggtgctgatcctccccaagcccgaaaaatccctcgcaaaagtggagaaggaacttactcccgaagtgctgcaagagtggttggacgaacttgaagagatgatgctggtcgtccatatgcctcgctttagaatcgaggacggattctcgctgaaggagcagctgcaggatatgggattggtggacctttttagcccagagaagtcgaagctgccgggcattgtggcagagggacgggacgatctctacgtgagcgatgcgtttcataaggcgtttctggaggtgaacgaggagggatccgaagcagccgcatcaactgcagtcgtcatcgcaggtcgcagccttaatccaaaccgggtcaccttcaaagcaaaccgcccatttctggtgtttatccgggaagtcccacttaacactatcatctttatggggagagttgcaaacccttgtgtcaag

SEQ ID NO: 18880 - DNA, 1392 bp, synthetic construct
  misc_feature 1..1392: note = source = /note="Description of Artificial Sequence: Synthetic coding sequence"
  source 1..1392: mol_type = other DNA
atgtatagtaatgtgattgggacagtgacttctgggaaaagaaaagtgtatcttcttagtctgctcctcatagggttctgggactgtgttacatgccatgggtctccagtcgatatctgtacagccaagccaagggatatccctatgaaccccatgtgtatatatcgatctcccgagaagaaagccacagaagatgaaggatctgaacagaaaatccccgaagcaactaacaggcgggtttgggaactgtctaaagctaactcgagatttgctactacattctaccagcatttagcggattctaaaaatgataacgataacatcttcctatctcccctgtctatttcgacagcctttgctatgacaaaattgggggcctgtaacgatacactgcagcagttgatggaagttttcaaatttgatacaatctcagaaaaaacttctgatcagatccactttttcttcgctaaactcaactgccgcctctaccggaaggcaaacaaatcatctaagctggtcagtgcaaatagactcttcggagataaatccctcactttcaacgaaacataccaggatatatcagaactcgtgtacggggcaaaactccagccactagacttcaaagaaaacgctgagcagtcacgcgccgctataaataaatgggtgtctaacaaaacagaagggagaataacagacgttataccctccgaagcgataaatgaacttacagtgctcgtgcttgtcaatacaatttattttaaaggactctggaaatcaaagttttctcccgaaaacacaaggaaagaactgttttataaagccgacggggaatcttgctcggcgtcaatgatgtatcaggagggaaaattccggtaccggagggtcgctgaagggacacaggttctagagctgccattcaaaggggatgatataactatggtcctgattctccccaaaccagaaaaatcattggccaaggtggaaaaagaacttactcccgaggtgctccaggaatggttagatgaactagaagaaatgatgctagtagtccatatgcctcggtttcggatcgaagatggattctcccttaaagaacagcttcaagatatgggactagtggatctattttccccagaaaaatctaagctacctgggatcgtcgccgaggggagagatgacctttacgtgtccgatgcctttcacaaagcattccttgaagtgaacgaggaagggagtgaagcggctgcaagtactgccgttgttatagccggaagatctctgaatcctaatagggtcactttcaaagctaatcgacctttccttgtattcatcagggaagtgcccttaaacactattatcttcatggggagggtagcgaatccctgcgtcaaa

SEQ ID NO: 18881 - DNA, 1392 bp, synthetic construct
  misc_feature 1..1392: note = source = /note="Description of Artificial Sequence: Synthetic coding sequence"
  source 1..1392: mol_type = other DNA
atgtattctaacgtcattggaactgttacttcaggcaagcgaaaggtatacctcttgtcgcttctgctaattggattttgggactgtgtgacatgtcatggatccccggtcgatatttgcacagcaaagccgcgggatattccaatgaatcctatgtgtatttaccggtcaccggagaagaaggccactgaggacgagggatcggaacaaaaaattccagaggcaacaaatagacgagtatgggagttgtcaaaagcgaattcccgcttcgctactacattttatcaacacctggcagattccaaaaatgacaatgataatatattcttaagtccattgtccatatcaaccgccttcgctatgaccaagttaggagcatgtaatgatactttgcaacagcttatggaagtgtttaagtttgacactatctcagaaaagacttcggatcaaatccattttttctttgctaaactcaattgccgactctaccggaaggctaacaaatcgagtaaacttgtcagcgcaaaccgattgtttggcgacaaatctctcacatttaacgagacttatcaagatatatcagaacttgtctatggagctaaattgcaaccactcgactttaaagaaaacgccgagcaaagtcgggctgctattaataagtgggtttccaataagactgaaggtagaattacagacgtcattcccagcgaagctataaatgaattgactgtactcgtgttggtcaacactatctacttcaagggactgtggaagtcgaagttcagccctgaaaatacccgtaaggaactcttctataaggctgatggggaatcgtgcagtgcatcaatgatgtatcaagaaggaaaattcagatatcgacgggttgctgaagggacccaagtgttagagctaccattcaaaggagacgatatcactatggttcttatcctgccaaaaccggagaaatcactggctaaagtggagaaggaacttaccccagaagttctgcaagaatggttggatgagctagaagaaatgatgcttgtggtccacatgccaagattccgcattgaagatggattttcgcttaaagaacagctacaagatatgggactggtcgatctattctctccagaaaaatccaaacttcctggaatcgttgctgaaggcagagacgacctatatgtttcagacgcttttcacaaagcattcttggaagtgaacgaggaaggatcggaggcggccgctagcactgccgttgtaattgcaggacgttctctgaacccaaatcgagtaacattcaaggcaaatcgcccttttctcgtctttattcgtgaagtcccattgaacacaataatcttcatggggcgagttgcaaatccttgcgttaaa

SEQ ID NO: 18882 - DNA, 1392 bp, synthetic construct
  misc_feature 1..1392: note = source = /note="Description of Artificial Sequence: Synthetic coding sequence"
  source 1..1392: mol_type = other DNA
atgtattcaaatgttatcggtaccgtgacgagcggcaagcgaaaagtgtacctgctgagtctgctgctcataggcttctgggattgcgttacatgccacggttcacctgtagacatttgtacagcaaagccaagggatattccaatgaatccaatgtgcatttataggagcccggagaaaaaggccacagaagatgaggggtctgagcagaagatacccgaggctactaataggagggtgtgggaactgtcaaaagcaaatagcagattcgccacaacgttctatcagcatctcgcagactctaagaatgacaacgataacattttcctgagcccgctctccattagcactgcgtttgctatgacaaaactgggcgcctgcaatgatactttgcagcagctcatggaggtgttcaagtttgatacaatcagtgagaagaccagtgatcaaatccacttctttttcgctaagctgaactgccgattgtatcgaaaggctaacaagtccagcaagctcgtgtctgcaaaccgcttgttcggggacaagagcctgacattcaatgagacctatcaggacatcagcgaactggtgtacggcgcaaagcttcagcccctggatttcaaggagaacgccgagcagtcacgcgctgctataaacaagtgggtctccaacaaaactgagggaagaattactgacgtgatcccatcagaagccattaatgaactgaccgttctggtgctggtgaatacgatatactttaagggactttggaagagcaagttttcccccgagaacacgcggaaagaactgttttacaaggctgatggggaaagctgtagcgcaagtatgatgtaccaggaaggaaaatttcggtatcggagggtagccgagggtactcaagtcctcgagcttcctttcaaaggagacgacattacaatggtgctgatactccctaagcccgagaaaagtctggccaaagtggaaaaagaactgacccctgaagtgctgcaagagtggctggatgagctcgaggaaatgatgctggtagtgcacatgcctcggttccgaattgaggatggcttcagccttaaggagcagttgcaagacatggggctcgtggacctgttctccccagaaaagtccaagctgcctggtatcgtagcggagggacgcgatgacctctacgtttctgacgcctttcataaagcttttcttgaagtgaacgaggaggggtccgaggccgctgcttctacggccgtggtgatcgcaggtagaagcctgaatccaaatagagtgacattcaaagctaatagacccttcttggtgtttatccgcgaagtacctctgaatacaattatctttatgggacgggtcgctaatccatgtgtgaaa

SEQ ID NO: 18883 - DNA, 1392 bp, synthetic construct
  misc_feature 1..1392: note = source = /note="Description of Artificial Sequence: Synthetic coding sequence"
  source 1..1392: mol_type = other DNA
atgtacagtaacgtcattggaactgttacaagcggcaagcggaaagtgtacctgctgagtctgctactcattggcttctgggactgcgtcacgtgtcacggttcccccgtggatatatgtacagcaaagccaagagacatccccatgaaccccatgtgtatctacaggtcccccgagaagaaggcaactgaggatgagggcagtgagcagaagatacccgaagccacaaataggcgggtatgggagctttccaaggctaacagtcgcttcgccaccacattttaccagcacttagccgattcgaaaaatgataacgacaacatcttcctgagccctcttagcataagcactgcctttgctatgacgaagctgggtgcttgcaatgacaccctgcagcagctcatggaggtgttcaaatttgacacaatttcagaaaaaacttctgaccagattcacttctttttcgctaaattgaattgtcgattgtatcggaaggctaacaagtcctcaaagttggtgagtgctaacaggctgttcggcgacaaatctctgactttcaacgagacctatcaggacatcagcgaactcgtgtatggagctaaattacagcccctggactttaaagagaatgcggagcagtcacgggccgccattaacaaatgggtctctaataagacagaggggagaattaccgatgtgatcccatccgaggcaatcaacgagttaacagtgctggtcctagttaataccatctactttaaagggctttggaaatccaagtttagtccagagaacactcgcaaagagctgttttataaagccgacggagagagctgcagtgctagcatgatgtaccaggagggaaaatttcgctacaggagagtggctgaaggaacccaggtcctggaactaccatttaaaggagacgatatcactatggttctgatcttgcctaaaccggagaaatcattggctaaggtggagaaagaactgaccccagaggtgttacaagagtggctggatgaactggaagaaatgatgctagtggtgcatatgcctcgttttcgaatagaggacggcttctccttgaaagaacagctgcaggacatgggactagtggacctgtttagtcctgagaaaagtaagttgcctggaatcgtggccgagggtagagatgacctatatgtgtccgacgctttccacaaagccttccttgaagtcaacgaggaaggaagtgaggcagcggccagtactgccgtagtgattgccggccggtcactcaacccaaatagagtgacattcaaagccaatagaccgttcctcgtatttattagggaagtcccactcaatacaattatcttcatggggcgcgtggctaatccctgcgtcaag

SEQ ID NO: 18884 - DNA, 1392 bp, synthetic construct
  misc_feature 1..1392: note = source = /note="Description of Artificial Sequence: Synthetic coding sequence"
  source 1..1392: mol_type = other DNA
atgtacagcaatgtgatcgggactgtgacgagcgggaagcgcaaggtttaccttttaagtctgctgcttatcggtttttgggattgcgtcacttgccacggttcccccgttgatatttgcacggctaaaccgcgtgacatcccgatgaaccccatgtgcatctaccgctccccagagaagaaggccacagaagatgagggttccgagcagaagatcccggaggcgactaatcggcgtgtctgggagttgtctaaggctaactctagatttgccactactttctaccaacacctcgctgactccaagaatgacaacgataacatcttcctttcccccctgtccatttcaaccgcgttcgccatgaccaaactcggggcttgcaacgatactcttcaacaactgatggaagtgttcaagttcgataccatctccgagaagacctccgatcaaatccacttcttcttcgccaagctgaactgtcgcctttaccgtaaggctaacaaatcgtcgaagctcgtttcagctaacagactgttcggcgacaagtccctcacctttaacgaaacataccaggatatctccgagttggtctacggtgcgaagttgcaacctctcgactttaaggagaatgctgagcagagccgggccgctatcaacaagtgggtctccaacaagaccgagggcaggattacagatgttattccgtcggaggccatcaatgagctcacggtcctcgttctggtcaacacgatttacttcaagggtttgtggaagtctaagttcagccctgagaatactaggaaggagctcttttataaggccgacggagagtcgtgttcagctagcatgatgtatcaagagggtaagttccggtaccgccgtgtcgccgagggtactcaggtactcgaacttccctttaaaggtgacgacattaccatggtcttgattcttcccaagcctgagaagagcctcgccaaggtcgagaaggagttgacccccgaagttctccaggagtggcttgacgagctggaagagatgatgcttgtggtgcacatgccccgtttccgtatcgaagatgggttctccctgaaggagcagcttcaggatatgggtctcgtagacctgtttagcccggagaagtcaaagctccccggtatcgtcgccgaaggtcgcgacgacttgtatgtctctgacgctttccacaaggctttcctggaggttaatgaggaggggtctgaggcagcggcgtccaccgcagtagtcatcgctggacgcagcttgaatcccaacagagttacgttcaaggccaaccgcccttttctcgtctttatccgcgaagtcccgctgaacaccatcatctttatgggccgcgttgctaatccgtgcgtcaag

SEQ ID NO: 18885 - DNA, 1392 bp, synthetic construct
  misc_feature 1..1392: note = source = /note="Description of Artificial Sequence: Synthetic coding sequence"
  source 1..1392: mol_type = other DNA
atgtactctaacgtcatcggcacagttaccagcggcaagcggaaagtttatctactgtctctcctccttattggattttgggattgtgtgacctgccatggatcacccgttgatatatgtacagccaaaccgagggatattccaatgaatcccatgtgtatatataggagtccagaaaaaaaggccaccgaggacgaaggttctgaacaaaaaatccccgaggcgacaaacagaagagtgtgggaactcagcaaggcgaatagcaggttcgctactaccttttaccagcaccttgctgactctaaaaacgataatgataacatattcctctccccactctctatatctactgccttcgctatgaccaaactgggcgcgtgcaacgacaccttacagcaactgatggaggtatttaagtttgatacgatctccgaaaagacatctgatcagatccactttttttttgctaagctcaactgcaggttgtatcggaaagcaaacaaatccagcaagttggtgtccgccaacagactgttcggagacaagtccctgacctttaatgagacataccaagacatcagcgagctggtatacggagccaagcttcagcccttggacttcaaggagaatgccgaacagtctcgtgccgcaatcaacaagtgggtttccaacaagactgagggccgcataacagatgtcattcccagcgaagctataaacgaactgacagttctcgtactcgtcaacacaatctacttcaagggactgtggaaatcaaaattctccccggaaaacacacgcaaggagcttttctataaggcagatggtgagagctgctccgcgtcgatgatgtaccaggagggcaaattccggtaccggcgggtcgctgaaggcactcaggtcctggaactgccattcaaaggcgacgacatcacaatggttttgatattgccgaagccggagaaatccctcgcgaaggttgagaaagagttgacccctgaagtgctgcaagaatggctggacgagcttgaggagatgatgctggtggtccacatgccccgctttagaatagaggacggcttcagccttaaggagcagctccaagacatgggtttagttgatcttttctcgccggagaagtctaagctgccaggtatagtggcagagggaagggatgatctctatgtgagtgacgcttttcacaaagcgttcctggaggtaaacgaggaagggagtgaggccgcagccagcaccgctgtggtaatcgcgggtcgatctttgaatcccaatcgcgtgacatttaaggccaacagacctttcttggtgttcatcagagaggttccacttaatactatcatctttatggggagggttgccaacccgtgtgtgaaa

SEQ ID NO: 18886 - DNA, 1392 bp, synthetic construct
  misc_feature 1..1392: note = source = /note="Description of Artificial Sequence: Synthetic coding sequence"
  source 1..1392: mol_type = other DNA
atgtactctaacgtcattggcaccgttactagcgggaagcgcaaggtatacttgttgtccctgctactaattggcttctgggattgtgttacctgtcacggcagcccggtggatatctgtaccgctaagcctagagatatccctatgaaccctatgtgtatttatagatccccggagaagaaggcaaccgaggacgagggttcggagcagaaaatcccagaagctaccaatcgacgggtctgggaactgagcaaagccaatagtaggttcgctaccaccttctatcaacatctggctgactctaaaaacgacaatgataatatctttctcagtcctctgtctattagcaccgcattcgcaatgaccaagctgggagcctgtaacgacacactccagcagctcatggaggtctttaagttcgacaccatctccgaaaagaccagtgatcagatccactttttctttgccaagttgaactgcagattatatagaaaggcaaataagagcagcaagctggtctcggctaacaggctattcggggacaaatcattgacattcaacgaaacctatcaagacattagcgaactcgtatacggcgcaaaactgcagcctcttgattttaaggagaacgccgagcagagtcgggcagctattaataaatgggtgagcaacaagaccgagggccggataactgatgtcatcccttccgaagcaatcaacgaacttaccgtgctagtgcttgttaacaccatttacttcaagggactttggaaatcaaaattttctccggagaatactcgaaaagagctcttctacaaagcagacggtgagagctgtagcgcatctatgatgtaccaagagggaaagtttagataccgccgggtggccgagggcactcaggttttggagctcccttttaagggcgatgatatcactatggtgctgattctcccgaagccagaaaagagtctggctaaagtagagaaagagttgactcccgaggttctccaggaatggttggacgaactggaggaaatgatgttggttgtgcatatgcctaggttccggatcgaggacggattttctcttaaggagcagctccaggatatgggcctggtggacctattctcacccgaaaaaagtaaactcccaggaattgtcgccgaaggaagggacgatctatatgtctcagatgctttccataaagcattccttgaggttaatgaggagggatccgaggcagccgcctctaccgccgtggtgattgcagggagatcccttaaccccaatcgggtgaccttcaaggcaaaccggccattcttagtgtttatcagggaagtgccactaaataccataatcttcatgggaagggtcgccaatccatgtgttaaa

SEQ ID NO: 18887 - DNA, 1392 bp, synthetic construct
  misc_feature 1..1392: note = source = /note="Description of Artificial Sequence: Synthetic coding sequence"
  source 1..1392: mol_type = other DNA
atgtattcgaacgttatcggaaccgtcacatcgggcaagcggaaggtgtacttgttgtctttgcttcttattggcttttgggactgtgtgacttgtcacggaagccccgtggacatctgcacggcaaagcctagagatatccctatgaaccctatgtgtatctacaggagcccggagaagaaagctacggaggatgaaggatccgagcagaaaatcccagaggctaccaaccggcgagtctgggagctaagtaaagcaaattcgcgcttcgcaaccactttctatcaacacctcgccgatagcaaaaacgacaacgataatatttttttgagcccattgtccataagcaccgcttttgccatgactaaactgggggcttgcaatgacactctgcagcaacttatggaggtgtttaagttcgatacgatctccgaaaaaacgtctgaccaaatccattttttcttcgccaagctcaattgtagactgtaccgtaaggcaaataaatcgtctaaactggtcagcgccaatcggttattcggggataagtctttgacttttaatgaaacctatcaagatatcagtgaactcgtttacggcgctaagctccagcccctcgactttaaggagaatgcagaacagtcccgggctgcgatcaataagtgggtgagtaataaaacagaaggacggataactgacgtgatccccagcgaggctatcaacgagctcacagtcttagttctggttaacactatctacttcaaagggctttggaagagcaagttttcgcctgaaaacaccagaaaagaactcttctataaggcagatggtgagtcctgctcagcttccatgatgtaccaagaggggaaattccgctatagacgggtagccgagggaactcaggtgctcgaattgccatttaaaggagatgatatcactatggtgctgattctgcccaaaccggaaaaatcattggctaaggtcgaaaaggagctcacaccagaggtccttcaagaatggctagacgaactggaggagatgatgctggttgtgcacatgccaaggtttcgtattgaggatggcttcagtcttaaagagcagctccaggacatgggcctggtcgacctcttttcccccgaaaaaagtaagctgcccggcatcgttgccgagggaagagacgacttatacgtatcagacgcattccataaagccttccttgaggtcaacgaggaggggagcgaagccgcagccagcaccgctgtagtgatcgctgggcgcagcctgaacccaaaccgagtaaccttcaaggcgaataggccttttctggtgttcatccgagaggtgcctcttaacacaattatttttatgggaagagtcgctaacccatgcgtgaag

SEQ ID NO: 18888 - DNA, 1392 bp, synthetic construct
  misc_feature 1..1392: note = source = /note="Description of Artificial Sequence: Synthetic coding sequence"
  source 1..1392: mol_type = other DNA
atgtactccaatgtgattggcacagtgacatctgggaaacggaaggtttatctgctcagccttctgctgatagggttctgggattgcgtcacatgccatggtagccctgtagatatttgtaccgctaagccgagggacatccctatgaacccgatgtgtatttatagatcacccgaaaaaaaggcgacagaggatgaaggcagcgagcagaaaattcctgaagctaccaaccgacgtgtttgggagctgtctaaagctaatagtagattcgccacaaccttttatcaacatttggctgactctaagaacgacaacgacaatatctttttgagcccattgagcatcagcaccgctttcgccatgactaagctgggcgcctgcaatgacacccttcagcagcttatggaagtcttcaaattcgatacaatctctgagaaaacatccgatcaaatacactttttcttcgccaaacttaactgcaggctttacaggaaggctaataaatcgtccaaacttgtgagcgcaaatcggttgtttggagacaaatctctgacctttaacgagacctaccaggatatctccgagctcgtatatggcgccaagttacagcctctcgactttaaggagaatgccgaacaatccagagcggcaattaacaaatgggtttctaacaagacggaagggagaatcactgacgttattccgagtgaagcgattaatgaacttactgtcttagtcctcgtcaatacaatatacttcaaaggcctgtggaaaagcaagttcagccccgagaatacccggaaggagcttttctataaggcagatggcgaaagctgttctgcctccatgatgtatcaggaaggaaaatttcggtaccgacgagtagctgagggaactcaggtcttggagctgcctttcaaaggcgatgacatcaccatggtcctgatcctgccgaaacctgagaagagccttgcaaaggtggagaaagagctaactcccgaagttttacaggagtggttggatgagctggaggagatgatgttggtggttcacatgcccaggtttaggattgaagatggcttttccctgaaggagcagctccaggacatgggactggttgatctgtttagtccagagaagagtaaactccctgggatcgttgccgagggccgtgacgatttgtacgtgtcagacgccttccacaaggctttccttgaggtcaacgaagagggatctgaggcagcggccagtacagcagtcgtaatcgctgggaggtctttgaatcccaatcgcgtgaccttcaaagcaaacaggccctttctggtattcatccgagaagtccctctaaacacaatcatcttcatggggcgggtggcaaatccatgcgtaaaa

SEQ ID NO: 18889 - DNA, 1392 bp, synthetic construct
  misc_feature 1..1392: note = source = /note="Description of Artificial Sequence: Synthetic coding sequence"
  source 1..1392: mol_type = other DNA
atgtactcaaacgtcatcggcaccgtgaccagcggcaaaagaaaagtttacctgctgagcctccttctgatcggtttctgggactgtgtgacttgtcatggaagcccagtggacatttgtacagccaaaccgagagatatccctatgaaccctatgtgcatctataggagccctgagaaaaaagccactgaagatgaaggctctgagcagaagattcccgaagctactaataggagagtgtgggaactatcaaaggctaattctaggtttgctactaccttctaccaacatctggcagacagcaaaaacgataatgataatatattcctttcacctctttctatctctacagccttcgccatgaccaagcttggagcgtgcaacgacaccctgcaacagctgatggaagtcttcaaatttgacacgatcagtgaaaaaaccagtgatcaaatccattttttttttgcaaagcttaactgcaggttataccgcaaagccaacaagtcatctaagctggtgagtgccaatagactgtttggagataagagtctgactttcaatgagacctaccaggatatctcagagcttgtttacggcgccaagttacagccgttagactttaaagagaacgccgaacaatcgcgtgctgccatcaacaagtgggtgagcaacaaaaccgaaggacgcatcacagacgtgattccctctgaagctataaatgaactcacagttttggttctcgtgaacaccatttactttaaaggtctttggaagagtaaatttagccctgaaaacacccgtaaggaattgttttacaaggcagacggcgagagctgctcggccagtatgatgtaccaagagggcaaattccggtatagacgggtcgcggaaggcacacaagtgctggaactgccttttaaaggagacgacattacaatggtcctgatcttgcctaaacccgagaaaagcctggctaaagtagaaaaggagctgacccctgaggtgctccaagagtggctcgacgagttggaggagatgatgttagttgtccacatgcccagatttcggatcgaggacggtttctcacttaaagagcagcttcaggatatgggcctggttgatcttttttccccagagaagagcaagctgcctggcatcgtcgctgagggacgggacgatctttacgtcagtgatgcttttcacaaagcttttctcgaagttaacgaggagggctccgaggcagcagcctccaccgcagtggtgatcgctggaaggagtctgaacccaaacagagtgacattcaaggcgaatcgccccttccttgtgttcataagagaggtcccactgaataccattatctttatgggaagggttgcaaatccttgtgtgaag

SEQ ID NO: 18890 - DNA, 1392 bp, synthetic construct
  misc_feature 1..1392: note = source = /note="Description of Artificial Sequence: Synthetic coding sequence"
  source 1..1392: mol_type = other DNA
atgtattctaacgtcatcggaacggttactagtgggaagcgaaaagtctacttgttgtccctcctgcttataggattttgggactgcgtgacatgtcacggatccccagtcgacatatgcaccgccaagccgcgggatattcctatgaatcctatgtgcatttataggtcgccagagaaaaaagcaacagaggatgaggggagcgaacagaagatcccagaagccacaaacagacgcgtgtgggaactgagcaaagctaatagtcggtttgccactactttttatcagcacctggcggattcgaagaatgacaacgataatatctttttgtctcctctgtctattagcactgccttcgcgatgacgaagctgggagcgtgtaacgacacactgcagcagctaatggaggtctttaaatttgataccatctccgagaaaacctccgaccaaattcattttttctttgcaaaactcaactgccggctctacaggaaagccaataaaagctccaaattagtgtccgctaaccgactttttggggataagtcattgacttttaatgaaacctatcaagacatcagtgaactggtatatggggccaagctccagcccttagactttaaggagaacgccgagcagtctagagcagctattaacaagtgggtgtctaacaagactgaaggtaggataacggacgtgattccgtccgaagccatcaatgagctgactgtgctggttctcgtaaatacaatttacttcaaggggctttggaagagtaaattttcaccagaaaacacgaggaaagagctcttctataaggcagacggcgaaagctgctcggctagtatgatgtaccaagaggggaagttccgctatcgcagggtggctgaggggactcaggttttggagctgcctttcaaaggcgacgacatcacaatggtgctcatcctccccaagccggagaagtcactagctaaggtggaaaaggaacttacacctgaggtgctgcaggaatggctggacgaactggaggagatgatgcttgtggtgcacatgcctcgcttcagaatcgaggacggatttagcctgaaggaacagttacaggatatgggactcgttgacctgttcagccccgagaaatcaaaacttccaggaattgtggccgaaggaagagatgacctgtacgtttctgatgcattccacaaggcatttcttgaggtcaacgaagagggttccgaagccgcagccagtacagccgtggttatcgcggggcgttcgttaaatcccaatagggttacatttaaggctaataggcccttcctcgtctttatccgggaagtccctttaaacaccatcatcttcatgggccgcgtcgcaaatccatgtgtgaaa

SEQ ID NO: 18891 - DNA, 1392 bp, synthetic construct
  misc_feature 1..1392: note = source = /note="Description of Artificial Sequence: Synthetic coding sequence"
  source 1..1392: mol_type = other DNA
atgtactccaacgttatcggaacagttacctctggcaaacgcaaagtgtaccttctgtctttgctgctgatcggattttgggactgcgtcacatgtcacggcagccccgtcgacatctgcacagccaagcctagagatattcccatgaatcctatgtgtatttacaggagccccgagaagaaggcgaccgaggatgaaggttcagagcagaaaattcctgaagctaccaacagaagggtgtgggaactcagtaaagctaactctaggtttgcaaccacattctaccagcatctggcggattctaagaacgataacgataacatcttcctctccccactttctatctcaactgcattcgctatgactaaactcggtgcctgcaatgacaccctgcagcagctgatggaagtgttcaagttcgacacaatcagcgagaagacgagcgaccagatccacttcttttttgccaagcttaactgtaggttgtaccgcaaggctaacaagtcttccaaattggtgagcgctaaccgccttttcggagataagtcactcaccttcaatgagacctaccaggatatatcagaactggtatacggcgccaagctgcagccgctggacttcaaggaaaacgcggaacagtctagggctgctataaacaaatgggtgtcaaacaagactgagggcaggatcacagacgtcatcccttcagaggccatcaatgagctgaccgtgctcgtccttgtgaacaccatttatttcaagggtctgtggaagtcaaagttttccccagaaaacacccgcaaagagctgttttataaagctgacggagagagctgcagcgcctccatgatgtaccaggagggcaagtttagataccgcagggtggctgaaggaacccaggtcctcgaattgccgtttaaaggagatgatatcacaatggttctcatcctcccaaagccagaaaagtcattggcgaaagtggaaaaagagctgaccccggaggttctgcaagaatggctggatgagctggaagaaatgatgcttgttgtgcatatgcccaggttcaggatcgaggacggtttctccttgaaggaacaactccaggacatgggtctggtcgacctctttagccctgagaagtcaaagctcccgggcatcgtggcagagggtagagatgatctgtacgtatccgatgccttccacaaagccttcctcgaggtgaatgaagaaggctccgaggccgcggcttctactgccgtggtcatcgccggcagaagcttgaatccaaaccgcgtgacttttaaagccaataggcctttcctcgtgtttataagggaggtccccctgaacacaattattttcatgggacgcgtcgccaacccatgtgtaaag

SEQ ID NO: 18892 - DNA, 1392 bp, synthetic construct
  misc_feature 1..1392: note = source = /note="Description of Artificial Sequence: Synthetic coding sequence"
  source 1..1392: mol_type = other DNA
atgtactccaatgtgattggaaccgtgacgtctgggaaacgaaaagtgtacttgcttagccttttgctgatcggtttttgggactgtgtgacctgtcacgggagcccggtcgacatctgtactgctaaacccagggatatcccaatgaatccgatgtgtatctacaggagtccggagaagaaggcaacagaggacgaaggaagtgagcagaaaatcccagaagctacaaatcgaagagtttgggagctttccaaggcaaattcacgattcgctacaacgttttatcaacacctggccgattccaagaatgacaacgacaacattttcctatccccactgtcaatcagcactgctttcgccatgaccaaactgggcgcatgtaacgacacgctgcaacagcttatggaagtctttaaattcgatacaattagcgagaagacttcggaccagatccacttcttctttgctaagctcaactgcaggctttataggaaggcaaataagagctctaagctcgtgtccgccaatagattattcggtgataagtccctgacatttaatgagacctaccaggacattagcgaattagtgtatggcgccaaattacagccactggatttcaaggagaacgctgaacagtccagagcggccataaataaatgggtgtcgaataaaaccgaaggcagaatcacagacgtgatcccatccgaggcgattaatgagctaacagtgctggttttggtgaatacaatctacttcaaggggctgtggaagtctaagttcagtcccgaaaacactcgaaaagaactgttctataaagcggacggggagtcatgttcggcctccatgatgtatcaggaaggaaaattccgttatagacgtgtcgcagagggaacgcaagttctagagctgcccttcaagggtgatgacatcacgatggtgcttatcctgccaaagcccgaaaaaagccttgccaaggtcgagaaagagctgacacctgaagtactgcaagagtggttagatgaattagaggaaatgatgctggtggtacatatgcctaggtttagaattgaagatgggttctcactcaaggaacagctccaggatatgggtctggttgacctcttttccccagaaaagtctaaacttccagggatcgtggcagaaggaagggacgatttgtatgtgagcgacgcctttcacaaggctttcctggaagtgaatgaggagggaagtgaagccgctgcatcgaccgcagtcgtaatcgctggcaggagtctcaatcccaatagagtaacctttaaagctaaccggccatttctcgtttttatacgagaggtccccctgaatacgatcatttttatgggccgggtagctaatccttgtgtgaaa

SEQ ID NO: 18893 - DNA, 1392 bp, synthetic construct
  misc_feature 1..1392: note = source = /note="Description of Artificial Sequence: Synthetic coding sequence"
  source 1..1392: mol_type = other DNA
atgtattcaaatgtgatcgggactgtgacttccggaaaacggaaagtgtatctgttgagtttactgctcatcgggttttgggattgcgtaacatgtcatggatctcccgtggatatatgtacagccaaacccagggacattcccatgaaccctatgtgtatatatcggtcccctgaaaaaaaagccactgaggacgaaggatccgaacaaaaaattcccgaagccactaaccgcagagtgtgggaactctccaaggccaactcccggtttgctacaacattctatcagcacctggcagattctaagaatgataatgataatatatttttatcccctttgtcaatctctactgcgttcgcgatgacaaaacttggggcttgcaatgatacgttacagcagctgatggaggtgttcaaatttgatacaatttctgaaaaaactagtgatcagatacatttttttttcgccaaactgaattgccgcctatacagaaaagccaataaatcctcaaagctcgtcagtgccaacagactttttggagataaatcattaacattcaacgaaacataccaggatatctcagaactcgtgtatggggccaaactccaacccctcgattttaaagaaaatgcagaacagtcaagagctgccatcaataaatgggtgtcaaataagactgaagggcggatcacagatgttataccttcagaagccataaacgagttaacagtactcgttctggtcaacacaatttattttaaaggactttggaaatccaaatttagtcccgaaaatacacgaaaagagctattctataaagcagatggagaatcctgttctgcctccatgatgtatcaggaaggaaaattcaggtatagacgggtagcagaaggaactcaagttctcgaactacctttcaaaggggatgatatcactatggtgctgatacttcctaaacccgagaaatccctagctaaagtcgagaaggagctaacacctgaggttctgcaggagtggcttgacgaactcgaggaaatgatgctcgtcgtgcatatgcctcgcttcaggatcgaagatggatttagtctaaaagaacagttacaggatatgggacttgtcgatctgttttctcccgaaaaaagtaaactccctgggatagttgctgaagggagggatgatctctatgtttctgatgcctttcacaaagcttttctcgaagtcaatgaagaggggtctgaagctgcagcgtctactgcagtggttatagccgggcggtccctgaaccctaaccgggtcacattcaaagctaatcgaccctttctggtgttcatacgagaagtgccattgaatacaattatatttatgggacgcgttgccaacccctgtgtgaaa

SEQ ID NO: 18894 - DNA, 1392 bp, synthetic construct
  misc_feature 1..1392: note = source = /note="Description of Artificial Sequence: Synthetic coding sequence"
  source 1..1392: mol_type = other DNA
atgtactcaaatgttattggcactgtgacgtccggcaagagaaaggtctacttgctttccttgctgctcattggattttgggactgcgtcacttgtcatgggagccccgtcgatatctgtacagcgaagccaagagacattcctatgaatcctatgtgcatataccgctcacccgagaagaaggcaactgaagacgaagggtcagagcaaaagattcccgaggccaccaacaggcgcgtttgggaactcagcaaagctaacagcaggtttgccacaacattttaccagcacctcgccgactccaagaatgacaatgacaacatctttctctcaccactttccatttccaccgcattcgcgatgaccaaactgggcgcttgcaacgataccctgcaacaactgatggaggtgttcaaattcgacaccatctccgagaagacctccgaccagattcattttttctttgcaaagctgaattgccgcttgtaccgcaaggccaacaagtctagtaagctggtcagtgctaataggctctttggggataagtctctgacctttaatgaaacttatcaggatatctctgagctggtttatggagccaagctgcagcctcttgattttaaagagaatgccgaacagtctagagctgcaatcaacaagtgggtgtcaaacaagacggaaggtcggataacagatgtaatcccttctgaggcgatcaacgaactcaccgtgctcgttctcgtgaatactatatactttaaggggctgtggaaaagcaagttctccccagagaatacgcggaaagagctcttctacaaagccgatggcgagagttgctcagcctcaatgatgtatcaagaaggaaagtttcggtacagaagagtggcagaagggacacaggtattggagctccccttcaaaggagatgacataaccatggttctgattctccccaaacctgagaaatccttggctaaggtggaaaaagaactgacccccgaagtgctccaggaatggcttgacgaactcgaggagatgatgctggtggtgcacatgccgagattcagaatcgaggatggattttcactgaaggagcaattgcaagatatggggctcgttgacttgtttagcccagaaaagtctaagctgccaggaattgtcgcagaaggtcgggacgatctgtacgttagcgatgctttccacaaagctttcctggaggtgaacgaggaagggtcagaggctgctgcgtctacagcagtagtcatcgctggccggtctcttaacccaaatagggtgacatttaaagccaacaggccctttctggtgtttattagggaggtccctctgaatacaataatcttcatgggccgggtcgccaacccatgcgtgaag

SEQ ID NO: 18895 - DNA, 1392 bp, synthetic construct
  misc_feature 1..1392: note = source = /note="Description of Artificial Sequence: Synthetic coding sequence"
  source 1..1392: mol_type = other DNA
atgtactctaatgtaatcgggactgttacttccggtaaacgaaaagtttatctcctctctcttctcttgattggattttgggattgcgttacttgccatggttcgcctgtcgatatttgtacagcaaagccgcgtgatatacctatgaatcctatgtgcatctatagatcgcctgaaaagaaagccaccgaagatgagggctctgaacagaagattcctgaagccactaaccgcagggtttgggaactcagcaaggctaactctcgctttgctacgacattttatcagcatcttgctgattcaaaaaatgataacgataacattttcttatcacctctttctataagtacggctttcgccatgacgaagctaggcgcatgtaacgataccttacagcagcttatggaggtgttcaagttcgatacgatctctgaaaagacctcggatcagatacacttcttcttcgccaagctaaactgtagattataccgtaaagccaacaagagctcgaaactcgtgtcagctaacagacttttcggtgacaaatccctgacattcaatgaaacataccaggatatttctgaacttgtgtatggggcgaaattgcagcctttggacttcaaggagaacgccgaacaatcgcgtgcggctatcaataaatgggttagtaataagaccgaaggtaggattaccgatgttattccctctgaggccatcaacgagcttactgttttggtcctggtgaacaccatttatttcaagggactttggaagtccaaattttctcccgagaacacacgaaaggagctcttctataaagctgatggtgagagttgttcagcctcaatgatgtatcaagagggtaagttccgataccgtcgtgttgctgaagggacccaggtccttgagttgcctttcaaaggtgatgatattacaatggttcttatactcccaaagcctgagaagagcttggcgaaagttgaaaaagaactaactccagaggttctccaagaatggctcgacgagcttgaggaaatgatgcttgtagtccatatgcccaggttcaggattgaggatgggtttagtctcaaagaacagcttcaggatatgggactcgttgacctattctctcccgagaagagcaagctcccggggatagttgcagagggtagggatgatttgtatgtgtccgatgcctttcacaaagcctttctcgaggtgaatgaggaaggttccgaggcggcggcctcgacagctgttgttatcgctggtcggtctctcaatccaaacagggttaccttcaaggcaaatcgcccctttcttgtgtttatccgagaggtaccactgaacacgatcattttcatgggaagagtggctaatccttgtgtgaaa

SEQ ID NO: 18896 - DNA, 1392 bp, synthetic construct
  misc_feature 1..1392: note = source = /note="Description of Artificial Sequence: Synthetic coding sequence"
  source 1..1392: mol_type = other DNA
atgtactcaaacgtaattggaaccgtgacttccggtaagcgaaaggtttacctattgtcacttctgctgatcggattttgggactgcgtaacatgccacggcagccccgtggacatctgcaccgctaagccccgtgacatccctatgaacccaatgtgtatttataggagtccagaaaaaaaagccacggaggatgagggaagcgaacagaaaattcccgaagctacgaaccgtagggtttgggaactgtctaaggccaactcaagattcgccaccactttttaccagcatctcgctgatagcaagaatgataatgacaatatcttcctgagtccgctgagtatttccaccgcattcgcgatgacgaagctgggcgcctgtaacgatacacttcaacagctaatggaggtcttcaagttcgataccattagcgagaaaacttccgatcagattcacttctttttcgccaaactgaattgtaggctgtatagaaaggccaataagtccagtaagctcgtgtctgcaaatagattgtttggcgataagtcccttactttcaatgagacgtaccaggacatctcagaattggtgtatggggctaagttgcagcccctggacttcaaagagaacgcagagcagtctcgggcggccattaacaagtgggtgtccaataagactgaaggccgaatcacagatgtaatcccctccgaggctatcaacgaactgaccgtactggttctcgtcaacactatttacttcaaggggctctggaagtcaaagttctcaccggaaaataccaggaaagagcttttttacaaggccgacggcgagtcctgctccgcatccatgatgtatcaggaggggaaatttagatatcggagggtggctgagggcacacaggtgctggagctgcccttcaaaggcgatgacatcacgatggtactaatcctgcccaagcctgaaaagtcactggccaaagtggagaaagagcttactcctgaggttctgcaggagtggctggacgaattagaggagatgatgctcgtcgtccatatgccacgcttcaggatcgaggatggattcagtttgaaggagcaactgcaggatatgggcctggttgatctattttccccagaaaagtcaaagctgcctgggatcgtcgcagagggccgggatgatctatatgtatccgacgcgttccataaggcattcttggaagtgaatgaggaaggaagcgaagccgctgcatccactgccgtcgtaattgcaggacgctcactgaaccctaatcgtgtcacctttaaggccaaccgcccttttcttgtttttatccgggaggtgccacttaataccataatctttatgggacgagttgccaatccctgcgtgaag

SEQ ID NO: 18897 - DNA, 1392 bp, synthetic construct
  misc_feature 1..1392: note = source = /note="Description of Artificial Sequence: Synthetic coding sequence"
  source 1..1392: mol_type = other DNA
atgtattcaaacgtgattggaaccgtcacaagcggcaagagaaaggtttacctactgagcctgctcctgattggtttctgggattgtgtcacgtgccatgggtctcccgtggacatctgcaccgccaagccacgggacatcccaatgaatccaatgtgtatctacagatcacccgagaagaaggccacagaggatgaaggttcagagcagaagatccccgaagcaaccaatagacgggtgtgggagctgtcgaaagcgaatagtaggtttgcaacgacattttaccagcacttggccgatagcaaaaacgataacgacaacatctttcttagtcctctgtctatctctaccgcatttgcgatgacaaagctcggtgcgtgcaatgatacactacagcaactcatggaggtgttcaaatttgacacgatctctgagaagacatccgaccaaatccatttcttcttcgcaaagcttaactgtcggctttaccggaaagcaaacaagtccagtaaattggtgagtgcaaacagactttttggcgataagagtctaactttcaatgagacttatcaggacatcagtgagttagtatatggggccaaacttcagccgttggattttaaggaaaatgccgagcaatcacgagctgcgatcaacaagtgggtgagtaacaagaccgaagggagaatcaccgacgtgattccttctgaagctataaacgagctgaccgttctggtccttgtgaatactatttatttcaagggattgtggaaaagtaaattctcccctgaaaacacccggaaggaacttttttataaagctgacggtgagtcctgctctgcttcaatgatgtaccaggaggggaagtttcgctataggcgggttgctgagggaacccaggttttggagctccccttcaagggcgacgatatcaccatggttctgatcctccctaaaccggaaaagtccctggccaaagttgagaaggagctcacaccagaagtgctgcaagagtggcttgatgaattagaggagatgatgcttgtggtccatatgcccagattcaggatagaagacgggtttagtctgaaagagcaactacaggacatgggacttgttgacctgtttagccctgagaaatctaagttgcctggaatcgttgccgagggtagggatgatctctacgtgagcgatgccttccacaaggcatttttggaagtgaatgaagaaggttccgaggccgccgcctcgaccgctgtggtgatagctggtagatctttaaaccccaaccgcgtgacttttaaagctaacaggccattccttgtcttcatacgggaagtcccactgaacacgataatttttatgggaagggtggccaacccctgtgtaaag

SEQ ID NO: 18898 - DNA, 1392 bp, synthetic construct
  misc_feature 1..1392: note = source = /note="Description of Artificial Sequence: Synthetic coding sequence"
  source 1..1392: mol_type = other DNA
atgtactccaatgtcatcggaacagtgacatcaggcaaaagaaaagtgtacttactgtctctcctactcatcggcttctgggattgcgtcacctgccacggctcccctgtcgacatttgtactgctaagccccgtgacatccccatgaaccccatgtgtatctatagatcccccgagaaaaaagctaccgaagacgaggggagcgaacaaaaaattccagaggccactaatagacgagtttgggagctgtcaaaggctaacagccgcttcgccaccactttctatcaacacctagcggacagcaagaatgataatgataacattttcttgagccctctgagcatcagcaccgcattcgcaatgacaaaactgggcgcctgcaatgacaccctccaacagctcatggaggtctttaagttcgacacgatttccgagaagaccagtgatcaaatccactttttctttgccaagcttaactgtcgcctgtaccgcaaggccaacaagtcaagcaagctagttagcgccaatagactttttggagacaagagtcttacctttaacgaaacctaccaggatataagtgagctcgtgtatggagctaaacttcagcctctggacttcaaggagaatgccgaacagagtagagctgcgatcaacaagtgggtatctaacaagactgaggggagaatcaccgatgtcatcccttcggaggctatcaatgagctgacagtgctggtgctagttaacactatctactttaagggcctttggaagtcaaaattttccccggagaatactcgtaaggagctcttctacaaggccgacggggaatcttgttcagcctccatgatgtatcaagagggaaagttcaggtatcggcgcgtcgccgaaggaacccaggttctggagctccctttcaagggagatgacattacgatggtcctgatcctcccaaaacctgaaaagtcacttgccaaggtcgaaaaagagctgaccccagaggtgttgcaggagtggttggacgagcttgaggagatgatgctggtcgtgcatatgccccgatttcggatcgaagacggcttcagcctcaaggaacagctacaggacatgggcctggttgacctattttcgccagagaaaagcaagttgcccggtatcgtcgctgagggaagggatgatctgtacgtgagcgacgccttccataaagccttccttgaggtcaacgaggaaggctctgaggctgcggcctcaactgctgttgttatcgcagggaggagtctcaaccctaaccgggtcactttcaaggcaaatcggcctttcttggttttcatccgtgaagtgccactcaacacaataattttcatgggcagagtcgccaacccatgtgtgaag

SEQ ID NO: 18899 - DNA, 1392 bp, synthetic construct
  misc_feature 1..1392: note = source = /note="Description of Artificial Sequence: Synthetic coding sequence"
  source 1..1392: mol_type = other DNA
atgtattcgaatgtaataggtacggtaacgtcgggtaaacgaaaagtatatttattatcgttattactaataggtttttgggattgtgtaacgtgtcatggttcgccggttgatatatgtacggcgaaaccgcgagatataccgatgaatccgatgtgtatatatcgatcgccggaaaaaaaagcgacggaagatgaaggttcggaacaaaaaataccggaagcgacgaatcgacgtgtttgggaactatcgaaagcgaattcgcgttttgcgacgacgttttatcaacatctagcggattcgaaaaatgataatgataatatatttttatcgccgctatcgatatcgacggcgtttgcgatgacgaaactaggtgcgtgtaatgatacgctacaacaattaatggaagtatttaaatttgatacgatatcggaaaaaacgtcggatcaaatacattttttttttgcgaaattaaattgtcgactatatcgtaaagcgaataaatcgtcgaaactagtatcggcgaatcgtttatttggtgataaatcgctaacgtttaatgaaacgtatcaagatatatcggaactagtatatggtgcgaaactacaaccgttagattttaaagaaaatgcggaacaatcgcgagcggcgataaataaatgggtatcgaataaaacggaaggtcgtataacggatgttataccgtcggaagcgataaatgaactaacggttttagttctagtaaatacgatatattttaaaggtctatggaaatcgaaattttcgccggaaaatacgcgaaaagaattattttataaagcggatggtgaatcgtgttcggcgtcgatgatgtatcaagaaggtaaatttcgatatcgtcgagttgcggaaggtacgcaagtattagaattaccgtttaaaggtgatgatataacgatggtactaatactaccgaaaccggaaaaatcgctagcgaaagtagaaaaagaattaacgccggaagtattacaagaatggctagatgaactagaagaaatgatgttagtagtacatatgccgcgttttcgtatagaagatggtttttcgctaaaagaacaactacaagatatgggtttagtagatttattttcgccggaaaaatcgaaactaccgggtatagtagcggaaggtcgtgatgatctatatgtttcggatgcgtttcataaagcgtttttagaagtaaatgaagaaggttcggaagcggcggcgtcgacggcggttgtaatagcgggtcgatcgttaaatccgaatcgtgtaacgtttaaagcgaatcgaccgtttctagtatttatacgtgaagtaccgctaaatacgataatatttatgggtcgtgtagcgaatccgtgtgtaaaa

SEQ ID NO: 18900 - DNA, 1392 bp, synthetic construct
  misc_feature 1..1392: note = source = /note="Description of Artificial Sequence: Synthetic coding sequence"
  source 1..1392: mol_type = other DNA
atgtactcgaacgtcattggcacagttacctccggcaaacggaaggtttacttgctgtccctgcttctgatagggttttgggattgtgtgacctgccatggatcccccgtagacatttgtaccgctaaacccagggacatccctatgaacccgatgtgcatataccggtcccccgagaaaaaagccaccgaggacgagggcagcgaacaaaagatacccgaggccaccaaccggcgggtgtgggaactgagcaaagcaaacagcaggtttgctaccaccttttaccagcatcttgctgactccaaaaacgacaatgacaacattttcctgtccccactttccatttctaccgcttttgccatgactaagctgggcgcttgcaacgacaccctccagcagctgatggaggtttttaaattcgataccatttccgagaaaacaagcgatcagatacacttcttctttgcaaagctcaattgcagactgtatcggaaggcaaataaatcgtctaagctggtctctgccaacaggcttttcggtgacaagtcactcacgttcaatgagacttaccaggacatatctgaactggtgtacggggctaagctgcagcctttggatttcaaagagaatgctgagcagtctagggcggctataaacaaatgggtctccaacaaaacagagggccgcattaccgacgtaattccttctgaggctatcaatgagctgaccgtgctggttctggtgaacacgatctattttaagggcctgtggaagtctaaattcagtcctgaaaacaccaggaaggagctgttctacaaagccgatggggagtcctgttctgcatctatgatgtaccaggaagggaaattccggtacagacgagtggctgaaggcacccaggtgctggaactgcccttcaagggcgatgacattaccatggtgttaatcctacccaagccggagaaatcgctggcgaaagtggaaaaggagctgactcctgaggtgcttcaggagtggctggatgagctggaggagatgatgttggtcgtacacatgcctagatttcggatagaggacggcttttcccttaaagagcagctccaagatatgggattagtggacctctttagtccagagaaatctaaattgccaggtatagtggcggagggcagagacgacctgtacgtgtccgatgcttttcacaaagcttttctcgaagttaacgaggagggctcggaggcagccgccagcacagccgtggtcatagcggggaggtcactgaacccgaaccgggtgacattcaaggcgaacagaccgttcctcgtcttcatccgcgaagtgcctctgaatacaattatttttatgggtagagtcgccaatccatgtgttaag

SEQ ID NO: 18901 - DNA, 1392 bp, synthetic construct
  misc_feature 1..1392: note = source = /note="Description of Artificial Sequence: Synthetic coding sequence"
  source 1..1392: mol_type = other DNA
atgtattcaaatgtcataggcaccgttaccagcggaaaaagaaaagtgtatctactgtccctgctgctcattgggttctgggactgcgtgacatgccatggtagccccgttgacatatgtacagcaaaaccccgagatatacctatgaacccaatgtgtatatataggtcccctgagaagaaagctactgaggacgaagggagcgaacagaaaattcccgaggctacaaaccggcgggtgtgggagctatccaaggccaacagccggttcgccactactttttatcagcacctggccgattctaaaaatgacaatgacaatatctttctgagcccactgtcaatctctactgctttcgcaatgactaagttgggtgcctgtaacgataccttacagcaactaatggaagttttcaaatttgacacaatatctgaaaagacatctgaccaaattcatttctttttcgccaaattaaactgtcgtttatataggaaagctaacaagtcttctaaactggtgtccgctaatagactgttcggggacaaaagtcttacctttaatgaaacatatcaggacatttccgaactagtctacggcgctaaattgcagccactggacttcaaagagaatgctgagcagagtcgagccgccatcaataagtgggtgtccaacaagacagaaggtcgcattaccgacgttataccatctgaagcaataaatgagctcaccgttcttgttctggttaacactatatatttcaagggactgtggaagagtaagttttctcccgaaaatactcgcaaggagctgttttacaaagcagatggagagtcatgttctgccagcatgatgtaccaagaagggaagttccgctataggagggtggccgaggggacacaggtgctggagctgccctttaagggggacgacatcaccatggtgctaattctccccaagcccgagaaatccctcgcaaaagtagaaaaggaattaacacctgaagtgctgcaggaatggctcgacgaactagaagagatgatgctcgtggtccatatgcccagatttagaatagaggatggcttctccctgaaagaacagctgcaggacatgggcttggtggacctgttcagtccagagaagagtaaactgcctggcattgttgccgagggtcgcgacgacctgtatgtttccgatgcattccacaaagccttcctggaagtaaatgaagagggcagcgaagcagcagcttcaactgctgttgttattgctggccggtctctgaaccctaatcgcgtgacttttaaagcaaacagacctttcctagtcttcattcgcgaggtgcctctgaacactattattttcatggggagggtcgcaaatccatgcgtgaaa

SEQ ID NO: 18902 - DNA, 1392 bp, synthetic construct
  misc_feature 1..1392: note = source = /note="Description of Artificial Sequence: Synthetic coding sequence"
  source 1..1392: mol_type = other DNA
atgtacagcaacgtgatcgggaccgtgactagcggaaagagaaaagtgtacctcctgagcctgttgctaatcggtttttgggattgcgtcacgtgccacgggtcgccagtagatatatgcactgccaagccacgagatattcccatgaacccaatgtgcatttacagaagccccgagaagaaagctactgaggacgaggggtctgagcaaaaaatcccagaggccactaatagacgcgtctgggaactctctaaggccaactcccgatttgcaacaaccttttaccaacacctagctgacagtaagaatgacaatgacaacatcttcctgtcccccctcagtatcagtacagcttttgctatgaccaaactcggcgcatgtaatgataccctgcagcaacttatggaagtgtttaagtttgatacaattagcgaaaagaccagcgatcagatccatttcttctttgccaagctaaattgccggctgtatcgtaaggctaacaaaagttcgaaactcgtgagcgccaacagactgttcggagacaaaagtttgaccttcaacgagacataccaagatatatcagagctggtctatggagcgaaactgcagccactcgattttaaagaaaacgccgagcaatctcgagctgcaatcaacaagtgggtgagcaacaagaccgagggccgcatcactgatgtgattccgagcgaagccatcaacgaactgacagtgctggtgttggtgaacacgatctactttaaaggattatggaaaagcaaattctcaccggagaacacaaggaaagagctgttttataaggctgacggcgaaagttgcagtgcatcaatgatgtatcaagaagggaagttcagatatcgtcgagtcgccgaaggtactcaagtcttggagctaccatttaagggggacgatattaccatggtgttgatccttcccaaaccggagaagtccctggccaaagtcgagaaagagctgactcctgaggtcctccaggagtggctcgacgagctcgaggaaatgatgcttgttgttcatatgccacgattccggatcgaagatggcttttccctgaaggagcagctccaggatatgggcttggtggatctctttagccccgaaaagagcaaattaccaggcatcgtggcagagggaagggacgacctgtacgtttctgacgccttccacaaggcttttttggaagtgaatgaggagggcagtgaggctgccgcaagtactgcagtagtgatagccggccgcagtcttaacccaaatcgggtgacctttaaggccaataggccttttctcgtgttcatccgtgaggttcccctgaatacaattatcttcatgggcagggtcgcaaacccttgtgtcaag

SEQ ID NO: 18903 - DNA, 1392 bp, synthetic construct
  misc_feature 1..1392: note = source = /note="Description of Artificial Sequence: Synthetic coding sequence"
  source 1..1392: mol_type = other DNA
atgtacagcaacgttattggaactgtcacatccggcaaaagaaaggtttatctgctgtccctgcttctgatcggtttctgggattgcgtcacctgccatggttcaccggtagacatctgtaccgccaagccgagagacatcccaatgaacccgatgtgcatttaccggagccccgagaaaaaagctaccgaggacgaagggtcagagcagaagattccagaggcgaccaatcgccgcgtttgggagctgtctaaagcaaacagccgattcgccacgacattttatcagcatctggcagattccaaaaatgataatgacaacatattcctgagccccctgtctatttcaactgcgtttgccatgactaagctcggcgcctgtaatgatacactccagcagcttatggaagtattcaaatttgacacgatctctgaaaagaccagtgatcaaatacattttttctttgctaagctgaactgcagactgtacagaaaagcaaacaaatcttccaagctcgtgtccgccaatcgccttttcggagataaatctctcacgtttaacgagacttatcaggatattagcgagctggtgtacggcgctaaactccagcctctggactttaaagagaatgctgaacagtctagggctgccataaataagtgggtgtccaataaaaccgagggcaggattaccgatgttataccctccgaggctattaacgagctgacggtcctcgtgctggtgaataccatatactttaagggcctttggaagtcaaagttctcccccgaaaacactaggaaggagctcttttataaagctgatggggagagttgctccgcttcaatgatgtatcaggaaggcaaattccgctacaggagggtggcggaagggacgcaggttctggaactgccctttaagggcgacgatatcacgatggtcttgatcctgcctaagccggagaaatccctggctaaagtagagaaggagcttactcctgaggttctccaggagtggcttgatgaactcgaggaaatgatgttggtggtccatatgccgagattccgaatcgaggacgggttcagcctcaaagaacaactccaggacatgggcttggtggaccttttttctcccgaaaaaagcaaactgcctggaatcgtcgctgaggggcgggatgacctgtacgtgagcgacgcctttcacaaagcctttctggaagtcaacgaggaggggtctgaagctgcggcctccacagccgtggtgattgcagggaggtccctgaaccccaacagagttacatttaaggccaacagaccgttcctcgtgtttatacgcgaagtgcccctgaacaccattatatttatggggagagttgctaacccctgcgtgaaa

SEQ ID NO: 18904 - DNA, 1392 bp, synthetic construct
  misc_feature 1..1392: note = source = /note="Description of Artificial Sequence: Synthetic coding sequence"
  source 1..1392: mol_type = other DNA
atgtatagtaatgttattggtactgtaaccagtggaaaaagaaaagtttacttattgtctttattacttataggtttctgggattgtgttacctgtcacggatcaccagtagatatttgtacagcaaaaccaagagatattccaatgaatccaatgtgtatttatagatcacctgaaaaaaaagctactgaagatgaaggttctgaacaaaagattccagaagctacgaatcgaagagtttgggaattaagtaaagcaaattcaagatttgctacaacattttatcaacatttagctgattcaaaaaatgataatgataatattttcttaagtccacttagtatttctacagcttttgctatgacaaagttaggagcatgtaatgatacattacaacaattaatggaagtatttaaatttgatacaatttcagaaaaaaccagtgatcaaattcatttcttttttgctaaattgaactgtaggctttatagaaaagcaaacaaatcatcaaaattagttagtgcaaacagattatttggagataagtcacttactttcaacgaaacttaccaagatatttcagaattagtttatggagctaaattgcaaccactagatttcaaagaaaatgcagaacaatcaagagcagcaataaataaatgggttagtaataaaactgaaggacgtattactgatgtaattccttctgaagctattaatgaattaacagttttagttttagttaatacaatttattttaagggtctttggaaatctaaattttcaccagaaaatactcgtaaagaattattttataaagcagatggtgaatcttgttcagcttctatgatgtatcaggaaggaaaatttagatatagacgagttgcagaaggaacacaagtgttagaattaccttttaagggagatgatattacaatggtattaatattaccaaagccagaaaaatctttagctaaagtagaaaaagaacttacaccagaagttttgcaagagtggcttgatgaacttgaagaaatgatgttagttgttcatatgccaagatttagaattgaagatggattttcacttaaagaacaattacaagatatgggtttagtagatcttttttcaccagaaaaatcaaaacttccaggaattgttgcagaaggaagagacgatctttacgtgtcagatgctttccataaagcatttttggaagttaatgaagaaggatcagaagcagcagcaagtactgcagttgtaattgcaggaagaagtttaaatccaaatagagtaacatttaaagctaatcgtccatttcttgttttcattagagaagttccattaaatactattatttttatgggacgagttgctaatccttgtgttaaa

SEQ ID NO: 18905 - DNA, 1392 bp, synthetic construct; identical to SEQ ID NO: 18890
  misc_feature 1..1392: note = source = /note="Description of Artificial Sequence: Synthetic coding sequence"
  source 1..1392: mol_type = other DNA

SEQ ID NO: 18906 - DNA, 1392 bp, synthetic construct
  misc_feature 1..1392: note = source = /note="Description of Artificial Sequence: Synthetic coding sequence"
  source 1..1392: mol_type = other DNA
atgtatagcaacgtaattggcaccgtgaccagcggcaagagaaaagtatatctgctatcccttctcctcatcgggttctgggactgcgttacgtgccacggcagtcccgtcgacatctgtaccgccaagcctcgggacatccctatgaaccctatgtgtatttatcgctccccggaaaagaaggcaacagaagatgaaggctcagagcaaaagattccagaagccaccaatcgtagggtgtgggaactctcaaaggctaacagcagatttgcgacgacattttaccaacatctagctgattctaaaaacgacaacgacaatatcttcctttcccctctgagtatctccaccgcctttgctatgaccaagctcggcgcgtgtaacgacaccctccaacagcttatggaggtcttcaagtttgacaccatctctgaaaagactagcgatcagattcacttcttcttcgcgaagctgaactgccggctgtacaggaaggcaaacaagagctccaagttggtctccgccaataggttgttcggagataagtctctgaccttcaacgagacctatcaagacatctcagagctggtatacggcgcaaaacttcaaccactggattttaaagagaacgcagagcagtcgagggccgcaattaacaaatgggtcagcaacaaaacagagggtagaataacagacgtgatccctagcgaggccatcaatgagcttacagtcttagtgttggtgaacactatatactttaaaggattgtggaagagcaaattttctcctgagaacactcggaaggaacttttctataaagctgacggggagtcctgctcggcctctatgatgtaccaggaggggaaatttcgataccgtcgggttgcagaaggcacccaagtcttggagctccccttcaaaggagacgacatcacaatggtgctgattcttcctaaacccgagaagagcttggcaaaagtcgagaaggagctcacacccgaagtgctgcaggagtggcttgatgaactggaggagatgatgctagtggtgcacatgccacggtttcggatagaagatggattttctctcaaagagcaactgcaggacatgggcctcgtggacctttttagcccggagaagtccaaactgccaggtatagttgccgaaggcagagatgatctttatgtgagcgatgcatttcataaggccttcttggaagtaaacgaggagggatcagaggcggctgctagtacagctgtggtcatcgcaggcagaagcctcaaccccaaccgggtgaccttcaaagctaacaggccatttttagttttcatccgcgaggtgccactcaataccatcatctttatgggcagggtggctaacccttgcgtgaaa

SEQ ID NO: 18907 - DNA, 1392 bp, synthetic construct
  misc_feature 1..1392: note = source = /note="Description of Artificial Sequence: Synthetic coding sequence"
  source 1..1392: mol_type = other DNA
atgtacagcaatgttattggaactgttactagcgggaaacgaaaagtttatcttctatcacttcttctgatcggcttctgggattgtgtgacttgccatgggtctccggttgacatctgtaccgctaaacccagagatattcctatgaaccctatgtgtatttaccgttcccccgaaaaaaaagccacagaagatgaaggctctgaacagaagataccagaagcaaccaacaggcgcgtctgggagctgagcaaagcgaactctcgatttgcaaccacattctaccagcatttggcagacagcaagaacgacaacgacaacatatttctatcccccttgtccatctctacagcatttgctatgacgaaactgggggcctgtaatgacactttgcagcagctgatggaggtgtttaagtttgatactatttccgagaaaacctctgaccagatccacttcttcttcgccaagctgaattgtcgcctgtataggaaagctaataaatctagtaaactggtgtcagcaaaccgcctgtttggcgacaaatcactgacattcaacgaaacttaccaggatatatctgagttagtttacggcgctaaactgcaaccactggacttcaaagagaatgcagagcagtctagggccgccattaacaagtgggtgagcaataaaactgaagggcggataactgacgtgatcccatcagaggccataaacgaactgaccgtcctggtgctggtgaataccatctacttcaagggcctctggaagtctaaatttagcccagagaatacgcgcaaggagctgttttacaaggccgatggcgagtcttgctccgcgtctatgatgtatcaagaagggaaattccggtaccggagagttgcagagggtacccaagtgctagagctacccttcaagggggacgacattacaatggtgcttattctgccgaagccagaaaagagccttgcaaaggtagagaaggaactcacgccagaggtcctccaagagtggcttgatgaactggaagaaatgatgctggtggtccacatgccacggtttcgaattgaggatggatttagtttgaaggagcaactacaggatatgggtttggtggacttattctctcccgaaaagagcaagctacccgggatcgtcgctgagggcagggacgatctgtacgtgtctgacgcctttcataaagcttttttggaggtgaacgaagaggggagcgaggccgccgcctcaactgctgtcgtgatcgctgggcgcagcctgaaccccaatagggtgacattcaaagctaatcggccatttctggtgtttatccgtgaggttccactgaatacaatcatattcatgggaagggtggccaacccatgtgtcaaa

SEQ ID NO: 18908 - DNA, 1392 bp, synthetic construct
  misc_feature 1..1392: note = source = /note="Description of Artificial Sequence: Synthetic coding sequence"
  source 1..1392: mol_type = other DNA
atgtattctaacgtgattggcacggttaccagtggaaagagaaaagtttacttactatctcttctgttaatcggtttttgggattgcgtcacctgtcacggctctcccgtggatatttgtaccgcaaagcctcgagacattcctatgaatcctatgtgtatttaccgctcacctgaaaaaaaggcgactgaagacgagggttccgaacaaaagattcctgaagcgacgaatcgtcgcgtatgggaactgagcaaagctaattctcgttttgcgacgacattttatcagcatttagccgattcaaaaaatgacaacgataacatttttttatcgccgctttccatcagcaccgcgttcgcgatgactaaacttggagcttgtaatgatacacttcagcaattgatggaagtctttaagtttgacacaattagcgaaaaaacttctgatcaaattcatttctttttcgcaaagttaaactgtcgactttatcgtaaagctaacaaatcatcaaaactcgtgtcagctaaccgcctgttcggagataaatctctgacgttcaatgaaacgtaccaagacatttcagaacttgtttatggagccaaactgcagcctttagattttaaagagaacgctgaacaatcacgagctgcgataaataaatgggtttcaaataaaacggaagggagaatcacagacgttatcccctcagaggcgatcaacgagctaacagtcctggtacttgttaacaccatctattttaaaggcttatggaaatcaaaattttccccagaaaacactagaaaagaactgttttataaagcagatggcgagagttgtagcgcatcaatgatgtaccaagaaggaaaatttcgttaccgtcgcgtagcggaaggcactcaggttttggagcttccgtttaaaggtgacgacattacgatggttctaatcttaccgaaaccagagaaatctcttgcaaaagttgaaaaagaactcacaccggaagttcttcaggaatggttggacgagttggaagaaatgatgttagttgtacatatgcctagattccgcatcgaagacggattttcattaaaagaacagcttcaggacatgggattagtggatttgttttctccggaaaaatcaaaactgcccggtatcgtcgcggagggcagagacgatctttatgtcagtgatgcgttccacaaagcgtttctggaagtgaacgaagaaggaagcgaggcggcagcgtcaacagcggtagtcattgcaggcagaagtttaaatccgaatcgtgttacatttaaagcgaaccgcccgtttttagtgtttatccgtgaggtgccactgaatacaattatttttatgggtcgtgtggctaatccgtgtgttaaa

SEQ ID NO: 18909 - DNA, 1392 bp, synthetic construct
  misc_feature 1..1392: note = source = /note="Description of Artificial Sequence: Synthetic coding sequence"
  source 1..1392: mol_type = other DNA
atgtactctaacgtcatagggaccgtcacctctgggaaaaggaaagtgtatctactgtctctgctgctcatagggttctgggactgtgtgacctgccatggtagccccgtcgacatatgcaccgccaagcccagggacattcctatgaaccctatgtgtatatataggtccccggaaaagaaagctactgaggacgagggcagcgaacaaaagattcctgaagcgaccaataggcgggtatgggagctttcaaaggctaattctaggttcgccacaactttttaccaacatctggctgatagcaaaaacgataacgataacatcttcttgtcacccctcagcataagcaccgcttttgctatgaccaagcttggcgcttgtaatgacacattgcagcagttgatggaagtctttaagtttgacacaattagcgaaaaaacgtcagaccagatacatttcttctttgctaagctgaattgtaggctgtaccgtaaggcaaacaaatcatctaaactcgtgtccgccaaccggctctttggcgataagtcactgacatttaacgaaacttaccaagatatttcagagctcgtatacggcgcaaaactccagcccctcgatttcaaagagaatgctgaacaatctagggcagccattaacaaatgggtttccaataaaacggaggggcgcatcacagacgtgatccccagtgaggccatcaacgaattgaccgttctagtgctggtcaacacaatctacttcaagggcctttggaaatcaaaattctcgcccgaaaacacacgaaaggagttgttttacaaggcggatggcgagtcctgctctgcctcgatgatgtaccaagagggcaaatttaggtaccgtcgggtggctgagggaacccaggtgctggagctccctttcaagggagatgatatcactatggtgttaatcctcccaaaaccagagaagagtctagcgaaggtggagaaagagttgaccccggaagtgttacaggagtggctggatgaactggaagagatgatgctggtagtgcacatgccccgttttcgaatcgaagacggcttttcacttaaagagcagctccaagacatgggactcgtcgaccttttttcccctgagaagtctaaactgcctggtatcgtggctgaggggcgcgacgacctctacgtgagcgatgcttttcataaggcctttctcgaagtaaatgaggaagggagtgaagctgctgcctcaacggcggtagtgatcgcaggtcggtccttaaatccgaaccgggtaacctttaaggcgaaccgaccttttttggtgtttataagggaggtgccactgaacactatcatctttatgggacgagtggccaacccatgcgttaag

SEQ ID NO: 18910 - DNA, 1392 bp, synthetic construct
  misc_feature 1..1392: note = source = /note="Description of Artificial Sequence: Synthetic coding sequence"
  source 1..1392: mol_type = other DNA
atgtacagcaacgtaatcggaactgtgacctctggcaagcgtaaggtgtacctgctgtcattgttgctgatcggattttgggattgtgtcacctgtcacggcagcccagtcgacatttgcacagctaagccaagggacatcccaatgaatccaatgtgtatctacaggtccccagaaaagaaggccaccgaggatgaaggatctgagcaaaaaatccctgaggctactaaccgtcgtgtgtgggagcttagcaaagctaactctcgcttcgcaactaccttctaccaacacttggccgactctaagaacgataacgataacatcttcctctcccccctgtctattagtaccgctttcgcaatgaccaagcttggagcctgcaacgacaccctgcagcagctgatggaggtattcaagttcgataccatttctgagaaaactagcgaccagatacacttttttttcgccaagctcaactgccgtttgtaccgtaaagccaacaagtcctcaaagctggtgtctgctaacaggttgttcggcgacaagtccctgaccttcaatgaaacatatcaggatatttcagaactggtctatggagctaaactgcaacctctcgattttaaggaaaatgcagaacagagtagagccgctataaataagtgggtttcaaacaagacagagggtagaattacagacgtgataccatccgaggccatcaacgagctgaccgttctggtacttgtgaacaccatctactttaagggcttgtggaagtcaaagttctctcctgagaatacccgcaaggaattgttctacaaggccgatggcgagtcttgctcagcttctatgatgtaccaagagggcaagtttaggtacagaagagtagcagagggaacacaggtgctcgagctgccttttaagggcgacgacatcaccatggtcctcatcttgccaaagcccgaaaaaagcttggctaaggtcgagaaggaactcacaccagaggtcctccaggagtggcttgatgaactggaggaaatgatgctggtggtgcatatgcctaggttcaggatagaggatggcttctccctgaaggagcaactgcaagacatgggactggtcgatctgttctctccagaaaagtccaagctgccaggcatagttgctgaaggcagggatgatctgtatgtttccgatgccttccacaaggcttttcttgaagtgaacgaggagggttccgaggctgccgcttctaccgcagtagtgattgccggacgtagtctcaacccaaacagggtgacattcaaagcaaatcgccctttcctcgtgttcattagggaggtgcccctcaacaccatcatcttcatgggacgtgtggcaaacccttgtgtgaag

SEQ ID NO: 18911 - DNA, 1392 bp, synthetic construct
  misc_feature 1..1392: note = source = /note="Description of Artificial Sequence: Synthetic coding sequence"
  source 1..1392: mol_type = other DNA
atgtactccaacgttatcggcacagtcaccagcggtaagagaaaagtctatctgctcagcctgctactcatcggtttctgggactgcgtgacctgtcatggcagccctgtagacatctgcaccgccaagccacgggatattccaatgaacccgatgtgcatctaccggagtcccgaaaaaaaggctacagaagatgaggggtctgagcaaaaaatcccggaggcaaccaacaggagggtttgggaactaagcaaggcgaatagccggttcgcgacaaccttctaccaacatttggcagactctaagaatgacaatgacaatatctttctgagtcccctgagtatcagtaccgcgttcgctatgacgaagttgggtgcgtgcaacgatacactacagcagttgatggaggtgtttaaattcgacacaattagtgagaaaacaagtgatcaaatccatttttttttcgccaagcttaactgccggctttaccgcaaagccaacaagtcgtccaagctggtcagcgcgaatcggttgttcggcgacaagagtttaacatttaatgagacctatcaggacatttctgaactagtgtacggagcaaaactgcaacctctagatttcaaggaaaatgctgaacagagccgcgcagccatcaataagtgggtgtcaaacaagaccgagggtagaataaccgatgtcattccaagcgaggcgatcaatgagttaacggtgctggtactggtgaacacaatttacttcaaaggcctgtggaaatctaagttctccccagagaacactaggaaagaattgttctataaggccgatggtgagtcttgctcagcaagtatgatgtaccaggaagggaagttccggtacagacgcgttgccgagggcacccaagtgttggagctgccttttaagggggatgatatcactatggttctgattctgcccaagcccgagaagtctctggccaaagtagaaaaggagcttacccctgaagtgctgcaggagtggctagacgagctggaggagatgatgctcgtggtgcacatgccacgcttcaggatcgaggacggattttccctgaaggagcagctgcaggacatggggctcgttgatctctttagcccagagaagtcgaagttgcctggaattgtggcagaggggcgagacgacctgtacgtaagtgatgccttccacaaagccttcctagaagtgaacgaagaaggatccgaggcagccgcctccacagctgtagtcatcgcaggaaggtccttgaatccaaatcgggtaactttcaaggcaaatcgacctttcctagtgtttatcagggaagtgccactcaatacaataattttcatggggcgggtggcaaatccgtgcgtaaaa

SEQ ID NO: 18912 - DNA, 1392 bp, synthetic construct
  misc_feature 1..1392: note = source = /note="Description of Artificial Sequence: Synthetic coding sequence"
  source 1..1392: mol_type = other DNA
atgtacagcaatgtcatcggaacagtaacctcgggcaaacgcaaggtttatctcttgagcctactgctaattggcttttgggactgtgtgacgtgtcatggctctcctgtcgacatttgtactgccaagccgcgtgatatccctatgaaccctatgtgcatttatagatccccggagaagaaggccacggaagacgagggcagcgaacaaaaaatccccgaagcgactaatcgacgagtttgggaactatccaaagcaaattcgcgattcgccaccaccttctaccaacacttggctgattcgaaaaacgacaatgataacatatttctctcgccgctctcaatttccacggctttcgccatgactaagctgggcgcgtgtaacgacactctccagcaactcatggaagtcttcaaatttgacacgatttcagaaaaaaccagcgatcagatccatttttttttcgcgaaactgaattgccggctttatagaaaggctaacaaatccagcaagcttgtttcagccaataggctgtttggagacaagtctctgacttttaacgagacttatcaggatatcagtgaactagtgtatggcgctaagctacaacccttggacttcaaggagaatgcggaacagtcccgggcggcaataaacaagtgggtgagtaacaagacagagggccgtatcactgatgtgatcccttccgaagctattaatgagttgaccgttttagtccttgttaacactatctattttaaggggttgtggaaatccaaattcagccctgagaatactcggaaggagctcttttacaaagcggatggcgagagttgcagtgctagcatgatgtaccaagagggaaagtttcggtataggcgcgtcgcagaaggaacgcaagttttggaactgcccttcaaaggagatgatatcactatggttttgatactccctaagccagagaagtctcttgcaaaggtagaaaaggaattgactcccgaggttctccaggagtggcttgacgaactggaagagatgatgttggtcgtccacatgccccgcttccgcatcgaggacgggttttcccttaaggagcagctgcaagatatgggtttggttgatctgttcagccccgagaagagtaaactcccgggcattgtggctgagggccgcgatgacttatacgtctctgacgcctttcataaagcgttcctggaagtcaacgaagagggttctgaggccgcagcatccacggcagttgttattgccggtcgcagccttaacccaaaccgtgtgacgtttaaggcaaatcgtccgttcttggtcttcattagggaggtcccattgaacacgattatttttatgggtagggttgcaaatccctgcgtcaag

SEQ ID NO: 18913 - DNA, 1392 bp, synthetic construct
  misc_feature 1..1392: note = source = /note="Description of Artificial Sequence: Synthetic coding sequence"
  source 1..1392: mol_type = other DNA
atgtactctaacgtaatcggaacagtgacttcaggaaaacgaaaggtgtatctccttagtttacttctcatcggattctgggattgtgttacatgccatgggtcgcctgtggatatatgtacagccaagcctcgggatatccctatgaatccaatgtgcatctacaggtcgcccgaaaaaaaagccacagaggacgagggatcagagcagaaaatacctgaagccactaaccggcgcgtatgggaactctcaaaagcaaattcccggttcgctacaacattttatcaacatcttgcggattctaaaaatgataatgataatatatttctttcaccactgtcaatatcgacagcttttgccatgacgaaactcggagcatgtaatgatactttacagcagcttatggaagtcttcaaatttgatacaatctctgaaaaaacatcagatcagatccatttctttttcgcaaaactcaattgtagactctatagaaaagcgaacaagtcatcgaaacttgtgtccgccaaccgactcttcggagataaaagtctgactttcaatgagacgtatcaggacatcagtgagcttgtgtatggggcgaaattacagcccctcgattttaaggaaaatgccgagcagtctcgggccgccatcaataaatgggtgtccaacaaaacagaaggaagaattactgatgtgataccatccgaagcaataaacgaattgactgtgctcgtgttagtcaatactatatacttcaaaggattgtggaagtccaaattcagtcctgagaatacaaggaaagaacttttctataaagctgacggggaatcgtgttctgcttctatgatgtatcaggaggggaaatttcggtatcggcgggtcgcagaaggaactcaggtactggaattgcctttcaaaggggacgatatcacaatggtactaatattgccgaaacccgagaagtctctcgctaaagtggaaaaagagctcacacccgaagtgctccaggaatggctggatgaactggaagaaatgatgttagtggtgcacatgccacggttcagaattgaagatgggtttagtttaaaagaacagctacaggatatgggacttgttgatctgttcagtcccgaaaaatccaaactacccgggatagtcgctgaagggcgcgatgatctctacgtctctgatgcatttcataaagcatttcttgaagttaacgaggaaggatctgaggctgcagcttctactgccgtagtaatcgctggaagaagtctcaatcctaatcgcgtgacatttaaagccaatcggcctttcctggtctttatcagggaagtacctctcaacacaataatctttatggggagagtggccaacccctgtgtgaaa

SEQ ID NO: 18914 - DNA, 1392 bp, synthetic construct
  misc_feature 1..1392: note = source = /note="Description of Artificial Sequence: Synthetic coding sequence"
  source 1..1392: mol_type = other DNA
atgtacagcaatgttattggcacagtcaccagcggaaaacgcaaggtgtatctgctgagcctgcttctcattggtttttgggattgtgtcacctgccacggtagccctgtcgatatctgcacggcaaaacctcgtgacatccctatgaacccgatgtgcatttaccgctcccctgagaagaaagctacagaggacgagggttccgaacagaaaatcccagaggccactaaccgccgagtttgggaactgagcaaagcgaatagccggtttgcgaccacgttctatcagcacctggcggacagcaagaatgacaacgataacatttttctgagcccgctgagtattagcacggccttcgccatgacgaaactgggggcgtgcaacgataccctccaacagctcatggaagtttttaaatttgatacgatcagcgaaaaaaccagcgaccagattcattttttctttgctaaactgaactgccgactgtaccgcaaagcaaataaaagctctaaactggtttctgccaatcggttgtttggtgacaagtccctgacctttaacgagacctatcaggacatttctgagctggtttacggtgccaaacttcaacctttggattttaaggagaacgctgagcaatcacgcgccgcaatcaacaagtgggttagcaacaaaaccgagggtaggattacggacgtcattccgagcgaggcgatcaatgagctgactgtgcttgtcctggtgaacaccatctatttcaagggcctttggaaatcaaaattcagcccggaaaacacgcgcaaagagctgttttacaaagccgatggagagtcctgctccgcgtccatgatgtaccaggaggggaagtttcgctaccggcgcgtcgctgagggtacgcaggtgctggaactgcctttcaagggtgatgatatcaccatggtgctgatcctaccaaaaccagagaagtcactggcgaaggttgaaaaagagctgaccccagaggtgctccaggagtggctggacgagctggaggaaatgatgctggtcgtgcacatgcctcgctttcgcatagaagacggcttttcgctgaaggagcagctgcaggatatgggcctggtggacctgtttagtcctgaaaaatctaagctgccaggcatcgtagctgagggtagagacgacctgtacgtcagcgatgcattccacaaagcgtttctggaggtcaatgaagaaggttctgaggcagccgcaagtaccgcggtggttattgccggccgttcgctgaatcctaaccgtgtcacttttaaagcaaaccgaccttttctggtgtttatacgtgaagtgccactgaatacgatcatcttcatgggtcgcgtggccaacccttgtgtaaag

SEQ ID NO: 18915 - DNA, 1392 bp, synthetic construct
  misc_feature 1..1392: note = source = /note="Description of Artificial Sequence: Synthetic coding sequence"
  source 1..1392: mol_type = other DNA
atgtacagcaatgttatcggcactgtgaccagcgggaaaagaaaggtgtacctgctaagtctacttctaatcggcttctgggactgtgttacctgtcacggcagcccagtggacatttgcacggctaaaccacgcgatataccgatgaatccaatgtgtatctatagatctcccgaaaagaaagcaactgaggacgaaggctctgagcagaaaatccctgaggcgaccaacaggagagtgtgggaactctctaaggccaacagccggtttgccacaaccttctatcaacacctcgccgattcaaaaaacgacaatgacaatatattcttgtcaccgctaagtattagcaccgcctttgctatgacaaagcttggcgcgtgtaatgacacgttacagcagttaatggaggtgtttaagtttgatacaatcagcgaaaagacctcggatcaaatacactttttctttgccaaattaaactgtcggctgtaccgtaaggctaacaaaagctccaagttggtgtcggcaaacaggctgtttggggataagagcttaacatttaatgaaacctatcaggacatctccgaactggtgtacggcgccaagctacagcctttggatttcaaggaaaacgcggaacagtcacgagcggctatcaacaaatgggtgtctaataagactgagggcagaattacagatgtcatcccctcggaggcgataaacgaactcacggttctggtgctggtgaatacgatctacttcaaggggctttggaagtctaagtttagccctgaaaacactcggaaagaacttttttacaaagccgacggcgaatcatgctcagcaagtatgatgtaccaagagggcaaattccgctaccgccgtgttgctgaaggcacacaggtactagaactcccattcaagggcgacgatatcacaatggtactgatcctcccgaagcctgagaagagtcttgcaaaggtagaaaaagaactgaccccggaagtgttgcaggagtggcttgacgagctggaggagatgatgttggtggtgcacatgccccgttttaggatagaggatggtttttctcttaaggagcagcttcaggacatgggcctagtggatctgttcagcccagagaagtccaagctccctggcatcgtggccgaaggcagggacgatctgtacgtatccgatgcctttcataaggcgtttctggaggtgaacgaagaagggagcgaagctgctgcctccaccgcggttgtaatcgcaggccgttctctaaacccaaatcgcgtgacattcaaagcgaataggccgtttctggtgttcatccgagaggtacctctgaataccataatctttatgggacgcgtggcaaacccctgtgtgaaa

SEQ ID NO: 18916 - DNA, 1392 bp, synthetic construct
  misc_feature 1..1392: note = source = /note="Description of Artificial Sequence: Synthetic coding sequence"
  source 1..1392: mol_type = other DNA
atgtatagtaacgtcatcgggactgtgacatccggcaaaaggaaggtatatcttctcagcctgctgctgattgggttttgggactgtgtaacctgccacggctcacccgtggatatttgtaccgccaagcctcgggacatccccatgaaccccatgtgtatctaccgatcccctgagaagaaggcaactgaggacgaggggagcgaacagaagatccccgaagcaaccaaccggagagtgtgggagctcagcaaggcaaattccaggtttgccacgaccttctaccagcatctggccgacagcaagaatgataacgataatattttccttagccctctgagcatcagtacagccttcgcgatgacaaagctcggagcgtgcaatgacactttacagcagcttatggaagttttcaaattcgatacaatttctgaaaagacttccgaccagatccatttctttttcgccaaattaaattgtcgcctctacaggaaggcaaataaatccagcaagctggtttccgccaaccgcctgttcggggacaaatccctgacatttaacgaaacttaccaggacatcagcgaactcgtctacggcgcaaaattacagccgttagatttcaaggagaatgcagaacagtctagagcggcaattaataagtgggtgagtaacaagacagaagggcggatcaccgatgtgatcccctctgaagcaatcaatgagctcactgtgctcgtgttggtcaacacaatctatttcaagggactttggaaatccaaattctctcctgagaatactcgtaaggagctcttttataaggccgacggtgagagttgctccgcctctatgatgtaccaagaagggaagttccgctatcggcgtgtggctgaaggtactcaggtgttggagctaccttttaaaggggatgatatcactatggttcttattctgccgaagcccgagaagagtctggccaaagtcgagaaggaactgacccccgaggtcctacaagagtggctggatgaactagaagaaatgatgctagttgtccacatgcctcgtttcaggattgaagacgggttttcccttaaggagcagctgcaagatatgggccttgtggacttgttcagcccagaaaagtccaaactgccaggcattgtagcagaaggaagggatgatctgtacgtgtcagacgcctttcataaagctttcctggaagtaaacgaggaaggctctgaagccgccgcctcgacagcagtggtcattgcgggccggtctttgaaccctaacagagtaaccttcaaagctaaccggccattcctggtgttcatccgcgaagtaccccttaacacgatcattttcatggggcgcgtggcaaacccctgtgtcaaa

SEQ ID NO: 18917 - DNA, 1392 bp, synthetic construct
  misc_feature 1..1392: note = source = /note="Description of Artificial Sequence: Synthetic coding sequence"
  source 1..1392: mol_type = other DNA
atgtattccaacgttattggtactgtgaccagcggcaagcgcaaggtctacttgctgtcgctactgctgatcggcttttgggactgcgtgacctgccacggatcgcctgttgacatctgcactgcgaagccgagggatatccccatgaatcccatgtgcatctacaggtcccccgagaagaaggcgaccgaggacgagggcagtgaacagaagatccccgaagctacaaatcgccgagtgtgggagctgtccaaagccaatagcagattcgccactaccttctaccagcacttggccgactccaagaatgataacgacaatatctttctcagccccctatctatcagcactgctttcgccatgacaaaactcggtgcttgcaatgacactctccagcaactgatggaggtgttcaagtttgatacaatttctgaaaagactagcgaccagatccacttcttcttcgcaaagctgaattgccgcctgtacagaaaagctaacaagagttccaaacttgtgagcgcgaatcgattgtttggcgacaagagtctcactttcaacgaaacttatcaggacattagcgaactggtgtacggcgcgaagctgcagccactggatttcaaggagaatgctgagcagagtcgggccgccattaacaaatgggtcagcaacaaaacagaagggagaataacagacgtgattcccagcgaggccatcaatgagctgaccgttctggttcttgtcaacacaatctacttcaaaggtctgtggaagtccaaattttcacctgagaacacccggaaggagctgttctacaaggccgatggggaaagctgcagtgctagtatgatgtaccaggaaggcaagttcaggtaccgtcgagtggcagaaggaacccaagtgctggaactcccatttaaaggcgacgacattacaatggttctgattctcccgaaacctgaaaagtctctggccaaagtggaaaaagaactcacccctgaagtgctgcaggagtggctggatgaactggaggaaatgatgctggtcgtgcacatgccccggttccggattgaagatggcttctcccttaaagagcaactgcaagatatggggttggttgatttgtttagcccggaaaaatcaaagcttcctggaattgtagcggagggcagagacgacctgtacgtgagcgacgctttccataaggcttttctagaggttaatgaagagggcagcgaagctgccgcctcaacagccgtggtcattgctggtaggtctctaaatcctaaccgagtgaccttcaaggccaacagaccattcctcgtgttcatccgtgaggttccattgaatacaatcattttcatgggaagagtggccaatccttgtgtaaaa

SEQ ID NO: 18918 - DNA, 1392 bp, synthetic construct
  misc_feature 1..1392: note = source = /note="Description of Artificial Sequence: Synthetic coding sequence"
  source 1..1392: mol_type = other DNA
atgtactccaacgtgataggtacggtgactagtggcaagaggaaggtgtatctgctgtccctgctactgataggtttctgggattgcgtgacgtgtcatgggagcccggttgatatctgtactgccaaaccccgggatattcctatgaatccaatgtgcatctacagatcgccagaaaaaaaggccacagaggacgaaggctctgagcaaaaaatccctgaagcgacaaacaggagagtttgggagttatctaaagccaacagccgcttcgcaactaccttttaccagcatctggctgattccaagaacgacaatgataatatttttttgtcgcctttgtctatctctaccgccttcgccatgacgaagttgggggcgtgcaatgacaccttgcagcagctgatggaggtgtttaaattcgacaccatctccgagaagacatccgaccagattcacttcttcttcgcgaagctgaattgccggttatacaggaaggccaataagagcagcaagctggtgtcagccaaccggctatttggcgataaaagcctgaccttcaacgagacatatcaggacatttccgaacttgtctacggggcaaaattgcaaccgctcgacttcaaagagaacgcagaacagtctagagccgctataaacaagtgggtgtcaaataaaacagaggggcgcatcaccgacgtgattccaagcgaggccattaatgaacttacggtgcttgttctcgttaataccatatacttcaaaggcctgtggaagagcaaattcagtcccgagaatacgcggaaagaactcttttataaagcagacggcgagtcatgtagcgcctctatgatgtatcaggaagggaaattccggtatagaagggttgccgagggaacacaggtgttggagcttccatttaagggagatgacatcaccatggtcctcattttgcccaagccggagaagtctctggctaaagtcgagaaagaactaacacccgaggtgctgcaggagtggctggacgagctggaggaaatgatgctggttgtccacatgccgaggttcaggatcgaggatggttttagtctgaaggaacaattgcaagacatgggactggttgatctctttagcccagagaagtctaagcttcccggaattgtcgcagagggacgtgatgatctgtacgtatcagatgcctttcataaggcatttctggaagtcaacgaggaagggagtgaggccgcagctagtacggcagtggttattgctggcaggtctttgaatccgaacagggtgaccttcaaagccaataggcctttcctggtgtttattagggaagttcctctcaataccatcattttcatgggccgtgtggctaacccttgcgttaaa

SEQ ID NO: 18919 - DNA, 1392 bp, synthetic construct
  misc_feature 1..1392: note = source = /note="Description of Artificial Sequence: Synthetic coding sequence"
  source 1..1392: mol_type = other DNA
atgtactccaatgtaatcgggaccgttacaagcggcaaacgaaaagtctacctgctatctcttttactcatcggtttctgggattgtgtgacatgtcacggttcgccagtggatatatgcactgccaaaccacgagacatacctatgaatcctatgtgtatataccggagcccagagaagaaagcaactgaggatgaaggctcagagcagaagattccggaagctacgaatcggcgcgtgtgggagctctcaaaagccaacagcaggtttgccaccacgttttatcaacacctggccgatagcaagaatgacaacgacaacatcttcttatcaccactgtctatctctactgccttcgcaatgactaagctgggggcttgtaacgacacactgcaacagctgatggaggtgttcaagttcgacaccatcagcgaaaagacctccgaccagattcacttcttcttcgctaaattaaactgcaggctctaccgcaaggcgaacaagagtagtaagttggtttctgcaaaccgcctatttggggataagtctctgacattcaatgaaacgtaccaggacattagtgaattggtgtacggagccaagcttcagccactcgatttcaaggaaaacgcggaacaatctagggccgctatcaataagtgggttagcaacaagaccgaaggccgcataacagatgttatcccaagtgaagcaatcaacgaacttacagtgctggtgttagttaatactatctatttcaagggcctgtggaaatcgaaattttctcccgagaacacacggaaagagctgttctataaggctgacggtgaatcgtgctcagctagcatgatgtaccaagagggcaagttccgctatagacgagtcgctgaggggacgcaggtgcttgaactgccattcaagggagacgatatcacaatggtgctgattttacctaaaccggaaaaatccctagcaaaggtcgaaaaggaactcacccctgaggtgctgcaagaatggctcgacgaactggaagagatgatgctggtcgtgcacatgccgcgatttagaatcgaagatggttttagtctgaaggagcagttgcaggacatggggctggtggatttgttttctcccgaaaagtcaaaactccctggaatcgtggccgagggacgggacgacctctatgtgtcagacgcgttccacaaggcattccttgaggtgaatgaggaagggtctgaagcggctgctagcacagctgtggtgatagctggtcgttccttgaacccaaatagggtgaccttcaaggcgaaccgtccctttctcgtatttattcgcgaagttcccctgaatacgatcatcttcatgggacgagtggccaacccttgtgtcaaa

SEQ ID NO: 18920 - DNA, 1392 bp, synthetic construct
  misc_feature 1..1392: note = source = /note="Description of Artificial Sequence: Synthetic coding sequence"
  source 1..1392: mol_type = other DNA
atgtactccaacgtaataggcacagtgacatccggcaagagaaaggtgtacctgttgtcgttattgctgatcggcttctgggattgtgtgacgtgccacggatcgcccgtcgacatttgcacggctaagccccgcgatattccaatgaatccgatgtgtatctatagatcccctgagaaaaaggctaccgaggacgagggcagtgaacagaagatcccagaagcaacaaatcggcgcgtctgggagttatcaaaggcgaacagccgttttgcgacgaccttctatcagcacctggccgactccaaaaatgataacgataacatattcctctcgccactgagcatttcgacggcctttgccatgactaagctgggcgcctgcaacgataccttgcagcaactgatggaagtgttcaagttcgacactatttcagagaaaacgagcgaccagattcacttttttttcgctaagttgaattgtcggttgtaccgcaaggcgaataagtcctcaaagcttgtgtcggcaaaccgactgttcggcgacaagagcctgacgttcaatgagacgtaccaagatatctccgagctcgtatacggcgccaagctccagccgttggactttaaagagaacgcggagcagagtcgcgctgcaataaataaatgggtctcaaataagaccgagggacgcattacggatgttatacctagtgaggcgatcaacgagttgactgtgctggtgctagtcaataccatctacttcaagggtttatggaagtcgaagttcagccctgagaacacgcggaaggaacttttctacaaggctgatggcgagtcgtgctccgcgtccatgatgtaccaagagggcaagttcagataccgacgcgtggcggagggcacgcaggttctggaactgcctttcaagggagatgacatcaccatggtcctgatcttgcctaaaccagagaagtccttggctaaagtcgagaaggagctgactccggaggtccttcaagagtggcttgacgagctcgaagaaatgatgcttgttgtccatatgccgcgtttccgtattgaagacggttttagtcttaaggagcagttgcaggacatgggtctggtcgacctcttcagccccgaaaagtcgaaactcccaggcatcgtcgccgaaggaagggatgatttgtacgtgagtgacgcatttcataaagcatttctggaagtgaacgaggagggcagtgaagctgctgcctcaaccgccgtcgtcattgccggaaggtcgcttaacccgaatcgtgtaacttttaaagctaatcgcccattcctggtctttatccgagaggtaccgctgaacaccatcatcttcatgggacgtgtggcaaacccgtgcgtaaaa

SEQ ID NO: 18921 - DNA, 1392 bp, synthetic construct
  misc_feature 1..1392: note = source = /note="Description of Artificial Sequence: Synthetic coding sequence"
  source 1..1392: mol_type = other DNA
atgtattctaacgtcatagggacggtgacaagtggcaagcgaaaagtgtatctgctctctttgctactgataggcttctgggactgcgttacgtgtcacggaagtccagtggatatctgtacagccaaacctcgtgatatccctatgaaccccatgtgtatttatagatctccagagaagaaggccaccgaagatgaagggtccgagcagaagattccagaggcaacaaatcgtagagtttgggagctgtccaaagcgaatagccgcttcgcaacgacgttctaccagcatctcgccgattctaaaaacgataatgacaacattttcctttcgcccctgagcatctccaccgccttcgcaatgacgaagctaggagcatgtaacgatacgctgcagcaactgatggaggtatttaaatttgatactatcagtgaaaaaacatccgatcaaatacacttctttttcgcaaaactgaattgccggttgtacagaaaggcaaacaagagctccaagctcgtgtcagccaatagattgttcggtgataagtctctgacgtttaacgaaacatatcaggacatctctgagttagtgtatggcgcaaagttgcagcccctcgactttaaagagaacgcggagcagtccagagccgcgatcaataagtgggtgagcaacaaaacagagggcaggattaccgatgttattccatcagaagccatcaacgaacttacggtcctcgtgttagtaaacacgatatactttaaggggctctggaaatctaagttctcaccagaaaacactagaaaagagctgttctataaggccgacggtgagtcatgtagtgcaagtatgatgtatcaagaggggaaattcagatacaggcgggtagccgaaggcactcaagtactagagcttcccttcaagggtgacgatataaccatggtgttgattcttccgaagcccgagaagtctttggctaaagtggagaaggaattgacccctgaggttcttcaggaatggttggatgagctagaggagatgatgctagtggtgcacatgccacgcttccggatcgaagacgggttctctctaaaggagcaactccaggacatgggcttagtggacctgttttccccagagaaaagcaagctgccggggatcgtggctgaaggacgcgacgatctctacgtatctgatgcatttcataaggcctttttggaggtgaatgaggagggttcagaagctgccgcgagtaccgccgtcgtgatcgccggcagatcattgaaccctaacagagtgaccttcaaggctaacaggccttttttagttttcattagagaggtgcctttaaatactattatattcatgggcagggtcgccaatccgtgtgtgaag

SEQ ID NO: 18922 - DNA, 1392 bp, synthetic construct
  misc_feature 1..1392: note = source = /note="Description of Artificial Sequence: Synthetic coding sequence"
  source 1..1392: mol_type = other DNA
atgtacagcaatgtgatcgggactgtgacttcaggcaagcgcaaagtttacctgctgtcactgctcttgatcggattttgggattgtgtgacatgccatggatctccagtcgacatatgcaccgctaagcctcgagatatcccaatgaacccaatgtgtatctataggagccccgagaaaaaggccacagaggatgagggtagcgagcagaagattccagaggccacaaatagacgcgtctgggagctctctaaagctaatagtcgtttcgccactactttctatcagcacctcgccgacagtaagaatgataacgacaatattttcctcagtcctctgtccatatcgacagcctttgctatgacaaagctcggggcatgcaacgacaccctgcagcagctgatggaagtctttaagttcgataccatttccgaaaaaactagtgaccaaatccattttttttttgccaagctgaactgcaggctgtatagaaaggctaataaaagttctaagttggtaagcgcaaaccggctcttcggggacaaaagcctgacattcaatgagacatatcaggacatctccgaactagtctacggggccaaactgcaacccctggactttaaagagaacgccgaacagtcaagagcggcaatcaataaatgggtttctaacaagacagagggaaggatcaccgacgtcataccaagtgaagctattaatgagctgacagtcctagtgttggtaaatactatctacttcaaaggcctgtggaaaagtaaattctctccagagaacacgagaaaagaattgttttacaaggcggacggagagtcctgttcggcatccatgatgtatcaagaaggcaagttccggtatagaagagtggccgaaggaacccaggtgctggaattaccgttcaagggtgatgatataacaatggtcttgatattgcccaagcctgagaaatcgcttgccaaggtggagaaggaactgacaccagaagtgttacaggagtggctcgacgagctggaggaaatgatgctagtggtgcacatgcctcggtttagaattgaggacggttttagtctgaaagagcagctgcaggatatgggcctggtggacctgtttagtcccgagaagtctaagttaccaggtattgtggcagagggccgcgacgacttatatgttagtgatgcattccacaaggcctttcttgaagtcaatgaggaggggtctgaggccgcagcaagtacagcagttgtcattgcagggcggtccctgaaccccaatagagttactttcaaggctaatcgacccttccttgtattcatcagggaagtgcccctaaacaccatcattttcatggggcgggtggcaaatccctgtgtgaag

SEQ ID NO: 18923 - DNA, 1392 bp, synthetic construct
  misc_feature 1..1392: note = source = /note="Description of Artificial Sequence: Synthetic coding sequence"
  source 1..1392: mol_type = other DNA
atgtatagcaacgttattgggactgtgacgagcgggaagcggaaagtgtatctcctgagcctgctgctcatcgggttttgggattgcgtgacatgtcacggaagcccagtcgacatatgtacagccaaaccccgggatattccaatgaaccccatgtgtatttatagatctcctgagaaaaaggcaaccgaggatgaaggttcagagcagaagattcccgaagctacaaaccgtcgggtttgggaactcagcaaggctaatagccgatttgcaactacattctatcaacatctcgcagacagtaagaatgataatgacaatatattcctctcacctctgagcatttctacggcctttgccatgacaaagctgggggcttgcaatgacacgctgcagcagttgatggaagtgttcaagtttgatacaataagtgagaaaacgtctgaccaaatccacttttttttcgcgaaacttaactgcagactgtacagaaaagccaacaagtcttcaaaactggtgtccgctaataggctgttcggggacaaatcgttgacttttaacgagacatatcaggatattagtgaactggtgtacggggccaaactgcagccgttggatttcaaggagaacgcggaacagtcccgcgctgctatcaataagtgggtctcgaataagactgaagggagaattacggatgtcatcccctcagaagcgataaacgagctgacggtgctcgtacttgtgaatacgatttattttaaaggcctatggaaaagcaagttttcacctgagaacacaaggaaagagcttttctataaagccgacggggagtcctgctccgcatccatgatgtaccaagagggtaaatttagataccggagggtcgctgaagggactcaggtgctggaactgccctttaagggcgacgatataaccatggtgttgattctgccgaaaccagagaaatccctggcaaaagtcgagaaggaactgactccagaagtgcttcaggagtggttagacgagctcgaagaaatgatgttagttgttcacatgccccgattcaggatcgaagatgggtttagtctgaaggagcagctgcaagacatgggactcgtggatctgtttagtcccgaaaagtcgaaactgccgggcattgtcgctgagggacgcgatgacctgtatgtgagcgatgctttccacaaggcatttttggaagtaaatgaggaaggctctgaagccgcagccagcacagccgtggtgatcgccggtcgatctctgaaccccaatagagttacattcaaagccaatcgccctttcttggtgtttataagggaggtgccgctgaacaccatcattttcatgggtcgcgtggccaatccttgtgtgaag

SEQ ID NO: 18924 - DNA, 1392 bp, synthetic construct
  misc_feature 1..1392: note = source = /note="Description of Artificial Sequence: Synthetic coding sequence"
  source 1..1392: mol_type = other DNA
atgtacagcaacgtcatcgggaccgtaacaagtggtaaacgaaaagtgtaccttctgtccctcctcctcattggcttctgggattgcgtgacttgccacggctctccagtggatatatgtacggccaagcccagggacatccctatgaatccgatgtgcatttacagatctcctgaaaagaaggccaccgaggatgaaggcagcgaacagaagattcctgaagctacaaatagacgcgtttgggaactgagcaaggcgaatagtagattcgcaaccaccttctatcagcatctggccgatagcaaaaacgacaacgataatatcttcctgagcccgctgagcatttcaactgcctttgccatgacaaaactgggggcatgcaatgacactctgcagcaattgatggaggtgtttaagttcgacactatctcagaaaagacgagcgaccagatacacttctttttcgcaaagctgaattgtagactgtacagaaaggcaaacaagagttcaaagcttgtgtccgcgaaccgtctcttcggggacaagagcctgacttttaatgaaacttatcaagacatcagcgaactcgtctacggcgctaaactgcagcctctcgattttaaggaaaacgctgagcagtcccgagctgccatcaacaagtgggttagtaataagaccgagggtcgaatcacggacgtgatcccaagcgaagccatcaacgagctgaccgtgttggtgctcgtcaataccatctacttcaagggtctctggaagtctaaattcagccctgaaaacacaaggaaggagctattctacaaagcagacggcgaaagttgtagcgcaagcatgatgtaccaggagggtaagtttcggtaccgccgtgtggcagaaggtactcaggtcctcgaactgcctttcaaaggcgacgacatcaccatggtgctcatactgccgaaacccgaaaagagtctggccaaagtagaaaaagagctgacccccgaggtcctgcaagaatggctagacgaactcgaagagatgatgctcgtggtccacatgcctcggttccggatcgaggacggatttagtttgaaggagcagctacaggacatgggcctggttgatctgttcagccccgagaagtccaaacttccaggcatcgtggcagaggggagagacgatctgtatgtaagcgacgcattccacaaagccttcctggaggtgaacgaagagggctctgaggcagccgcatccaccgctgtggttattgcgggaagatctcttaaccctaatagagtcaccttcaaggctaacaggcccttcctggtctttattcgagaggtgccgctgaatacaatcatttttatgggccgggttgcaaatccctgtgtgaaa

SEQ ID NO: 18925 - DNA, 1392 bp, synthetic construct
  misc_feature 1..1392: note = source = /note="Description of Artificial Sequence: Synthetic coding sequence"
  source 1..1392: mol_type = other DNA
atgtactcaaatgtcatagggactgttacatctggcaaacgcaaagtgtacctgttgtcacttctgctgattggattttgggactgcgtaacatgtcatggcagtcccgtcgatatctgtactgctaaacccagagatattccgatgaacccaatgtgcatatacaggtcacctgagaagaaagcgaccgaggacgaaggctctgagcaaaagatccctgaggccacgaataggcgggtatgggaattaagcaaggcgaattccagattcgctactactttctatcaacacctggccgactccaaaaacgataacgataacattttcctctctcccctttccataagcaccgcgttcgctatgacgaagttgggtgcttgtaatgacaccctccagcagctcatggaggtgttcaaattcgacaccataagcgaaaaaaccagtgaccaaatacacttcttctttgctaaactcaattgtcggctgtaccgaaaggctaataagtcgtcaaaattagtgagcgcgaatcggcttttcggcgacaagagcctgacctttaatgagacttaccaggacatttccgaactggtgtatggcgcaaagctccagccattggactttaaggaaaatgctgagcagtcaagggccgccataaacaagtgggtgagcaacaagactgaagggcgcataacagacgtcattccatccgaggccataaatgagcttaccgtcctcgtgttggtgaacaccatttacttcaaggggctgtggaagtctaaattcagccccgagaacaccagaaaggaactgttttataaagcagacggcgaaagttgctccgcctccatgatgtatcaggagggaaagttcaggtaccgtcgagtcgccgagggcacccaggtgttagaactgcctttcaagggcgacgatatcaccatggtgctgattctaccgaaaccggagaagagtctggcaaaagtggagaaggagttaacacctgaggtccttcaggaatggttggatgagctggaggaaatgatgctagttgtgcatatgccaaggttccgaatcgaagacgggttctcactgaaggagcagctccaggacatgggactggtggatctcttcagcccagagaaatcaaagttgcctggtatcgtggccgaaggacgggacgatctgtatgtgagtgacgcctttcataaagcatttttggaggtgaacgaagagggcagtgaagcagccgccagtaccgcagtcgtgatagccggaaggagtctgaaccctaaccgagtaaccttcaaggctaacaggccattcctggtctttattcgcgaagtgccacttaatactatcatttttatgggcagagtagccaacccttgcgtgaag

SEQ ID NO: 18926 - DNA, 1392 bp, synthetic construct
  misc_feature 1..1392: note = source = /note="Description of Artificial Sequence: Synthetic coding sequence"
  source 1..1392: mol_type = other DNA
atgtactccaatgtaatcgggacagtgacatccgggaaacggaaggtctatttgctctccctgttactcattggattttgggattgcgtgacttgtcacggttctccagtagatatctgtactgccaagcctagagatatacctatgaatcctatgtgtatctaccggtccccagaaaagaaagcaactgaggacgaagggagcgagcaaaagatcccagaagccactaaccgtcgcgtgtgggagctgtcgaaggcaaattctcgatttgcgactaccttctatcaacacctggccgatagcaagaacgacaacgacaatatttttctaagtccgctgtcgatcagtaccgcattcgcaatgacgaaattgggagcatgcaatgacaccctgcagcagctgatggaagtgttcaagttcgacaccattagcgaaaaaacctctgatcagatccactttttctttgctaaactgaattgtcggttgtatcgaaaagcgaacaagtcctctaaattagtctctgccaaccggttgtttggtgacaagtccttaacgttcaatgaaacataccaggacatttctgaactcgtgtacggggccaaactgcagcccctcgattttaaagaaaacgctgaacaaagtcgcgccgcgatcaataaatgggtgtcaaataaaactgagggccgcattaccgacgtaataccgagtgaggccattaacgaattgaccgttcttgtcctagtcaatacaatttactttaaaggcctgtggaagtccaagttctctcctgaaaacacccgtaaggagctgttctacaaggccgatggtgagtcgtgttcagcatccatgatgtaccaagagggaaagtttcgataccgccgtgtagctgaaggtacccaggttcttgagctgccttttaagggagacgatataactatggtactcatcctaccaaagcctgaaaaatccctggcaaaagtcgaaaaggagttgactcccgaggtccttcaggagtggctcgacgaactcgaagagatgatgctcgtcgttcacatgccacggttcaggattgaagacgggttttctcttaaggagcagctgcaggatatgggcctggtggacctgttttccccagagaaaagtaagctgccggggatagtggcagaaggacgagatgatctttatgtcagcgatgctttccataaggcgtttttagaggtcaatgaagaaggcagcgaggcggcagcctccaccgctgtggtcatcgcaggacgttctctgaaccccaatcgagttacctttaaagccaataggccatttcttgtgtttatcagggaggtgcccctgaataccattattttcatggggcgcgtggctaatccctgtgtaaag

SEQ ID NO: 18927 - DNA, 1392 bp, synthetic construct
  misc_feature 1..1392: note = source = /note="Description of Artificial Sequence: Synthetic coding sequence"
  source 1..1392: mol_type = other DNA
atgtattcaaatgtgatcgggaccgtgacttctgggaaaagaaaagtgtacctcctgtctctcctgctcattgggttctgggattgcgtgacctgccacggtagccccgtagacatctgcacagccaagccgcgcgacatccccatgaatccgatgtgtatttaccggtcccctgaaaagaaggccaccgaggatgaagggtccgagcagaagattcccgaggctacgaacaggagagtgtgggaactgtccaaggcgaatagcaggttcgctacgaccttctaccagcacctcgctgactcaaagaacgataacgacaacatcttcctgtccccgctatccatttctactgcctttgccatgacaaaattaggcgcttgtaacgatacccttcaacagctaatggaggtcttcaagttcgacacgatttccgagaagacctctgaccagatacattttttctttgccaagcttaactgcagactctatcgcaaggcaaataaatcctctaaactggtgtccgccaatcgcctgtttggtgacaagtctctcacattcaacgagacgtaccaggatattagcgagttagtctatggggcaaagctgcaacctcttgatttcaaagaaaatgcagagcagtcacgagcggcaattaataaatgggtgtcaaacaagaccgagggcaggatcacggatgtgattcccagcgaagcgatcaacgagttaacggttctcgtactggtgaacaccatttattttaagggcctgtggaaatctaaatttagccccgagaacacacgaaaagagctgttctacaaggctgacggtgaaagctgttctgcttccatgatgtaccaagagggcaaattccgctatcgaagagtcgctgagggcacccaagtgctggaactgccctttaagggagatgacattacgatggttctgattctgccaaagcctgaaaagtctctcgccaaagtggaaaaggaattgacccccgaggttctgcaagaatggctggacgaactggaagagatgatgctcgttgtgcatatgccaaggtttcggatcgaggatggctttagtttaaaggagcagctccaggacatgggattggtggaccttttcagtccagagaagtcaaagctacctggcatcgtggctgagggtcgcgatgacctatacgtcagtgacgcctttcataaggcgttcttggaagtcaatgaggagggttctgaggcagccgctagcacagctgtggtcattgccggcaggtcattgaaccccaatagagtgacgtttaaggctaatcgccctttcctcgtgttcatccgcgaagtgccgctcaacacgattatcttcatgggacgtgtggcaaacccttgcgtgaaa

SEQ ID NO: 18928 - DNA, 1392 bp, synthetic construct
  misc_feature 1..1392: note = source = /note="Description of Artificial Sequence: Synthetic coding sequence"
  source 1..1392: mol_type = other DNA
atgtattcaaacgtgatcggtactgtcacgtcgggaaagcgtaaggtgtacctgctgagcctgttgcttatcggattttgggattgcgtgacctgtcatggaagcccggtcgatatctgcactgccaagccaagagacatccctatgaatccgatgtgcatttacaggtcgcccgagaaaaaggcaaccgaggacgaaggcagcgaacagaaaattccagaagccaccaacagacgagtgtgggaactttctaaggccaattcgcggttcgccactaccttctaccagcacctggctgattcaaagaacgataacgacaacattttcctcagccctctgtccatcagcaccgccttcgccatgactaagttgggagcctgcaacgacactcttcaacaactcatggaggtattcaagttcgacactatatctgaaaagacctcggaccagatccatttctttttcgccaaactcaactgccgcctgtaccgcaaagcaaataagtcgtccaagctcgtgtcggccaaccggctgtttggagataaatcactgacgttcaatgaaacctaccaagacatctccgaacttgtctacggagcgaaactccagccgctggatttcaaagaaaatgccgaacaaagccgggctgctatcaacaagtgggtttcaaacaagacggaggggcgcatcaccgatgtcatcccgtccgaggcgatcaatgaactgaccgttctggtgctggtgaacaccatctacttcaagggtttgtggaaaagtaaattctccccagaaaatactcggaaggagctgttctacaaggcagacggcgaatcgtgctcggcgtcgatgatgtaccaggaaggcaagttcagatacagaagagtggcggaagggacccaagtgctggaactcccgtttaagggagacgatatcactatggtgttgatcctgccaaaacctgagaagtccctcgccaaggtggaaaaggagctgacccccgaagtgctccaggaatggctcgacgaactcgaggagatgatgctggtggtgcacatgccgcggttccgcatcgaggacggattttccctcaaggaacagctgcaggatatgggactggtggatctgttctcaccagagaaatccaaattgccgggcattgtcgcagaggggcgcgacgacctctacgtgtcagacgcgtttcacaaggcgtttcttgaagtcaacgaggagggcagcgaggcagccgcgtccaccgctgtggtcattgctggacggagcctgaaccccaatcgcgtgactttcaaggctaacaggccgttcctcgtctttatccgcgaggtgcctctgaacactatcatcttcatgggtagggtcgcaaatccgtgtgtgaag

SEQ ID NO: 18929 - DNA, 1392 bp, synthetic construct
  misc_feature 1..1392: note = source = /note="Description of Artificial Sequence: Synthetic coding sequence"
  source 1..1392: mol_type = other DNA
atgtattcaaatgtgattgggaccgtcactagcggcaaacgaaaagtctaccttctgagcctcctgctgattggattttgggattgcgtgacatgccacgggtctcccgttgacatttgtacggccaagccaagggacattcccatgaacccaatgtgtatttatcggtctccagaaaagaaggcaacagaggatgagggttccgagcaaaaaattccagaagccaccaatcggcgggtttgggagctatccaaggccaattcccggttcgctacaactttctatcagcacctggctgacagcaaaaatgataacgacaacattttcttatcccccctttcaattagcacggcctttgctatgactaaactgggcgcttgcaatgacaccctgcagcagctgatggaagtgtttaagttcgacacgatcagcgagaagacaagtgatcaaatccacttctttttcgccaaacttaactgtaggctgtataggaaagcgaataagtcatcaaaactcgtgagcgctaacagactctttggcgacaagtcactaaccttcaatgaaacttaccaggatatctccgagctagtgtatggcgcgaaacttcagcctctggactttaaagagaatgctgagcaaagcagggcagcaataaataagtgggtttctaacaagactgaaggaaggataaccgacgtcataccgagtgaggcgatcaatgaactgaccgttctggtgctagttaataccatttatttcaaggggttgtggaaaagtaaattcagcccagagaacactaggaaggagctattttataaagcagatggcgagagctgcagtgcatctatgatgtaccaggaggggaagtttaggtatcgtcgggtcgccgaaggaacccaggtgctggaactcccattcaagggggatgacatcaccatggtactcatccttccaaaacctgaaaaatcgttagccaaggtcgagaaagaactcacaccggaggtgctgcaggaatggctggacgagctggaggagatgatgctcgtggtccatatgccaaggtttcggatcgaggacggcttttcactcaaggaacagctccaagacatgggattggtcgaccttttcagccctgaaaagtctaagctgcccggcattgtcgccgagggccgcgatgatctgtacgtttcagacgccttccataaggccttcctcgaggtgaacgaggaggggtccgaggccgccgcttcaactgccgtcgtcattgccggtaggtcactgaaccctaacagggtgacttttaaggcaaacagaccctttctggtgttcattagagaggttcccctgaacaccattatttttatgggtcgtgtagccaatccgtgtgtaaaa

SEQ ID NO: 18930 - DNA, 1392 bp, synthetic construct
  misc_feature 1..1392: note = source = /note="Description of Artificial Sequence: Synthetic coding sequence"
  source 1..1392: mol_type = other DNA
atgtacagcaacgtaatcggcacagtgacgagcggtaaaaggaaagtttaccttctgtccctgcttcttataggattttgggactgcgtgacatgtcacggcagcccggtcgacatttgcacagcaaagcccagagacattcccatgaatccaatgtgtatttataggagtccagagaagaaagcaacggaagatgagggctcggagcagaaaataccagaggccactaacaggagggtgtgggagctgtcgaaggcgaactcccgttttgccacaaccttctatcaacacctggctgatagcaaaaatgacaacgataacattttcctgtctccattatcgatcagtacagccttcgctatgactaagttgggagcttgtaatgacaccctgcagcagctgatggaggtatttaagttcgataccatttcagagaagacttcggatcagattcacttcttctttgccaaactgaattgtcggttgtaccggaaggcgaacaaatcttctaagctggtaagcgcgaaccgcctgttcggggataagtccctgactttcaacgagacttaccaagacatcagtgagctggtttacggggcaaaactccagcctctggatttcaaggagaacgcagagcaatccagggctgctatcaacaagtgggtgtctaacaagaccgagggcagaatcaccgacgtcattccatcagaagcgatcaacgagttgacggtgttggttctagtgaataccatctacttcaaaggcctctggaagagcaagttttcccccgagaataccaggaaggaactgttttataaggctgacggggagtcttgctctgccagcatgatgtatcaggaaggcaagtttcggtacagacgagtggcagagggcacccaggtgctagagctcccctttaagggggacgatattactatggtgctgatcctgcccaaaccagaaaagtccctggcgaaggtcgaaaaagagctcacccccgaagtgctacaggaatggctggacgagctcgaagaaatgatgcttgtagtccatatgcccagattccggattgaagacggattctcgctcaaggaacaactgcaggatatggggctagtggatctcttcagcccggaaaaatccaaattgcccgggatcgtggccgaaggacgcgacgacctgtatgtgagcgatgccttccataaggcattccttgaagtgaatgaagaagggagcgaggccgccgcctccacagcggttgtgatcgcaggtaggagtcttaatcctaaccgagttacctttaaggctaatcggccctttctggttttcatcagggaggttccgcttaacacaataatttttatggggagggtggcaaacccctgcgtaaag

SEQ ID NO: 18931 - DNA, 1392 bp, synthetic construct
  misc_feature 1..1392: note = source = /note="Description of Artificial Sequence: Synthetic coding sequence"
  source 1..1392: mol_type = other DNA
atgtattctaatgtgattggcactgtgacatcaggtaaaaggaaggtctacttgctcagtctcttgctgattggtttttgggattgcgtgacatgccatgggagtccggtggacatctgtactgcaaaaccacgggatatccccatgaacccgatgtgcatataccgatcccccgagaagaaggctaccgaagatgagggttcagaacagaaaattccagaagcaaccaataggagagtctgggaactgagtaaagctaactcacgctttgccaccacgttctaccagcacctcgcagacagcaaaaatgataacgataatatcttcttgtcgcccctgtctatatctactgccttcgccatgactaagctgggagcttgcaacgacacactgcagcagttgatggaagtcttcaagttcgataccatttcagagaaaaccagcgaccaaatccattttttctttgccaagctcaattgcaggctgtaccggaaggcaaacaaatctagcaaacttgtgtctgccaataggctgtttggagacaagtcgctgacgtttaacgagacttaccaggatatctcggagctcgtctatggtgcaaagctgcagcccctggatttcaaggaaaatgctgaacagtctcgcgccgccattaacaaatgggtgagtaataagaccgaaggccggatcacggacgtaatcccgtccgaagcaattaacgagcttaccgtgctggtacttgtgaatacaatctacttcaaaggcctctggaagtcaaagttttcccccgaaaataccagaaaagaactgttctacaaagcggacggcgaaagctgctctgcctccatgatgtaccaggagggtaagtttagatatcgacgggttgcagaaggcacgcaggtccttgaactccccttcaaaggagacgacattactatggtactaattctgccaaaaccagaaaagtccttagcaaaggtggagaaggagctcacaccagaggtccttcaggagtggttggacgagctggaggaaatgatgctcgtggtgcatatgccacggttccggattgaggacggtttttcactcaaagagcagctccaggatatgggtctggtggaccttttttcaccagagaagtcaaaacttcccgggatcgtggccgaggggagggatgacttatatgtgagcgacgcctttcacaaggctttcctggaggtgaatgaagaaggcagcgaagcggccgctagcaccgctgtggtgatcgcgggccgctctctcaatcctaaccgcgttacattcaaggccaacagaccctttctggtgtttattagggaagtccccctgaacacaatcatcttcatggggcgcgttgctaacccgtgtgtgaaa

SEQ ID NO: 18932 - DNA, 1392 bp, synthetic construct
  misc_feature 1..1392: note = source = /note="Description of Artificial Sequence: Synthetic coding sequence"
  source 1..1392: mol_type = other DNA
atgtactctaatgtgataggcacagtgacttccggcaagcgcaaggtttacctgttgagcttgctgctgattggattctgggattgcgtgacgtgtcatggctcgcctgtggacatctgcaccgctaaaccaagagacattcctatgaatccgatgtgcatatataggagccccgagaaaaaagccacagaagatgaaggttccgaacagaaaattcccgaggccaccaaccgtcgcgtgtgggaactttctaaggcgaacagtagattcgccaccactttttatcagcacctggcagatagcaagaatgacaatgacaacatattcctgagtccactctccatctcgaccgctttcgctatgaccaaacttggcgcttgcaacgacacgctacagcagttgatggaagtgtttaagttcgataccatctcggaaaagacaagcgaccagattcacttcttttttgctaagctgaactgccgactgtacaggaaagcgaacaagagtagcaagctcgtctccgccaaccggctgttcggggacaaatcgcttaccttcaacgagacataccaagacatcagtgaactggtgtatggcgcaaagctgcagcctctggacttcaaggagaatgccgagcaatccagggctgccatcaacaagtgggtgtccaataagactgaggggcgcattacggacgtcattccgtccgaggcaattaacgagcttacagttctggtgttggtaaacaccatctactttaagggcctgtggaagtctaaattctctccagagaacaccagaaaggagctattttacaaagccgatggcgagtcctgttccgcctcgatgatgtaccaagaggggaagtttaggtacagacgcgtcgccgaaggaacacaagtcctggagctgccattcaaaggagacgatatcacaatggtgcttatcctgccaaagcctgaaaagagtctagcgaaggtggagaaggaactaacgccagaggtcctacaggagtggctggatgaactagaggagatgatgctagtcgtacacatgccacgtttcagaatcgaggatgggttcagtctgaaagaacagctgcaagatatggggctcgtcgaccttttcagtcccgagaagtccaagttgcctggcattgtagcggaggggcgagatgatctgtacgtcagtgacgctttccataaggcatttctcgaagtgaacgaagaggggtctgaggctgccgctagtactgctgtggtcatcgcgggccggtccttgaatcctaatagggtgaccttcaaggcaaatcggccgtttttagtttttattagagaggtccctctcaacactatcatatttatggggagggtcgccaacccctgcgtcaag

SEQ ID NO: 18933 - DNA, 1473 bp, synthetic construct
  misc_feature 1..1473: note = source = /note="Description of Artificial Sequence: Synthetic coding sequence"
  source 1..1473: mol_type = other DNA
atggcactgttgtgggggctcctggtcctgtcgtggtcctgcctccaagggccctgcagcgtcttttcgccagtgtccgccatggaacctctcggtagacagcttacgagcgggcccaaccaggaacaagtttcccctcttacccttttgaagctcggaaaccaggaaccaggaggccagaccgcactgaagtcgccacctggagtgtgctcgcgagatcctacccctgagcagacgcatcgtcttgcaagagcaatgatggcatttactgcagatttgttcagcctggtcgcacagacttcgacttgtcctaaccttattctctcacctctctcagtggcacttgcactgagccaccttgccctgggtgcgcagaaccataccctgcaaagacttcagcaagtcttgcatgctggaagcggaccatgccttcctcatcttctctcccgactgtgtcaagaccttggaccaggagcttttagactggcggcacggatgtacctgcaaaagggttttccaattaaggaggatttccttgagcagagcgaacagctgtttggtgccaagccagtctcgcttactggcaagcaagaagatgaccttgcaaacatcaaccagtgggtgaaggaagcgactgaaggtaagatccaagagttccttagcggactgcccgaggataccgtgctgcttcttctgaatgcaattcacttccaggggttctggcggaacaagtttgatccatcactgactcagagagactcctttcatctggatgagcaatttaccgtccctgtggaaatgatgcaggcaagaacttaccctctgcgctggttcttgctggaacaaccagagatccaggtcgcacattttccgttcaaaaacaacatgtcctttgtcgtccttgtgcccactcactttgaatggaatgtgagccaagtgctggcaaacttgagttgggataccctgcatcctcctctggtgtgggagcggcccaccaaggtcagactgccgaagttgtacctgaagcaccaaatggatctggtggcaactctgtctcagcttggactgcaggaattgtttcaagctccagaccttcgggggatttccgaacagtcactggtcgtgtccggagtgcagcatcaatcaacccttgaactttcggaggtgggcgtcgaagcggcagcagcaacctcaatagctatgtcccgcatgtctctctcgtccttttcggtgaaccgccccttcctgttcttcatctttgaagatactactggcctgcctctctttgtcggttcagtgaggaaccctaatccttcggcaccccgggaacttaaggaacaacaagattctcctggtaataaggatttccttcaatcactcaagggtttccctagaggggataagttgtttgggcctgaccttaagctcgtgccacccatggaagaagattacccacagttcggatcacccaag

SEQ ID NO: 18934 - DNA, 1473 bp, synthetic construct
  misc_feature 1..1473: note = source = /note="Description of Artificial Sequence: Synthetic coding sequence"
  source 1..1473: mol_type = other DNA
atggcactgctatggggactgctagtcctttcttggagctgtttgcagggcccatgttccgtcttctctcccgtgtcagccatggagcctctgggccggcagctcaccagcggacccaaccaggagcaggtatcacccctgaccctcctgaagcttgggaaccaggagcccggcggccaaacagcgctgaagtcaccccctggggtgtgcagcagagaccccacccccgagcagactcacagattggcaagagctatgatggcattcaccgcagacttgttctccttagtggcccagacatctacctgccccaatctgatcctgtcccctctgtcagtcgcacttgcattgtcgcatctggccctaggcgcacagaatcatacactccagcgcctgcagcaggttctgcacgccggaagcggtccctgtctgcctcatctgctgtccaggctttgtcaagatcttggcccaggggccttcagactggccgctagaatgtacctgcagaaggggttccccatcaaggaagatttcctcgagcagagtgagcagcttttcggcgctaaaccagtgtctctgaccggcaagcaggaagacgacctggctaacatcaaccagtgggtgaaggaagctacagagggtaagatccaagagttcctgagcggccttcccgaagataccgtgctgttgctgctgaatgcaattcactttcaaggcttctggcgaaataaatttgacccatccttgactcagcgggacagtttccacctggacgagcagtttacagtcccagtagagatgatgcaggccagaacataccctttacgttggtttttgttggagcagccagagatacaggtcgcgcatttcccgtttaagaacaatatgagtttcgtcgttctggtgcctacccatttcgagtggaatgtcagccaggtgctggcaaacctgtcttgggataccctccaccccccactcgtctgggagcggcccacaaaggtacggctccccaaactgtaccttaaacaccagatggatctggtggctacactgagccagttaggtctgcaggagttattccaagcccccgatctgcgcggcatctcagaacagtcactggtagtttccggcgtccagcatcaaagtactctggaactttccgaggtcggcgtcgaagccgcagccgccaccagcatagctatgtcaagaatgtcactgagctccttctctgtgaaccggcccttcctgtttttcatcttcgaggacaccacagggttacccctattcgttggctccgttcggaacccaaacccttctgccccacgcgagcttaaggaacaacaggattcgcctggtaataaagattttctgcaatctctcaaaggcttccctcggggggacaagctgttcgggcctgatctgaagctggtgccgccaatggaggaagactatccgcagtttggttcgcctaag

SEQ ID NO: 18935 - DNA, 1473 bp, synthetic construct
  misc_feature 1..1473: note = source = /note="Description of Artificial Sequence: Synthetic coding sequence"
  source 1..1473: mol_type = other DNA
atggctcttctatgggggctgctcgtattaagctggagctgcctgcagggaccttgctctgtgttctctccagtgtctgctatggagcccttgggaaggcaactgacctcaggtcctaaccaggaacaagtctctcctctaacgctgctgaagctgggtaatcaagaacctggcgggcaaacagctctaaagtccccgccaggcgtgtgtagtagagacccgacacctgaacaaactcaccgactggcacgggctatgatggctttcaccgccgacctattctccctcgttgctcagaccagcacatgccccaatttgattctctcacctctgagtgtggcattagccctgtcgcacttggcacttggagctcagaaccacacacttcaaagattgcagcaggtgctgcacgctgggtctggaccgtgtttgccccatctattaagtagactgtgccaggatttgggccccggcgccttcagactggcagcccgaatgtaccttcagaaaggttttccgatcaaagaagattttctcgaacagtcagagcagctgttcggcgctaaacccgtgagcctgacagggaagcaggaggacgatttagctaacatcaaccagtgggtgaaggaagccacagagggcaaaatacaggaatttttgtccggccttccagaggatactgtcttactgctgcttaacgccattcactttcaaggcttctggcggaacaagttcgatccctcactgacacagcgggatagctttcatctggatgagcagttcaccgttccagtcgagatgatgcaggcgcgcacataccctctgagatggttccttttggaacaacccgaaatccaagtggctcactttcccttcaagaataatatgagcttcgtggtgctcgtgccgacccacttcgaatggaacgtctcccaggtgcttgctaatctgagctgggacactttgcatcctcccctcgtgtgggaacgccccacgaaggttcgtctccctaagctgtatttaaagcaccaaatggaccttgtcgctactctgagccaattgggcctccaagaactgtttcaagccccggacttaagaggcatctcggaacagtccctcgtggtctcgggcgtccagcatcagtccactctggaattgtcagaggttggagtcgaagctgctgccgccacctcaatagcaatgtcgcgcatgtcattaagcagcttctcggtgaacagaccattccttttctttatattcgaagatacaacagggcttcctctgttcgtagggtctgtgcggaatccaaaccctagtgccccccgagagctgaaggagcagcaggactccccgggtaacaaggattttctgcagtccctgaaagggtttccgcgcggggacaaattgttcgggcccgacctgaaattagttccacccatggaggaggactatcctcagttcggcagccccaaa

SEQ ID NO: 18936 - DNA, 1473 bp, synthetic construct
  misc_feature 1..1473: note = source = /note="Description of Artificial Sequence: Synthetic coding sequence"
  source 1..1473: mol_type = other DNA
atggcactgctgtggggcctgctggtgctgtcatggtcatgtctgcagggaccttgctcagtgttctctccggtgagcgcgatggagccgctgggtcgccaactgactagcggccctaatcaagaacaggtgtcgcccctcaccctgctgaagctcggaaaccaggagccaggcggacaaacggctttgaaatcccctccaggcgtgtgctcgcgcgacccgactccagagcagactcatcggctggccagggcgatgatggcatttacggccgacctgttttcccttgtcgcccagacctcgacctgccctaatctgatcctctccccattgtccgttgctttggcgctctcccatctggctctcggggcgcagaaccataccctccagcgccttcagcaggtgctgcatgcaggatcgggaccgtgtttgccccacttgctgagccggctctgtcaggatctggggccaggagcctttagactggccgcccgcatgtatctgcaaaagggctttcccatcaaggaggatttcttggaacagtcggagcagctgttcggtgccaagccagtaagcctgaccggaaagcaagaggacgacctcgcaaatatcaatcagtgggtgaaagaggccaccgaaggcaaaattcaggagtttctgtccggtttgcctgaagatactgtgctgctgctcctgaatgccatccacttccagggattttggcggaacaaattcgatccttctctgacccagcgcgattcctttcacctggacgaacaattcaccgtgccagtggagatgatgcaggcccggacgtacccactgagatggttcctgctggaacagccggagatccaagtggcacatttcccgttcaaaaacaacatgtcctttgtggtcctcgtgccaactcatttcgagtggaacgtgtcgcaagtgcttgccaacctctcctgggacactctgcaccctccgctggtgtgggaaagaccgaccaaagtgcgccttccaaagctgtacctcaaacaccagatggacctcgtggccacgctgtcccaacttggcctccaggaactgttccaggccccggatttgagaggaatcagcgaacagagcctcgttgtgtcgggagtgcaacatcaatccactctggaactctccgaagtcggggtcgaagccgctgccgccacttcgatcgctatgtccagaatgagcctctcatccttctccgtgaatagacccttcctcttcttcatcttcgaggacactactggtctgcctctcttcgtcggatcggtccgaaacccaaacccgtcagcccctcgcgagctcaaggaacaacaagactcccctggaaataaggatttcctgcagtccttgaaggggttcccaaggggagacaagctgttcggacctgatctcaagctcgtgcccccgatggaggaggactatccgcaattcggatcccctaaa

SEQ ID NO: 18937 - DNA, 1473 bp, synthetic construct
  misc_feature 1..1473: note = source = /note="Description of Artificial Sequence: Synthetic coding sequence"
  source 1..1473: mol_type = other DNA
atggctttgctgtgggggctccttgtgctctcttggtcatgcttgcaaggaccgtgctccgtgttttccccagtgtcggccatggaaccgctgggtcggcaactgactagcggaccgaaccaggagcaggtgtctcctctgaccctcctcaagctcggaaatcaggagccaggaggccagactgccctgaagtcgcctccgggcgtttgctcaagggatcccactccggaacaaactcacaggctcgcccgggctatgatggcatttactgccgacctcttctcgttggttgcccagacttccacttgcccgaatctgatcctttcaccgctgtcggtggcgctggcgctgtctcatctggccctcggcgcacagaatcacaccctgcagcggcttcagcaggtgctgcatgctggatcaggaccgtgtctgccgcatctcttgtccaggctttgccaggatctggggccaggagcgtttcgcctcgctgcgcggatgtaccttcagaaaggattcccgatcaaggaagatttccttgagcaatccgaacaactcttcggagctaaaccggtcagcctgactggaaagcaggaggacgacctggcgaacatcaaccagtgggtcaaggaagcaaccgaaggaaagatccaagagtttctgagcggactccccgaggacaccgtgctgctgcttcttaacgccatccattttcaaggattctggcgcaacaaattcgatccttcgctgactcagagagactctttccacctggacgaacagtttaccgtgcctgtcgaaatgatgcaagcgcgcacctaccccttgcgctggttcctcctggagcagccggaaatccaggtcgcccacttcccgttcaagaataacatgagcttcgtggtgttggtcccgacccatttcgaatggaacgtgtcacaggtgctcgcaaatctgtcctgggacaccctccacccaccactggtctgggagcgcccgaccaaggtgagactgcctaaactgtacctgaagcatcagatggatctggtcgcaacgctctcgcaacttgggctccaagaattgttccaagccccggaccttagagggatctccgaacagtcgctcgtggtcagcggagtgcagcatcagagcacccttgagctgagtgaagtgggagtcgaggcggcggccgcaaccagcatcgccatgtcaagaatgagtctcagctcattctccgttaacaggccatttctgtttttcatcttcgaggatactactgggctcccactcttcgtcggaagtgtgcgcaatccgaatccgagcgctccgcgcgagctgaaggaacagcaggactcgccaggcaacaaggatttcctgcaatcgctcaagggtttccctcgcggagataagctcttcggaccggacctgaaattggtgccgccaatggaggaagattacccacaatttggcagcccgaag

SEQ ID NO: 18938 - DNA, 1473 bp, synthetic construct
  misc_feature 1..1473: note = source = /note="Description of Artificial Sequence: Synthetic coding sequence"
  source 1..1473: mol_type = other DNA
atggctttgctttggggcctgttggtgctcagctggtcttgcctgcagggtccttgttccgttttctctccagtaagcgctatggagccgctcggcagacaactgacctcaggacccaatcaggagcaggtatctccactcactctcctgaaattgggtaatcaggaacctggtggccagacagcgctcaagagccctccaggagtgtgctcaagggacccaaccccagagcagacgcaccgcctggcgagggccatgatggcatttacagctgacctgttcagcctcgttgcacaaaccagcacttgccccaatctgatactctcccccctgtccgtggctctggcactgtcacatctggcgctgggtgcgcagaatcatactctgcaaagactccagcaggttctgcacgcgggaagtggaccgtgtctgccacatctgctgagccgcctctgtcaagaccttggaccaggtgcttttagactggccgccagaatgtatctgcagaagggcttccctatcaaagaagacttcctggagcagagtgagcagctgttcggcgccaagcccgtcagcttgaccggaaaacaagaagacgatcttgcgaatataaaccagtgggtaaaggaggcaactgagggtaagatccaagagttcctgtctggactgcctgaggatacagtgctgctcctgttgaacgctattcactttcagggattttggagaaacaagttcgatcccagccttacgcagcgcgactccttccacttggacgaacagttcactgtcccggtggagatgatgcaagctcgcacctaccctctgcgctggttccttctggagcaaccggaaatacaagtggcccacttcccgttcaagaataatatgtccttcgtcgtgctcgtaccaacacacttcgaatggaacgtcagccaggtcctggccaacctctcttgggataccctgcaccctccactggtctgggaacgcccaaccaaggttaggctccccaagctttatttgaagcatcagatggacctcgtcgcgacgctttctcagcttggtctccaggaactgtttcaggcccctgatcttagaggtatctcagagcagtccctggttgtgtcaggcgtgcagcatcagtccaccctcgagctgtctgaggtgggtgtagaagcagctgccgccacctccatagcgatgtcaaggatgtccctctcctctttcagtgtcaacaggccctttctcttctttatattcgaagacacgaccggcctgccgctgttcgtgggcagtgtgaggaacccaaacccttcagcccccagggagctgaaggaacagcaggactctcctggcaacaaggatttcctccagtcactgaagggtttcccgaggggcgacaagcttttcggcccggacttgaagctcgtgccccccatggaagaagactacccacagtttggatcacccaag

SEQ ID NO: 18939 - DNA, 1473 bp, synthetic construct
  misc_feature 1..1473: note = source = /note="Description of Artificial Sequence: Synthetic coding sequence"
  source 1..1473: mol_type = other DNA
atggccctgctctggggactgctcgtgctctcctggtcatgcctgcaaggaccgtgctcggtcttttcgcccgtgtcggccatggagccactgggtcgacaactcacctcaggaccaaatcaggaacaagtgagcccgctcacgctgctcaaactcggaaatcaggaaccgggtggacaaaccgcgctcaagtcgccaccgggagtgtgtagcagagatccgacccctgaacagactcaccgcctggcgcgggcaatgatggccttcaccgccgacctcttctcccttgtggcccagacttctacctgtcccaacctgattctgagcccgctctccgtcgctcttgcgctttcccacctggctctgggcgcgcagaaccatactctgcaacgactgcagcaggtgctccatgcaggctcgggaccatgcctgccgcaccttctgtcccggctgtgccaagacctgggacccggagcatttcgcttggcggcacgcatgtacctgcaaaaaggcttcccgatcaaggaggattttcttgaacagtccgagcaactcttcggagcaaagccggtgtcgctgaccgggaagcaggaggacgacctggccaatatcaaccagtgggtgaaggaggccaccgaaggaaagatccaagagtttctcagcggcttgcccgaggacactgtgcttctcctgctgaacgctatccacttccagggattctggaggaataagttcgatccatccctcactcagcgggatagcttccaccttgacgagcagttcactgtgcctgtggaaatgatgcaggccagaacgtacccactgcgatggtttctgctcgaacagcccgaaattcaggtggctcatttcccgtttaagaacaacatgagcttcgtggtgcttgtgcctactcatttcgaatggaacgtgtcccaagtcctcgcgaacttgtcgtgggacaccttgcacccgccgctggtgtgggagcggccgactaaggtccggctcccgaagctctaccttaaacatcagatggatcttgtcgccaccctgtcgcaactgggattgcaggaactcttccaagcaccggatctgaggggcatctcagagcaatccctggtggtcagcggggtccaacaccaatccaccctggaactgtccgaagttggagtcgaagccgccgcggcaacttccatcgcaatgagccggatgtccctcagctcattttcggtgaatagacccttccttttcttcatcttcgaggacaccactggactgccgctgtttgtgggatcggtgcgcaacccaaatccatccgcgccacgggagctgaaggaacagcaggactcgccaggaaacaaggacttcctgcaatcacttaagggcttccctcgcggggataaactgtttggcccggatctcaagctggtccctccgatggaagaggattacccacagtttggtagccccaag

SEQ ID NO: 18940 - DNA, 1473 bp, synthetic construct
  misc_feature 1..1473: note = source = /note="Description of Artificial Sequence: Synthetic coding sequence"
  source 1..1473: mol_type = other DNA
atggcacttctttggggactgctcgtacttagctggtcgtgccttcagggcccgtgtagcgtcttttcgcccgtgtcggcaatggagccacttggtagacagctgaccagcggaccaaaccaggagcaagtgtccccccttaccctccttaaacttggaaaccaagagcctggcgggcagaccgctctcaagtctcctccaggggtgtgttcccgtgaccctacccctgaacagactcatcgcttggcaagggcgatgatggcattcaccgcagacttgttttccctggtcgcacagacgtccacgtgtcccaaccttattctttcgcctctgtcagtggcactggcactgtcgcaccttgccttgggtgcccaaaatcatacccttcagagacttcaacaggtccttcacgcaggctccggtccttgtctgccacaccttctttcacggttgtgccaggatcttggcccaggcgcctttcgcctggccgcacgaatgtacctgcaaaagggattcccaataaaggaagattttctggagcagtcggagcagctttttggagcgaaacctgtgtcattgactggcaaacaagaggatgatctcgccaacatcaaccaatgggtgaaagaggcaactgaaggcaaaatacaagaatttctctctgggcttcctgaggacaccgtgctgctgcttctcaatgcaatacatttccagggattttggcggaataagtttgaccccagcctgacccaacgagatagctttcacctggatgaacagttcaccgtccctgtcgaaatgatgcaagcccgcacctacccacttcggtggtttctcctggaacagccagaaatccaggtcgcacactttcctttcaagaacaatatgtccttcgttgtcctggtgccaacccattttgaatggaacgtctcccaagttctcgcaaacctgtcgtgggacactctgcatccgcctctggtctgggaaaggcctaccaaggtgaggttgcccaaactgtacctgaaacatcaaatggaccttgtggccaccctgtcacaacttggccttcaggagctgtttcaggcaccagatttgagagggatttcggaacaaagccttgtggtgtccggggtgcagcatcagagcaccctggaattgtcagaggtgggcgtcgaagcagcggcagcaactagcattgcaatgtcacgcatgagcctgtcgagcttttcagtcaaccgcccttttctgttctttatctttgaagatactactggactgccgctgttcgtgggatccgtccgtaatccaaacccatctgcaccgagggagctgaaggaacagcaagatagccctgggaataaggattttctgcagtctctcaagggtttcccaagaggagataagctctttgggccagatctgaaactggtgcctcctatggaagaggattaccctcaattcggtagccctaag

SEQ ID NO: 18941 - DNA, 1473 bp, synthetic construct
  misc_feature 1..1473: note = source = /note="Description of Artificial Sequence: Synthetic coding sequence"
  source 1..1473: mol_type = other DNA
atggcgcttctttggggcttgcttgtgctgagctggagttgcttacaaggtccgtgttcagtattttcgcctgttagcgcaatggaacctctggggcgacaactcacatcaggaccaaatcaggaacaggtttcgccactgacccttctgaagttaggcaaccaagaaccgggagggcagacggctctgaaatctcctccgggcgtgtgcagccgcgaccctacgccggaacagactcacaggttagctagagctatgatggcatttacggccgatctgtttagcttggtagcgcaaaccagcacgtgccctaatcttattctttctccgctatctgttgcactagcactgtcccatcttgcgcttggagctcagaaccatacgctgcaacgtcttcagcaagttttgcatgcaggctctggaccctgcctcccacatttattaagccggctgtgccaagatcttgggcctggagcatttagacttgctgctcgaatgtacctccagaagggctttccaattaaagaagatttcttagagcagagcgaacagttgtttggagcaaaaccggtcagcctgactggtaagcaagaagatgacttggcaaatattaaccaatgggtgaaagaggcgactgaaggcaaaattcaggaattcctgtcaggattacctgaagatacagtactgttgcttctcaacgcaatacactttcaaggcttttggcgtaacaaatttgacccttcactgacacaacgtgatagtttccacttagatgaacagtttaccgttccggttgaaatgatgcaagcgcgtacatatcctttgcgatggtttctgctggaacaacctgaaattcaagttgcacacttcccgttcaaaaacaacatgagtttcgtggttcttgtaccgacacatttcgaatggaatgtttctcaggtcctggcaaacctttcctgggatacgcttcatcctccgttagtttgggaacgtccaacaaaagtgcgcctccctaaattgtatttgaaacatcagatggacctagtggcgacgctcagccaactggggttgcaagagctattccaggccccggacctgcgtgggatttcagagcagtccttagtagtgtcaggagtacaacatcaatctacactggagctgtctgaagtgggcgtggaagcagccgcggccacttcaatagctatgtcgcgaatgtccctttcttctttctcggttaatcgtccatttctgtttttcatttttgaggacaccacaggccttccgctctttgttggctcagtccggaatcctaatccatctgcgccgagagaactgaaagaacaacaggattctcctgggaacaaggattttctgcaatctcttaaaggatttccgagaggcgataagctttttggcccggatctgaaacttgtgcctccaatggaagaagattatcctcagtttggaagtccaaaa

SEQ ID NO: 18942 - DNA, 1473 bp, synthetic construct
  misc_feature 1..1473: note = source = /note="Description of Artificial Sequence: Synthetic coding sequence"
  source 1..1473: mol_type = other DNA
atggccctgctctggggactcctggtcctgtcatggagctgccttcaggggccatgttccgtctttagcccagtgtccgcaatggaacccctcgggagacagctgaccagcgggcctaaccaggaacaggtgagccctctgactttgttgaaacttggcaaccaagaacccggcggacagaccgcactgaagtccccgccaggggtgtgttcccgcgatcccactcccgaacaaacccaccgtctggcacgtgcaatgatggccttcaccgcggatttgttttcgctggtggcacagacgtcaacctgtcctaatttgatcctctcccccctttccgtcgcccttgcgctcagccacttggcactcggagcacagaaccatactctgcaacggctccagcaggtgctccacgcaggatcgggtccctgtctcccccatctgctttcgcgcctgtgtcaggacctgggaccaggagcattcagacttgcagcaagaatgtaccttcagaaaggctttcctattaaggaagattttctcgaacaatccgaacaactgtttggcgctaagccagtgtcactgactggtaaacaggaggacgatctggcaaacatcaaccaatgggtgaaggaagcgactgaaggaaagatacaggagtttctctcggggcttcctgaggacactgtgcttctgctgctgaatgcaatacattttcagggattctggaggaacaagtttgatccttcgcttacgcaaagagacagctttcatctggatgaacaatttacggtccctgtcgaaatgatgcaagcacggacctatcctctccgctggttcctcctcgaacaacctgaaatccaagtggcacattttccatttaagaacaatatgtccttcgtggtccttgtgccaacccactttgaatggaacgtgagccaagtgctggcgaacctgtcatgggatactctgcatccacctctcgtgtgggaaaggcctactaaggtgcgactgcccaagctgtacctgaagcaccaaatggacctcgtggctaccctctcacagcttggattgcaggagttgtttcaagcacctgatcttcggggaattagcgaacaatcgctggtcgtcagcggagtccaacatcagagcactcttgaactctcggaagtgggcgtcgaggcagctgcagccacctccatcgccatgagcagaatgtcactgtcctcattctccgtgaatcgacctttccttttcttcattttcgaagataccactggactccctctgtttgtgggctcggtgcgaaacccaaacccttcggcacccagagaacttaaggagcagcaagattcccccggaaacaaggacttcctgcagtccctcaagggctttccgcgcggtgataagctgttcggacccgacctgaaactggtgccacctatggaagaggactacccgcaattcggttctcctaag

SEQ ID NO: 18943 - DNA, 1473 bp, synthetic construct
  misc_feature 1..1473: note = source = /note="Description of Artificial Sequence: Synthetic coding sequence"
  source 1..1473: mol_type = other DNA
atggctctgctgtggggacttctggtcctgagctggagctgcttgcagggaccctgcagtgtgttctcgccggtcagcgctatggagcccttgggacggcaactgacttcagggccaaatcaggaacaagtgtcaccattgaccctgttgaagctgggcaaccaagaacccggcggccaaaccgccctaaagagccccccaggagtttgcagtagagatcctacccccgaacagacccaccgcctggctcgcgccatgatggcttttaccgccgacctgttctctttggtggcccagacgagtacgtgccccaacctcatcctgtccccactgtctgtggcactcgctttatcccatctagccctcggcgcacagaaccacacgctgcagagattgcaacaggtgcttcacgcaggttctgggccgtgcctacctcatctccttagcaggctgtgccaagacttggggcccggagctttccgtctggccgcaaggatgtacctgcagaagggctttccaatcaaggaggattttctggagcaatcagaacaactgtttggcgctaaacctgtgtccctgaccggcaagcaggaagatgatctcgccaacataaaccaatgggtgaaggaagccacagaaggaaagatccaggagttcctatccggactaccagaggataccgtgctactcctcctgaatgcaattcacttccagggcttttggagaaataaatttgatcccagtttgacgcagcgcgatagtttccatctagatgagcagttcacagttcctgttgagatgatgcaggcgcggacttatccattaagatggtttctgctggagcagcctgagatccaggtagcacatttcccatttaaaaataatatgagttttgtggtcctggtgcccactcatttcgaatggaacgttagtcaggtgctggcaaatttgtcctgggatactctacacccacctctagtgtgggaaaggcccaccaaagtgaggctacccaaactctatttgaaacaccagatggatcttgtggccactttaagccagctgggtttgcaggagttgttccaggcccccgatctacggggcatatctgaacaaagtctcgtagtatccggagtgcaacaccagtcaacactggaactaagcgaggttggagtggaagccgctgcagccacgtcaatcgcgatgagccgaatgagcctgtcatcctttagcgtgaatagaccctttctattttttatattcgaggacacaacaggcttgcccttgttcgtgggaagtgtgcgtaatccaaacccgagcgcccctcgcgaacttaaagagcagcaggattctcccggcaataaggattttctgcaaagtctcaaggggtttcccaggggcgataagctgttcggtcctgacctaaaactggtgcctccaatggaagaagactatccgcaattcggctcccccaaa

SEQ ID NO: 18944 - DNA, 1473 bp, synthetic construct
  misc_feature 1..1473: note = source = /note="Description of Artificial Sequence: Synthetic coding sequence"
  source 1..1473: mol_type = other DNA
atggcacttctgtggggactgcttgtgctcagctggtcctgcctgcaaggtccatgttcggtcttttcaccagtgtcggcaatggaacctcttggacgacaacttactagcggacctaatcaagaacaggtgtcccctcttactcttctgaaacttggaaaccaagagcccggcggacagactgccctgaaaagtcccccaggtgtctgctcgcgcgatcctactccagaacaaactcatcggcttgcccgtgccatgatggcattcactgcagatcttttttcgctggtcgcccaaacttcaacttgtcctaatctcattctgtcgcctctgtccgtggcactggcactgtcccatcttgcattgggagcccagaaccacactcttcagcgcctgcagcaggtgctgcatgcaggatcaggaccttgccttccgcatttgctttccaggctttgtcaggatctgggtcctggtgcctttcgtcttgcagcaaggatgtacctgcagaaggggttcccgattaaagaggactttctcgagcaatccgaacagcttttcggggctaagccagttagcctgacggggaagcaggaggacgatctcgcaaacattaaccagtgggtgaaagaggcaacggaaggcaaaattcaagaattcctgtcgggtctgccagaggacactgtcctgctcctgctcaacgcaattcattttcagggtttttggcggaacaaatttgaccccagccttacccagagggactccttccatcttgatgaacaatttacggtgcccgtggaaatgatgcaagcgcgaacttaccctctgcgatggtttctgctggagcaacccgaaattcaggtggcacactttccgtttaagaacaacatgagctttgtcgtgctggtccccacccatttcgagtggaacgtgtcacaagtgctggctaatctgtcatgggatactttgcacccgccactcgtttgggaacgaccaactaaggtgcggctccctaaactctacctgaagcatcagatggacctggtcgccactttgtcacagcttgggcttcaggagctgtttcaagcaccggacttgcgtggaatatcggaacaatccctggtggtttcgggtgtccaacaccagagcaccctggaactgtcggaagtgggagtggaagcggctgccgccacttccattgcaatgtcccgcatgtctcttagctctttctcggtcaaccgcccgttcctgttcttcatatttgaagatacgaccgggttgcctctgtttgtgggttccgtgagaaatcccaatccctcagcaccaagagaactgaaggaacaacaagattcgcctggcaataaagatttcctccaatccctgaagggttttcccaggggggataaacttttcgggcctgatcttaagctcgtgccaccaatggaagaagattacccacagtttggatcaccaaaa

SEQ ID NO: 18945 - DNA, 1473 bp, synthetic construct
  misc_feature 1..1473: note = source = /note="Description of Artificial Sequence: Synthetic coding sequence"
  source 1..1473: mol_type = other DNA
atggcgcttctgtggggattgctggtgctgtcctggtcctgtctgcagggcccgtgttccgtgttttcacctgtgtccgcaatggagcctctcggtcggcagctgacttcgggtcccaatcaggaacaggtgtcgccgcttactctgctgaaactgggaaaccaggagcccggaggacagactgctctgaagtccccgccaggcgtttgctcaagagatcctaccccggagcaaacgcatcgcctggcccgcgcgatgatggcgttcaccgccgacctcttcagcctggtcgcacagaccagcacctgcccgaacctgatcctgtcaccgttgagcgtagcactcgcactgagccacttggccctcggagctcaaaaccataccctgcagagattgcagcaggtgcttcatgctggttcgggaccatgcctcccgcacctgctcagccgcctgtgccaggacctcggaccgggggctttcagactggcagctaggatgtacctgcaaaaagggttcccaatcaaggaggacttcttggaacagtcggaacaactgtttggtgccaagcctgtctcccttacgggcaaacaggaagatgacctggcgaacatcaatcaatgggtgaaggaggccactgaaggaaagattcaggagtttctttctggactcccggaggataccgttctcttgctgctcaacgcaatccacttccaaggattctggagaaacaagttcgacccatcactcactcagcgggactcattccacctcgatgaacagttcactgtgccggtcgagatgatgcaggcacggacttaccccttgcggtggttcctccttgaacagcccgaaatccaggttgcgcattttccatttaagaataacatgtcgttcgtggtcctcgtacccacccactttgaatggaatgtgtcccaagtcctggccaacctgtcgtgggacaccctgcacccgccgcttgtttgggaacgccctacgaaggtccggctgcctaaattgtatcttaaacaccagatggatctcgtggccacgcttagtcagctggggctgcaagaactcttccaagcgccggatttgcgtggcatctccgaacaatcattggtcgtgagcggcgtgcaacatcaatcgactctggagctctccgaggtcggggtggaagccgccgcggccacttcgattgccatgagcaggatgagcctgtcctccttctctgtgaatcgaccgtttctcttcttcatattcgaagataccactggactgcctctcttcgtggggtcagtgcggaacccaaacccatctgcacctcgcgaactcaaggaacagcaggactcgcccggaaataaggactttctccagtctctcaagggattccctcgcggcgacaagctcttcggtccagacctgaagctggtgcctcctatggaggaggattaccctcaattcggctctcccaaa

SEQ ID NO: 18946 - DNA, 1473 bp, synthetic construct
  misc_feature 1..1473: note = source = /note="Description of Artificial Sequence: Synthetic coding sequence"
  source 1..1473: mol_type = other DNA
atggccctgttgtgggggctgctggtcctgagttggtcttgcctgcagggcccgtgttctgtgttttccccggtgagcgccatggagccactgggaaggcagctgacaagcggccccaaccaggagcaggtgtcaccacttaccctgctgaaactgggcaaccaagagcctggaggccagaccgccctcaagagccctcccggtgtgtgtagtcgcgatcccacccccgagcagacacacagattggcaagagctatgatggccttcacggcagacttgtttagcctggtcgcgcagactagcacatgtcctaatctcatcctgagtcctctgagcgtcgcccttgccctgtcacacctggccctgggtgctcagaatcacacacttcagcgcctgcaacaggtcctgcacgctggttctggcccatgcctgccccatttgctgagcagactctgccaagacctcggtcccggggccttcagactcgctgcacgcatgtacctgcaaaaaggatttccgatcaaagaagacttcctcgaacagagtgagcagctgttcggcgctaaacccgtgtccctgacagggaagcaggaggacgaccttgcgaacatcaatcagtgggtcaaggaagctaccgaaggaaagattcaggaatttctgagtggcttgccagaagatactgtcctgctcctgttgaatgccatccacttccagggattctggcggaataaattcgatccgagcctgactcagagagactcttttcaccttgacgagcaattcaccgtccccgtagagatgatgcaagccagaacgtatcccctcagatggttccttctggaacaacccgagatccaggtggctcatttcccttttaaaaacaacatgtcattcgttgtcctggtgcccacccatttcgaatggaatgtctcccaggtgctggccaatttgtcctgggacactctgcacccaccactcgtttgggagcgccctactaaggtgagactgccgaagttgtatcttaagcaccagatggatcttgtcgcgacattgtcacagctgggcctgcaggagctttttcaggctccggacttgagaggcatctctgaacagagcctggtggtgtcaggcgtccagcaccagagcacactcgagctgagcgaggtgggggtcgaagctgccgcagccacatctattgcaatgtctcggatgtccctgagttctttctctgtaaacagaccatttctctttttcatttttgaagatactacgggattgcctctgttcgtgggctctgtccgaaaccctaacccgtctgcccccagggagctcaaggagcagcaagactcaccggggaacaaggacttcctgcagagcctcaagggctttccgcgcggggacaagttgtttggccccgacctgaaactggtgccccccatggaggaggattacccccagtttggctcccccaag

SEQ ID NO: 18947 - DNA, 1473 bp, synthetic construct
  misc_feature 1..1473: note = source = /note="Description of Artificial Sequence: Synthetic coding sequence"
  source 1..1473: mol_type = other DNA
atggccctgttgtggggtctcctcgtgttaagctggagctgtctccagggcccttgctcggtattttcccccgtttccgcaatggaacctttgggcagacagctcacgtccggtccgaatcaagaacaagtttcccctctgacattgttaaagctcggcaaccaggaaccaggcggccagacggccttgaaatcgccaccaggcgtctgcagccgggacccgactcctgagcagacacaccgtctggcccgggccatgatggcttttacagccgacttgttttctctggtggcccagacctccacttgtcccaacctcattctttcccccctgtccgttgcgcttgcgctatcccatctggcattgggggcgcagaatcacacgctacagaggctccagcaggtgctgcatgcaggctctggcccatgcctgccccacctactcagccgcctgtgccaggatctcggtccgggagcattccggctcgccgctcgaatgtatctccagaagggcttccccataaaagaggactttctggaacagtcggagcagctgtttggggccaaacctgtttcgctcactggcaaacaagaggatgacctggctaacatcaatcaatgggtcaaggaggcaaccgagggcaagatacaggagtttctgtcggggcttcccgaggacacggtgctgttgcttctgaatgcaattcacttccaagggttttggagaaacaagttcgatccttcactgacacaacgagacagctttcacttagatgaacagtttaccgttcccgtggaaatgatgcaggcccgcacttaccccctgcggtggttcctcctggaacagccggaaattcaagttgctcacttcccctttaaaaataacatgtctttcgtcgttctggttcctacccactttgagtggaacgttagccaggttttagccaacctgtcttgggataccctgcaccctcccctcgtgtgggaacgtcctacaaaagtccggttacccaagttatacctgaagcatcagatggaccttgtagctacgctttcgcagttgggccttcaggagctcttccaggctccggatctgaggggcatctccgaacagtccttagtggtcagtggtgtccagcaccagagcaccctggaactgtctgaagttggcgtggaggcggctgcagccacgtctatcgcaatgagcagaatgtccctctcaagttttagcgttaaccgcccctttctgttcttcattttcgaggacacgactggtcttcccctgttcgtgggcagtgtacggaatccgaatcctagtgccccaagagagctgaaggaacagcaagattctccagggaacaaggatttcctgcaaagcctgaaaggattcccaagaggagacaagttatttggccccgatctcaaattggttcctcccatggaggaggactaccctcagtttggctcccccaag

SEQ ID NO: 18948 - DNA, 1473 bp, synthetic construct
  misc_feature 1..1473: note = source = /note="Description of Artificial Sequence: Synthetic coding sequence"
  source 1..1473: mol_type = other DNA
atggccctgttgtgggggctcctggttctgagctggagttgcctgcaaggcccgtgcagcgtgtttagtcctgtcagcgcaatggaaccgctgggtcgccagctgacgagcggtccgaatcaggagcaagtctcacccctgacgctgctgaaattgggtaaccaggagccagggggtcaaaccgctctgaagtctccacctggggtctgtagtcgcgatccaacacctgagcagactcacaggctggcgcgcgcgatgatggccttcacggcagacctgttctcactggtagctcagacgagcacttgtcctaatctgatcttgagcccactatctgttgctctggccctgagccacctggcactaggcgcacaaaaccacacgctgcagcgactgcagcaggtgttgcatgccggcagcggtccgtgcctaccacacctgttgtcacgcctttgtcaggacctcggtccaggtgctttccgtttggcagcccgaatgtacctccagaaaggctttcctattaaagaggattttctggagcaatccgaacagctgtttggggccaaaccggtgtctctgacggggaaacaggaggacgacctggccaacatcaaccagtgggtgaaggaggcaacggagggtaagattcaggagtttctgtctggccttcctgaggacactgtcctcctgttgttgaatgccatccatttccagggtttttggcgcaataagtttgacccgtccctgactcaacgcgacagcttccatctggacgagcaatttactgtgccagtcgagatgatgcaagcccgcacgtatcctctgcgttggttcttgttggagcaacctgagattcaggtggctcatttcccctttaaaaacaatatgagtttcgttgtgttggtgcctacccactttgagtggaatgtaagccaagttctggctaatctgtcttgggacacactgcatcctccgctcgtttgggagaggccgactaaagttagactgcccaaactatatctgaaacatcaaatggatctggttgctacactgagccagctgggtctgcaggaactgttccaagcgccagacctacgcggcataagcgaacagtctctggtcgtttccggggttcaacaccagtcgacgctggagctgagcgaagtgggagtggaagcagctgccgccaccagcatcgcgatgtctcgcatgtccttgagctcctttagcgttaatcgtccttttctgtttttcattttcgaggacaccacgggtctgccgctgtttgtgggttctgtgcgcaatcctaacccgtcagcccccagagaattaaaggaacagcaagattccccgggaaataaggactttctccagtcattgaaaggctttccacgcggcgacaaactcttcggtcctgatttaaaactggtccctccgatggaggaggactacccgcagtttggttctccgaag

SEQ ID NO: 18949 - DNA, 1473 bp, synthetic construct
  misc_feature 1..1473: note = source = /note="Description of Artificial Sequence: Synthetic coding sequence"
  source 1..1473: mol_type = other DNA
atggcgctgctgtgggggctcttggtactgtcctggtcttgtctccagggcccctgtagcgttttcagccccgtgtcagctatggagcccctgggccgccagctcacatccgggcctaaccaggaacaggtaagtccgttgacccttctgaaactgggcaaccaggagccaggcggccagactgctttgaaatctccgcctggtgtgtgtagtcgggatcccacgcctgagcagactcacagactcgctagggccatgatggcctttacggccgatctcttctctctcgtggcccagaccagcacatgtcccaacctgattttgtcaccgctttccgtggctctggctctttcccacctggcacttggggcacagaaccataccctccagcgccttcagcaggtattgcacgccgggagcggcccatgcctgccccatctgctgtctaggctctgccaggacctgggacccggggcattccggctcgccgcaaggatgtacctgcagaagggcttccccatcaaagaggactttctggaacaatctgaacagctgtttggcgcgaaaccagttagcctcacaggtaagcaggaggatgatctcgctaacataaaccaatgggttaaggaagccaccgagggaaagatccaagaattcctctccgggctgcctgaggatacagtccttctgttgctgaacgctattcatttccaggggttttggaggaacaagttcgatccctctctgactcagcgggactcctttcatctcgacgaacagtttactgtgcccgtggagatgatgcaggccagaacctaccctttgcggtggtttctcctcgagcagccggaaatccaggtagcgcactttccattcaagaacaacatgtcctttgtggtcctggtacctacccattttgagtggaatgtcagccaggtgcttgctaacctttcttgggataccctccatccaccgctggtgtgggaaaggcccacgaaggtccgcctgcctaaactgtatctgaagcaccaaatggacctggtcgctactctttcccagctgggcctccaggagctttttcaggctcctgacctgcgaggtattagtgagcaaagtctcgtggtgagtggcgtgcagcaccagagtacactggagctgagcgaggtgggtgttgaggcagccgctgcgacatccattgccatgtccaggatgtcccttagcagcttctcagtgaatcggccattcctttttttcatttttgaggatacaacaggactccctttgtttgttgggagtgtccgaaaccccaatccgtccgcacctagggagctcaaagagcagcaggactcccctggaaataaggatttccttcagagcctgaaaggcttccctcgaggagacaagctctttggccccgacttgaagctcgtcccgcctatggaggaagattatcctcagttcggctcacccaaa

SEQ ID NO: 18950 - DNA, 1473 bp, synthetic construct
  misc_feature 1..1473: note = source = /note="Description of Artificial Sequence: Synthetic coding sequence"
  source 1..1473: mol_type = other DNA
atggcactcttgtggggtctgttggtactgtcatggtcctgcttgcaggggccttgcagtgtgtttagccccgtgtccgcaatggagcctctgggacggcagctaacttccggcccgaaccaagaacaggtctcgcccctgacactgctgaaactgggcaatcaggaacctggcggtcagaccgctttgaagtcgccccctggagtctgttcaagagaccccacccccgagcagacccaccggctggcgagagccatgatggcctttacagctgatctgttttctttggtcgcccaaacaagcacttgccccaacctcattttatccccactaagcgtggcactggctctgtctcatctggctttgggtgcacagaaccacacactgcaacgtctacaacaggtcttgcacgcaggcagcggcccttgcctgcctcacctgctctcaaggctctgccaggatctgggacccggcgcatttagactagctgctcgaatgtatctgcagaagggcttcccgattaaggaagattttctggagcaatcagagcaactttttggcgcaaagccagttagtctgactgggaagcaggaggatgacttggcaaatatcaatcaatgggtcaaagaggccactgaaggcaaaattcaggagttcctcagcgggctgccggaggatactgttttattgctcctcaacgcaatccatttccagggattctggcgtaacaagtttgaccctagccttacccagcgcgattcgtttcacctggacgagcagtttacggtgccggttgaaatgatgcaggccagaacctatcctttgcgatggttcctcctggaacaaccagagatccaggtagcacatttcccatttaagaacaatatgtccttcgtggttctcgtgcccacccacttcgagtggaacgttagccaggtacttgccaacctgtcctgggataccttgcacccacccctcgtctgggaaaggccaactaaggtgcgtctaccgaaactgtatcttaagcatcagatggatctcgtggcgacattgagccagttgggactacaagagctttttcaggccccagatcttcgcggtatttctgagcagtccctcgttgtaagcggggtgcagcaccagtccacgctggaactaagcgaggttggggttgaggccgcagccgctacatcgattgctatgtctagaatgagtctctcaagcttctcagttaacagacctttcctgttttttatcttcgaggacaccactgggctgccactgttcgtgggttcggttcggaaccctaatccctctgcccccagagaactgaaggagcagcaggatagccctggtaacaaagacttcttgcagtcactcaaaggctttcccaggggagacaagctctttggacccgatttgaagctggtcccaccaatggaggaggattacccacagttcggcagcccaaaa

SEQ ID NO: 18951 - DNA, 1473 bp, synthetic construct
  misc_feature 1..1473: note = source = /note="Description of Artificial Sequence: Synthetic coding sequence"
  source 1..1473: mol_type = other DNA
atggccctcctctggggactgctggtcctttcatggtcgtgtctccagggaccttgctcagtgttctcaccagtttcagctatggagccgctgggcagacagctgacctccggcccaaatcaggagcaggtgtcacctttgacgctgctgaagctggggaaccaggaaccaggaggccaaacggccctcaagagcccgccgggtgtgtgctccagagatccaacgcccgagcagacgcaccggctcgcacgcgccatgatggcctttaccgcggatctgttttcgctggtcgcacagacttccacgtgtccgaacctgatcctgtcgcccctgtccgtggcgctggccctcagccatctggcgctcggcgcccaaaatcacactctccaacggctgcagcaagtgctccatgccggaagcggcccatgcctgccacacctcctctcgcgcttgtgccaagatctgggtccgggtgctttccgcctggcggcgcgcatgtacctgcagaaaggcttcccgattaaggaggatttcctggaacagtccgagcagctgtttggcgccaagcctgtgtccctgactggaaagcaagaagatgaccttgccaacatcaaccagtgggtgaaggaggcaaccgagggtaagatccaagagtttttgtccggcctccccgaggacaccgtgctgctcctgttgaacgctatacacttccaagggttctggcgaaacaagtttgatccgtccctgacccaaagggacagctttcatttggacgaacagttcaccgtccctgtcgagatgatgcaagcccggacctacccgctgcgctggttcctgctggaacagccagagatccaggtggctcatttccccttcaaaaacaacatgtctttcgtggtgctggtccccacgcactttgaatggaatgttagccaagtcctggcgaatctctcctgggacaccctgcacccacccctggtgtgggaacgccctacgaaagtcaggcttccgaagttgtacctgaagcaccagatggatctcgtggcaactctgagccagctcggcctccaggagcttttccaggcacccgatttgcggggcatttcagaacagagcctcgtcgtgagcggagttcaacaccaaagcaccctggaattgagcgaagtgggggtggaggccgctgctgcaacttctatcgcaatgagcagaatgagcctcagctcgttctcagtgaatagaccgtttcttttctttatctttgaggatactaccggactgcccctctttgtcggatccgtgcggaatccaaatccatccgcgccgcgggaactcaaagagcaacaggactcaccaggcaacaaggacttcttgcaatccctcaagggcttcccccggggtgataaacttttcggaccggatcttaaactggtgccgccaatggaagaggactacccgcagttcggatcgcctaaa

SEQ ID NO: 18952 - DNA, 1473 bp, synthetic construct
  misc_feature 1..1473: note = source = /note="Description of Artificial Sequence: Synthetic coding sequence"
  source 1..1473: mol_type = other DNA
atggcacttttgtgggggctattggtgctctcatggagttgtctccagggaccctgctctgtattcagccctgtctcagccatggagcctctgggtagacagttaacgtccggccctaaccaggagcaggtatccccattaacgctactaaagctggggaatcaagaaccgggaggccaaacagccttgaaatcccccccaggggtgtgttcccgcgaccccacccccgagcaaacccaccgcttagctagagctatgatggccttcaccgcagacctgtttagtctggtggcgcaaacctccacttgtccaaacctcatactgagtcctctgagtgtcgcactggctcttagtcatttggcactgggagcccaaaatcataccttgcagaggttacagcaggtgctgcacgccggatctggaccgtgcctcccccatttgttatcccggttatgccaagacctggggcccggtgccttccgcctggctgcccggatgtaccttcagaagggattcccaattaaggaagacttcctcgagcagtccgagcagttattcggggccaagccagtatccctcaccgggaagcaggaggatgatctcgctaatataaaccagtgggtgaaggaagcaactgagggtaagatccaagagtttttgtctggcctgcccgaggacaccgtcctgctgctgctgaatgcgatccattttcagggcttttggaggaataaattcgatccaagtttaactcagcgtgacagcttccacctagacgagcagttcacagtgccagttgaaatgatgcaggctagaacatatccactccggtggttcctgctagaacagcccgaaattcaggtcgcgcatttcccgtttaagaacaacatgtctttcgtggtattagtccctacccactttgagtggaatgtcagccaggtgctcgcgaacctctcctgggatacgctgcatcctcccctggtctgggaacgacctaccaaggtacgtctgccaaaactgtacttgaagcaccagatggatctggtggcaaccctctctcaactgggactgcaggagctgtttcaggcaccagatcttcgaggaatatccgagcaatctctcgtggtgagtggagtacagcatcagtccacactggagttgtctgaggtgggtgttgaagctgccgccgcaacctccattgctatgagtcgtatgtcactctcgtcctttagcgtcaaccgtccctttctgttcttcattttcgaggacacaaccgggctccccttattcgtgggatccgtgaggaacccaaacccatccgccccccgggaattgaaggagcaacaagattcccccggcaacaaagattttctccagtcgctgaagggcttccctaggggcgataaactgtttggaccagatttgaaactggttccgccaatggaggaggattatccccaattcggatcacccaag

SEQ ID NO: 18953 - DNA, 1473 bp, synthetic construct
  misc_feature 1..1473: note = source = /note="Description of Artificial Sequence: Synthetic coding sequence"
  source 1..1473: mol_type = other DNA
atggcgcttctatgggggctgttggtcttatcttggtcttgtctgcagggaccatgttctgtcttttcaccggttagcgcaatggagccgcttggccgtcaactgacttccgggcccaatcaggaacaagtgtcccccctcacattgctgaagctgggtaaccaagaaccaggcggtcaaactgcgctgaaaagcccccctggcgtgtgctcaagagacccgacacctgagcaaacccacagactcgcacgtgccatgatggcatttaccgcagatttgttttccctggtcgcgcagactagtacctgccctaatcttatcctgagccccctctcagtggcgctggccttgtcacacctggccttgggcgcacagaaccacacactacaaagactgcagcaggtgctccacgctggaagtggaccttgtcttccccacctcttaagtcggctctgccaggacctgggacccggtgccttccgattggccgccaggatgtatctccagaagggatttcccatcaaggaggatttcctcgagcagtcggagcagttatttggggccaagcctgtttctctcaccggtaaacaggaagacgatctggccaacattaatcagtgggtaaaagaagccaccgagggtaagatccaggagttcttgtccggtctccccgaggatacagtgctcttgcttttgaacgcaatacatttccaggggttttggcggaacaagttcgacccaagtttgacccagcgcgactcgtttcacctcgatgaacagttcacagtgccagttgagatgatgcaggctagaacctacccactgcgatggtttctcctcgagcaacccgagatccaagtggcacactttcccttcaagaacaatatgagctttgtagtcctcgtacctacccacttcgaatggaacgttagccaggtcttggccaacttgtcttgggacaccctgcatccccccctggtctgggagaggcctactaaggttcgtctgcccaagctctacctgaaacaccagatggatctcgtggctacactgagccagctgggtctacaggagctgtttcaggctcctgaccttagaggcatttccgagcagtctctggtggtatctggtgttcaacaccaatctacattggagctatccgaggtgggagtcgaagccgctgctgcaacaagtatagcgatgtcacgcatgtctcttagtagttttagcgtgaaccgcccattcctttttttcattttcgaagataccaccgggttgccactctttgtcgggagtgtgaggaacccaaatcctagcgccccacgcgaacttaaggagcaacaggattcccccggtaacaaggatttcttgcagagtctgaagggattccctaggggtgacaaactgttcggacctgatcttaaactggtgcccccaatggaagaggattatccgcagtttggcagccccaaa

SEQ ID NO: 18954 - DNA, 1473 bp, synthetic construct
  misc_feature 1..1473: note = source = /note="Description of Artificial Sequence: Synthetic coding sequence"
  source 1..1473: mol_type = other DNA
atggcgctgctgtggggcctgctggttttgagctggagctgcctccagggcccttgcagcgtgttcagccccgtcagcgcaatggaacccttgggtagacagcttacaagtggtcccaaccaggaacaggtatcccctttgacacttctgaagctcgggaaccaggagccaggaggccaaaccgctttgaaatcaccaccaggtgtgtgttctcgggaccccacgcccgaacagacccatcgattggccagagcaatgatggctttcacagcagacctattttccctggtggcccaaaccagtacttgccctaacctgattctgtccccgcttagcgtggccttggcactgtcccatctggcattaggtgcacagaaccacactctccagcgtctacaacaggtgctacatgctggaagcggtccatgtctaccccacctgctctccagactctgtcaggacttgggcccgggcgcttttcgtcttgcagcacggatgtatctgcagaagggttttcctataaaggaggacttccttgaacagtctgagcagctgttcggcgcaaagcctgtgtccctgactgggaagcaggaggacgatctcgccaatattaaccagtgggtgaaggaagcaacagaaggcaagattcaggagtttctgtcgggtttgcccgaggataccgttctgttgctgctaaacgccattcatttccagggattttggcgcaataaattcgacccctcactaactcagagagatagctttcatctggacgagcagttcacggtgcccgttgaaatgatgcaagcccgcacctatcctctgaggtggttcttgctggaacagcctgaaatccaggtcgctcatttcccatttaagaacaatatgtcatttgtagtcctggtgccaacacatttcgagtggaacgtcagccaggtccttgctaatctctcgtgggataccctccaccctcctctggtgtgggaacgaccaacaaaagtcagactacccaagctataccttaagcaccagatggacttggtggccacactgtctcagctcggccttcaggagttgttccaggcccctgacctccgcggtataagcgagcagtccctcgtagtgagtggcgtccagcaccagtcaacactggaactatctgaggtgggtgtggaggctgctgcagctaccagcatagcaatgtccagaatgtctctgagctctttttcggtgaatcgtccctttctcttcttcatttttgaggatacgaccgggttgcctctgttcgtggggtccgtccggaaccctaacccttcggcaccgcgcgagctcaaagagcagcaagattccccaggtaataaggattttttgcagtcactgaagggcttcccaaggggcgacaagttattcggtcccgatctgaagctggtgcctcccatggaggaggattacccgcagttcgggtctccgaag

SEQ ID NO: 18955 - DNA, 1473 bp, synthetic construct
  misc_feature 1..1473: note = source = /note="Description of Artificial Sequence: Synthetic coding sequence"
  source 1..1473: mol_type = other DNA
atggcgctgctttggggcctgctggtgctcagctggagctgcctgcaaggtccatgtagtgtattttctcccgtgagtgccatggagcctttgggaaggcagttgacatctggccctaatcaggagcaagtgtcccccttgactctgctgaagctgggtaatcaggagcctggggggcaaaccgctcttaaaagcccacctggagtgtgttctagggatccgacccctgagcagacacataggctggcccgggcaatgatggcttttacagctgacctcttcagtttggttgcccaaacttctacctgcccaaatctgattcttagccccctgtcagtcgcacttgctctgtctcatctcgctcttggggctcaaaaccatacgctgcagcgattgcagcaggtgctgcatgcaggctccggcccatgtcttcctcatcttctgagtcggctgtgtcaagatctggggcccggcgcctttaggcttgccgctcggatgtacctccagaagggatttcccatcaaggaggatttcctcgaacagtcagagcagctgtttggcgccaaaccagtgtccctgaccggcaaacaagaagatgatcttgccaacatcaatcagtgggtgaaggaagctaccgagggtaagatccaggaatttctgtccgggttgccagaagacactgtccttttgcttttgaatgcaattcatttccagggattctggcggaataaattcgatccgtctctcactcagcgggattcttttcaccttgacgagcaattcactgtgccagtcgaaatgatgcaggcaaggacatacccactcaggtggttcctgctggagcagccagagatccaggtggcccactttccatttaagaataatatgtcctttgttgtcctggttcccacccatttcgaatggaacgtcagccaggtgttggctaacctgagttgggatacgctccatcccccactcgtctgggaacggcctaccaaagtccggctgcctaaactttatctgaagcatcagatggatctggtggccacgttgtcacagctgggcctgcaggagctgtttcaggcgcccgacttgcgaggcatttcagagcaatctctggttgtgtccggggtgcagcatcagagtactctcgagttgagcgaagtcggagttgaggccgcagcggcaacctctatcgccatgagcagaatgagcctgagctccttctccgtcaaccggccttttctcttttttatctttgaagataccactggacttccactgttcgtgggttctgtgcggaaccctaatccctcagctccaagagagctgaaggagcaacaggatagcccagggaataaggactttctccagagtctgaaggggttccctcgaggggataaactcttcgggcctgatctcaaactggtcccacccatggaggaagactatccgcagttcgggtctcccaag

SEQ ID NO: 18956 - DNA, 1473 bp, synthetic construct
  misc_feature 1..1473: note = source = /note="Description of Artificial Sequence: Synthetic coding sequence"
  source 1..1473: mol_type = other DNA
atggcacttctctgggggcttctggtattgtcatggtcgtgtttacagggcccctgcagtgtttttagtccagtgtcagctatggagcctttgggcagacagctcacttccggtcccaaccaagagcaagtttcccctcttacactgctcaaattggggaatcaggaacccggtggccagaccgctcttaagtcaccgccaggagtgtgttcccgagatccaactcccgaacagactcacaggctggctcgggccatgatggcctttaccgccgatttattttccctggttgcgcagacctcaacctgtccgaacctaatcctgagccctttatcagtcgcccttgcactctcccacctcgccctaggcgcccagaatcacactctacagaggctgcagcaggtcttgcacgcaggatctggaccttgtctgccccatctgttgagcagactctgtcaagacctggggcctggagccttcaggctagctgcacggatgtacctacagaagggctttccaattaaggaagacttcctggagcagtcggagcagttattcggagctaaaccggtgagtttgactggtaagcaggaagacgatctggccaatataaaccagtgggtaaaggaagccacagaggggaaaatccaggaatttctcagcgggctgcctgaggacacggtcctcctcttgctgaatgccatacattttcaggggttttggcgaaataagtttgatccaagtctcacgcaacgcgattctttccacctagacgaacagttcactgttccggtggagatgatgcaggcgaggacctacccgctgagatggtttctgttggagcaacctgagatccaggtggcacacttcccctttaaaaacaacatgagtttcgtagtgctggttccaacacactttgaatggaatgtctcccaggtgctggcgaacctgtcgtgggacacactgcacccaccactggtctgggagcgtcccactaaagtccgccttcccaagctctatctcaagcatcagatggatttggtagccactctgagtcaactgggtctgcaggagctgtttcaggcacccgatttacggggaattagcgaacaatctttagtcgtatctggtgtgcaacatcagtcaaccctggaattatctgaggtaggcgtggaggcagccgctgctacctctatcgcgatgagcaggatgtcattgtctagttttagcgtaaatcgccccttcctcttttttattttcgaggacactactggccttcctctgtttgtgggttccgtgcgaaatccaaatccctcagccccacgggaattgaaggagcaacaggacagtcctgggaacaaggacttcctccagtccctaaagggatttccccgaggggacaagctgttcggtcccgatctgaagctggtgcctcccatggaggaagactacccccagttcggatctcctaag

SEQ ID NO: 18957 - DNA, 1473 bp, synthetic construct
  misc_feature 1..1473: note = source = /note="Description of Artificial Sequence: Synthetic coding sequence"
  source 1..1473: mol_type = other DNA
atggctctactgtgggggctgcttgttctttcctggtcttgcctccagggcccatgtagcgtattttctcccgtcagcgctatggagcctctgggaaggcagctaacaagcggtccaaaccaggagcaagtttcccccctgaccctgctgaagctgggaaatcaggaacctggcgggcagacggcactgaaatctcctccaggcgtgtgcagtagagaccccacccccgagcaaacgcataggctcgcgcgagccatgatggcatttactgccgaccttttctctctcgtggcacagactagtacatgtcctaacctgatcttatcaccgctgagcgtagctctggccctatcacacttggcgctgggcgcccagaaccacaccctccaacggctgcagcaggtgctgcacgcaggtagtggaccttgtctgcctcacctcctttcgaggttgtgtcaagacctggggccaggtgcatttaggttagcagctaggatgtatctccaaaagggattccctatcaaagaggacttcctcgagcagtccgagcagcttttcggggctaagccagtatccctgaccggaaagcaggaggatgatctagcgaatattaaccagtgggtcaaggaagccaccgaaggaaagattcaggagttcctttctggtctcccagaggacacagttttactcttgctgaatgccattcatttccagggcttctggcgcaacaaattcgacccaagcctcacccagcgagattccttccacctggacgagcagtttacggtcccagtggaaatgatgcaagcacgaacctatcctctccgatggtttctcctggagcaacctgaaatccaggtggcccacttccccttcaaaaataatatgtctttcgtggttctcgtacccacgcactttgaatggaatgtgtctcaggtgcttgccaatctctcttgggacacactgcaccccccattggtgtgggaacgaccaacaaaggtccgactccctaagctgtatctgaaacaccagatggacctggtggcaacgttaagccagctcggtctccaagagctcttccaggcccctgacctgcggggcatcagcgaacagtccttggtggtctcaggagttcagcaccagtcaacgttggaactcagtgaggttggtgtagaagctgccgcggctacatctatcgctatgtctagaatgagcctgtcttctttttctgtaaaccgccccttcctgttcttcatctttgaagacactactgggttgcccctttttgttggttccgtgaggaatcctaacccatctgcaccccgggaactgaaagaacaacaagactcgcccggcaacaaagactttttacaatccctgaaaggattcccccggggtgataaactgttcgggcctgacctgaagctcgtccctccaatggaagaggattacccacagttcggctccccaaaa

SEQ ID NO: 18958 - DNA, 1473 bp, synthetic construct
  misc_feature 1..1473: note = source = /note="Description of Artificial Sequence: Synthetic coding sequence"
  source 1..1473: mol_type = other DNA
atggcactcctatggggcctgctcgtcctgtcttggagctgtctgcaggggccctgtagtgtgttcagccctgtgagtgctatggagcccctcggtcgccaactcactagcggcccgaatcaagaacaagtgagccccctcactttgctaaagcttggaaaccaagagccaggcggacagacggcgctgaagagtccacctggggtgtgcagccgcgacccaaccccggagcagactcacagacttgcaagggctatgatggcctttacagctgatcttttttctctcgtggctcagaccagcacgtgccctaatctaatcctgtctcccctttccgtggcacttgctctgagtcatctggcgctgggcgctcagaatcacacacttcagcggttgcagcaggttctgcatgccgggagtggtccgtgtctcccgcatcttctgtcccggctgtgccaggacctgggccctggggcttttaggctcgccgcacggatgtacctacaaaagggttttccaattaaagaggactttctggaacagtccgagcagctatttggagcaaagccggtttccctgaccggcaaacaagaggatgatttggccaatatcaaccagtgggtgaaggaggccaccgaggggaagatccaggagtttctgagcgggcttcccgaggacacagtgctgctgctcctaaatgccattcattttcagggcttttggaggaataagtttgacccctctctgactcagagagattcctttcatctcgatgagcagttcactgttcccgtggagatgatgcaagcccggacctatcccctgcggtggttcttgttagagcagcctgagattcaggtggcacacttcccctttaaaaataacatgtcctttgtggtcctggtgcctacacacttcgagtggaatgtgagccaggtgttagctaacctatcctgggatacattgcaccccccgcttgtatgggaaaggcctaccaaggtcaggctgcccaagctgtacctcaagcatcagatggatctggtggccacactatcccagttgggtctgcaagagctctttcaagcccctgatctaagagggataagcgagcagtcattagttgttagtggcgtccagcatcaaagcactctggaactctccgaggtgggcgttgaggccgctgctgccacctctattgccatgtcacggatgtcgctcagctcgttctcagtaaataggccattcctctttttcatcttcgaggatactaccggactccccctgttcgtaggctctgttagaaatccgaacccgtccgcccctcgcgaactgaaggaacagcaagacagccccgggaacaaggactttctccagtcgctgaaaggctttcctcgtggagacaagctgttcggacccgatctgaaactggttcctccaatggaggaggactatcctcagtttggcagccccaaa

SEQ ID NO: 18959 - DNA, 1473 bp, synthetic construct
  misc_feature 1..1473: note = source = /note="Description of Artificial Sequence: Synthetic coding sequence"
  source 1..1473: mol_type = other DNA
atggctctcttgtggggcctgctagtcttgagctggtcttgcttgcaggggccctgctcagtattctcaccagtctccgctatggagcctcttggcagacagttgacaagtgggcccaatcaggagcaagttagtccattgaccctattgaaattgggcaaccaggagcctggcggccagacggcactcaagagtccacctggagtttgttcccgtgatccgacaccagaacagactcaccggctcgcccgcgccatgatggccttcaccgctgatcttttttccctcgtagcccaaacaagcacgtgtccgaatctcatattgtctcccttgtccgtggcgctggccctatcgcatttagctttgggcgcgcaaaaccacacgttacagcggctgcagcaagtgctacacgcgggctccgggccgtgtttgcctcacctccttagccgattgtgccaggatcttggacctggcgcattccgacttgccgcccgaatgtatctccagaaaggtttcccgatcaaagaagattttctagagcagagtgagcaattatttggtgccaaacccgtcagtctaacgggcaagcaggaagatgatctcgctaatatcaaccagtgggtaaaggaagcaacagagggcaaaatacaagaattcctctcaggtcttccagaagatactgttcttctactgctgaatgcaattcactttcagggattctggcgaaacaagttcgacccctctctgactcagcgcgacagctttcacctcgacgagcagttcacagtgcctgtggaaatgatgcaagctaggacttaccctctgcggtggttcttgctggaacaaccagagatccaggtagcgcactttccattcaaaaataacatgtccttcgtcgtcctagtcccaacgcacttcgaatggaacgtttctcaagtcttggcgaacctctcgtgggatacccttcacccccctctggtttgggagaggcccaccaaggtgcgccttccgaagctttatctcaagcaccaaatggatctcgtggcgaccctctcgcagctgggcctgcaagagcttttccaggcgccagacctgcgcgggatcagcgagcagagcctagtagtgagtggtgtacagcaccagagcacattggaactttcggaagtaggggtcgaagctgccgcagcgacgtccatcgcgatgtctcggatgagtctatcctccttcagcgtcaaccgaccattcctgttctttatctttgaggacacgaccggtctccctcttttcgttggctctgtcagaaatcctaatccctcggcacctcgcgagcttaaggagcagcaagactctccgggcaacaaagactttcttcagtctctgaaaggttttcccagaggagacaaattgtttgggccagacttaaaactggtgccccctatggaggaagattatccgcaatttgggtctccgaag

SEQ ID NO: 18960 - DNA, 1473 bp, synthetic construct
  misc_feature 1..1473: note = source = /note="Description of Artificial Sequence: Synthetic coding sequence"
  source 1..1473: mol_type = other DNA
atggcgctgctgtggggcctgttggtgcttagttggtcctgcttacaggggccctgttctgttttttcccccgtaagtgcaatggaaccattaggccggcagttgacaagcgggcccaaccaggagcaggtaagccccttgacactccttaagttggggaaccaggagccaggaggacagactgcccttaaatcacctccaggggtttgcagccgcgatcccaccccggagcagacccataggttggcacgcgcaatgatggccttcacagccgacctgttttccttggtcgctcagacgtccacctgccctaatctcattttatcgcccttaagtgtcgctctcgcactctcccaccttgccctcggtgctcagaaccacactctgcagcgactccagcaggtattgcatgcaggcagcgggccctgcttgccgcatctcctaagtcgtctctgccaagacctcgggcctggcgccttcagactcgccgcaaggatgtacttgcagaaaggatttccaatcaaggaggatttcctcgaacagagcgagcaactgtttggtgccaagcctgtctccctaacaggaaagcaggaggacgacctggccaacataaatcagtgggtcaaggaggccacagaaggaaagatccaagaattcttgtctggcttgccagaagacacggttttgttgctactaaacgcgattcacttccagggcttttggagaaacaaatttgatccttccctgacccagcgggactcattccatctggacgaacaatttaccgttcctgttgagatgatgcaggcccggacttaccctctaagatggttcctgctggagcagcccgagatccaggtcgcacatttcccctttaaaaacaacatgtcgttcgtcgtgctggtgcctactcacttcgagtggaacgtgtcccaagtgctcgccaacctctcgtgggacaccctccacccccccctggtctgggagaggcccaccaaagttcggcttccaaaactgtatctgaagcaccagatggatctagtcgccacgctgtcgcagctgggactccaagaattgttccaggcacccgacttgcgtggcatctcagagcagtctttagtggtcagcggggttcagcatcagagcacgctcgaattgtcggaagtcggcgttgaggccgctgcggctacgtccatcgccatgtcacggatgagcctgtcatctttctctgttaatcgtccctttctttttttcatcttcgaggacaccaccggattgccattgtttgtgggatcagtgcggaaccccaatccgtctgctccccgggagttaaaggagcagcaagacagccctggcaataaggatttccttcagagccttaaggggttcccccgcggtgacaagctttttggccctgatctgaagttggtgccaccaatggaggaagactacccgcagttcggctcccctaaa

SEQ ID NO: 18961 - DNA, 1473 bp, synthetic construct
  misc_feature 1..1473: note = source = /note="Description of Artificial Sequence: Synthetic coding sequence"
  source 1..1473: mol_type = other DNA
atggccctgctctgggggttattggtattgtcttggtcatgtctgcaggggccctgttctgtcttcagtcctgtctcagcaatggaacccctcgggcgacagctcacttctggacctaatcaggaacaggtcagtcctctcactctgctcaaattagggaaccaggaacctgggggacagactgccctaaaaagtccccccggggtttgcagtcgtgatcctactccagaacagacacaccgactggcaagagcaatgatggcctttactgccgatttattttccctggtcgcccagacaagtacatgccccaacctcatcttgtcccctctttctgtcgcccttgccctgtcccatttggcactcggggcccaaaaccacactctccagcgacttcaacaggttctccacgccgggagtggaccctgcttaccacacctcttatctagattatgccaagatcttgggcccggagcattccggctagccgccagaatgtatttacagaaagggtttcccattaaagaagattttcttgaacagtctgaacaattattcggggccaagcccgtgtctctaactgggaaacaggaagatgatctggcaaatatcaaccagtgggtgaaagaagctacagaagggaaaatacaggaatttcttagtggactacccgaagacactgtccttttactactcaacgctatccattttcaggggttttggaggaataagttcgatccttctttaacacagcgagatagtttccaccttgatgagcagttcactgtgcctgttgaaatgatgcaggctcgaacgtatccacttcgctggttcctattagagcagccagagattcaggtggcgcatttccccttcaaaaacaatatgtctttcgtcgtgttggtccctacacactttgagtggaatgtgtcccaggtacttgcaaacttatcttgggatactctccacccacctcttgtgtgggaacggccaactaaagtgagactgcctaaattgtatcttaaacatcagatggatctggtggccactttgagtcagctggggcttcaggaactctttcaggcccctgacctgcggggaatctcagaacaatcactagtagtaagtggggtacaacatcagtctacgctagagctcagtgaagttggagtcgaagctgcagccgcaacatccatcgcaatgtcccgaatgtctctttccagtttctcggtaaatcgacctttcttatttttcattttcgaggatactactggactcccactgttcgttgggtctgtacgcaaccccaatccttccgccccacgggaattaaaagagcagcaggattctcccgggaataaagattttctccagtcactcaaagggttcccccggggggacaaactcttcggaccagatctcaaattggtgccaccaatggaagaagattatccccagtttggatccccaaaa

SEQ ID NO: 18962 - DNA, 1473 bp, synthetic construct
  misc_feature 1..1473: note = source = /note="Description of Artificial Sequence: Synthetic coding sequence"
  source 1..1473: mol_type = other DNA
atggcgctattatggggtctactagttctatcgtggtcgtgtttacaaggtccgtgttcggtattttcgccggtatcggcgatggaaccgttaggtcgtcaactaacgtcgggtccgaatcaagaacaagtatcgccgttaacgctattaaaattaggtaatcaagaaccgggtggtcaaacggcgttaaaatcgccgccgggtgtatgttcgcgagatccgacgccggaacaaacgcatcgactagcgcgtgcgatgatggcgtttacggcggatttattttcgttagttgcgcaaacgtcgacgtgtccgaatctaatattatcgccgttatcggtagcgttagcgttatcgcatctagcgctaggtgcgcaaaatcatacgctacaacgactacaacaagttctacatgcgggttcgggtccgtgtctaccgcatctattatcgcgtttatgtcaagatttaggtccgggtgcgtttcgattagcggcgcgaatgtatttacaaaaaggttttccgataaaagaagattttttagaacaatcggaacaactatttggtgcgaaaccggtttcgctaacgggtaaacaagaagatgatctagcgaatataaatcaatgggtaaaagaagcgacggaaggtaaaatacaagaatttttatcgggtctaccggaagatacggtattattactactaaatgcgatacattttcaaggtttttggcgaaataaatttgatccgtcgttaacgcaacgagattcgtttcatctagatgaacaatttacggtaccggttgaaatgatgcaagcgcgtacgtatccgctacgatggtttttactagaacaaccggaaatacaagtagcgcattttccgtttaaaaataatatgtcgtttgtagtattagtaccgacgcattttgaatggaatgtatcgcaagtattagcgaatctatcgtgggatacgctacatccgccgttagtatgggaacgtccgacgaaagttcgtttaccgaaattatatctaaaacatcaaatggatttagtagcgacgttatcgcaactaggtctacaagaactatttcaagcgccggatttacgtggtatatcggaacaatcgttagtagtatcgggtgtacaacatcaatcgacgttagaattatcggaagtaggtgttgaagcggcggcggcgacgtcgatagcgatgtcgcgtatgtcgctatcgtcgttttcggtaaatcgaccgtttttattttttatatttgaagatacgacgggtttaccgctatttgtaggttcggtacgtaatccgaatccgtcggcgccgcgagaattaaaagaacaacaagattcgccgggtaataaagattttttacaatcgctaaaaggttttccgcgaggtgataaattatttggtccggatttaaaactagttccgccgatggaagaagattatccgcaatttggttcgccgaaa

SEQ ID NO: 18963 - DNA, 1473 bp, synthetic construct
  misc_feature 1..1473: note = source = /note="Description of Artificial Sequence: Synthetic coding sequence"
  source 1..1473: mol_type = other DNA
atggccttgctttggggtttgcttgtcctctcatggagctgccttcagggaccatgttcggtcttttcgcccgtgtcagcaatggaacctctcggtaggcagctgacttcagggcctaaccaagaacaagtgtcgccccttacgctgctcaagctcggcaaccaagagcctggcggtcaaaccgcgcttaaatcgccccccggagtttgttcccgggatcccaccccagagcagactcataggcttgcaagggctatgatggcattcacggccgatctcttctccctggtcgcccaaacctcgacttgcccgaatcttatactcagcccactttcagtggcacttgccctctcacacctggcactgggggcacaaaaccataccctccagagacttcagcaggtgctgcacgcaggatcgggaccatgtctcccacatctcctttcgcggctttgtcaggatctgggcccaggagcattcagactcgcggcaagaatgtacctccaaaaggggttcccaattaaggaggattttctcgaacaaagcgagcaacttttcggtgcaaagcccgtctcactcaccgggaagcaggaagatgacctggcgaatatcaatcaatgggtgaaggaagccactgaagggaagattcaggagtttctctccggcctccccgaggatactgtcctgctgctgctgaacgccatccattttcaaggtttctggagaaacaagtttgacccgtcgctgactcagagggattccttccatttggatgagcagttcactgtgccagttgaaatgatgcaggccaggacctacccactccgatggtttctcctggaacaaccagaaattcaagtggcgcacttccccttcaagaacaatatgagctttgtggtgctggtcccgacccattttgagtggaacgtgtcgcaggtgctggcgaacctctcgtgggacactcttcaccccccacttgtgtgggaacgccctactaaagtgcgtctgcctaaactctacctcaagcatcagatggatcttgtggcaacgctctcgcaactcgggctgcaagaactgttccaagcacccgaccttaggggtatctcagagcagtcgcttgtggtatctggtgtgcagcatcaatccactctcgaactttcggaagtcggtgtggaggctgcagccgccacctctatagcaatgtcacggatgtccctgagctctttctccgtcaaccgcccattccttttcttcattttcgaagataccactggtctgcctctgtttgtgggaagcgtccgcaacccaaatcctagcgcacctcgggaactgaaggagcaacaggactcgcccggaaacaaggactttctgcagagcctcaaaggcttcccacgaggcgataagctgttcggtcctgacctgaaactggtgccaccaatggaagaagattacccacagtttgggagccccaag

SEQ ID NO: 18964 - DNA, 1473 bp, synthetic construct
  misc_feature 1..1473: note = source = /note="Description of Artificial Sequence: Synthetic coding sequence"
  source 1..1473: mol_type = other DNA
atggcacttctctggggcctccttgtgctttcctggtcatgcctgcagggcccttgctcagtctttagccccgtgtcggcaatggagccactcggtaggcaactgactagcggacccaatcaggagcaagtgtcccccctgaccctccttaagttggggaaccaggaacctgggggtcagaccgcactgaaatctccaccgggagtctgctcccgggatcccaccccagaacagacccatagacttgcacgcgccatgatggcatttaccgcggatctcttttcacttgtggcgcaaacctcaacttgcccaaaccttattctttcgcctctttccgtggcactcgcactgtcccatctcgccctcggggcacagaatcatacgttgcaaagactgcagcaggtgcttcatgcaggatcaggcccatgtctcccacatcttctttcccgactgtgtcaagacctcgggcctggagctttccgccttgcagctcgaatgtaccttcagaaaggttttcccatcaaggaagatttccttgaacaatcggaacagctgtttggagcaaagccagtctcgctcaccggaaagcaagaagatgatcttgctaacataaaccaatgggtgaaggaagcaactgaaggtaagatacaggagttcctttctggtctgcccgaagataccgtgttgcttttgttgaacgcaattcatttccaggggttctggcggaacaagtttgatccatcgctgactcaaagagattcgtttcatctggacgaacagttcactgtgcccgtcgaaatgatgcaggctagaacttacccccttagatggttcctcctggagcagccagaaattcaagtggcacatttcccatttaagaacaacatgtcttttgtggttcttgtgccaactcattttgaatggaatgtgagccaagtcctggcgaatctgtcatgggacactttgcatcctccactggtctgggaacgacccaccaaagtgcgcctgccgaagttgtacctgaagcaccagatggatctggtggctaccctttcgcagctgggactccaagagcttttccaggcccctgatctgcgcggaatttcagagcagagcctggtggtgtccggcgttcagcaccaaagcactttggagctgtcggaagtcggcgtggaggcagcagcagcgaccagcattgcgatgtcacgaatgtccctgtcctcgtttagcgtgaaccggccgtttcttttcttcatatttgaggacaccaccggacttcccctctttgtgggatccgtgcgcaatcctaatccatctgcacctagggagctgaaggagcaacaagattctcccggtaacaaagactttctgcagagcctcaagggttttcctaggggagacaagctctttggtcctgacctgaaactggtgcctccaatggaagaagattacccacagtttggatcacctaag

SEQ ID NO: 18965 - DNA, 1473 bp, synthetic construct
  misc_feature 1..1473: note = source = /note="Description of Artificial Sequence: Synthetic coding sequence"
  source 1..1473: mol_type = other DNA
atggccctactgtggggcttgctggtcctaagctggtcttgtctgcagggcccttgttcagttttctcacctgtgtccgccatggaacctctaggaagacaactgacaagcggccctaaccaagaacaggtttcccccttaactctgctgaaactggggaaccaagagcctggggggcagaccgccctgaagtcccccccgggggtatgttcgagggatcccacacccgagcagacacatagactcgcccgtgcaatgatggcatttacggctgacctatttagtctcgttgcccagacctccacctgtcccaacctgattctcagccctctgagcgtggcactagcactttctcaccttgctctgggggcccaaaaccataccctccaacgattacagcaagtgctgcacgctggaagcgggccttgcttgccccatctgctgtctaggttgtgtcaggatttaggccccggcgccttccgtttggcagcacggatgtatttacagaaagggtttcctattaaggaggactttctagaacagtccgaacagctattcggtgcaaaacccgtgagcttgactggtaaacaggaagatgacttggcaaacataaaccagtgggtgaaggaggccactgaaggaaaaatccaagagttcctaagcggattgcctgaagacactgtactgctcctgctcaatgctatccatttccagggcttctggagaaataagttcgacccttctctgactcaacgcgactccttccacctagacgagcaattcacggttcccgtggagatgatgcaggcaaggacgtatcccctgagatggtttcttctggaacagccagagattcaggtcgcccacttcccttttaaaaacaatatgtcctttgtcgtattggtgccaacgcatttcgaatggaacgtgagccaggttctggccaacctgtcttgggatacccttcacccacccttggtgtgggaaaggcccactaaagtgaggctccccaagctctaccttaagcaccagatggacctcgtggccaccctctcccagctcggtctacaagagctgttccaggctcccgacctacgtggcattagcgaacagagcctggtggtctccggggtgcaacatcagtctacgctggagctgagcgaagtgggagttgaggcagcagccgccactagtatcgctatgtcacgcatgagtctgtcctcctttagcgtaaatcgaccttttttgtttttcatttttgaggacactaccggacttccacttttcgtgggcagcgttcgtaatccaaacccaagtgccccccgagagctgaaagagcagcaagacagcccgggcaacaaagatttcctgcagtcccttaagggtttcccgaggggcgacaagctattcggacctgatctgaagcttgtcccacccatggaggaagactatcctcaatttggctcccccaaa

SEQ ID NO: 18966 - DNA, 1473 bp, synthetic construct
  misc_feature 1..1473: note = source = /note="Description of Artificial Sequence: Synthetic coding sequence"
  source 1..1473: mol_type = other DNA
atggcacttctctggggcctgctcgtcctttcctggtcatgcctgcaaggtccctgttcagttttttcgcctgtgtcagcgatggaacctctgggacgccagttgacctctggaccaaaccaagagcaagtgagccctctgactcttcttaagctcggcaaccaagagcctggcggtcaaactgccctcaagtcccctccaggagtctgttcaagggaccctactccagagcagactcaccgcctggcgcgggccatgatggcatttaccgccgatttgttctcactggtggcacaaaccagcacgtgtcccaatcttatcctttcgccactgtcggtcgcactggccctgtcacatctggcgctcggtgcacagaaccacactcttcagcgactgcagcaagtgctgcatgcagggagcggaccctgtctgcctcatcttctttccagactttgtcaagatctgggacctggagcctttagacttgcagcacgcatgtacctgcagaaaggatttcctatcaaggaggattttctcgaacagagcgaacaactctttggggcgaagccagtctctctgaccgggaagcaagaagatgacttggccaacattaatcagtgggtcaaggaagcaactgaaggaaaaatccaggaatttctcagcggacttccggaagataccgtgcttctccttcttaacgctattcatttccaggggttttggcgcaacaagtttgatccgtcgcttactcaacgcgattcgtttcatctggacgaacagtttaccgtccccgtcgaaatgatgcaagcgcggacctacccactgcggtggttccttcttgaacagcctgagattcaagtggcacactttccttttaagaacaacatgtcctttgtcgtgctggtgccaacccatttcgaatggaatgtgtcccaggtgcttgcaaaccttagctgggatactctgcaccctccccttgtctgggaaaggcctaccaaggtgagactcccgaaactttaccttaagcatcagatggatctggtggcaacgctttcgcagcttggtctgcaggaactttttcaagcaccagatctccgcggaattagcgagcaaagtttggtggtcagcggagtgcagcatcaatccactcttgaactgtccgaagtgggtgtggaagcagcagcagcaacctctatagcaatgtcaagaatgtcgctctcatcatttagcgtcaataggccatttctcttctttatctttgaggacactaccggccttcctctttttgtgggctcagtgcgcaacccaaatccatcggcaccacgggaactgaaggaacagcaagactcgccaggaaataaggattttctccaaagcctgaaggggtttcctcgaggagataagctgttcggcccagacctgaagctggtgccacctatggaggaggattatccacagttcgggtcccccaaa

SEQ ID NO: 18967 - DNA, 1473 bp, synthetic construct
  misc_feature 1..1473: note = source = /note="Description of Artificial Sequence: Synthetic coding sequence"
  source 1..1473: mol_type = other DNA
atggcattgctgtggggactgctcgtcctgtcgtggagctgtttgcaaggcccctgctcggtgttttccccagtctccgcgatggagccgctgggacggcagctgacctcaggaccgaatcaggaacaggtgtccccgctcactctgctcaaacttggcaaccaggagccaggaggccagactgctctgaaaagccccccgggagtgtgctcgagggatccgacccctgagcaaactcacagactcgcgcgcgccatgatggccttcactgcagatctgttcagcctggtggcccagacctcaacctgcccgaaccttatcttgtcaccactgtcggtggctttggcgttgtcccacctggcccttggagcccagaaccatactctgcaaagactgcagcaggtgctccacgctggaagcggaccgtgtctgccccacctcctgtcgcgcctctgtcaggacctgggtcccggagccttccggctggccgcccggatgtacctccaaaagggcttcccaatcaaggaggatttcctggaacaatcagagcagctcttcggagccaagcctgtgtcattgactggcaagcaagaagatgatctggctaatatcaaccagtgggtgaaggaggccaccgaaggaaagattcaggagttcctcagcggactgccggaggacactgtcctgctccttctcaatgccatccatttccaaggtttttggcgcaacaagtttgatccttctctgactcagcgggactcgtttcacctggacgaacagttcactgttccggtcgagatgatgcaggctcgcacgtatccgttgcgctggttcctgttggaacagccggagatccaagtggcccatttcccattcaagaataacatgagcttcgtcgtccttgtccctactcacttcgaatggaacgtctcccaagtgctggcaaacctgagctgggacaccctgcacccgccactggtttgggagaggccgaccaaggtgagactcccgaaactttacttgaagcatcaaatggatctggtggccactctgtcgcagcttgggctgcaggagcttttccaagcaccagacctcagagggatcagcgaacagtccttggtggtgtcaggcgtgcaacatcaaagcaccctcgaactttccgaagtgggagttgaggccgcggctgccacctccatcgcgatgagccggatgtcgctgagctcctttagcgtgaaccgcccgttcctgttcttcatattcgaagataccaccggcctgccgctgtttgtgggatcggtcagaaacccgaatcccagcgcgccgcgggaactgaaggaacagcaagactcgccgggcaacaaggatttccttcagtcactgaagggattcccgaggggggacaaactgttcggacctgacctgaaattggtgccgccgatggaagaagattacccgcagtttggaagcccaaaa

SEQ ID NO: 18968 - DNA, 1473 bp, synthetic construct
  misc_feature 1..1473: note = source = /note="Description of Artificial Sequence: Synthetic coding sequence"
  source 1..1473: mol_type = other DNA
atggctctgttgtgggggttgctggtgctgtcttggagttgcctccagggtccttgcagcgtgttcagcccggttagcgcgatggaaccacttggtagacagctaacatcggggccaaatcaagagcaagtgagccccctcacactgctgaagctgggcaatcaggaaccgggcgggcaaacagctctcaagtcccctcccggcgtctgctcccgggatcctacccctgagcagactcatcgcctggccagagcaatgatggcgtttactgccgatctgttctcactagtggctcaaacaagtacctgccctaatctgattctgagccctctctccgtggctctcgctctttctcaccttgcactgggcgcgcagaatcataccttacagagactgcagcaggttttgcacgccggatctggtccttgcctgcctcacctcctgagtaggctgtgccaagacctaggacctggtgcctttaggctggccgctaggatgtacctgcagaagggcttcccaattaaagaagacttcctcgaacagagcgagcaattgttcggggctaagccagtgtcactgaccggaaagcaagaggacgacttagctaatatcaaccagtgggtgaaagaagctactgagggcaaaatccaagaattcctgtccggactgcccgaagacaccgttcttctcctgctgaacgcaatccattttcagggattttggcgaaacaaattcgacccctccctaacgcagcgggatagcttccacctggatgaacagttcaccgtgcctgtcgagatgatgcaggccagaacttatcccctcagatggttcctgctcgagcaacccgagattcaggtcgcgcactttccattcaagaacaatatgtccttcgtcgttctcgtgccgactcatttcgagtggaacgtctcccaggtgctagctaatctgagctgggacacacttcatccccccttggtgtgggagaggcccaccaaagttcgcctccctaaactctatttgaaacaccagatggacctcgtcgccactttaagccagctggggctgcaggagctgtttcaggcgcctgaccttcggggtatctccgagcagagtctggtggtaagcggtgtgcaacatcagtcaactcttgaactctccgaagttggagttgaggcagcagcggcgacgagtattgcgatgtctcgaatgagcctgagcagtttttccgtgaatcgcccctttctgttctttatcttcgaagacactaccggtttacctctgtttgtcggcagtgttcgcaaccccaacccctccgcgcctagggaacttaaggaacagcaagactcccccgggaacaaggattttcttcagagcctgaagggcttccccaggggggataaactgtttggccctgacctcaaactggtgcccccaatggaggaggattaccctcagtttggctcccccaaa

SEQ ID NO: 18969 - DNA, 1473 bp, synthetic construct
  misc_feature 1..1473: note = source = /note="Description of Artificial Sequence: Synthetic coding sequence"
  source 1..1473: mol_type = other DNA
atggcactgctgtggggcttgctcgttttgtcgtggtcgtgcttgcagggaccttgctcggtctttagcccggtgtcggcgatggaaccgctgggccggcaacttacctcaggaccaaatcaagaacaagtgtcccctcttacgcttctgaaacttggaaaccaggaaccgggaggacagaccgccctcaaatcacctccgggagtgtgtagcagagatcctaccccggaacaaacccatcggttggcgcgggccatgatggcattcaccgctgacctgttcagtctggtggcccagacctcgacttgcccgaatctgatcctgtcaccactgtccgttgccctggcgctgtcccacttggccttgggagcgcagaaccatactctccagcgcctgcagcaggtgctccacgctggatctggtccgtgtctcccgcatctgctttcgaggttgtgccaagacctcggaccgggtgccttcagactcgcggctcgcatgtacctgcagaagggatttcccattaaggaggactttctcgaacagtcggagcaactcttcggcgccaaaccggtgtccctgaccggtaaacaggaggacgatctggctaacattaaccaatgggtcaaggaggcaaccgaaggaaaaatccaggagtttctgtccggactcccggaagatactgtgctgctgctcctgaatgcgatacacttccaaggcttctggcggaataagttcgacccttctctgacccagagagacagttttcacctggatgagcagttcactgtcccggttgagatgatgcaggcgagaacctacccgctgcgatggttcctgttggagcagcctgaaatccaggtcgcccatttcccgttcaagaataacatgtcattcgtggtgctggtgcctactcactttgagtggaatgtgtcgcaggtcctcgccaacctctcatgggatactctgcaccctccgctcgtatgggaacgcccgacgaaggtgcgtctgccaaagctctatctgaagcatcaaatggatctggtggcaactttgtcccaactcggactgcaagaactgtttcaagccccggacctgcggggaatctcggagcagtcgctcgtcgtgtccggggtgcaacaccagagcactttggaattgtccgaggtgggtgtggaagcagctgccgcgacttccatcgctatgtcacggatgtcactgagctcctttagcgttaacagaccattcctgtttttcatctttgaggacactactggactgccactcttcgtggggagcgttagaaaccccaacccaagcgcgccgcgcgagcttaaagaacaacaagactcgccagggaataaggacttccttcagagcctcaaggggttcccgcggggtgacaagctctttggacctgacctcaaactcgttccgcctatggaagaggattaccctcagttcgggtcgccgaag

SEQ ID NO: 18970 - DNA, 1473 bp, synthetic construct
  misc_feature 1..1473: note = source = /note="Description of Artificial Sequence: Synthetic coding sequence"
  source 1..1473: mol_type = other DNA
atggccttactgtggggccttcttgttctctcctggtcatgtttgcagggtccgtgctccgtcttttctcccgtgtcggcaatggaaccactgggcaggcaacttacctcaggccctaatcaagagcaggtatctcccctgacactactgaagttgggaaatcaagaacctgggggacaaacagccttaaagtccccccccggtgtatgctcccgtgaccctaccccagagcaaacacataggttggcaagggcgatgatggctttcactgcagacctcttctcacttgtggcacagacatccacctgtcctaatctgatcctttctccgctgagtgtggcactggctttgtctcatctggccctcggagcccagaaccatactcttcaacgcctgcaacaggtgctgcacgccggctctgggccctgtctgccgcacctcttatcacggttatgccaggacctgggaccaggggccttccgtcttgccgcccgcatgtatctccagaaaggtttccctatcaaggaagacttcctcgagcagagcgagcaactgttcggagcaaaacctgtgagcctgaccggtaaacaggaggatgacctggccaatattaatcaatgggtaaaggaagctacagaaggcaaaatccaggagtttctgtccgggctgccagaggataccgttctgttactgcttaacgccatccacttccagggattttggcgcaacaagttcgatccatcccttacacaacgagactctttccacctggatgagcagttcacagttcctgttgagatgatgcaggcgagaacgtaccctttaaggtggttcttactggagcaacccgaaattcaggtggcacactttccattcaagaacaatatgtctttcgtcgtgctggtcccaacacactttgaatggaacgtgtcccaggttttagcgaatctatcatgggacactcttcatccaccactggtgtgggaaaggccaaccaaggtgcggctgccgaagctttacctgaagcatcagatggatctggtagcgaccttatcccaactaggcctccaagagctgttccaagcacccgatctgcgagggatttcagaacagagcctcgtagtcagcggggtgcaacaccagagcaccttagagctgagtgaagtcggcgtcgaagctgccgcagctacttcaatcgccatgagccggatgtctctgtcaagcttttcagttaaccgcccttttttgttcttcatctttgaagacactaccgggttgccactgtttgtggggtctgtacgcaatcctaacccttcagctccccgggaactaaaggaacagcaagactcccccgggaataaagactttctgcaaagtctgaaggggtttcccagaggggataagctctttgggccagacctgaaactcgtcccacccatggaagaggactatccccaatttgggagccctaaa

SEQ ID NO: 18971 - DNA, 1473 bp, synthetic construct
  misc_feature 1..1473: note = source = /note="Description of Artificial Sequence: Synthetic coding sequence"
  source 1..1473: mol_type = other DNA
atggctctgctatggggtttgcttgttttaagctggtcttgccttcaggggccctgttcggtgttttcacccgtctcggccatggagcccctcgggcggcagctgacgtccggacctaatcaagaacaggtgagccctcttaccctgttgaagctgggcaatcaagaaccaggcgggcagaccgccctaaaatccccacctggggtctgcagcagggatcctactcctgaacagacacatcgcctggcacgcgcgatgatggcctttacggccgatctcttctcgctggtggcacagacatcaacatgccccaaccttattctatccccgttgtcggttgcattggctctcagtcaccttgccctaggagcccaaaatcataccttacaacgcctccagcaagtgctgcatgccgggtcggggccctgcctcccccatctgctatcgcgtctgtgccaggacctggggcctggtgcattccggctagccgcaaggatgtatctccaaaagggatttcctatcaaggaggactttctggagcaaagtgagcagctgttcggcgctaagccagtctcactgaccgggaaacaggaggacgacctggcaaatatcaaccaatgggtcaaggaagctaccgagggcaagattcaggagttcctgtctggcctgcccgaggacaccgtactcctgctgctgaacgcaattcactttcaagggttttggcggaacaagttcgatccgagtttgacacaaagggacagctttcacctggatgagcaattcacagttccggtagaaatgatgcaggctaggacctatcctctgagatggtttttgctggagcaacctgagatccaggtcgcacactttccatttaagaacaatatgagctttgtagtacttgttcccactcacttcgaatggaatgtgtcacaggtgctggcaaacctctcttgggatactttgcacccccccctcgtctgggaaaggcccaccaaggtgcggctacctaagctgtacctaaagcaccagatggacctcgtcgccaccttaagccaactcggcctacaggagcttttccaggccccagatcttaggggaatttcagaacagagtcttgtggtgagcggcgtgcagcaccaatccactctggaactgtcagaggtaggggttgaagctgccgcagcaactagcatcgcaatgagtcggatgtctctgagcagtttcagcgtgaatcggcccttccttttttttatatttgaggatacaaccggccttcccctatttgtgggctcagtgcgaaaccccaacccctcggctcctagggaactgaaagagcagcaggattcaccaggtaataaggactttctccagagcctgaaggggttcccccgaggggacaaattgttcgggccagatttaaagcttgtgccaccaatggaagaggattaccctcagttcggtagcccaaag

SEQ ID NO: 18972 - DNA, 1473 bp, synthetic construct
  misc_feature 1..1473: note = source = /note="Description of Artificial Sequence: Synthetic coding sequence"
  source 1..1473: mol_type = other DNA
atggcacttctttggggacttcttgtgctgtcctggtcctgccttcagggaccctgctccgtgttttcaccggtgtcggcaatggaaccactggggagacaactgacttcaggcccaaatcaggagcaggtgtcccctctgactctgctcaagctgggtaaccaggaacctgggggacagactgctctgaagtcccctcctggagtctgtagcagagatccaaccccagaacagactcatcgactggccagagctatgatggcgttcactgcagacttgttcagccttgtggcacaaacttcgacctgcccgaacctcatactgagcccactgagcgtggcactggcacttagtcacttggccctgggtgcccaaaatcatactctgcaacggctccagcaagtgcttcacgcgggatccggaccctgcctgcctcatctgctgtcaaggctgtgtcaagatctgggtccaggcgcatttcgcctggcagcccggatgtacttgcagaaagggtttccgataaaggaagattttctggaacagtccgaacagctttttggcgcaaagccagtgagccttaccggaaagcaagaagatgaccttgcgaacatcaaccagtgggtcaaggaagcgactgaagggaaaattcaagaatttctgagcggacttccagaagataccgttctgctgcttcttaatgcaattcacttccagggtttctggcgcaacaagtttgacccttccctgacgcaaagagattcctttcacctggatgaacagttcacggtgcctgtggaaatgatgcaagcccggacctatcctcttcggtggtttctccttgagcaacctgaaatccaagtcgctcatttcccctttaagaataacatgtcctttgttgtcctggtgcctacgcattttgagtggaatgtctcccaagtgcttgccaacctctcatgggacaccctccacccgcccctggtctgggaaaggcctaccaaggtgcgattgccaaagctgtaccttaagcaccaaatggatctggtggcaaccctgtcccaacttggcctccaggaactgtttcaggcgcccgaccttcgcggaatttcagaacaatcgctggtggtgtcgggggtgcagcaccagagcaccctggaacttagcgaggtcggagtggaagcagcagccgcaacttcgatcgcgatgtcgcggatgagtctctcgtcgttctcggtcaataggcctttcctcttcttcatttttgaggacaccactggcctccctctgttcgtcggaagcgtgcgcaaccccaatccgagcgcccctagagagctgaaagaacagcaggattccccaggaaacaaggattttctccagagcctgaagggtttcccccgaggagataaacttttcggccctgatctcaagctggtgccacctatggaagaggactacccccagtttggctcgccaaag

SEQ ID NO: 18973 - DNA, 1473 bp, synthetic construct
  misc_feature 1..1473: note = source = /note="Description of Artificial Sequence: Synthetic coding sequence"
  source 1..1473: mol_type = other DNA
atggccctcctttgggggttactcgtgttatcctggtcttgcctacaggggccttgtagtgtgttcagccctgtttccgcaatggaacccctgggcaggcaactcacatctggaccaaaccaggagcaggtcagcccactgaccctgcttaagctgggaaaccaggaaccaggaggtcagacagccttaaagagccctccaggagtgtgcagtagggacccaacacccgagcagacccacaggctggctcgcgctatgatggcctttacggctgacctgtttagcttggtcgcccagacttccacctgcccaaatctaatcttgagcccactctctgtggccctcgccctctcacacctcgctttaggggcacagaaccacaccctgcagaggctgcagcaggttttgcacgctgggtccggtccttgccttccccatctgctgtcacgtctttgccaggacttgggcccgggtgcttttcgcttggctgcccggatgtacttgcagaaggggttccccattaaggaggacttcctggaacagtcagagcagctgttcggcgcaaagcccgtcagtttgactggtaaacaagaagacgacctagcaaacatcaatcagtgggtgaaagaagctactgagggaaagatccaagagttcctttccggcctgccagaagatactgtgcttttactcctaaatgcaatccatttccaggggttttggagaaataaattcgatccgtctctcactcagagggactcctttcacctggacgaacagtttacagtaccagtagaaatgatgcaagctcgtacataccccctgcggtggtttctgcttgaacagccggaaatccaagttgcccattttcccttcaagaacaatatgagctttgtcgtcctggtgccaacccattttgaatggaacgtcagtcaagtccttgctaatctgagttgggacaccctgcatcctccactggtctgggagcggcccaccaaggtccgcctgccaaagttatatttgaaacaccagatggatcttgtggccaccttaagtcagctgggcttgcaggagctgttccaggcccctgatctgcgcggcatcagcgagcagtcgctggttgtgagcggggtgcagcatcagtcgacgctggagctttcggaagtgggagtggaagcagccgctgccacctctatcgccatgtctcgcatgtccctgtcaagtttcagcgttaacaggccctttttattcttcatcttcgaggatactaccggactgcccttatttgtgggatctgtccggaacccaaaccccagtgccccaagggagctaaaagaacagcaggacagccccggcaacaaggactttttacagtccctaaagggattccctcgcggggacaaactgtttgggcctgatctgaaactcgttcctcctatggaggaggactatccacaattcgggtcaccaaag

SEQ ID NO: 18974 - DNA, 1473 bp, synthetic construct
  misc_feature 1..1473: note = source = /note="Description of Artificial Sequence: Synthetic coding sequence"
  source 1..1473: mol_type = other DNA
atggccctgttatgggggttgctagtgctgtcctggagctgtctacaggggccgtgtagtgtgttttctccagtcagtgctatggaaccgctcggacgccagttgacgtcagggcccaatcaggagcaggtgagccctctgaccctcctgaaacttgggaaccaggagccaggtggtcagacagcgcttaaatctcctcccggggtgtgctctagggatcccactccggaacagacacaccgcttggctagagcgatgatggctttcacagctgatctgttttcattggttgcccagacatctacctgtccaaacctgattctgtcacccctgagtgtggcccttgccctcagccacctggctctgggcgcacagaaccacactctacagcgcttacagcaggttctgcacgcaggctctggcccgtgcttacctcaccttttatcgagactctgccaggacctgggccccggcgcctttcgattggcggccaggatgtatctacagaaaggatttcccattaaagaggacttcttagaacagtccgagcaactgtttggcgcaaaaccagtcagcttgaccggcaagcaagaagatgatctggctaatatcaatcagtgggtgaaagaggctactgaagggaagatccaagagttcctctccggtctgccagaagatacggtgttattgttgctgaacgccattcacttccagggattttggcgtaataagttcgacccaagcctgacccaacgcgattcattccacctggacgaacaattcaccgtgccagtggagatgatgcaggcgagaacctaccctctgcgatggttcttactggagcaacccgagattcaggttgctcacttcccatttaagaataacatgtcctttgttgtgctcgtgcctactcattttgagtggaacgtcagtcaagtcctcgcaaacctttcttgggatacccttcatccacctctggtctgggagagacctaccaaggtgcggctgccaaagctatatctcaaacaccagatggacctggttgccacactgtcccaactcggacttcaggagctgtttcaagctcccgacctcaggggcatatctgagcagtctttggtggtgtctggcgtccagcaccagtccactctcgaactgagcgaggtgggtgtggaagcagctgccgccacgagtatcgcgatgagcagaatgtcactgtcttcgtttagcgtcaacagaccgtttctgttctttatcttcgaggacactaccggattgcctctctttgtcggttcagtacgtaacccgaaccctagcgccccacgagaattgaaagagcaacaggatagcccggggaacaaagatttcctgcagtcactgaaagggtttcctaggggggataaactatttggtccagacctcaaactcgtgcctccgatggaggaagattacccgcagttcgggtcccctaag

SEQ ID NO: 18975 - DNA, 1473 bp, synthetic construct
  misc_feature 1..1473: note = source = /note="Description of Artificial Sequence: Synthetic coding sequence"
  source 1..1473: mol_type = other DNA
atggccttactctgggggctgctggttctgtcatggtcttgtctgcagggcccgtgtagcgtgttctcacctgtttcagccatggaacctctgggtcgacagctgactagcggaccaaaccaggaacaggtctcccccctgacccttctaaagctcggaaaccaggaaccgggcggacagaccgccctgaaatctccacctggggtgtgtagtcgcgatcctactcccgaacagacccatcggctcgctcgcgccatgatggcctttacagcagacctgttctccctggtggcccagacatccacgtgtcccaatctgatactcagcccgctgagtgtcgccctcgctctgtcacacctggctcttggggcccagaaccataccctgcagcggttgcagcaggtcctgcacgctgggtctggcccttgcctcccccatttgctctctcgtttgtgccaggacctcgggccaggcgccttcaggctggctgcaaggatgtacctgcagaaggggtttcccatcaaggaggactttctggagcagtccgagcaattatttggcgccaagccagtaagcctcaccggaaaacaggaggacgacctggccaatatcaatcaatgggtcaaggaggcgacggagggcaaaatccaagaattcctctctggccttcccgaggatacagtccttctattgctgaacgccatccattttcagggcttttggaggaacaaattcgatcccagcttaacccagcgcgatagttttcatcttgatgaacagttcaccgtgcccgtcgagatgatgcaagctaggacctaccccttgcgctggtttctgctggaacagcctgaaattcaggtggcccattttccttttaagaataacatgagctttgtggtgctggttccaactcatttcgaatggaacgtatctcaggttctggcgaatttgtcctgggataccctacacccaccccttgtatgggaaaggcccactaaagtcaggctgcctaagttatatctcaagcaccagatggatttggtagcaacactgagccagctcggcctccaggaactgttccaggctcccgacctgcgcggcattagtgaacagagtttagtggtttccggcgtacagcatcagtccactctggagttgtccgaggtgggggtggaggcggctgccgctacatccattgccatgtcccggatgtccctgtcttccttctccgtgaataggccatttctgttctttatcttcgaggacaccaccggtctcccgctgtttgtgggaagcgtgagaaacccaaatcccagcgccccccgtgagctcaaagaacagcaggattcgcctggtaataaggatttcctgcaatcgctaaagggattccctcgcggcgacaaacttttcggccccgatctgaagttggtcccgcccatggaggaagattatccccagtttggatctccaaaa

SEQ ID NO: 18976 - DNA, 1473 bp, synthetic construct
  misc_feature 1..1473: note = source = /note="Description of Artificial Sequence: Synthetic coding sequence"
  source 1..1473: mol_type = other DNA
atggcactcctgtggggtctgttggtgctttcatggagctgtctccagggaccttgttccgtgttttcgcccgtatcggccatggaaccactcggtagacagctgacttcgggacctaaccaagagcaggtgtccccattgaccctgctgaaactgggtaatcaagaacccggtgggcagactgcacttaagtctccaccaggtgtgtgttcccgcgatcctacccccgaacagactcatagactggcacgcgccatgatggcattcacggccgatctgttcagccttgtggcacaaaccagcacctgtccaaacctcattctctcgcctcttagtgtcgccctggcattgtcccatcttgcgcttggtgcacaaaatcacaccctgcaacggctgcagcaagtccttcatgcaggatccggaccttgcctgcctcatcttcttagccgcctctgtcaagatctcgggcctggagcatttaggctcgcagcacgcatgtacctgcaaaagggatttccaataaaggaggacttcctggaacaatccgaacagctgtttggggccaaaccagtctccctgaccggtaagcaggaggacgatcttgcaaacattaaccaatgggtgaaagaagccaccgaaggaaagatccaagaattcctgtccggactccctgaggataccgtgctgcttctcctcaatgcgatacacttccaagggttctggcggaacaagttcgatccatcactcacccagcgcgactcatttcacctcgatgaacagttcaccgtgcccgtggaaatgatgcaagcacgaacctaccccctgcgctggttccttctggaacagccagagatccaagtggcacactttccgtttaagaacaacatgtcattcgtggtcctggtccctactcactttgagtggaatgtgtcacaggtcctggctaacctctcctgggataccctgcacccgccacttgtgtgggagcgcccaacgaaggtgcggctgcctaagctctacctgaaacatcagatggacctggtggcgacgctttcccaactcggtttgcaggaactctttcaggcccctgacctgcgcgggattagcgagcagtcgctggtggtttcgggggtccaacatcaaagcaccctcgagcttagcgaagtgggggtggaggcggctgccgcaacgtcgattgccatgagccgaatgagcttgtccagcttttccgtcaatagaccgtttttgtttttcatctttgaagatactaccggtttgccactttttgtgggatcagtcagaaaccctaatcccagcgcaccgagggaacttaaggagcaacaggactctccgggaaacaaagattttctccagagcctgaagggattcccaagaggtgataagctctttgggccagacctcaagctcgtgcctcctatggaagaagattacccccagtttggatcaccgaaa

SEQ ID NO: 18977 - DNA, 1473 bp, synthetic construct
  misc_feature 1..1473: note = source = /note="Description of Artificial Sequence: Synthetic coding sequence"
  source 1..1473: mol_type = other DNA
atggcccttctgtggggactgcttgtgctttcctggtcatgtctgcaagggccctgttcagtgttctccccggtgtccgcaatggagccgttggggcgccaactgacctcaggacccaatcaggaacaggtgtcaccacttactcttctcaaactgggaaatcaggaaccgggaggccaaactgcgctgaagtcccctcctggcgtctgtagcagagatccgacgcccgaacaaacccacagactggcacgggcaatgatggcattcaccgcagacctcttttctctcgtggcacagacctcgacttgccccaaccttatcctgtcgcctctgtcggtggctcttgccctgtctcacttggcccttggggcacaaaaccatactctgcaaagactgcaacaagttcttcacgcgggtagcggaccctgtctcccgcatctgctttcacgcctctgccaggatctgggtcctggagcattccgccttgcagcgcgtatgtacttgcaaaagggtttccctattaaggaagattttcttgaacaatctgaacaactcttcggagcaaagccagtctcgctgactggcaaacaagaggacgatctcgccaatatcaaccagtgggtgaaggaagccaccgaaggaaagatacaggagtttctgtcgggcctcccagaagatactgtgttgttgctgcttaacgcaatacatttccaagggttttggaggaacaagtttgacccttccctgacccagcgggactccttccatctggacgagcagtttaccgtcccagttgaaatgatgcaagctaggacgtatcctctgcgttggttccttcttgaacagcctgaaattcaggtggcacattttccatttaagaacaacatgtcatttgtggtgttggtgcctactcattttgagtggaatgtgagccaggtgttggccaacctcagctgggacacgcttcaccctcctctggtgtgggaaagacccaccaaagtgagactgccaaaactctatttgaagcatcaaatggacctcgtggcaaccttgagccagttgggcctccaagagctgttccaggctccggatttgagaggtatttccgagcagtccctggtcgtctctggtgtgcaacaccagtccacccttgaactcagcgaggtcggggtcgaggccgcagcagccacctccattgcgatgtcgaggatgagcctttcatccttcagcgtgaatcggccgttcctgttcttcatctttgaagatactactggactgcctctctttgttgggagcgtgcgaaatccaaacccttcggccccaagagaactcaaggagcaacaagactcgcccggaaacaaggattttctgcaatcccttaaaggatttcctcgcggcgataagttgtttggaccagatctgaaactcgtcccaccaatggaagaagattacccccagtttggatcgcccaag

SEQ ID NO: 18978 - DNA, 1473 bp, synthetic construct
  misc_feature 1..1473: note = source = /note="Description of Artificial Sequence: Synthetic coding sequence"
  source 1..1473: mol_type = other DNA
atggctctgttgtgggggctgctcgtactgtcctggtcatgtctccagggtccatgctcagtcttctcccctgtatccgcaatggaaccactaggtcgccagctcacgagcgggccaaaccaggagcaagtgtctcccctgactttgctcaagctagggaatcaggagcctggaggacagactgcgctgaaatctccacccggagtgtgcagccgggatcctacacccgagcagacccacagactggcccgcgctatgatggcctttacagcggatttgttctccctagtggcccagacctcaacgtgccctaacctaatcctgtctcccttgtctgtcgcactggccttatctcatcttgccctgggagcccaaaatcacaccctgcagcgcctgcagcaggtgctgcacgcggggtcggggccgtgtctgcctcacctgctctccaggctgtgccaagacctcgggcctggagccttccgtctcgctgcgagaatgtacttacaaaagggctttcccattaaggaggatttcctggagcagtctgaacagctgttcggcgcaaaaccagtcagcttgaccgggaaacaagaggacgacctcgcaaacatcaaccaatgggtaaaagaagcgacagagggcaagatacaggagtttctcagcggactgccggaggacacggttctgctgctactgaacgctatccactttcagggtttttggcgcaataagttcgaccctagcctgacacagcgtgattcatttcacttggatgaacagtttactgtgccggtcgagatgatgcaagccagaacttatccgctaaggtggttccttctggagcagcctgaaatccaggtggcgcactttccattcaagaataatatgtcttttgtggtgctggtgcccacacatttcgaatggaacgtgtcccaagtcctggcgaacctctcttgggacacgcttcacccacctctggtgtgggaacggcccactaaggtccgcctgcctaagttgtacctgaagcaccagatggacctggtggctactctgtcccagcttgggttgcaagagctgttccaggcacccgatcttcggggaatctctgagcagtcgctcgtggtttccggtgtgcagcaccagtctaccttggagctttctgaggtaggcgtggaggctgccgcggcaacatctattgcaatgtcccggatgtctctgtcttctttttcagtgaacagaccctttctatttttcatctttgaagacacaactggacttccactcttcgttggctcagttcggaaccctaacccgagcgcgccacgtgagctgaaagaacagcaagattctccgggaaacaaagattttctgcagagcctgaaagggttcccacggggtgacaagctgtttggccctgatctaaaattggttcccccaatggaagaagactacccgcagttcggtagtcctaag

SEQ ID NO: 18979 - DNA, 1473 bp, synthetic construct
  misc_feature 1..1473: note = source = /note="Description of Artificial Sequence: Synthetic coding sequence"
  source 1..1473: mol_type = other DNA
atggccctcctctggggtctgctcgtgctgtcgtggagttgccttcagggcccgtgctcggttttctcaccagtgtcggccatggaaccgttgggaaggcagctcaccagcgggcctaaccaggagcaggtgtcccccctcactctgctgaagctgggcaatcaagagcctggagggcagactgcgctcaagagcccacccggagtttgctcacgagatcccacgcccgagcagactcaccggctggcccgcgcaatgatggccttcaccgcagatctcttctcgctggtcgcccagacttctacctgtccaaacctcatcctcagccccctgtcggtcgctctcgccctctcgcatctggccctcggggcccaaaaccacacccttcagaggctgcaacaggtactgcatgccggatctggcccatgtctcccgcatctgctctcccgtttgtgtcaagatctcggcccaggagcgttccggctcgcggctagaatgtaccttcagaaaggatttcctatcaaggaggacttcctggaacaatctgagcagcttttcggagcaaagccggtcagcctgaccggaaagcaggaagatgacctggccaatatcaaccaatgggtgaaagaagctactgaaggtaagattcaggagttcctttccggacttccagaggacaccgtcttgctcctcctgaatgccatacacttccagggcttctggcggaacaagtttgacccgtccctcactcaacgcgacagcttccaccttgacgaacagttcacggtgcctgtggaaatgatgcaggcgcgaacttacccgcttcggtggtttctcctggaacagccagaaatccaagtggcccattttccatttaagaataacatgtctttcgtcgtgctggtcccgacccatttcgagtggaacgtgtcacaggtgctggcaaatctctcctgggatacccttcacccgcctctggtgtgggaacggccgaccaaggtcagactccctaagctgtacctcaaacaccaaatggacctggtcgcaactctgtcccaactcggcctgcaggaactgtttcaggcgccagaccttagaggaatctcagagcaatcactggttgtctcaggagtgcagcaccaatccacgctcgaattgagcgaagtgggagtcgaggcagccgctgccacgtcaatcgcgatgtcccggatgtcactctcgtccttttcagtgaatagaccattcctcttcttcatctttgaggacactaccggcctgcctctgttcgtgggttcggtgcgcaaccctaacccgtccgccccgcgcgaactcaaggagcaacaggactccccgggaaacaaggacttcctccagtctctgaaaggattcccgcggggcgacaaactgttcgggccggatcttaaactggtgcccccgatggaggaggactacccgcaattcggctccccgaag

SEQ ID NO: 18980 - DNA, 1473 bp, synthetic construct
  misc_feature 1..1473: note = source = /note="Description of Artificial Sequence: Synthetic coding sequence"
  source 1..1473: mol_type = other DNA
atggccctgctctggggtctcctggttctttcatggagctgtctccagggaccttgtagcgtattttctccagtgtccgcaatggagccattgggtcgacagctgactagcggcccgaaccaggaacaggttagccccctgaccctcctgaaactcggcaaccaggagccgggcggtcaaacagcccttaagtcacctccaggcgtgtgttctagagaccctacgcccgaacagacccaccgcctggcaagagcgatgatggcttttacggctgatttgttctctctcgtggcacagacatcaacttgtcctaacctaattctgagccccctaagcgttgctctcgcccttagtcacttagctcttggggcacagaaccacacactccaacggcttcaacaagtgctccacgcaggttcgggtccatgtctgccacatctgctgtctaggctgtgtcaagacctgggaccaggcgccttccgactagcagcccggatgtacttgcagaagggcttcccaatcaaggaggacttcctcgagcaatcggagcagctattcggcgctaaaccagtgtccctcaccggaaagcaggaggacgacctggccaatatcaatcagtgggttaaagaggccactgagggaaagatacaggagttcctgtctggactcccagaggatacagtgctactgctactaaacgcgatccacttccagggcttttggcgtaacaagtttgatccgtcactgacccagcgggacagcttccacctggatgagcagttcaccgttcccgtggaaatgatgcaagcacggacatacccactccgctggtttctcctagagcagccggaaattcaggttgcccatttccccttcaaaaacaatatgtcgttcgttgtcttggtgcccacccattttgagtggaacgtgtcccaagtgctcgcaaacctgtcctgggataccctgcacccccccctggtgtgggaacgacccacgaaagtgagactccctaagctttatctgaagcatcagatggacttagtggccacattatcgcagctgggactccaggaattgttccaggccccagacttgaggggtataagtgagcagtccttggtagtttccggcgtgcagcaccagagcacactggagcttagtgaggttggggtggaggctgctgctgcaacaagcatagctatgtctaggatgagcctcagctcttttagtgtgaataggcccttcctgttcttcatttttgaagacaccacaggtcttcctctttttgtgggaagtgtcaggaaccccaatccatcagcacccagggagctcaaagagcagcaggacagcccggggaataaagatttcctgcagagcctgaagggatttcctcgcggagacaagctgtttggcccagatctcaagctcgtgccacccatggaagaggactaccctcagttcgggtctcctaaa

SEQ ID NO: 18981 - DNA, 1473 bp, synthetic construct
  misc_feature 1..1473: note = source = /note="Description of Artificial Sequence: Synthetic coding sequence"
  source 1..1473: mol_type = other DNA
atggcgctcctctgggggttgctggtgctatcctggtcgtgcttacagggtccatgctccgtgttcagccccgtcagcgccatggaacctttgggaagacagttgaccagcgggcccaatcaggagcaagtgtcaccactgacgctcctgaaactgggcaatcaggaacccggcgggcagaccgctttaaaatcaccccccggcgtctgttcccgtgaccctacacccgaacagacccatagactcgctcgagcgatgatggcttttacggcagacctgttctctctggtcgctcagacgtcaacttgcccaaacttgattctcagccccctcagcgtggctctggcccttagccatctcgcccttggagctcagaaccataccctgcaaaggctgcagcaggttctgcacgccggatccggcccttgcctccctcacctcttgagcagactgtgccaggacctagggccaggcgcttttaggcttgccgcacgaatgtacctgcagaaggggttccctattaaagaagactttctggaacaatctgaacagctttttggagccaaacctgtgtcattgacaggtaagcaggaggatgacctggccaatatcaaccagtgggtgaaggaggccaccgaggggaagattcaagagttcctaagcgggctgcccgaggataccgttctcctcctgctcaacgcgatccatttccaggggttctggcgaaacaagtttgacccctccttaacccagcgtgactctttccaccttgatgagcagtttacggttccggtcgagatgatgcaggctaggacgtaccccttgcggtggtttctgcttgagcaacctgaaatacaggttgcgcattttcctttcaagaacaacatgagctttgtggtcctggtgcctactcactttgaatggaacgtgtctcaggtccttgctaacctgtcctgggacactttgcacccccccttggtgtgggagagaccgacaaaagtgcgtttgccgaaactgtacctgaagcaccagatggacctggtggcaaccctgagtcagctgggactgcaagagctgttccaggcccccgatctacgaggaattagtgagcaatcactcgtggtcagtggagttcaacatcaaagcaccctggagctgagcgaagtaggcgtcgaggccgcggctgcaacatctatcgccatgtcgagaatgtcactgtcctcattcagcgttaaccgccctttcctatttttcatcttcgaagacacgacaggtcttccgctgtttgttgggagtgtgaggaacccgaacccgagtgccccacgcgaactgaaggagcaacaggatagcccaggcaacaaggatttcctgcaaagtctgaaaggctttccacgtggcgacaagctgttcggccccgacctgaaactggtaccacccatggaggaggactaccctcagtttgggagtcccaag

SEQ ID NO: 18982 - DNA, 1473 bp, synthetic construct
  misc_feature 1..1473: note = source = /note="Description of Artificial Sequence: Synthetic coding sequence"
  source 1..1473: mol_type = other DNA
atggcattgctgtggggcctgctggtgctgtcctggagttgcctgcaggggccttgctccgtgttcagtcctgtttcagccatggaacccctgggtaggcagctgacttcaggtcccaaccaggaacaggtttctcccctgacactactgaagctgggaaaccaagagccagggggccagaccgcattgaagtctccaccaggggtgtgttcaagagaccccacgccagaacagacacatcgcctggcccgggccatgatggcatttactgcggatctgttctcactggtggcccagacctccacctgtcctaatctcatattgtcaccgctctctgttgctcttgctctgtcacaccttgctttgggcgcacagaaccacaccttgcagcgcttacagcaggttctacacgctggctcaggcccctgtctcccacacctactgagccgattgtgtcaggacctggggccaggcgcgttccgcttggccgcccgtatgtacctgcagaagggcttccctataaaggaagacttcctggaacagtctgagcagctgttcggcgctaagcccgtctccctcactggcaaacaggaggacgatctcgcaaacatcaatcagtgggtcaaggaagcgactgaagggaaaatccaggagtttttaagcggactaccagaagatacagtgctcttacttttgaatgccatccattttcaggggttctggaggaataaatttgatccctccctgactcagagggattcattccaccttgatgagcagtttaccgtcccagttgaaatgatgcaggctaggacctatcctttgagatggttcctgctggaacagcctgagattcaggtagctcactttcccttcaagaataatatgagctttgttgtactggtacccactcatttcgaatggaatgtctctcaggtgttagcgaatctttcctgggatacgttgcatccacccctagtgtgggaaagaccaactaaggtgagactcccaaagctgtacctgaaacaccagatggatctggtagccaccttgtcccagttaggactgcaggaattgtttcaagctcccgacttgcgcggaatctctgagcagtcattagtggtgtccggcgtgcagcaccagagcacactggaattgagtgaagtgggggttgaagccgccgccgcaaccagcatcgcaatgtcaaggatgtccttgtcatccttcagcgtgaacaggccgtttctttttttcatattcgaggacaccacagggctcccattgttcgtgggctcagtgcggaaccctaacccttcagcccctagggagttaaaggagcagcaggacagcccagggaataaggacttccttcagagccttaaaggattccctcgaggcgataagttgtttggaccggatctaaaacttgtgccacctatggaagaagattacccacagtttggaagcccgaag

SEQ ID NO: 18983 - DNA, 1473 bp, synthetic construct
  misc_feature 1..1473: note = source = /note="Description of Artificial Sequence: Synthetic coding sequence"
  source 1..1473: mol_type = other DNA
atggcacttctgtggggcctgctcgtgctttcctggtcatgcttgcagggtccttgcagcgtctttagccccgtgtccgcaatggaaccacttggtagacagctgacttcgggaccaaaccaagaacaagtttcccctcttactcttctcaagctcggtaaccaggaacctggtggccagaccgccttgaagtcaccacccggggtctgttcgcgcgatcccacccctgagcaaactcatcggcttgcacgcgccatgatggcattcaccgcagatctcttttcccttgtggcccaaacctctacctgtccaaaccttatacttagcccactctccgtggcactggcactttcccacctggcgctcggggcccaaaaccataccctgcaacgccttcaacaagtcctccatgctggttcaggaccttgtttgccacatctgttgtcgagactttgtcaagacctgggcccgggagcctttcgcctcgcggcaaggatgtacctgcaaaaagggttccccataaaggaagatttcttggaacagagcgaacagctgtttggagctaagccggtgtcgctgaccggaaagcaggaggacgatctggcgaacataaatcagtgggtcaaggaggcaacggaaggcaaaattcaagagtttcttagtgggcttcctgaggatacggtgctgctgctcctgaatgcaatccacttccaaggcttttggagaaacaaattcgatccttcccttacccagcgggatagcttccacctggatgaacagtttaccgtgcctgtcgagatgatgcaagcaaggacttacccactccgttggtttctgcttgaacaacctgaaatacaggttgctcatttcccttttaagaacaacatgtcatttgtcgttctcgtcccgactcatttcgagtggaatgtgtcgcaagtgcttgcaaatttgtcctgggacacccttcatcctcccctggtgtgggaaaggcctactaaggtgcgtctgcccaaactttaccttaaacatcaaatggacctggtcgcgacgctttcccagttgggacttcaagagctcttccaagcacctgatctgaggggaatttccgaacaaagcctggtggtcagcggagtgcagcatcaaagcactctcgagcttagcgaagtcggagttgaagctgcagccgccacttcgatcgcaatgtccagaatgagcttgagctccttttctgtgaaccggccttttctgttctttatctttgaggacaccactgggcttccactttttgttggatccgtgaggaacccgaacccctcggcgcccagagaactgaaggagcaacaagactcgccagggaataaagattttcttcaaagccttaaagggttcccgcgcggagacaagctgtttggccccgatctgaagttggtgccgccaatggaagaggattaccctcagtttggctctccaaaa

SEQ ID NO: 18984 - DNA, 1473 bp, synthetic construct
  misc_feature 1..1473: note = source = /note="Description of Artificial Sequence: Synthetic coding sequence"
  source 1..1473: mol_type = other DNA
atggccctactgtgggggcttttagtgctgtcctggagctgtctgcagggtccatgcagcgtgtttagccctgtgagtgcaatggagcctttgggcagacagttgactagcggcccgaatcaggagcaggtttccccactgaccttgcttaagttggggaatcaggaacctgggggccagaccgcccttaagagcccccccggggtgtgtagcagagatcctacccctgagcagacgcaccgcctggccagggctatgatggccttcaccgcagaccttttttcactggtcgcgcagacctcaacatgcccaaacctgatcctgtcgccgctttctgttgccctcgcccttagtcatctggcactgggcgcgcaaaatcacactcttcaacgactgcagcaagtattgcatgccgggtcaggcccctgtctgcctcacttactttctagattatgtcaggatctggggccgggtgcctttagactcgccgctcgaatgtacctgcaaaaagggttccccatcaaagaagactttctggaacagtccgaacagctatttggcgccaagcccgtgtccttaacaggaaaacaggaggacgatctcgcaaacatcaatcagtgggtgaaggaggcaactgaaggaaaaattcaggaattcctgtccggcctcccagaagatacggtcctcctgctgctgaacgcaatccattttcaggggttctggcggaataagttcgacccttctcttacacagcgagactcgtttcaccttgatgagcagtttaccgtgcccgtcgagatgatgcaggcccgcacctacccattgcggtggtttctattggagcaacctgagattcaagtagcccattttccatttaaaaacaacatgagctttgtggtgcttgtgcccacccacttcgagtggaatgtttcccaggtactggccaatctctcttgggatacattgcatcccccactggtctgggagcggccaacaaaggtgcggttacctaagttgtacctaaaacatcaaatggatctggtggccacgctttcccagctcgggttgcaggagctgttccaggcgccagacttacgcggcatctccgagcagagcctggttgtgtccggggttcaacatcagtccactctggagttgagcgaggtgggggtggaagctgcagccgcgaccagcattgccatgtcccggatgagtttaagcagtttctctgttaacagacctttcctcttctttatcttcgaggatacaaccggtctccctctcttcgtcggcagtgttagaaatcctaatcctagcgcccctagggagttaaaagaacagcaggattctccaggtaataaggactttttgcagtctctgaagggctttccccggggcgacaaactctttggccccgacttaaaattggtaccacccatggaagaagactaccctcaatttgggtcacccaaa

SEQ ID NO: 18985 - DNA, 1473 bp, synthetic construct
  misc_feature 1..1473: note = source = /note="Description of Artificial Sequence: Synthetic coding sequence"
  source 1..1473: mol_type = other DNA
atggcactgctctgggggctgttggtgctctcttggagctgtcttcagggaccgtgcagtgttttcagcccggtatccgccatggaacctctcggcaggcagttaaccagcggcccgaatcaggaacaggtgagtcctctaacgctgctgaaactcggcaaccaggagccaggcggccagaccgcccttaagtctccccccggagtgtgtagcagggacccaaccccggaacaaactcataggctggcacgcgccatgatggcatttaccgccgacctctttagcctcgtggcacagacaagcacatgtccaaaccttatcctatctcccttatccgttgccctggcccttagccatctggcactgggcgctcaaaatcacactctccagcgtctccaacaagtgctccacgccggttctggcccttgtctacctcacctgctgtctcgcttatgccaggacctgggccctggagcctttcggctggcagcccgtatgtatctacagaaggggtttcccattaaggaggacttcctggagcaatccgagcaattgttcggggcgaagccggtttctttgaccggcaagcaggaggacgatctcgctaacataaaccagtgggtgaaggaggctaccgaaggcaagatccaggagtttctgtccggccttccagaggatacagtacttcttcttctgaacgcgatccacttccagggattttggcgcaacaagtttgacccttccttaacccagcgagacagctttcacctcgatgaacaatttacagtgccagttgaaatgatgcaggcgaggacttaccccctgaggtggttcctcctggagcagccagaaatccaggtggcccattttccgttcaagaacaacatgagctttgtcgtcctggtgccaacgcatttcgagtggaatgtctcacaagtgcttgccaatctctcctgggatactctgcacccacccctggtttgggaacggccgaccaaagtgaggctgcctaaattatatctgaaacaccagatggacctagtggctactctatctcagcttgggcttcaggagctgtttcaagcccctgatctgcgtgggattagcgaacagtcactcgtagtgtctggtgtgcaacatcaatccaccctagagctctccgaagtcggcgtagaggccgcagccgccacatccatagcaatgtcgcggatgtccttatcaagcttctccgtgaatcgtccgttcctgttcttcatcttcgaggacaccacaggcctgccactgtttgtgggaagtgtccgtaacccgaatccctcagccccaagggagctaaaggaacagcaggatagccctgggaacaaggacttcctgcagtctttaaaggggttccctaggggggacaagctattcggacctgacctcaaactggtgcctcctatggaggaagactacccacagttcggttcacccaag

SEQ ID NO: 18986 - DNA, 1473 bp, synthetic construct
  misc_feature 1..1473: note = source = /note="Description of Artificial Sequence: Synthetic coding sequence"
  source 1..1473: mol_type = other DNA
atggccctgctctggggcctgctggtgctgtcgtggagctgtctccagggcccttgtagtgtgttttcacctgtttccgctatggagcctttgggcagacagctaacctccggtcccaatcaggaacaggtgtcgcctctcaccttgttgaagctggggaaccaggagcctggcgggcagactgcactgaagtcaccccccggtgtgtgttcccgggatccaaccccagaacagacacaccggcttgcgagagcgatgatggcatttacggctgatctgttctctttggtcgctcagacctcaacttgccccaacttaatcctgtccccacttagtgttgctctggctttaagccatctggctctgggagcgcaaaatcacacacttcagcgcttgcagcaagtgctgcatgctggatccgggccatgtttgccgcaccttctttctcgactgtgtcaggacctagggcctggcgcatttcgcttggctgcaaggatgtacctgcagaaagggtttcccatcaaagaagattttctggagcagtccgaacaactgtttggcgctaagcccgtttcactaaccggtaaacaggaagacgacctggctaacatcaatcagtgggtgaaagaggccactgaaggcaaaatccaggagttcctgtctgggctgccagaggatacagtcctgctgctgctgaatgccatacacttccagggattctggaggaacaaatttgacccatccctgacccaaagagacagcttccacttggacgagcagtttacagtgcctgtcgagatgatgcaagcgcgcacttaccccctgagatggtttctcttggaacagcccgaaattcaggtggcccacttccccttcaaaaacaacatgagttttgtagtgctcgtgcccacccattttgagtggaatgtgtctcaggttctcgcaaacctgtcgtgggacactcttcatccccccctcgtgtgggaaagacctactaaagtgaggctgcccaagttgtatctgaagcaccagatggacttagtggccactctgagtcagctgggccttcaggaactgtttcaggcgccagacctgcgcggaatcagcgagcagagtctggtggtgtccggggtccagcaccagagcaccttggagctgtccgaagtgggcgtggaggcggctgcagcaacaagcatcgcgatgagccggatgtctctgagcagttttagcgttaatcgcccatttctatttttcatttttgaggacacaacaggccttccactgtttgtgggtagcgtccgtaaccccaatccatctgccccccgggagctgaaggaacagcaggattctccggggaacaaggacttcctgcagtctctgaagggattccccagaggtgataagctgttcgggcccgatctgaagcttgttcctcctatggaggaggattatccccagtttggaagccctaaa

SEQ ID NO: 18987 - DNA, 1473 bp, synthetic construct
  misc_feature 1..1473: note = source = /note="Description of Artificial Sequence: Synthetic coding sequence"
  source 1..1473: mol_type = other DNA
atggcactgctttggggcctgctggtcctctcatggtcctgcttgcaaggtccgtgctcggtgttctcgcctgtttccgcgatggaaccattgggacgtcagctgacttcaggcccgaatcaggaacaggtgtccccattgaccctgctgaaactcggaaatcaggaaccaggggggcagaccgctttgaagtcgccgccgggcgtttgcagccgggacccaaccccagaacagacgcatcgcctggccagggccatgatggccttcacggcggacctgtttagcctggtcgcccagaccagcacttgccccaatttgatcctgtcgcctctctccgtggccctggcactctcccacctcgcactcggtgcccaaaatcacacgcttcagcgactccagcaagtgctgcacgcaggatccgggccatgtctgccgcacctgttgtctaggctctgtcaggatctgggacctggggccttcagacttgcggcacgcatgtatctgcagaaaggattcccaatcaaagaggacttccttgagcaatccgagcagctgttcggtgcgaagccggtttcacttactggaaagcaagaagatgatctggcgaacattaaccagtgggtgaaggaagccaccgaaggaaagatccaagagttcctgtcgggactgccagaggacacggtgctgctgcttctcaacgccatccactttcaaggcttctggcggaacaaatttgatccgagcttgacccaacgcgacagcttccacctcgacgaacaattcactgtgccggtcgaaatgatgcaggctaggacctacccgctccggtggttcctgttggagcagccagaaatccaagtcgctcattttccgttcaagaacaacatgagctttgtcgttctggtgcccacccatttcgagtggaatgtgtctcaagtcctggccaatctgtcctgggacactctgcatccaccgctcgtgtgggagaggccaactaaagtgcggctccctaaactctacctcaagcatcaaatggatctggtggccactctgtctcaactgggactccaagagctgttccaggcgccggacttgcggggaatctcggaacagtctttggtcgtgtcaggcgtgcaacaccagtccacccttgaacttagcgaagtgggagtcgaagcagcggcggccacctcaattgcaatgtctcggatgtcgctgtcctcattctcagtcaaccgccctttcctgtttttcatcttcgaggataccacgggactgcccctcttcgtgggcagcgtgcgcaaccctaacccgagcgcaccgcgagagcttaaggagcagcaggactcgccgggaaacaaggacttcctgcagtctttgaagggatttcccagaggcgataagctgttcggacccgatctgaagctggtgccgcctatggaagaggactacccgcagtttggttccccgaag

SEQ ID NO: 18988 - DNA, 1473 bp, synthetic construct
  misc_feature 1..1473: note = source = /note="Description of Artificial Sequence: Synthetic coding sequence"
  source 1..1473: mol_type = other DNA
atggcactgctgtggggattactcgttctaagttggagctgcctgcagggcccctgtagcgtgttcagccccgtgagcgcaatggaacctctcggcaggcagttgaccagtggacctaatcaagagcaggtatcaccattgactttactgaaactgggcaaccaggagcctggcggccagacagctctgaaaagtcctccaggagtgtgtagccgggatcccacccccgagcagacccacagactggctagagctatgatggcttttacagccgatctgttttccctggtggctcaaaccagcacctgccctaatctcatcttgtctcccttgtcagtagccctggcactgagtcacctggccctgggagcccagaatcacacacttcaaaggctacagcaggtcctacacgccggctccggcccatgcctcccacacctgctatctcgcctgtgtcaggatctgggaccaggggccttcaggcttgcagctcgcatgtacctccagaagggttttcccatcaaagaagatttcctagagcaatctgaacagctgttcggggccaaacctgtgtctctaactgggaagcaagaggacgacctagctaatatcaaccaatgggtgaaagaggctaccgaggggaagatccaggagttcctgtccggcctgcccgaagacaccgtcctgctcctgctgaatgccatacatttccagggtttttggcggaacaagttcgaccccagtctgacccagcgggacagcttccacctggatgagcagttcacagtgccagtagaaatgatgcaggctcggacatatcctctcaggtggtttctactcgagcaaccagaaatccaggtggcacacttccctttcaagaataatatgtcttttgtcgtgctagtgccaacccacttcgaatggaatgtctcccaggtgttagctaacctgtcttgggatacattacaccctcctctggtgtgggaacgcccgactaaggtccggctgcccaagttatatttgaaacatcagatggatctggtggccactctgtcccagctgggccttcaggaactatttcaggccccggacctaaggggaatctccgagcagtctttggttgtaagcggcgttcagcatcagtcaacccttgagctgtctgaggttggggtggaagccgcagctgccacttcaatagccatgtccaggatgagtctctcttcattttctgtgaacagacccttcctgtttttcatttttgaggacaccacagggttacccttgtttgttggttctgtgcggaatccaaaccccagcgccccacgggaactaaaagaacaacaggactctcctggaaataaagacttcttgcaaagtctgaaaggtttcccacgtggagataaactgtttgggccagacttaaaacttgtgccacctatggaagaggactatcctcagttcggatctcccaag

SEQ ID NO: 18989 - DNA, 1473 bp, synthetic construct
  misc_feature 1..1473: note = source = /note="Description of Artificial Sequence: Synthetic coding sequence"
  source 1..1473: mol_type = other DNA
atggccttattatggggtctgcttgtattatcttggtcctgtctacagggtccctgtagtgttttttccccagtgagcgccatggagcctcttggacggcagctgacttcagggcccaaccaagagcaggtttcaccgctcacattactgaaactgggaaatcaggaaccggggggacagaccgccttgaagtccccacccggcgtgtgcagccgcgaccccactcccgagcagacccaccggcttgctagggccatgatggcattcacggcggacctcttctctctggttgctcagacgtcaacttgcccaaatttgatcttgagcccgctatccgttgccctggctttgagccacttggcactcggggcccagaatcataccctccagagacttcaacaggtgctccatgcaggatccgggccctgtctgcctcatctgctctcaagactatgccaggatctagggcctggggccttcaggctcgcagcacgaatgtacctgcaaaagggtttccccatcaaggaagacttcctcgaacagtccgaacagctcttcggggctaagccggtgagcttgactggtaagcaggaggacgatttagccaatattaatcaatgggtcaaggaggctactgagggtaagattcaggaatttctgagcgggctccctgaggatactgtgctgctgctgctgaacgccatccactttcaaggattttggcgaaacaaattcgacccttcactgactcagcgcgattccttccacttggatgagcagttcacggttcctgtagagatgatgcaagctcgcacttatccactgaggtggtttctgttagagcagcctgagattcaggttgcacactttccattcaaaaataacatgagtttcgtcgtgttggtccctacgcacttcgagtggaatgtatcgcaggtcctggctaacctgtcttgggacactctccacccgcccctagtctgggaaagaccaactaaagtccgcctcccaaaactgtacttgaaacaccagatggacctcgtggcaaccctgtctcaattggggctgcaggaactgttccaggcacccgatcttagagggatttctgagcaatcgttggtcgtgtctggtgtgcaacatcagagtacactggagctgtcggaagtcggggtcgaggccgctgctgctacatctatcgccatgagtcggatgagtctatccagtttcagcgttaacaggccctttcttttcttcatctttgaggatactacgggacttcctctcttcgtgggaagcgtgcgcaatccgaacccgtcagctccgcgcgaactaaaagagcagcaagattctcctggaaataaggacttcttgcagtccttgaaaggcttcccccgaggtgacaagttatttggtccagatttgaagctcgtccccccaatggaagaggactaccctcaatttggttcccctaaa

SEQ ID NO: 18990 - DNA, 1473 bp, synthetic construct
  misc_feature 1..1473: note = source = /note="Description of Artificial Sequence: Synthetic coding sequence"
  source 1..1473: mol_type = other DNA
atggcgctcctgtggggtctgctggtgctgagctggtcatgccttcagggtccttgttcggttttctccccagtgagtgcaatggaaccgctgggtaggcaactcacttccggacctaaccaggaacaagtgtcgccccttacccttttgaagctcggaaaccaagaaccagggggccaaactgcactcaagtcccctcctggggtgtgctcgcgggatccaaccccagagcagacccacagactcgctagagcgatgatggcgtttacggccgatctctttagccttgtcgcacagacgtcaacctgccccaatctgattctcagcccactttccgtcgcccttgccctgagccatctggcgcttggagcgcaaaatcacactctgcaacggctccagcaggtgctccatgcaggatccggcccttgcctgcctcacttgctgtcgagactgtgtcaggatctcggccctggtgcgtttcgcctggccgcacgcatgtacctccagaaagggttcccgatcaaagaggatttcttggagcaaagcgaacagctgtttggagccaaaccagtgtctcttactggcaagcaagaagatgacctcgcaaacatcaaccaatgggtgaaggaagccaccgaagggaagattcaagaatttctcagcggcttgcctgaggacactgtgttgcttcttcttaacgcaatccattttcagggtttttggaggaacaaattcgacccatccctgacgcagagagattcatttcacttggatgagcaatttaccgtgcctgtggagatgatgcaagcacgaacctacccactgcgatggtttctgcttgaacagccagagattcaggtcgcacattttccgtttaagaacaatatgtcctttgttgtactggtgcctactcatttcgagtggaatgtctctcaagtccttgccaacctttcatgggacacccttcacccccctctcgtgtgggaaagacctactaaggtgcgcctgcctaaattgtacctcaagcatcaaatggatctggtggcgacgctctcgcagcttgggcttcaagaactctttcaagctcctgatctgcggggaatttccgaacaaagcctggtggtgagcggcgtgcagcatcaatcgaccctcgaattgtctgaagtaggggtcgaagcagcggctgcaacttccatagcaatgtcgcgcatgtcgctttcgtccttctccgtcaatagacctttcctgttcttcatctttgaagataccacgggactgcctctgttcgtgggaagcgtgcggaacccgaatcctagcgcccccagagagctcaaagaacaacaggactcgccagggaataaggacttcttgcagtcgcttaaaggttttccgagaggtgataaacttttcggacctgatctgaagttggtccctcctatggaagaggattacccacaatttgggtcaccaaag

SEQ ID NO: 18991 - DNA, 1473 bp, synthetic construct
  misc_feature 1..1473: note = source = /note="Description of Artificial Sequence: Synthetic coding sequence"
  source 1..1473: mol_type = other DNA
atggctttgctatggggattgttagttctcagctggtcttgtctgcaaggaccatgttcagtgtttagtccagtctcggccatggaaccacttggaagacaattgacgtcgggcccaaatcaagagcaagtttctccactaacattgctgaaactcggaaatcaagaaccgggaggacaaactgctttgaaatctcctcctggagtttgttcccgagatccaacaccggaacaaactcatagactagcacgtgcaatgatggcttttacggcggacctgtttagtttggttgcccagacttcgacatgtcctaatttgatcttatctccgttatctgtagcattagcgttgagtcaccttgctttaggtgcccaaaatcatactctccaacgtttacagcaagtcttacacgccggatcaggaccatgtctgcctcacctcttatcacgtctctgtcaggacttgggcccaggagccttccgattggctgcaaggatgtacctacaaaagggattcccaattaaggaggacttcttggagcaatctgagcagctctttggagcaaagcctgtctcactcacagggaagcaagaggatgatctagcaaatattaatcagtgggtcaaagaagctacagaaggaaaaattcaggagttcctaagtggactcccagaagataccgttcttctcttgttgaatgcaatccatttccaagggttttggagaaataagttcgatccttcacttacccaaagagacagctttcacctagatgaacaattcacagtcccagttgaaatgatgcaagcaaggacatatccgcttcggtggttcctcctagaacagcctgaaattcaagtcgcacattttccatttaagaataatatgtcattcgtcgtccttgtaccgacacatttcgaatggaacgtgtcacaggtgcttgccaatttgagctgggatactctgcacccgcctttggtttgggaaagacctacgaaagtacgcttgcctaaactctatctcaagcaccaaatggacctggtcgcgactttatcccaactcggtttgcaagaactcttccaagccccagatttgagaggtatctcagaacagagtcttgttgtgtctggagttcagcatcaaagcactctagagcttagtgaagtgggtgtggaagccgcagctgcgacgtcaatcgctatgagtcgaatgtccctatcatcattcagtgtgaaccgaccgtttctgttcttcatttttgaagacacgactggcttgccactatttgtcggatctgttcggaatccaaatccgtcagcaccgcgtgagcttaaagagcaacaagatagtcccggaaataaagacttcttgcagtctttaaaaggttttccaaggggagataagctcttcggaccagatctaaagctggttccacctatggaagaagattatccacagtttggtagtcctaaa

SEQ ID NO: 18992 - DNA, 1473 bp, synthetic construct
  misc_feature 1..1473: note = source = /note="Description of Artificial Sequence: Synthetic coding sequence"
  source 1..1473: mol_type = other DNA
atggccctgctgtgggggctacttgtgctttcctggagttgccttcagggtccatgtagtgttttttctcctgtgtccgccatggaaccgctgggccgacagctgacatctggccccaatcaggagcaggtcagtccgctcaccctgctgaagctgggaaatcaggagcccgggggacaaacagcactaaaatccccgccaggggtatgttccagggacccgactcccgagcagacccatcggctggcacgggccatgatggcctttactgcagacctgttctctctggtcgcccagacctccacttgtcctaacttgattctatcaccactgtccgtggcgttggctctgagccatttggctctaggcgcccagaaccacacactgcagcgactccagcaagtattacacgctggatcgggaccttgtttacctcacctcctctcccggctctgtcaggacctggggccaggagccttcagactggccgctagaatgtacctccagaaggggtttcctatcaaggaagactttttagagcagtccgagcagttgttcggggccaagcccgtgtcgctgacggggaagcaggaggatgacctggccaatattaatcagtgggtgaaggaagcaactgaaggcaaaatccaagagtttctgagcggccttccggaggatactgtgctactcttactcaacgctatacactttcagggattttggcggaacaagtttgacccctcccttacacaacgggacagctttcatctggatgagcagtttaccgtcccagtagagatgatgcaggcaagaacataccctctccggtggtttctgcttgagcaacctgaaatccaagtcgcccattttccattcaaaaacaatatgtcatttgttgtgttagttcccactcacttcgaatggaacgtatcccaggtactggcaaacctctcatgggatacccttcatccacctctagtatgggaaagacccacgaaggttagactgccaaagctctatctgaagcatcagatggacttggttgcaacactgtcccaactcgggttgcaggaattgtttcaggctccagatctgagggggatctcggagcagtccttggtggtatctggagtgcagcatcagagcacgctggagctttctgaagtgggcgtggaagccgcagccgctaccagcatcgctatgtctcggatgtcgttgtcaagtttctcggttaaccgcccctttctcttttttatcttcgaggatacaaccgggctccctctatttgtgggctccgtgcgcaatccaaatccgtcagcccctcgcgagctgaaggagcaacaggacagtcccggaaataaggacttcttgcaatctctcaagggcttcccaaggggtgacaagctattcggtcctgacttgaagctggtgcctcctatggaggaggactacccacaatttggcagtcccaag

SEQ ID NO: 18993 - DNA, 1473 bp, synthetic construct
  misc_feature 1..1473: note = source = /note="Description of Artificial Sequence: Synthetic coding sequence"
  source 1..1473: mol_type = other DNA
atggctttgctttgggggctcctcgttctttcatggtcttgtctccaagggccttgttctgtgttttccccagtaagtgccatggaaccgttgggccgtcaacttacctctggtcctaaccaagagcaggtcagccctcttacacttcttaaacttggaaatcaggaacctggaggtcaaacagcattgaaatcccctcccggcgtttgtagtcgcgatcctaccccagaacagacccaccgacttgcccgtgctatgatggcattcaccgccgatttgtttagtttggttgctcaaacttccacctgccctaatttgattctctctcccttgtctgtagctcttgcattgagccatcttgcattaggtgctcaaaatcacacactccaaaggttacaacaagttttgcatgctggttctggcccttgtctcccccaccttcttagccgactttgtcaagacttggggcccggagcgttcagattagcagcaaggatgtacttgcagaaaggctttcctattaaggaagattttctggagcagtccgaacaacttttcggcgccaagcctgtgtctctcacaggcaagcaggaagatgatcttgccaatattaatcagtgggtgaaggaagcaacagagggcaagattcaagaattcttgtcgggcttgccagaagacacggttcttctccttctaaacgctatccattttcagggattctggaggaataaattcgatccgtcattgacacagagagattctttccatttagacgaacagtttaccgttcccgttgaaatgatgcaagctaggacctatccattgcgatggttccttttggaacaacctgagattcaggtcgctcatttcccgttcaagaacaatatgagttttgtggttctagttcctacccattttgaatggaacgttagtcaggttttggcgaatctctcttgggacactttacatccaccactggtttgggaacgtccaactaaggttaggctcccaaaattgtatctcaagcatcaaatggatcttgtagctactctttcgcaacttgggctccaagagctctttcaggcacctgatttaagaggaatttccgaacaatcccttgtcgtctccggtgtccagcaccaatccaccctcgaactctctgaagttggagttgaagctgcggctgccacatccatcgctatgtcacggatgagcctgtcatccttctctgttaatcgtcccttcctgttctttatttttgaggacactactggcctgcctctttttgtaggttcagtgcgcaaccccaatcccagcgctccacgtgaattgaaggagcagcaagacagccccggaaacaaggatttcctgcagtctctcaagggattcccaagaggcgataagttgtttggacctgatttgaagttggtacccccaatggaggaggattatccacaatttggttcaccaaag

SEQ ID NO: 18994 - DNA, 1473 bp, synthetic construct
  misc_feature 1..1473: note = source = /note="Description of Artificial Sequence: Synthetic coding sequence"
  source 1..1473: mol_type = other DNA
atggccctcctctggggcttgctggtcttgtcatggtcctgtctccagggcccatgctcagtcttttccccagtgtcggctatggagccgctgggacggcagctgacctcgggccctaatcaggaacaggtgtcccctctcaccctgctgaaactgggtaaccaagaaccggggggccaaactgccttgaagtcgcctcccggagtctgctcgcgcgatccgactcccgaacagactcataggcttgctcgtgccatgatggctttcactgcagatctgttctccctcgtggcccaaacttcaacctgtccgaacctcattctgtcgccgctgagcgtcgccctggcgctgagccatctcgcgctcggagcccagaaccataccctccagcgcctccaacaggtcctgcacgccggcagcggaccttgccttcctcacctcctgagccggctgtgccaggacctgggcccgggcgcattccgcttggcggccagaatgtacctgcagaagggattcccgatcaaggaggacttcctggaacagtcggagcagttgttcggcgcaaaaccggtgtcgttgactggtaagcaggaagatgacctggctaacatcaaccagtgggtcaaagaggcgactgaaggaaaaatccaggagttcctttcgggcctcccagaggacaccgtgctgctgcttctgaacgcgatccacttccaaggattctggcggaataagttcgacccttccctcacccagcgcgactccttccacctggacgaacagtttaccgtgcccgtggagatgatgcaggctaggacttacccgctccgctggttcctgctggagcaacccgaaatccaggtggcacacttcccttttaagaacaacatgagcttcgtggtgctggtgccaacccatttcgagtggaacgtgagccaagtcctggccaacctcagctgggatactctccatccgcccctcgtgtgggaaaggcctacgaaggtgcgccttccgaagctctacctgaagcaccagatggacctggtcgccactctgagccagctgggactgcaagaactcttccaagccccagacctcaggggcatctcagagcagtccctggtggtgtccggagtccagcatcaaagcaccctggagctgtcggaagtgggcgtggaggcggctgccgctacgagcatcgcgatgtcaagaatgtcgctgtcatcattctcagtgaatcggccttttctgttcttcattttcgaagatactactggactgccgctcttcgtcggcagcgtgcgcaaccccaacccttccgccccgagagaactgaaagagcagcaagactcgccgggcaataaggacttcctgcagtcacttaaaggattcccccgcggagataaactttttggcccagacctgaagctggtgcctccaatggaagaggattacccgcagttcggatcacccaaa

SEQ ID NO: 18995 - DNA, 1473 bp, synthetic construct
  misc_feature 1..1473: note = source = /note="Description of Artificial Sequence: Synthetic coding sequence"
  source 1..1473: mol_type = other DNA
atggccttactttggggacttttagttttatcatggtcatgtttacaaggaccatgttcagttttctcaccagtttctgctatggaaccacttggtagacaacttacttcaggacctaatcaagaacaagttagtccacttactttattaaaattaggaaatcaagagccaggaggacaaacagctttaaaaagcccaccaggtgtatgttcaagagatccaactcctgaacaaactcataggcttgcaagggcaatgatggcttttactgcagatcttttttctttagtagctcaaactagtacttgtccaaatcttattttatcaccattatcagttgcattggcattatctcatcttgcacttggagcacaaaatcatacgttgcaaagattacaacaagtattacatgctggaagtggaccatgtttaccacatttgctatcaagattatgtcaagatttaggaccaggagcatttcgtttagcagcaagaatgtatctacaaaagggatttccaatcaaagaagattttcttgaacaatctgaacaattatttggtgctaagcctgtaagtttaacaggtaaacaagaagatgatttagcaaatattaatcaatgggtaaaagaagcaacagaaggaaagattcaagaatttcttagcggtttacctgaagatacagttcttttgttattaaatgcaattcattttcaaggattctggcgaaataaattcgatcctagtcttactcaaagagatagttttcatcttgacgaacaatttacagtaccagttgaaatgatgcaagcaagaacttatccattaagatggtttttacttgaacaaccagaaattcaagttgcacatttcccattcaagaataatatgtcatttgttgttttggttccaactcattttgaatggaatgtctcacaagtattagcaaatttatcatgggatactttacatccaccacttgtttgggaaagaccaactaaagttagattaccaaaattatatcttaaacatcaaatggatctcgtagctacattatcacaacttggtcttcaagaactttttcaagcacctgatcttaggggaatttcagaacagtctcttgtcgtatctggagttcaacatcaatcaactcttgaattatcagaagttggagttgaagccgcagccgctactagtatagcaatgtcaagaatgagtttatcttcattttctgttaatagaccatttttattttttattttcgaagacactacaggactaccattgttcgtaggatcagtacgaaatccaaatccaagtgcacctagagagttaaaagaacaacaagattcaccaggaaataaggattttttacaatcattaaaaggattcccaagaggagataagttatttgggccagatctaaaacttgttccacctatggaagaggattatccacaatttggaagtccaaaa

SEQ ID NO: 18996 - DNA, 1473 bp, synthetic construct
  misc_feature 1..1473: note = source = /note="Description of Artificial Sequence: Synthetic coding sequence"
  source 1..1473: mol_type = other DNA
atggcactcttgtggggactgcttgtcctcagctggtcctgccttcaaggaccctgttctgtgttctcccccgtttccgccatggagccactcggacgccagctgaccagcggtcccaaccaggaacaagtgagcccgctgacccttctgaagctcggaaaccaagaacccggcggacagactgcgcttaagtcgccaccaggagtctgctccagggatccaacccccgaacagactcatagactggcacgtgctatgatggccttcaccgcagatctgttttcgttggtggcccagacctcgacttgtcctaaccttattctttcgcctctttccgtggcactggcactgtctcatcttgctcttggtgcccagaaccataccctgcaacgacttcagcaggtgctgcatgcggggtccggaccatgtctgcctcatttgcttagccgcctgtgccaggatcttggacctggggcattcagactcgcggcgcgaatgtacctgcaaaaggggttccctatcaaagaagattttctcgagcagagcgagcagttgttcggtgcaaagcctgtctcgctgaccggcaagcaagaagatgatctggccaacattaaccagtgggtgaaggaggcaaccgaagggaagattcaggagtttctttcgggactgcctgaagataccgtcctgctgcttctgaatgccattcatttccagggattctggcgtaataagttcgacccgtccctgactcaaagagacagttttcatctcgatgaacagtttaccgtgcctgtggaaatgatgcaggcaagaacttatccactccgatggttcctgcttgaacaacctgaaatccaagtcgcccattttccatttaagaacaatatgtccttcgtggtgctggtgccaacgcatttcgagtggaacgtttcgcaagtgctggcaaacctgtcgtgggatactcttcatcccccactcgtttgggagcgccctactaaagtccggctccctaagctctaccttaagcaccagatggatctggtggccaccctgagccagctgggacttcaggagctgtttcaggcacctgatctgagaggaatctcggaacaatccctggtagtctcaggagtccaacaccagtccaccctggaactctcggaagttggggtggaagcagctgcagcgacctcaatcgctatgtcgaggatgtcactgtcatcgttctcagtcaatcggccctttctctttttcatttttgaagatactactggccttcccctctttgttggctcggtgcgaaaccctaaccctagcgcccccagagagcttaaggaacaacaagactccccaggcaataaagactttctgcagtctctgaaagggtttccccggggagataaactcttcggacctgatcttaaacttgtgccccctatggaagaggactatcctcaattcggatcgccaaag

SEQ ID NO: 18997 - DNA, 1473 bp, synthetic construct
  misc_feature 1..1473: note = source = /note="Description of Artificial Sequence: Synthetic coding sequence"
  source 1..1473: mol_type = other DNA
atggccctgctctggggcctcctggtccttagctggtcgtgcctgcaggggccatgtagcgtgttcagccctgtctcggcgatggaaccactggggagacagctcaccagcggaccaaaccaggagcaggtgtcgccgctcactctcctgaagctgggaaatcaggaaccgggcggacagaccgcactgaagagcccgccgggcgtctgcagccgcgatccgacccctgaacagactcatcgcctggcccgggcgatgatggcgttcactgcggacctgtttagcctcgtggctcagacctctacctgcccgaacctgatcttgagcccactgtcggtcgcattggcactctcgcatttggctctcggtgcccaaaaccataccctgcagcggctgcaacaggtcctccacgcgggctcagggccctgccttccacacctgctgtcacgcctctgccaagacctcggtccaggcgcctttcggctggccgccagaatgtacctccagaaaggattcccgatcaaggaagattttctggagcaatcggaacagctcttcggcgcaaagcctgtgtccctgaccggcaagcaggaagatgatcttgccaacatcaaccagtgggtcaaggaagcaactgagggtaaaatccaggagttcctttcgggtctgccagaggacaccgtcctcctgcttctgaacgccattcacttccagggcttctggcggaataagttcgaccccagcttgactcaacgggactcgttccacctggacgaacagttcacggtcccggtggaaatgatgcaggctaggacttaccctctgcgctggttcttgctcgaacagcctgaaatccaagtggcccatttccccttcaagaacaatatgtcatttgtcgtcctggtgccgacgcatttcgaatggaacgtcagccaagttcttgccaacctctcatgggacaccttgcacccgccccttgtgtgggaaagaccgactaaggtccgattgccgaaactctaccttaagcaccagatggatctggtcgcaactctctcccagctcggactccaagagctgtttcaagcgcccgacctcaggggtatctccgagcagtccctggtggtgtccggcgtgcagcatcaatcaaccctggaactgtccgaagtcggggtggaggcagcggccgccacttcaatcgccatgagcagaatgtcactctcatcgttcagcgtcaacaggccgttcttgttcttcattttcgaagataccactggactgccgctgtttgtcgggtccgtccggaacccgaacccttcggccccaagagaactgaaggagcagcaggactctccgggtaataaggacttcctgcaatcgctgaaagggttcccgcgcggcgacaagctgtttggaccggacctgaagctcgtgccgccgatggaggaggattacccccaattcgggtcaccaaag

SEQ ID NO: 18998 - DNA, 1473 bp, synthetic construct
  misc_feature 1..1473: note = source = /note="Description of Artificial Sequence: Synthetic coding sequence"
  source 1..1473: mol_type = other DNA
atggctctactatggggactactcgtcttgtcttggtcttgtctccagggaccttgctcagtcttttccccagtatcagccatggaaccgcttgggcggcagctcacatccgggcccaatcaggagcaggtatctcccttaactctactcaagttagggaaccaagaaccaggaggacaaactgcattaaaatctccccccggggtatgctcgagggatcccacacccgaacagacacatcgcttagcacgggccatgatggcttttacagcagatctgttttctcttgtagcacagacatcaacatgccctaacctaatcctctccccattgtcagtggcgttagctctatctcatctcgccctcggggcccagaatcacacacttcagaggttacagcaggtgttacacgctggatccggaccctgccttccacatctcctctctcgattatgccaggatttgggacccggagcattcaggctcgctgccaggatgtatctgcaaaagggattccccataaaagaagatttcctagaacagtccgaacagttattcggagctaaaccagtaagtctcactggaaaacaggaggatgacctcgctaatattaaccagtgggtcaaggaagccactgaaggaaaaatccaggaatttctctccggactcccagaggatactgtgctcctgctcctgaatgcaatacatttccaggggttttggcgaaacaagtttgaccctagtcttactcagagggatagtttccatctggatgagcagtttactgtgcctgtggaaatgatgcaggccaggacatatcctctccgctggtttctgctcgaacagccagaaatacaggtcgcacactttcctttcaaaaacaacatgtcttttgtggtgcttgtgccaacacattttgagtggaatgtgtctcaggtgttggctaatctctcttgggatacattacacccacccttggtgtgggaaaggcccacaaaagtgcggctcccaaaactctacctcaaacaccagatggatctcgtcgcaacactgtctcagcttgggttacaggaactttttcaggcacctgacttgcgtgggatatccgaacagtcattagtcgtatctggggttcagcatcagtctactcttgagctctcagaggtgggagtagaagccgcagccgccacatccatagcgatgtcccgaatgtcattgtcttcctttagtgtaaataggccctttttatttttcatatttgaggatactacagggctccctctttttgtagggtctgttagaaatcccaatccctcagccccccgagaactgaaagaacagcaggattcccccgggaacaaagattttctccagtctttaaaagggtttccacggggagataaattatttgggcctgatttgaaactggtgcctcctatggaagaagattatcctcagttcggatctccgaaa

SEQ ID NO: 18999 - DNA, 1473 bp, synthetic construct
  misc_feature 1..1473: note = source = /note="Description of Artificial Sequence: Synthetic coding sequence"
  source 1..1473: mol_type = other DNA
atggccttgctgtgggggctgctggtgctctcgtggtcgtgcctgcagggtccttgttcagtcttctcgcccgtgtcagcaatggaacccttaggccggcaattgacgagcggtccgaatcaggagcaagtgtccccgctgacgcttttgaagctggggaaccaggagcctggtggacagaccgccctgaagtctccccccggcgtgtgctcccgggatcccactcccgaacagacacatcgcctcgctcgcgctatgatggcgttcactgccgacctctttagtctagtagctcaaacttcaacatgcccgaatctgattctaagcccgctgtccgtcgcgctcgcactaagtcacttggccctcggcgcccagaaccatactctgcaacgtctgcagcaggtactgcacgcgggatcggggccgtgtctgccccacctgctgagtcgcctttgccaggatctgggccccggagctttcagactggccgccaggatgtacctacaaaagggcttcccaatcaaggaggacttcctggagcagtcggagcagctttttggcgctaaaccagtctcgctcacgggcaagcaagaagatgatctcgcgaatataaaccagtgggtgaaggaggctaccgagggaaagattcaagagttccttagtggcctgccagaggatacggttttgctcttgcttaacgcgatccatttccagggcttctggcgcaacaagttcgatccctctctcactcaacgtgacagttttcacttagatgagcaatttacagtgcccgtggaaatgatgcaagcccgcacttaccccctccgctggttcctgctggaacagcccgagatccaggtggcgcactttccgttcaaaaacaacatgtcgttcgtcgtgctggtccccactcactttgaatggaacgtgtctcaggtgctagccaatctgtcgtgggatacgttgcacccacccctggtctgggagcgcccaactaaagtgcggctaccgaagctgtatctgaagcaccagatggatctagtggccaccctgtcccagcttggattgcaggagctgttccaggctccagacctcaggggaattagcgagcaatccctcgttgtctctggcgtgcagcatcagtccaccctagaactgtccgaggtaggggtggaagctgcggcagcaacatctattgctatgtcccgcatgtcgctctcgtccttcagcgtcaaccgtccgtttctgtttttcatattcgaggacaccacgggtctacccttattcgtgggttccgtgcgcaaccccaatccctccgcccccagggaattgaaggagcagcaggacagtccaggcaacaaggactttttgcagtcgctgaagggtttcccgcgcggagacaagctgtttggtccagatctgaaactggttccgcccatggaagaggattacccacaattcggaagtcccaag

SEQ ID NO: 19000 - DNA, 1473 bp, synthetic construct
  misc_feature 1..1473: note = source = /note="Description of Artificial Sequence: Synthetic coding sequence"
  source 1..1473: mol_type = other DNA
atggcgctcctttggggtcttctggtcctctcctggagttgcctgcagggcccatgctccgtcttctctcccgtgagcgccatggagccactgggccgccagttgacttctggtccgaatcaggaacaggtctctccgttaacacttctgaagctcggtaatcaggagccaggtggtcaaaccgccctcaagtcgccacctggcgtttgttcgcgtgatccgacccctgagcagacccatcgtctagcccgcgccatgatggcatttactgctgatctcttctcgcttgtggcgcaaacttctacgtgccctaacttgatcctttccccgttgtctgtcgctcttgccctgtcgcacctggcattgggggctcaaaatcatactttgcagcgtttgcaacaggtgctacatgcgggatccggcccatgcctcccccatctgttgagccgtctgtgtcaagatctcggccctggtgccttccgcctggccgctagaatgtacctgcaaaagggtttccctattaaggaggacttcctagagcagtcagagcaactgtttggggcgaagcccgtgtccctaaccggtaagcaggaagacgacttggcaaacataaatcagtgggtcaaggaagccacggaaggaaagatccaggagttcctaagcggtttgcctgaggacacggttttgctgctgctaaatgcaattcacttccagggcttctggcgcaacaaattcgacccttcccttacacaacgcgactcgtttcatctggacgagcagttcaccgtgcccgttgagatgatgcaggctcgtacctaccctctgagatggtttctgctggagcagcccgaaatccaggtcgcccactttccgttcaagaacaacatgtcattcgtggtgctggttcccactcatttcgagtggaacgtgtcgcaggtgctggcaaatctttcctgggatactttgcacccgccgctggtttgggagcgtcccacgaaggtgcgactgcccaagctctacttgaagcaccaaatggacctggtcgcaaccttgtcccagctcggattgcaggagctgttccaagccccggatttgagaggcatctccgagcagtctctggtcgtgtccggagtccagcaccagtctacactcgagttgtccgaggtcggagtggaggctgcagcggccacaagcatcgccatgtcacgaatgtctctgagctcatttagcgttaacagacccttcttgttcttcatttttgaagataccactggactgcccctgtttgtcggttctgttcgcaacccgaacccgagcgcaccgcgggagttgaaggagcagcaggactcaccgggtaataaagatttcttgcaatccctgaagggattcccgagaggcgacaagctttttggccccgatctgaagctggtaccgcctatggaagaggattacccccagttcggaagtccaaag

SEQ ID NO: 19001 - DNA, 1473 bp, synthetic construct
  misc_feature 1..1473: note = source = /note="Description of Artificial Sequence: Synthetic coding sequence"
  source 1..1473: mol_type = other DNA
atggccctcctgtggggactgctggtcctctcatggtcctgtctccagggcccgtgctcggttttctcaccggtcagcgccatggagcctttgggtcggcagctgactagtggaccgaatcaggaacaggtgagccctctcactctgctgaagttggggaaccaggagccgggcggacagaccgctctcaaatcaccaccaggagtgtgttccagggacccgaccccagaacagacgcatcggctggcgcgggccatgatggcatttactgccgatctgttcagcctcgtggcccaaacctcgacctgcccgaacctgatcctttcgccattgtccgtggccctggcactctctcacctggcgttgggagcacaaaaccacaccctccagagacttcagcaagtgctgcacgccgggtcaggcccatgcctcccccatctgctgtccagactgtgtcaggacctcggcccgggagcgttccgccttgccgcccgcatgtacctgcaaaaaggattcccaatcaaagaggacttcctggagcaatcagaacagctgtttggcgcaaagcccgtctcactcaccgggaagcaagaggatgacctcgcgaacatcaaccaatgggtgaaggaggcgactgaaggaaaaatccaagaattcctctccgggttgccagaggatactgtgttgctgttgctcaacgccattcacttccagggcttctggcgcaacaagttcgacccaagcctcacccaaagagactccttccacttggatgagcagttcacggtgccagtggaaatgatgcaggcgaggacgtacccactgcgctggttcctgctggaacagccggagatccaagtggctcacttcccgtttaagaataacatgtcgttcgtcgtcttggtccctacgcacttcgagtggaacgtgtcacaggtgctggcaaacctgagctgggacacgctgcatcccccgctggtgtgggagcggccgaccaaggtgcgcctgccaaagctgtacctcaaacatcagatggatctcgtcgctactctgtcacagctcggcctccaggaactgtttcaggcacctgatctgcgcggaatctccgaacagtcgctcgtcgtgagcggcgtgcaacatcaatcgactctggagctctcggaagtgggagttgaagcagctgctgctacttcgatcgctatgtcgcgtatgtcgctgtcatcattctccgtgaaccgcccgttcctgttcttcatcttcgaggacacgaccggcctgccgctgtttgtcggatccgtgagaaacccgaacccgtccgcaccgcgcgaactgaaggaacagcaggattcgccaggcaacaaagacttccttcaaagcctgaaaggcttcccgaggggtgataaactgttcggcccggatctgaaactggtgccgcctatggaggaggactatccccagttcggatccccgaag

SEQ ID NO: 19002 - DNA, 1473 bp, synthetic construct
  misc_feature 1..1473: note = source = /note="Description of Artificial Sequence: Synthetic coding sequence"
  source 1..1473: mol_type = other DNA
atggcactcctgtggggtttgctcgtgctttcctggtcttgccttcagggaccgtgctcggtgttttcgccagtgtccgcaatggaacctcttggccgccaacttacttccggccctaatcaggaacaagtgtcgcctctgacgcttctgaaactgggcaaccaagagcctggcggccaaaccgcactgaaatccccaccaggagtgtgttcaagagatccaaccccggagcaaactcatagactcgcgagagcaatgatggcatttactgccgacctgttttcgctcgtggcccagaccagcacttgtccaaacctgattctgtcgccactgtcagtggcgttggcgctgtcgcatcttgcacttggagctcagaaccataccctgcagcggctgcaacaagtgcttcatgcgggatcgggaccttgtctccctcaccttctttcgcggctgtgccaggatctcggtcccggtgctttcagattggccgcacgaatgtacctgcaaaagggctttcctatcaaagaggacttcctggaacaatcagagcaacttttcggggcaaagcctgtgtcgcttacgggcaaacaagaagatgacctggcaaacattaaccagtgggtcaaggaagctaccgaaggtaagatccaagaattcctctcgggcctgcctgaggacactgtgctcctccttttgaatgctattcattttcagggtttttggcgcaacaaatttgatccgtcccttactcaacgggacagctttcatcttgatgaacaatttactgttcccgtggagatgatgcaagcacggacttacccactgcggtggtttcttctggagcaacctgagatccaggtggcacattttcctttcaagaacaacatgagcttcgtggtcctggtccctacgcactttgaatggaatgtcagccaggtgcttgcaaacctctcgtgggatactctgcatcctcctcttgtgtgggaacgccccactaaagtgaggcttcccaagctctaccttaagcatcaaatggaccttgtcgcaactctcagccagctcggactgcaggaacttttccaagcccctgaccttcggggtatttccgaacaatctcttgtcgtgtccggtgtccaacaccaaagcacccttgaactcagcgaagtgggagtggaagcagcagcggcaacctcgatagctatgtcaagaatgtcactgtcgtcgtttagcgtcaaccgacctttcctcttcttcatattcgaagatacgaccggcttgccactgtttgtcggaagcgttagaaacccaaacccatctgcacctagggaactcaaggaacagcaagattccccaggaaataaggacttccttcagagcctcaaaggttttcccagaggcgacaaactttttgggcccgatcttaagctcgtgcctcctatggaggaagattaccctcaatttggatcaccaaag

SEQ ID NO: 19003 - DNA, 1473 bp, synthetic construct
  misc_feature 1..1473: note = source = /note="Description of Artificial Sequence: Synthetic coding sequence"
  source 1..1473: mol_type = other DNA
atggccctcctgtggggcttgctcgttcttagctggagctgcctgcagggaccctgttccgtgtttagtccggtgagcgccatggagcctctgggcagacaactgacgtccggcccaaatcaggagcaagtgtccccgctcaccttgctgaaactcggaaaccaagagccaggaggtcagactgcactgaagtccccgccaggagtctgctcgcgcgatccgacgccggagcagactcaccggctcgcgcgggccatgatggcgttcacggccgaccttttctccctcgtggcgcagacctcgacctgcccaaatctgattctgagccctctttcggtggccctcgcactgagccacctggccctcggtgcccaaaatcatactttgcagcgactgcaacaagtgctgcacgccggttcgggtccatgcctgccgcacctcctgagccgcctttgtcaggatctcggtccgggagccttccgactggccgcacggatgtacctgcagaaaggattcccgatcaaggaggacttcctcgagcagtccgaacagttgttcggcgctaaaccggtgtcactgaccggcaagcaggaagacgatctcgctaatatcaaccagtgggtcaaagaggccaccgaaggaaagatacaagagttcctttccggccttcctgaggacactgtgctgttgctgctgaacgccatccacttccaagggttttggcggaacaagttcgacccttcactgactcagcgcgacagctttcatctggacgaacaattcaccgtcccggtcgagatgatgcaggcccgcacgtaccccctgcggtggttcctgctcgaacagccggagattcaggtcgcccacttcccgttcaagaataacatgtcgttcgtggtgctggtgccgacccatttcgaatggaatgtgtctcaagttctggccaacctctcgtgggacactctccacccgccactcgtgtgggaacgcccgactaaagtgcgcctcccgaagctgtacctgaagcatcagatggaccttgtcgcgactctgtcccaactcggactccaggaactctttcaggcgccggatcttaggggaatctccgagcagagcctcgtcgtctcaggggtgcagcaccagtcgacccttgagctgtctgaggtcggcgtggaggccgcggcggcgacctcaatcgcgatgtcccggatgtcgctgtcgagctttagcgtcaaccggccctttctcttcttcattttcgaagacaccaccggcctgcctttgtttgtgggaagcgtgagaaaccctaatccgtccgcgcccagagaactgaaggaacagcaagactccccaggtaacaaagactttctccagagcctgaagggttttccgagaggagacaagctgttcggtccggatctgaagctggtccctccaatggaggaggattatccgcaattcggctccccgaaa

SEQ ID NO: 19004 - DNA, 1473 bp, synthetic construct
  misc_feature 1..1473: note = source = /note="Description of Artificial Sequence: Synthetic coding sequence"
  source 1..1473: mol_type = other DNA
atggcactcctctggggcctgctggtactgtcgtggtcttgtctgcaggggccctgctccgttttctcgccagtctccgccatggaacccttgggcagacaactcacctctggaccgaaccaggagcaggtatccccattgaccctactaaaactcgggaaccaggagcccggaggccagactgcacttaagagtccacccggagtttgttcaagggatccaacccccgaacaaacccaccgcctggccagagccatgatggcttttaccgcagacctgttctccctggtagctcaaacctccacctgcccaaatctgatactctcgcccctgtccgtggcactcgctctgtcccacctggcgctgggcgcacagaaccataccctgcagcgactccaacaggtgttacacgctggttccggaccatgcttgccccatctgctgagtcggttgtgccaggatctcgggcctggtgcattccggctggccgcacgaatgtatctacagaagggattcccaatcaaggaggacttcctcgaacagtcagagcaattgttcggagccaagcccgttagtctgacgggaaaacaggaagacgacctggccaatatcaaccagtgggtgaaggaggccaccgagggaaaaatccaagagttcttgagcgggctcccagaggacactgtgttgttgctgcttaacgccatccattttcagggcttttggcgcaacaagttcgacccaagcttaacccagcgggatagtttccacctggacgagcaattcactgtgccagtggaaatgatgcaggccaggacttatcctctgagatggttccttctcgagcagcccgaaatccaagtggctcatttcccattcaaaaacaatatgagcttcgtcgtactcgtacccactcattttgaatggaatgtcagtcaggtgctcgcaaatctgtcttgggatacactgcaccctcctcttgtgtgggaacgccccacaaaggttaggctcccgaagctgtacctgaaacaccagatggatctggttgccacactgagccagctcggacttcaggaattgttccaagctccagacctgaggggcatcagcgagcagagtttggtggtatctggtgttcagcaccaaagtacgcttgaactgtccgaagtaggcgtggaagccgcggcagctacctccattgccatgagtcgcatgtccctgtcctcgttttccgtgaataggccattcctgttttttatatttgaggacacaaccggattgccattgtttgtcgggtctgtacggaatccgaaccctagcgcaccccgcgaactcaaggagcaacaggactcacctggcaataaagattttctccagagcctgaaaggtttccccaggggcgacaaactgttcggccccgacctgaagctcgtgcccccaatggaggaagattatcctcagttcggcagccccaaa

SEQ ID NO: 19005 - DNA, 1473 bp, synthetic construct; identical to SEQ ID NO: 18973
  misc_feature 1..1473: note = source = /note="Description of Artificial Sequence: Synthetic coding sequence"
  source 1..1473: mol_type = other DNA

SEQ ID NO: 19006 - DNA, 1473 bp, synthetic construct
  misc_feature 1..1473: note = source = /note="Description of Artificial Sequence: Synthetic coding sequence"
  source 1..1473: mol_type = other DNA
atggcactgctgtggggtctgttggtcctttcatggagttgtctgcaaggcccttgttccgtgttttcgccagtgtccgcaatggaaccgcttgggcgacaactcacttcaggccccaaccaagaacaagtctcacccctcactctcctcaaactcggaaaccaggaacctggtggtcaaactgctctgaaatcgccacccggtgtttgctcacgtgatcctaccccggaacagactcatcggttggcacgagcaatgatggcctttactgcggatctttttagcctggtggcacagacctccacctgtcctaatcttatactgagtccactttcagtggcactggcacttagccatctggcactcggtgcccagaaccatactcttcaaagacttcaacaggtccttcacgcagggtcgggaccttgtctgccgcatttgttgtcgcgcttgtgccaagatctgggacctggtgcgtttcgtttggcggcccgaatgtacctgcagaagggatttcccatcaaagaagattttctggagcagtccgaacaactctttggagcaaaacctgtttcactcaccggtaaacaggaggacgaccttgccaacatcaatcagtgggtgaaggaagcaactgaaggtaagattcaggagtttctgtcggggcttccagaagataccgtgctgctgctgctcaatgcaattcattttcagggattctggagaaacaagtttgatcctagcctcacgcaacgcgactcgtttcaccttgatgaacaattcacggtcccagtggaaatgatgcaagcccggacgtacccactgaggtggttcctcttggagcaacctgaaattcaagtggcccactttccttttaagaacaatatgagcttcgtggtccttgtccctacccactttgagtggaatgtctcacaggtgttggcgaacttgtcgtgggatactttgcatcctccgcttgtgtgggaaagacctaccaaggtacgtttgcccaagctgtacctgaagcatcagatggatcttgtggctaccctgtctcaactgggccttcaagagcttttccaggcaccagacctccggggaatctcagaacagtccttggtggtgtcaggagtgcagcaccaatcgacccttgagctttctgaagttggagttgaagccgccgcagctaccagtattgctatgtcgcggatgtccctgagcagtttttcggtgaacagaccctttttgttcttcattttcgaggacactacgggactgccactttttgtgggcagcgtgagaaaccctaatccttccgccccaagagagctgaaggagcagcaagacagcccaggcaacaaggacttcctccaaagcctcaagggcttcccccggggggacaagctgtttggccctgatttgaaactggtcccaccaatggaggaagattacccccaattcggatcccctaag

SEQ ID NO: 19007 - DNA, 1473 bp, synthetic construct
  misc_feature 1..1473: note = source = /note="Description of Artificial Sequence: Synthetic coding sequence"
  source 1..1473: mol_type = other DNA
atggcgctcctgtggggacttcttgtcctgagctggtcatgcctgcaaggcccgtgttcggtgttctcccctgtgtccgctatggagccgctggggcgccagctcacgtcggggcctaaccaggagcaagtcagccccctgactctcctgaagctgggaaaccaagaaccggggggccagaccgccctcaagagcccgccgggggtttgctcgcgggacccaacgccagaacagacgcatcgccttgccagagcgatgatggctttcactgccgatcttttctccctggtcgcccagacctccacttgcccgaatctcatcttgtcaccgctttcagtggccctggctctctcccacttggccctgggagcacaaaaccacaccctccaaagactgcagcaggtgcttcatgctggttccggcccgtgtctgccacatctgctctcgaggctgtgccaggatctgggccctggcgccttccggctggccgccaggatgtacctgcaaaaggggttccctatcaaggaggatttcctcgaacagtcggagcagctgttcggcgctaagccagtctcactgactggaaaacaggaggacgatctcgcgaatattaaccaatgggtgaaagaagcgactgaaggaaaaatccaggagtttctcagcggactgcccgaggacaccgtgctgctgttgctgaacgccatccactttcagggattttggagaaataagttcgacccgtccctgactcaacgggactcgtttcacctggacgaacagttcaccgtgccggtggaaatgatgcaggcgcgcacctaccccctccggtggttccttctcgaacaaccggagatccaggtggcccacttcccattcaaaaacaacatgtctttcgtggtcttggtgccgacccatttcgaatggaacgtttcgcaggtgctggcaaatctgtcctgggatactctgcaccctccgctcgtgtgggaaagacccaccaaggtccgtttgcctaagctctacctgaagcatcagatggacctggtcgcgactctctctcagctgggattgcaagaactgttccaggcgccggatttgcggggaatctcagaacaatccctggtggtgtcgggagtgcagcaccaaagcactctcgagctgagcgaggtgggagtcgaagccgcagcagcaacctccatcgcaatgagccgcatgtcgctctcatcgttctcagtgaaccgcccctttctgttctttatttttgaggacaccaccggactcccactcttcgtcggatcggtgcggaacccaaatcccagtgctccacgagaattgaaggaacagcaggacagcccgggcaataaagacttcctgcaaagcctgaagggattcccacgcggtgataagctctttggtccggatcttaaactggtccctccaatggaggaggactaccctcaattcggttccccgaag

SEQ ID NO: 19008 - DNA, 1473 bp, synthetic construct
  misc_feature 1..1473: note = source = /note="Description of Artificial Sequence: Synthetic coding sequence"
  source 1..1473: mol_type = other DNA
atggcgctactgtgggggcttttagtgctgagctggtcttgtcttcaaggaccctgctcagtgttcagcccagttagcgctatggagccactgggccgccaactgacctctggcccaaaccaagagcaggtttcaccactaaccttacttaaactgggcaaccaagagcctggcgggcaaaccgcattgaaaagtcccccgggcgtctgtagtagggacccaacccccgagcagacacaccgcctcgcaagagcaatgatggcctttactgcagacctgtttagcctggttgcgcagacatccacctgtccaaatcttatcctctctcccttgtctgtggctctggcactgagccacctcgcacttggcgcccagaaccacacactgcaaaggctccagcaggtgctgcacgcagggtccggaccatgcctgccacacctgttgagtaggctttgccaggatcttggtccaggagctttccgcttagcggcaagaatgtaccttcagaaaggctttccgattaaagaggacttcttggagcagtccgagcagttgttcggagcgaagccagtgagcttgacaggaaagcaagaagacgacctggctaacatcaaccaatgggtgaaagaagctactgaaggaaaaatccaggagttcctgtcagggctacctgaggacacggtcctccttcttcttaatgcgatccacttccagggattctggagaaataaattcgacccaagcctgactcagagagacagcttccatctggacgagcagttcaccgttcccgttgagatgatgcaggcacgaacataccccctgcggtggttcctcttggaacaacctgagattcaggtcgcccattttccctttaaaaacaatatgagcttcgttgttctggttccaacacactttgagtggaatgtctcccaagttctagccaacctgagctgggacaccctgcatccaccacttgtctgggagaggcccaccaaagttagacttccaaaattgtacctgaagcatcagatggatctggtggcaaccctgtcccaactgggactccaagagttgtttcaggctcctgatctgaggggtatcagcgagcaaagtttggtggtcagcggcgttcagcatcagtctacactcgagctctctgaggtgggcgtggaagccgctgccgctacaagcattgcaatgtctagaatgtctttgagcagctttagcgtaaatcgaccctttttgtttttcatcttcgaagatactaccggacttccactcttcgtaggatcagttagaaatccaaaccctagtgctccccgcgagttgaaagagcaacaggacagtccaggcaacaaagatttcctccagagcctgaaaggattccctcgcggcgataagctgtttggacccgatcttaaattagtgcctcctatggaggaggattaccctcagttcggaagcccaaag

SEQ ID NO: 19009 - DNA, 1473 bp, synthetic construct
  misc_feature 1..1473: note = source = /note="Description of Artificial Sequence: Synthetic coding sequence"
  source 1..1473: mol_type = other DNA
atggctctgctttggggcctgctggtgctgtcctggtcatgcttgcagggcccatgcagtgtgttcagccctgtgtcagctatggagcccctgggtcgtcagttgacctctggccctaatcaggaacaggtctctccccttaccctcctgaagttgggtaaccaagaaccaggcggacagactgcccttaaaagccctcctggagtttgttctagagacccaacaccagagcagacacaccgcctggctagggcaatgatggctttcaccgctgacttgttcagtctcgtggcccagacaagcacttgtccaaatctgatactcagcccactgagtgtagctcttgccttgtcacacctcgcactgggagcccagaatcataccctgcagagattgcagcaggtattgcatgccggatccggtccttgcctgccccaccttctgtcacgcctgtgtcaggatcttggtcccggcgcttttagactcgccgcaaggatgtatcttcaaaagggcttccctataaaagaggacttcctggaacagtctgaacagttgttcggagcaaaacctgtctccctcacaggtaaacaggaggatgatctcgccaacatcaatcagtgggtgaaagaagctaccgagggcaaaatacaagaattcttgtccggtctgccagaggataccgttctgctcctgcttaacgcaatccatttccaaggattttggcgtaacaagtttgatcccagtctcacacaacgtgacagcttccaccttgatgaacagttcactgtccctgtcgagatgatgcaggccaggacttaccctctgcgttggttcttgctggaacagcctgagatccaagtcgcccattttccattcaagaataatatgagcttcgtagtgctcgttcccactcatttcgagtggaacgtctcccaagtgctggccaacctgtcatgggataccctccaccctcctctggtgtgggagcgtcccactaaggtccgcctccccaagctttacctgaaacatcagatggacttggttgctaccttgagtcagcttggcctccaggagttgttccaggcccccgacctgaggggaattagtgagcagagcctggtagtctcaggcgtgcagcaccagtccaccctcgagttgtccgaagtgggagttgaggcagccgcagccacctccatcgccatgtcaagaatgagcctgagcagcttctcagtgaacaggcctttcctgttcttcatctttgaagacactaccggtctgccattgttcgtaggaagtgtaaggaaccccaatccaagcgctccccgtgagctgaaggagcaacaagattctccaggtaacaaagatttcttgcagtctctgaagggctttcctcgtggcgacaaactgttcggtcccgaccttaagctggtcccacccatggaggaagattatccacagttcggtagtcccaag

SEQ ID NO: 19010 - DNA, 1473 bp, synthetic construct
  misc_feature 1..1473: note = source = /note="Description of Artificial Sequence: Synthetic coding sequence"
  source 1..1473: mol_type = other DNA
atggcacttctgtggggactgcttgtgcttagctggtcctgcctgcaaggcccatgtagcgttttcagccctgtgagcgccatggagcctctgggccgacagctgacatctgggcccaaccaggagcaggtttccccactgactttgcttaagctgggcaaccaagagcctggaggacagactgctttaaagtctcctcccggggtgtgttccagagatccaaccccggagcagactcaccgattggctagagctatgatggcatttactgcggacctttttagcttggtggctcaaacctctacttgccccaaccttatcctcagccccctatccgtggctctcgctctgagccacctggctcttggcgcccagaaccacacgctgcagcgactgcaacaggttctgcacgcagggtcaggtccctgtcttccccatctgctgtcaaggttgtgtcaagatcttggccccggagctttccggctggccgcacgaatgtacttacaaaaaggctttccaatcaaggaagattttttggaacagagcgaacaactgtttggagctaaacctgttagcctgaccggtaagcaagaggacgatctcgccaacatcaaccagtgggtgaaggaagcgacagaggggaagatccaagaatttctcagcgggctccctgaggacactgtactccttcttctgaatgcaatccactttcaaggattctggagaaacaaatttgatccaagcctgacccagagagactcttttcacctggatgagcagtttacggttcctgttgagatgatgcaagctagaacctaccccctcagatggtttttgctggaacagccggaaatccaggttgctcactttcccttcaagaacaatatgtccttcgtcgtgcttgtgccaacacatttcgaatggaacgtaagtcaggtcctggcaaacctcagctgggatactctgcatcctcccctcgtctgggagcggcccactaaagtgagattgccaaaactctacctgaaacatcagatggatcttgtagcaacactcagtcaactgggcctccaagagctgttccaggcccctgatcttcgtggaatcagtgaacaatccctggttgtttccggggttcagcaccagagcactctggagctttcagaggtcggagtcgaggctgccgctgcaacatcaatcgctatgagtagaatgtccctctctagcttcagtgtcaacaggccatttctgttttttatctttgaagatactacgggactgccactcttcgtgggatctgttcgcaatcccaacccttcagcacccagagagctgaaagaacagcaggattcccctggcaataaggatttcctgcagagcctgaagggattcccaagaggcgacaaattattcggccctgacctgaaactcgtccctcccatggaagaagactacccacagttcggtagtcctaaa

SEQ ID NO: 19011 - DNA, 1473 bp, synthetic construct
  misc_feature 1..1473: note = source = /note="Description of Artificial Sequence: Synthetic coding sequence"
  source 1..1473: mol_type = other DNA
atggccctgctctggggtctgctggtcttatcatggtcatgtttacaaggcccttgcagcgtcttcagccctgtttcagctatggaaccacttggtcgccagctgacgagtggtcctaatcaagaacaagttagccctttgactttgttgaagctggggaatcaggagcctggcggccaaactgcactgaagtcacccccgggggtttgttctagggaccccactcctgaacaaactcaccgcctggctcgggcgatgatggccttcacggcggacttgttttctcttgttgcacagacatctacatgcccaaacctaattctgagccccctgtcggtagccctcgctctgtctcacctagcccttggggctcagaaccacacattgcagagactgcaacaggtcctgcacgccggctctgggccttgcctcccgcacctgctttcgcgattatgccaggatctgggcccaggcgcctttagactagccgcccgaatgtacttgcagaaaggatttcctattaaggaagacttcctagaacagtcagagcagttgtttggcgctaagcccgtcagcctcacagggaagcaggaggatgatctggccaacattaaccaatgggtaaaagaggcaaccgaaggaaagatccaggagttcttaagcggcctgccagaggacacagttttattgctgctgaacgctattcacttccagggcttctggagaaacaaatttgatccttctttaactcagcgcgactccttccatctggacgaacagttcaccgtcccagtggaaatgatgcaagcacggacatacccactacggtggttcctgctcgagcaaccggaaatccaggtcgcccacttcccctttaagaataacatgagttttgtggtgctggtgcctacccattttgagtggaacgttagtcaggtcctggccaatctgagctgggatactctacacccccccttggtctgggagcgtcctaccaaggtgcggctaccaaagctttacctgaaacaccagatggatctcgttgctactctttcgcaattggggttgcaggaacttttccaggcccccgatttgcgggggatctccgaacagtcacttgtggtttctggagtgcagcatcagtctaccctggagctttcggaagtcggcgtcgaagccgcggccgctactagcatcgccatgtcacgcatgtctttatcctccttctccgtgaatcgaccttttctattttttatttttgaagatactacaggcctacctctattcgtcggctctgtccgcaaccccaatcctagtgcccctagggaactcaaagagcaacaggatagtcccgggaataaagacttcttgcagtccctaaaaggcttccctagaggagacaaattgttcgggccggacctaaaactggtaccaccaatggaggaggattaccctcaatttggatctcctaag

SEQ ID NO: 19012 - DNA, 1473 bp, synthetic construct
  misc_feature 1..1473: note = source = /note="Description of Artificial Sequence: Synthetic coding sequence"
  source 1..1473: mol_type = other DNA
atggccttgttgtggggacttctggtgttgagctggagctgcctgcaaggaccctgctccgtgttctcccctgttagcgcaatggagccgcttggacggcagctgacttcgggaccgaaccaagagcaggtgtcgccgctcaccttgctgaagctgggtaaccaagaacctggtggccagactgccctcaagtcaccaccgggtgtctgctcgcgcgacccgaccccggaacagacccacagactggcccgggcgatgatggcttttaccgcggacctcttcagcctcgtggcccaaacttctacttgtccgaacctcatcttgtctcccctgagcgtggctcttgcgctgagccatctggcactgggagcccaaaatcatactcttcagcgcctgcaacaagtccttcacgcaggatcaggaccatgcctgccgcacctgctgagccggctctgtcaggacctgggacctggggccttcaggctcgcagcacggatgtacctccagaaggggttcccgatcaaagaagatttcctggagcagtcggagcagctgttcggagccaagccagtgagcctgaccgggaagcaggaggacgatctggccaatatcaaccaatgggtcaaagaagccactgaggggaagatccaagaattcctgtccggcctcccggaagataccgtgttgctcctgctcaacgcaatccactttcagggtttctggcgcaacaagttcgatccaagcctgacccagcgggactctttccacctcgacgaacaattcacggtgccggttgaaatgatgcaggctcgcacttacccgcttagatggtttctgcttgagcaacccgagattcaagtagcccatttccctttcaagaacaatatgtcgtttgtggtgctggtgccgacccatttcgagtggaatgtgtcgcaggtccttgcgaacctttcctgggatacgctgcacccaccgctcgtgtgggaaaggccaactaaggtacgcctccctaagctgtacctgaagcaccagatggatctggtggctaccctttcccagcttggactgcaggagctctttcaggcgccggacctgcggggcatctccgaacagtcgctggttgtctccggagtgcagcatcaatcaaccctggaactctccgaggtgggagtggaggctgccgcagccacctccattgcgatgtcacgaatgtcattgagctcattctcggtcaaccgtcctttcctcttcttcatcttcgaggacaccactggcctgccactgttcgtcgggagtgtgagaaatccgaatccatcggcgccacgtgaactgaaggaacagcaagattcgcctggcaacaaagactttcttcagtcactcaaaggcttcccgagaggtgacaagctgtttggtcccgacctcaaattggtcccaccgatggaagaagattatcctcagtttgggtcaccaaaa

SEQ ID NO: 19013 - DNA, 1473 bp, synthetic construct
  misc_feature 1..1473: note = source = /note="Description of Artificial Sequence: Synthetic coding sequence"
  source 1..1473: mol_type = other DNA
atggcgcttttgtgggggttgctcgtgctgtcctggtcgtgcttgcaaggcccgtgctccgtgttctcgccggtttcggccatggaacccctcggccgccagttgaccagcggaccgaatcaggaacaagtcagcccgctgaccctcctgaaactgggaaatcaagaaccaggaggccagaccgcgctgaagagccccccgggcgtctgctcacgcgacccgaccccggaacaaacgcaccgcctcgcccgcgcaatgatggcatttactgcagatctgttctcgcttgtggcccagacttcgacctgtccaaacctgattctctcgccgctcagcgtcgccctcgcgctctcgcacctggcgctgggagcccagaaccacacccttcagcgactccagcaagtgcttcatgccggcagcggaccttgccttcctcatctcttgtcgcgcctctgtcaagacctcggcccgggggcgttccgcctggcagcacggatgtacctccagaagggattcccgatcaaagaggacttcctggagcaatccgaacaactctttggcgctaaacccgtgtccctcactggaaagcaggaggacgacctggccaacatcaatcagtgggtgaaggaggctaccgaaggaaagattcaggaatttctgagcggactgccggaagatactgtgcttctgctcctgaacgcaatccatttccaggggttctggcgtaataagttcgacccgtcactgacccaaagggattcttttcacctggatgaacaatttactgtgccagtggagatgatgcaggcacgcacctacccactgagatggttcctccttgaacagccagagatccaagtggcgcacttcccgttcaaaaacaacatgtcgttcgtggtgctggtgccaactcacttcgaatggaatgtctcccaagtgctggctaacctttcgtgggacacgctgcaccctccactggtctgggaaagacccaccaaggtgcgcctcccaaagctgtacctgaagcatcagatggacctcgtggcgactttgtcgcagctgggactccaagagctgtttcaggcgccggacctgagaggaatctcggagcagtccttggtggtgtctggagtgcagcaccaaagcacgctggagctctcggaagtgggagtggaggctgccgccgccacttcgatcgctatgtcccgcatgtctctctcttcgttcagcgtaaacaggccattcctgttcttcatctttgaggacactaccggcctcccgctcttcgtcggatccgtgcgaaatcctaacccgagcgcgccgcgggagctgaaggagcagcaggactcgccgggaaacaaggacttccttcaatctctcaaaggattcccccggggggataagctgtttgggccggacttgaagctggtgccgccgatggaagaggactacccgcagttcggatcaccgaaa

SEQ ID NO: 19014 - DNA, 1473 bp, synthetic construct
  misc_feature 1..1473: note = source = /note="Description of Artificial Sequence: Synthetic coding sequence"
  source 1..1473: mol_type = other DNA
atggcccttctttggggactcctcgtcttatcctggtcctgcctgcaagggccgtgtagcgtgtttagccccgtctcagccatggaaccccttggacggcagcttacatccggtcctaatcaggagcaggtgagcccgttaacacttctcaaactcggcaatcaggaacctggaggacagaccgcactcaagtctcctccaggcgtttgtagccgcgatcctactcccgagcagacacaccggctcgcaagagcaatgatggccttcaccgcagacttgttttctctcgtggctcagacctctacctgccctaacctcatcttaagccccctgtccgtagcactggcactaagccatctcgctcttggagcacagaaccacacactgcaacggctgcagcaagtactgcacgctggctccggaccctgcctgccccacttgttgtctagactgtgccaagatctgggtccaggagcctttagactcgctgcccgaatgtatctgcagaagggtttccccatcaaagaggattttctcgagcagtccgagcaattgtttggtgcaaagccggtctcattaactgggaaacaggaagatgacctggccaatattaaccagtgggtgaaagaagccaccgaagggaagattcaggagtttctgtcaggcctccctgaagatactgtgctcttattgctgaatgccatccactttcagggattttggagaaataagttcgacccttcactgacccagagagattcttttcatctggacgagcagttcaccgttcctgttgagatgatgcaggcacgtacatatcctctgcgctggtttcttcttgaacagccggaaatccaggttgcccatttcccattcaaaaataacatgtcgttcgtggttctggtgccgacacatttcgaatggaacgtatcacaagtcttggccaacctgagctgggatacactgcacccccccttggtgtgggaaaggcccaccaaagtaagactaccaaaactgtacctcaaacaccaaatggatttggttgctacactttcccagctgggactgcaggaactgttccaggcacctgatctgcgggggatttctgagcagagccttgtggtgtctggagtgcagcatcagtcaactcttgagctttcagaggtgggggtggaggctgccgctgccacttccatagccatgagtcgtatgtcactctcttcgtttagtgtgaaccgtcccttcttgttttttatctttgaggacaccactggattacctttatttgtgggctcggtcaggaatccaaacccaagcgccccacgtgagctcaaggagcagcaggacagccccgggaataaggactttcttcagtcccttaaaggattcccccggggcgataagctgttcggtccggatctgaagcttgtgccccccatggaggaggattaccctcaattcgggagccctaaa

SEQ ID NO: 19015 - DNA, 1473 bp, synthetic construct
  misc_feature 1..1473: note = source = /note="Description of Artificial Sequence: Synthetic coding sequence"
  source 1..1473: mol_type = other DNA
atggcgctgctgtggggactcctggtcctgtcgtggtcctgcctccaaggaccatgctccgtgttctcgcccgtttcggccatggaaccgttgggccgccaacttacctcgggaccgaaccaagagcaggtcagcccgctgaccctcctcaagctgggcaaccaagagccgggcgggcagaccgccctgaagtcaccacctggcgtttgctcacgggaccctactcctgagcaaactcaccgcttggctagggctatgatggcattcactgcggatctgttttcgctggtggctcaaacctccacgtgcccaaatctgatcctgtccccgctgtcggtcgccctggccctgtcacacctcgctctcggagcccagaatcataccttgcagagacttcagcaggtgttgcacgctggaagtggcccatgcctgccgcacctcctgtcgaggctctgccaggaccttggcccgggtgctttccgactggccgcacggatgtacctgcagaagggattcccgattaaagaggacttcctcgaacagtcggagcagctgtttggcgccaagccagtgtcgctcactggaaaacaggaagatgatctggctaacattaatcagtgggtgaaagaagccactgaaggtaagatccaagagtttctgtcaggactgccggaagatactgtgctcctgctcttgaacgcaatccacttccagggcttctggcgcaataagtttgacccgtccttgacccagcgcgactccttccacctggatgaacagtttaccgtgccggtggaaatgatgcaagctagaacttacccgctccggtggttcctgctggaacaaccagagatccaggtggcgcactttccctttaagaacaatatgtccttcgtcgtgttggttcccacccatttcgaatggaacgtcagccaggtgctcgcaaacctgtcatgggatactctgcatccgccgctggtgtgggaaagacctacgaaggtcagattgcctaagctgtacctgaaacaccagatggacctggtcgcaacgctgtcacaactgggactgcaagagctgttccaggccccggacttgcgcggcatctcggaacaatcgctcgtggtgtcgggagtccagcaccagtcaactctcgaactctcggaggtcggcgttgaagcagccgctgcaacttcgattgccatgtcccgtatgtcactgtcatccttcagcgtgaatagacctttcctgttcttcatcttcgaggacactaccggactgcctctgttcgtgggctcggtgcgaaatcccaatccgagcgcgccgcgcgaactgaaggagcagcaggatagccccgggaataaggacttcctgcaatctctgaagggcttcccacgcggtgataaactcttcggaccagatttgaaactggtgccgccgatggaagaggactacccgcaatttgggtcgcctaag

SEQ ID NO: 19016 - DNA, 1473 bp, synthetic construct
  misc_feature 1..1473: note = source = /note="Description of Artificial Sequence: Synthetic coding sequence"
  source 1..1473: mol_type = other DNA
atggccctgctgtggggactgttggtgctgtcctggtcctgtctgcaagggccatgttcggtgttttcgccggtgtcggccatggaaccactcggacggcagctcacttcgggcccaaatcaggagcaggtttctccgctgaccctcctgaagctgggcaaccaagaaccaggtggtcagacggcccttaagtcgccacctggcgtctgcagcagggacccgaccccggagcaaacgcatagactggcaagagccatgatggcttttaccgcagacctgttctcactggtggcccagacttccacctgtccaaaccttatcctctcgccactctccgtggccctggcactttcgcatctcgctctcggcgctcagaaccataccctgcaaagactgcaacaagtgctccacgccggaagcggaccgtgcctgccgcatctgttgtcacgcctgtgccaggacttgggccctggcgcgtttcggctggcggcgaggatgtacctgcagaaagggttcccgattaaggaggatttccttgaacagtcagagcaactgttcggtgccaaaccagtatcgctgaccggaaagcaagaggacgacctggcgaatatcaatcagtgggtgaaagaagccaccgaaggaaagattcaggaatttctctccggcctgccagaggacactgttctgcttctgctgaacgccatccactttcagggattctggcgtaacaagttcgatccatcactcacccaacgggactcattccacctggatgagcagtttaccgtgcctgtcgagatgatgcaggcacgcacttacccgctgagatggtttctgctggagcaaccggaaattcaagtggcccacttcccgttcaagaataacatgtccttcgtcgtgctggtgccgacgcacttcgaatggaacgtgtcccaggtgctggccaacttgtcctgggatacccttcatcctccactggtgtgggaacgcccgactaaggtgcggctgcctaaactttacctgaagcaccagatggacctggtggccactctgtcacagctcggacttcaggaactgttccaagcgccagacctgagaggaatatcagagcagtccctcgtggtgtccggagtgcaacaccagtcaactctcgagctgtccgaagtcggggtggaagccgcggcggcgacttcgattgctatgtccagaatgtcgcttagcagcttctcggtgaatcggccgttcctcttcttcatcttcgaggacactactggactgcctctctttgttggaagcgtccgcaatccaaacccgtcagcgccgagggagctgaaagaacagcaagattcgccaggaaacaaggactttttgcagtctcttaaggggttcccacgaggagataagctgttcgggccagatctgaagctcgtcccgccgatggaagaagattaccctcagttcggatcgcctaag

SEQ ID NO: 19017 - DNA, 1473 bp, synthetic construct
  misc_feature 1..1473: note = source = /note="Description of Artificial Sequence: Synthetic coding sequence"
  source 1..1473: mol_type = other DNA
atggcccttctgtggggactgcttgtcctttcgtggtcatgccttcagggcccgtgctccgtgttctcccctgtcagcgccatggaaccgcttggccggcagcttactagcggcccgaaccaggagcaggtgtcgcctctgacgctgctcaagttgggtaatcaagagccaggcggacagaccgcccttaagtcgccgcccggggtctgcagccgggatccgacccctgagcaaactcacaggctggctcgggctatgatggcctttactgccgacctgttctctctcgtcgcccaaacttcgacctgtccgaacctcatcctctcaccgctctccgtggcactggccctctcccatctggcgctgggagctcagaaccacacgctgcagaggctgcagcaggtgctgcacgcgggctcaggcccgtgtctgccccatctcctctcgagactgtgtcaagatctcgggccgggcgctttccgcctggcggcccggatgtacttgcaaaagggctttccaatcaaagaggacttccttgagcagtccgaacagctgtttggcgcaaagcctgtgtcgctcactgggaagcaggaagatgatctggcaaacatcaaccagtgggtgaaggaggccaccgaaggtaaaatccaagaatttctgtccggacttcctgaagataccgtgctgctcctgctcaatgccattcatttccagggtttctggcgcaataagttcgacccgtccctgactcaacgggactcctttcacctcgatgaacaattcactgttccagtggagatgatgcaggcaagaacttaccccttgagatggttcctgctggagcagccggagatacaagtggcgcactttccgttcaagaacaacatgtcatttgtggtgctcgtgccgacgcacttcgagtggaacgtctcgcaagtgctggcgaatctctcgtgggacaccctgcatcctccgcttgtgtgggagcgccccacgaaggttagattgcctaaactctacctcaagcatcagatggacctcgtcgcaaccctgtcacagctgggactgcaagagttgttccaggctcctgatctgcggggcatcagcgagcaatccctcgtggtatcgggcgtgcagcatcagtcaaccctggaactctccgaagtgggggtggaggcagctgcggcaactagcatcgcgatgtcgaggatgtcgcttagcagcttttccgtgaaccggccattcctgttcttcatttttgaggacaccactggcctgccgctcttcgtcggaagcgtgagaaaccctaatccgagcgcaccacgcgaactcaaggaacagcaggactcaccaggaaataaggactttctccagtccctcaaaggcttccctcgcggagataagctgttcggccccgacctcaaactggtgcctccgatggaggaggactacccgcagttcggcagcccgaag

SEQ ID NO: 19018 - DNA, 1473 bp, synthetic construct
  misc_feature 1..1473: note = source = /note="Description of Artificial Sequence: Synthetic coding sequence"
  source 1..1473: mol_type = other DNA
atggccttgctgtggggactcctggtgctctcctggtcgtgtctgcaaggtccatgtagcgtgttttcgcccgtttcggcaatggaacctcttggtaggcaactgacgagcggacccaaccaggagcaagtcagccctttgaccctgcttaagctgggaaatcaagagccaggtggacagacggctctgaagtcgcctcccggtgtgtgctcgagagatccaacccccgaacaaacccaccggttggcccgtgcgatgatggcttttaccgcagatctgtttagccttgtggcgcagacctccacttgtcctaatcttatactctcgcccctgtccgtcgcacttgcactttcacacctggcactgggtgcacagaatcataccctgcaacgacttcagcaagtcctgcatgctggctcaggaccatgcttgccgcatctcctctcgagactctgtcaggacctcggccctggagcatttcgcttggcagcaaggatgtaccttcagaagggattcccaattaaggaagattttctggaacaaagcgaacaactgtttggggctaagcctgtttctctcaccggcaaacaggaagatgatctggcgaacattaatcagtgggtgaaggaggcaacggaaggcaagatccaggagttcttgtcgggacttccggaggatactgtgcttttgctcctcaacgccattcacttccaaggtttttggcggaacaagtttgatccttcactgactcagcgcgatagctttcacctcgacgagcagtttactgtgccggtggagatgatgcaggcccgcacctaccctttgcggtggttcttgttggaacaaccagaaatccaggtggcacactttccgttcaaaaacaacatgtccttcgtcgtgcttgtccccactcactttgaatggaacgtgtcccaggtgctggcaaacctgtcctgggatactctgcatcccccactggtgtgggaaagacctaccaaagtcagacttcctaagctgtacctcaaacatcaaatggatctggtggcaactctgtcccagttgggactgcaggagctgtttcaagctcctgatctgcggggaatctcggagcaaagcctcgttgtgtcgggagtccaacatcaatcgactcttgaactgtcggaggtgggtgtggaagcagcagcggccacctccattgccatgtcccgcatgagcctcagctccttctcggtcaaccgaccatttcttttcttcatatttgaagatactactgggctgccactgtttgtgggatcggtgagaaaccctaatccatccgccccaagagagctcaaggagcaacaagattcgccagggaataaggacttcctccagtcactgaagggcttccctcgaggggataaactctttggcccagatctgaagttggtcccacctatggaagaagattaccctcaatttggatcgccaaaa

SEQ ID NO: 19019 - DNA, 1473 bp, synthetic construct
  misc_feature 1..1473: note = source = /note="Description of Artificial Sequence: Synthetic coding sequence"
  source 1..1473: mol_type = other DNA
atggcactcttgtgggggctgctcgtgctctcgtggagttgtctccaaggtccgtgttcagtgttttcgccagtcagcgccatggaacctctgggtaggcaattgacctccggcccaaatcaggagcaagtctctcctcttaccctgctgaaactgggtaatcaggagcccggaggtcagactgcacttaagtcgccacccggagtgtgtagcagagatcctacgcctgagcagactcatagacttgcgagagcaatgatggcatttaccgccgatcttttttccctcgtcgcgcagacctccacgtgcccgaacttgattttgtcacccctgagcgtcgcgctggccctttcccatctcgcgcttggtgcccaaaatcacacccttcagcggcttcagcaagtcctccacgcaggttcaggaccgtgcctgccacacttgctcagccgcctgtgccaggaccttggacccggtgccttcagattggcggcccgaatgtaccttcagaagggctttccaattaaggaagatttcctggagcaatcagaacaactttttggcgcaaagccagtgtcactgaccgggaagcaagaagatgacctcgccaacattaaccagtgggtgaaggaagcaacggaaggtaagatccaggaattcttgtccggactgccggaagatacggtgcttcttctgctcaacgcaatccactttcagggcttttggaggaacaagtttgacccatcccttactcaacgtgactccttccatcttgatgaacaatttactgtcccagtggagatgatgcaagcacgcacctacccactgcggtggtttcttcttgaacaacctgaaatacaagtggcacattttccgttcaagaataacatgtccttcgtggtcttggtcccaacccattttgaatggaatgtgagccaggtgttggcaaacctctcgtgggacaccctgcatcctcccctcgtgtgggaacgccctactaaggtcaggctgcctaaactctacctgaaacatcagatggatcttgtcgccactctgtcccaactcggactccaagaacttttccaagcaccggatctcagagggatcagcgagcagtcacttgtggtgagcggagtccagcatcaatcaacgcttgagctgtcagaggtcggggtggaagccgcggcggcaacctcaatcgccatgtccaggatgtcactttcatcattttcagtgaataggccttttctctttttcatatttgaagatactaccgggcttcccctgttcgttgggtccgtgcgcaaccctaacccgagcgcaccaagagagctcaaggaacaacaggattcgccaggaaacaaggacttcctgcaatcgctcaagggcttccccagaggtgacaaactctttggtcctgacttgaaactggtcccacctatggaggaggattaccctcagtttggctcgccgaag

SEQ ID NO: 19020 - DNA, 1473 bp, synthetic construct
  misc_feature 1..1473: note = source = /note="Description of Artificial Sequence: Synthetic coding sequence"
  source 1..1473: mol_type = other DNA
atggcactgctgtggggacttctcgtgctttcttggagctgtctgcaaggaccatgtagcgtttttagccctgtgtctgccatggagccattggggagacagctcactagtggtcccaatcaagaacaggtgtcacctctcacactgttgaagttgggcaatcaggagcctggcggccaaactgctctgaaatcccctccaggtgtttgctcacgcgacccaacgccggagcaaacccacagactggcacgggctatgatggctttcaccgccgacctgttcagtctggtggctcagacatcaacatgtccaaacctgattctgagccccttgtccgtcgcgctggccttgagccatctcgcccttggggcgcagaaccacaccctgcagagactgcagcaggtgctgcacgcaggttctggtccctgtctcccccatctgctgagtcgcctgtgccaggatctgggtccaggggcgtttaggctcgcggcgcgaatgtatctccagaagggcttccccatcaaggaggattttctggaacagtccgagcagttgttcggcgccaagcccgtgagtctcaccggcaagcaggaagatgaccttgctaatattaaccagtgggtcaaagaagccaccgaggggaagatccaggagtttcttagcgggctgccagaggatactgtgttgctgcttctcaacgccatccactttcaggggttctggcgcaacaaattcgaccctagcctgactcagagggatagcttccatcttgacgaacagttcaccgtaccagtcgagatgatgcaggcaagaacttacccactccggtggtttctgttggaacagccagagattcaagtggcccattttcctttcaagaataatatgtccttcgttgttctggtcccaacccatttcgagtggaatgtgtcccaggtgctggccaacctctcatgggacacgctgcatccacctctcgtgtgggagcggccgaccaaggttcggctcccgaagctttatttgaaacaccagatggatttggtagctacactgtcccaactgggattgcaagagctgttccaggcgcccgaccttcgaggcatttccgaacagagcctggtagttagtggagtgcagcaccagtctacgctcgaactgtcagaagtgggtgtagaggctgccgccgctacttccatagccatgagcagaatgtctctcagcagtttctccgtgaaccgaccctttctgtttttcattttcgaagacaccacagggctccctctgtttgtggggtccgtcaggaatccgaacccctccgctccccgcgaacttaaagagcagcaagacagcccaggcaataaggacttcctgcagtccttgaaaggcttccccagaggagacaagttgtttggaccggatctgaagctggtgcctccaatggaggaagattacccccagtttggtagccctaaa

SEQ ID NO: 19021 - DNA, 1473 bp, synthetic construct
  misc_feature 1..1473: note = source = /note="Description of Artificial Sequence: Synthetic coding sequence"
  source 1..1473: mol_type = other DNA
atggccctgctgtggggactgcttgttctgagttggagctgtcttcagggaccttgtagtgtcttttcgccagtgtctgcaatggagccactcggccgacagctgactagtggtcccaatcaggagcaggtcagcccattgacactgcttaaattgggcaatcaggagccgggcggccagactgccttgaagtctccccctggagtctgttctcgcgatcccactccagagcagacccatcgtttggctagggccatgatggccttcacagctgatctcttttcattggtcgctcaaacgagcacctgccctaatttgatactttcccctctgtccgttgcgctggctctctcccatttggctctaggagcccagaaccacaccctgcagcgtctccagcaggtattacatgccgggtcgggtccttgtctaccacatcttcttagtagactttgccaggacttggggccgggggcattccgacttgccgccaggatgtatctgcagaagggattccctatcaaagaggattttcttgaacagagcgagcagcttttcggcgccaagcctgtttcgttgactgggaagcaagaagatgatctcgcaaacataaaccagtgggtgaaagaggcaaccgagggaaagattcaggagttcttgagtggtctaccagaggatacggtgctgctgctcttgaatgcgatacacttccagggtttctggcggaataaatttgacccaagtcttacccagagggactctttccacctagatgagcagttcaccgttccagtcgagatgatgcaggcccgaacatacccgcttcggtggttcctgttagagcagcctgagattcaggtggctcacttccctttcaagaacaatatgtcattcgtggttttggtgccaacacacttcgagtggaatgtttcccaagtgctcgccaacctgagctgggatacccttcaccctcccctagtctgggagcgcccgacaaaggtgaggctgccaaagctatacctcaagcaccagatggacctcgtagctacattgtctcaactggggctgcaggagctgttccaggcacccgacctgcgcgggattagcgaacagtcccttgtggtgtctggagtgcagcatcagtccactctggagctctcagaggtcggggtggaagccgctgcagccaccagcatcgccatgagccggatgtcactcagctccttctctgtgaaccgaccattcttgttctttatttttgaggatacaaccggcctgcctctcttcgttggctctgtaagaaacccaaaccccagtgcgccgagggagctaaaggagcagcaggattcccctggtaataaagactttctccagagcctcaagggatttccacgcggggacaaactgttcgggcctgacctgaagctagtcccacctatggaggaggactaccctcagttcggatccccaaaa

SEQ ID NO: 19022 - DNA, 1473 bp, synthetic construct
  misc_feature 1..1473: note = source = /note="Description of Artificial Sequence: Synthetic coding sequence"
  source 1..1473: mol_type = other DNA
atggccttgctgtggggcctgttggtcctttcttggtcctgcctacaaggaccctgttccgttttctccccggtgtcggccatggagccactgggccgtcagctcacctctggccccaaccaagagcaagtgagcccgctgaccctcctaaaacttggtaaccaggaacctggcggtcaaactgctctgaaatcaccccctggcgtctgttcgcgagatcccaccccagagcaaacacaccgcctcgctcgtgctatgatggctttcactgccgacttgttctcgttagtcgcccagaccagcacctgcccgaacctcatactgtcccctcttagcgttgccttggctctgtcgcacctcgcgctcggcgcgcaaaaccatacccttcagagactacagcaagtgctacacgccggtagcggtccctgcctgccccacctcttgtcccgtttgtgccaggatctgggccccggtgcctttcgcctcgctgcccgtatgtacttgcagaagggatttcctatcaaagaggacttcctggagcagtccgagcaactcttcggcgcgaagcctgtgtccttgaccggtaagcaggaagacgacctcgctaacatcaatcagtgggtcaaggaggccaccgagggcaagattcaggagtttctatcgggtctgccggaggacaccgtcctccttctcctgaatgcgatccacttccagggattctggcggaataagtttgatccgagcctgactcagagagacagcttccatttggacgagcagttcacggtcccagttgagatgatgcaagctaggacgtacccactgcggtggtttctccttgagcaacctgagattcaagttgctcacttcccgttcaagaacaacatgtctttcgttgtcctggtacctacccatttcgagtggaatgtaagccaggtcttggccaacctgtcgtgggacacgctgcacccacctcttgtctgggaaaggccgacaaaagtccgtctgcctaaactttacttgaagcaccagatggatctggttgccaccctatcgcagctgggtttacaggagctctttcaggctcccgatctgaggggtatctcggagcagtcgttggttgtttcaggtgtgcagcaccagtctactctcgagctgtcagaagtgggtgttgaggcagcggccgctacgagcattgccatgagtcgcatgtccctgtcgtccttctcagttaaccgacccttcctattcttcatctttgaggacacaacgggcctgcctctcttcgtgggctccgtccgtaatccgaatccttcagccccgcgtgaactcaaggaacagcaggactcccctgggaacaaagatttcctccaaagtttgaagggctttccccggggagataaactcttcggtcccgatctgaaattggtcccccctatggaggaggactacccccaatttgggtcccctaag

SEQ ID NO: 19023 - DNA, 1473 bp, synthetic construct
  misc_feature 1..1473: note = source = /note="Description of Artificial Sequence: Synthetic coding sequence"
  source 1..1473: mol_type = other DNA
atggcactgctctggggccttcttgttctgtcctggtcctgcctccagggtccttgctcggtcttctcccccgtaagtgcaatggaaccactcggcaggcaactcacgagcggcccgaatcaagaacaggtatctccactgaccctactcaagctgggtaatcaagagccaggcggacagacagcgttgaagtcccctcccggggtgtgctctcgggatcctacccctgaacagacccatcggctggcgcgcgctatgatggccttcactgctgaccttttttccctggtggcccaaacgtcaacgtgccccaatctcatcctgagtcctctgagtgttgcgctggccctgagccaccttgccctgggagcccagaatcatacgctgcaacgactccagcaagtcctgcacgcggggtctgggccctgcctccctcaccttttgagccgcctatgtcaggatctggggcccggagcttttcgacttgccgcccggatgtacctccagaaaggctttcctatcaaggaggacttcctcgagcaatctgagcagctgtttggggcaaaaccggttagcctgaccggaaaacaagaggatgatcttgcaaacattaaccagtgggtgaaagaggctaccgagggtaagattcaagaattcctatctgggttgccagaggacactgtcctcctgttactcaatgctatacacttccagggcttttggcggaataagttcgatccttccctgacgcaacgcgacagttttcacctcgacgagcaattcaccgttcctgtggagatgatgcaagctaggacctatcccctgaggtggtttttactggaacagccagaaatacaagtggcccacttccctttcaaaaacaatatgtcctttgtagttctcgttccaactcacttcgagtggaacgtttcacaggttctggccaacctgtcatgggacactctccacccacccctggtctgggagcgtccgaccaaagtccggttaccaaagctatacctgaaacatcagatggacctggtggctacccttagccagctgggcttacaagaactgtttcaggcgcctgatcttcggggcatctcagagcagagtctcgttgtcagtggcgtccagcatcagagtaccctagagttgtcagaagttggtgttgaggccgcggccgcaacgtccatagctatgtcccgcatgtctcttagcagcttctcggtcaaccgccccttcctgtttttcatattcgaggacaccaccggcctgccgctgttcgtcggctctgtgagaaacccaaaccccagcgctccacgggagctgaaagaacagcaggattccccgggaaataaagacttccttcagtccctgaagggcttccctcgtggagataaactgttcggacctgacctcaaactggtgccccccatggaagaggattatccacagtttgggtctccgaaa

SEQ ID NO: 19024 - DNA, 1473 bp, synthetic construct
  misc_feature 1..1473: note = source = /note="Description of Artificial Sequence: Synthetic coding sequence"
  source 1..1473: mol_type = other DNA
atggccctcctgtggggcttgctggtgttgtcatggagctgcttgcagggaccgtgttcagtgttcagcccggtgtcggcgatggaaccactcggtcggcagctgactagcggccctaaccaggagcaagtgtccccgctgacgctgctgaaattgggcaatcaggaaccgggaggacagaccgcgctgaagtctccgccgggagtttgctcacgcgaccccaccccagaacagactcaccgcctggcgcgtgccatgatggcctttaccgccgatctgttctccctggtcgctcaaacttcaacctgccctaacctcatcctcagcccactgagcgtcgccctggcactttcccacctggcgcttggagcacaaaaccatacgctgcagagactgcaacaggtgctccacgctgggtcaggtccgtgtctgcctcacttgctgtcacggctgtgccaagacctgggacccggagccttccggctcgccgcacgcatgtacctgcagaagggatttcctatcaaagaggacttcctcgagcagtccgaacaactgttcggtgccaagccagtgtccctgactgggaaacaggaggatgacctggccaatatcaatcaatgggtgaaggaggccaccgaggggaagatccaagagttcctttcgggcctcccagaggatactgtgctcctccttctcaatgctattcatttccagggattttggcgcaataagttcgatccgtctctcacccaacgggactcgttccatctggacgagcaattcaccgtgccggtggaaatgatgcaagcaaggacctaccctctcagatggttcttgctggaacaaccagaaatccaggtggcgcatttcccgttcaaaaacaacatgtcgttcgtcgtgctggtcccaactcattttgaatggaacgtctcccaagtgctggccaacctgtcctgggacactctccacccgccgttggtgtgggaacgccccacgaaggtgaggcttcctaagctgtacctcaagcaccagatggacctggtcgcaaccctctcgcagcttggactccaggagcttttccaggcgccggacctgcggggcatctcagaacagtcgcttgttgtcagcggagtgcagcaccagtcgaccttggaactgtcggaagtcggcgtcgaggcagcggccgcaactagtatcgctatgtccagaatgagcctgtcgtcgtttagcgtgaaccggccgttcctgttcttcatttttgaggacactaccggcctcccgctcttcgtgggatcggtgcgaaacccaaacccctcagctccccgcgagctgaaagaacaacaggatagcccaggaaataaagacttcctgcagtccctcaaggggtttcctagaggtgataagctgtttggacctgatctgaagctcgttccgccaatggaagaagattacccgcagttcgggtcccccaag

SEQ ID NO: 19025 - DNA, 1473 bp, synthetic construct
  misc_feature 1..1473: note = source = /note="Description of Artificial Sequence: Synthetic coding sequence"
  source 1..1473: mol_type = other DNA
atggcacttctttggggactgctcgtgcttagctggagctgcctgcagggaccatgttccgtgttctcgcctgtgtcagcaatggaacctctgggcaggcaactcacctcgggcccaaaccaggaacaggtgagtcctctcactctgctgaaacttgggaaccaggagcctggcggacagactgcactgaagtctccccctggcgtgtgcagtcgggatcctactccagaacaaacacatcgccttgcgcgggccatgatggcttttactgcggacctgttttccctggttgcccagacatcaacatgccccaatctgattctcagccccctctccgtggcactggctctgagtcaccttgccctcggagctcaaaatcataccctccagcggctgcaacaggtgctgcacgccgggagcggtccatgtctgcctcaccttctcagtaggttgtgccaagatttgggacctggagcatttcgcctcgccgctagaatgtatttgcagaaaggattcccaatcaaggaggacttcctggaacagagtgaacaactgtttggagcaaagcctgtgagtctgacaggcaagcaggaggacgacttggctaacatcaaccaatgggttaaggaagctacagagggcaaaattcaggaatttctttctggattgccagaagataccgtgctgttgcttctcaatgcaatccatttccagggattttggagaaataaatttgatcccagcttgacacaacgcgatagcttccaccttgacgaacagttcaccgtgcccgttgaaatgatgcaagcccgtacttatcctctccgctggtttctgttggaacagcctgaaatacaggtggcccactttccatttaaaaacaacatgagtttcgtggtgctcgtaccaacacattttgagtggaacgtgagtcaggtactggccaacctttcatgggatactctccaccctcctctcgtttgggaaaggccaactaaggtgaggttgccaaaactgtacctcaaacaccagatggatttagtcgctaccctttcacagctcgggcttcaagaactatttcaggcaccggacttaaggggaattagcgaacagagtctggtagtaagcggtgtccaacaccagtccaccctcgagctctctgaggttggtgttgaagctgctgcggctactagcatcgccatgagccggatgagcctgtcttccttcagtgtcaacagaccatttttgttcttcattttcgaggataccacagggctacctttgtttgtcggatctgttagaaaccccaatccatcagcaccacgggagctgaaggagcagcaggattccccaggcaataaggacttcttgcaaagtctgaagggctttcctcgcggagataaactgtttggtcctgacctgaagctggtgccccctatggaagaggactacccgcagttcggatcccctaag

SEQ ID NO: 19026 - DNA, 1473 bp, synthetic construct
  misc_feature 1..1473: note = source = /note="Description of Artificial Sequence: Synthetic coding sequence"
  source 1..1473: mol_type = other DNA
atggcactgctctggggcctcttggtccttagttggtcctgtctccagggtccgtgttctgtcttctcacctgtgtctgctatggagcccctcggcaggcagctgacatctggtcctaatcaagaacaagtgagtcccctcaccttgctcaagctcggcaatcaggagccaggtggacagactgcccttaagagcccacctggcgtctgctctagggatccaacgcccgagcagactcatagactggcaagggcaatgatggcgtttactgctgaccttttcagcctggttgctcagacctctacgtgccccaacctcatcctgagccctttgtctgtcgcccttgcactctcccaccttgctctgggtgctcaaaatcatactcttcagcgccttcagcaagtgctgcatgctggctcaggtccctgtctgccccacctgctgtcccgcctgtgtcaggacctgggcccgggagcattcagacttgcagcccgcatgtacctgcaaaagggatttccgatcaaagaagatttccttgagcagtctgaacaactgttcggtgcaaaacccgtgtctctgactggtaagcaagaggacgatctggcaaacatcaaccaatgggtgaaggaagctacggagggtaaaattcaggaattcctttccggactgcctgaagacacggtgttgttgttgcttaatgcgattcatttccaaggattctggagaaacaagtttgaccccagcctcactcaaagggattccttccacctggacgaacagtttacagtgccggtggagatgatgcaggccaggacttatccattgagatggtttttgctcgaacagcctgaaatccaggtggcgcactttccctttaagaacaacatgagcttcgtagtacttgttcccactcattttgaatggaacgtttctcaagtgctggctaacctgagctgggacactttgcatccaccattggtttgggagaggcctacaaaagttcgcttgcccaagctctacctcaaacatcagatggatcttgtggctactctgagccagcttggcctccaggagctgttccaagcccctgacttgcgcggcatctcagaacagtctttggtggtgtcaggcgtgcagcaccagtcaacactcgagctgagtgaggtcggtgtggaggcagctgccgctacttctatcgctatgtctagaatgtctctctcaagtttttcagtcaatcgcccgtttctcttcttcattttcgaagacactacgggacttcccctcttcgtcggttctgtaagaaatcccaacccctcagcacccagggagttgaaggaacagcaggattctccaggaaacaaagacttcctgcagagcctgaaaggctttccgaggggagataagctcttcggtcccgatctgaagcttgtaccgcctatggaagaagattacccacaatttggatctcctaag

SEQ ID NO: 19027 - DNA, 1473 bp, synthetic construct
  misc_feature 1..1473: note = source = /note="Description of Artificial Sequence: Synthetic coding sequence"
  source 1..1473: mol_type = other DNA
atggccttgctgtggggcttactggttttgtcgtggtcatgcttacagggcccttgttcagttttcagtcccgtcagtgcgatggagcctctgggccgtcagctaacgagtggcccgaatcaggagcaggtgagccccctgaccctgctgaaattgggcaatcaggaaccaggaggacagactgccctgaagtcaccacctggagtctgtagccgggaccctaccccagagcagacccacaggctcgctagagcgatgatggccttcacagccgacctgttttcccttgtggcccagacaagcacctgtccaaacctaatcctgtcccctctctctgtggccctcgcattgtcacatttggcacttggagctcaaaatcataccctgcagagattgcaacaggtgttgcatgctggttcaggcccctgcctcccgcacctgcttagccggctctgtcaggacttgggtcctggtgcattccgcctagcagccagaatgtacctgcagaagggcttccccataaaggaggatttcctggagcagagtgaacagctgtttggcgcaaaaccagtttctttgactggcaagcaggaggatgatctggcgaacattaaccagtgggtcaaagaggcaaccgaaggcaagattcaagagtttctttcgggtttacctgaagacaccgtgctgctattacttaatgctattcattttcagggtttctggagaaataagtttgatcctagtctgacccagcgcgacagttttcacctcgacgagcagtttactgtgccagtggaaatgatgcaggccagaacttatcctctacggtggtttctcctggagcagcccgagattcaagtggcccacttccctttcaaaaacaacatgtcttttgtcgtgctggtgcctacgcactttgagtggaacgtgagccaagtgctcgccaatctgtcctgggacacccttcacccgccactggtctgggaaagacccactaaagtacgcctgcccaagttatacttaaaacatcaaatggaccttgtcgctaccctgtcccaactgggactgcaggaactctttcaggcccccgatctcaggggcatttccgagcagagtctggtggtgtctggggtgcagcaccagtccacactggagctctccgaggtcggggtcgaggctgcagctgcaacttcaatcgcaatgagccgaatgtctctttcctctttctccgtgaatagaccctttctattttttatcttcgaagacacgactggcctgcctctgttcgtcggctctgttcgcaaccctaaccccagcgcgccaagagagttaaaggaacagcaagactcacctgggaacaaagacttccttcaatctctcaagggtttcccaaggggcgataaactcttcggcccggatttgaagctcgtaccgcccatggaggaagattatccccagttcggctcaccaaag

SEQ ID NO: 19028 - DNA, 1473 bp, synthetic construct
  misc_feature 1..1473: note = source = /note="Description of Artificial Sequence: Synthetic coding sequence"
  source 1..1473: mol_type = other DNA
atggctctcttgtggggcttactggttctttcttggtcctgcttgcaggggccgtgttccgtatttagcccggtaagtgcgatggagccactgggtaggcagcttacctctgggcctaatcaggagcaagtttcccctttaactctgttgaagctcggcaaccaagagcctgggggccagactgctcttaaatcgccgcccggcgtttgttctcgcgatccaactcctgagcagactcatcgactggcaagagccatgatggcttttacagcggatttattttccctcgtcgcgcaaacatcaacctgccctaacctgattctgagcccgcttagtgtcgcgctggctctgtcacatcttgcgctaggtgcacaaaatcatacgcttcaacgtcttcaacaagtacttcatgcaggaagcggaccttgccttccacatcttttgtcacgactctgccaggatcttggtcctggggctttccgacttgccgcgcgaatgtacctccagaaaggatttccgattaaagaagactttctggagcagagcgagcaactcttcggtgcgaaaccggtttcccttacaggaaagcaagaagacgatcttgctaacatcaaccagtgggtcaaggaggctactgaagggaagattcaagagttcttgagcggtctgccggaagatacagtgttattgctgttaaatgcaattcatttccaaggattttggcgcaataaatttgacccttctcttacccaaagagattccttccatttagacgaacagtttaccgtgccagtagaaatgatgcaagcaaggacgtacccgctgcgttggtttttattagagcagccagaaatacaggttgcacattttcctttcaaaaacaatatgagcttcgttgtcctcgttccgactcattttgaatggaatgtctctcaagtgctggccaatcttagctgggatacacttcatccaccgttagtttgggagcgcccaacgaaagtgcgactgccgaaactgtatttaaaacatcaaatggatcttgtcgccacgcttagtcagttgggtctccaggaactttttcaggcgcctgatttacggggcatatctgaacaatctttggtggtttctggagtacaacatcagtccacgttagagctcagcgaagttggagtcgaagctgcagctgcaacgtcaattgcgatgtcacgcatgtctttgtctagtttttctgtgaaccgcccttttcttttttttatttttgaggatacaacaggattgcctctctttgttggatcagtacgcaatccgaacccgtcagcaccgcgggagcttaaggaacagcaagactcgccgggaaataaggattttcttcaatcattgaaagggtttccgcggggcgataaactgtttggcccagatctgaaattagttccaccaatggaggaagattatccacagtttggctcgccgaaa

SEQ ID NO: 19029 - DNA, 1473 bp, synthetic construct
  misc_feature 1..1473: note = source = /note="Description of Artificial Sequence: Synthetic coding sequence"
  source 1..1473: mol_type = other DNA
atggccctgctgtgggggctcctggtgctgtcttggtcctgcctgcagggaccttgttccgtctttagtcctgtgtcagccatggagccactcggacggcagctgaccagtggtcctaatcaggaacaggtgagtccgctgacccttttgaaactgggcaaccaggagcctggcggtcagacggcgcttaagagccccccaggcgtgtgttctcgagatccaacacccgaacagacacaccgcttggcgcgagcgatgatggcatttacggcagatctgtttagcctggtcgctcagacatcaacctgcccaaacctgatcctgagtccactttccgttgctcttgccttgagtcacctggccctcggagctcaaaatcacacccttcagcgattgcagcaggtcctccatgccggatcagggccctgcctgccacatctgcttagccgcctctgtcaggacctgggtccaggggcttttcgcttggccgctaggatgtatctgcagaagggatttcccattaaggaggacttcctggaacagtccgagcagctgtttggagctaagcccgtgtctctgactggcaagcaggaggacgatcttgccaacatcaaccagtgggtcaaggaggctaccgaaggaaagatccaggagttccttagcggtctccccgaagacacggtactcttgttgctgaatgctatccacttccagggtttctggaggaacaagttcgaccccagcctgacgcagcgggactcttttcacctggatgaacagttcactgtcccggtagagatgatgcaggccagaacatatcccctgagatggttcttgttggaacagcccgaaatacaggtagcacactttccttttaaaaacaacatgagtttcgtggtcctggtgcccacgcattttgagtggaacgtctctcaggtgctcgctaacctgagttgggacacactgcacccgcctctcgtgtgggagagaccgacaaaagtccgactgccaaaactctacctcaagcatcagatggatttggtggcaactctgtcacagttgggactgcaggagctgtttcaggctcctgatctgcgcggaatatccgaacagtccctggtggtgagtggagtgcagcatcagtctaccctggagttgtccgaagtgggagtggaggccgctgcagccacatctatagctatgagtaggatgtccctgtcaagcttctccgttaacagaccatttctgttctttatttttgaggatacaactggactgcctctttttgtgggatctgtaagaaatcccaatccttccgctccaagagagttgaaagaacagcaggactcccctggcaataaggactttctgcagagcttgaagggctttcccagaggggacaagctcttcggtccagacctcaagctcgttcccccaatggaggaggactatccacagtttgggtctccaaag

SEQ ID NO: 19030 - DNA, 1473 bp, synthetic construct
  misc_feature 1..1473: note = source = /note="Description of Artificial Sequence: Synthetic coding sequence"
  source 1..1473: mol_type = other DNA
atggcactcctgtggggtctgctggtgctcagctggtcctgtctccagggcccctgttccgtattcagcccagttagcgcaatggagccactgggtcggcagctcacctcaggccctaatcaagaacaggtgtctccccttacgctgttgaaacttggcaatcaggagccgggcggtcagaccgcattgaagagccccccgggcgtctgtagcagggacccaacacctgagcagactcaccggctcgccagggccatgatggcctttactgctgatctcttctcactcgtcgctcagacgtccacttgccccaacctgatcctgagccccctttcagtcgcgctggctctgagccatcttgcccttggtgcacagaaccatacacttcagcggctccagcaggtcctccatgctggaagtgggccctgcctgccccatctgcttagcagattgtgccaggatctgggccctggtgcattcaggctcgccgcacgcatgtacctgcagaagggtttccctatcaaggaggatttcttggagcagtcagagcagctcttcggcgcaaagcctgtgagcttgacaggaaagcaggaagatgacctggcgaatatcaaccagtgggtcaaggaagccaccgagggaaagattcaggagtttctctctggattgcccgaagacaccgttctcctcctgcttaacgcaatacatttccaggggttctggcgcaacaagttcgatccttccctcactcaacgcgactctttccatctggacgagcagtttacagtgcctgtggaaatgatgcaggctcgaacataccccctcagatggttcttgcttgaacagcccgaaatccaggtggcccactttccattcaagaacaatatgtcttttgtggtgctggtacctacacacttcgagtggaacgtgtctcaggtgctggcaaatctttcttgggatactttgcacccacccctggtctgggagcgcccaactaaggtgaggcttcccaagctgtacctgaaacaccaaatggacctggttgctaccttgtctcagctggggctgcaggagctctttcaagctccagacctgaggggcatctccgagcagtctctggtcgtaagcggtgtgcagcaccagtcaacactcgagctgtccgaggtcggcgttgaagcagccgccgcaacaagtattgccatgtcccgcatgtctctgtctagcttcagcgtaaaccggccttttctcttctttatttttgaggacactaccggtctgcccctttttgtgggctctgtgagaaacccaaatccctctgcccctcgcgaactgaaagagcaacaggactcccctggcaataaggacttcctgcaaagcctcaagggttttcctagaggcgacaaacttttcggcccagatttgaagcttgtgccgcccatggaggaggattacccgcagttcggcagccctaag

SEQ ID NO: 19031 - DNA, 1473 bp, synthetic construct
  misc_feature 1..1473: note = source = /note="Description of Artificial Sequence: Synthetic coding sequence"
  source 1..1473: mol_type = other DNA
atggccctgttatggggcctgctggtcttgtcttggtcttgcctgcagggtccgtgctccgttttctcccctgtatctgccatggagccactgggacgccagcttaccagcgggccaaatcaggaacaggtcagccccctgaccctgttgaagctgggcaaccaggaaccgggcggtcagacggccttgaagagtcctccgggggtgtgctctagggatcccaccccagagcaaacccatagactcgcgagagcgatgatggcctttaccgcagatctttttagcttggtcgcccagacgtcaacatgccccaacttaatcctgagtcctttgtccgtcgccctcgccctgtcacatctcgccctgggggcgcaaaaccacacactgcaaaggctgcagcaagtgctgcatgcgggctccggaccttgtctgccccatttgctatcaaggttgtgccaggatctggggccaggcgcttttcggctcgcggcaaggatgtatctgcagaagggctttcctatcaaggaagactttctggagcagagcgagcaactgttcggcgcgaagccagtgagcttaaccggcaagcaggaagatgatctggctaatatcaatcagtgggtgaaggaggctacagaggggaaaatccaggagtttctgtctggcctgcccgaagacacggtgcttcttttactcaatgccatccatttccagggcttttggcgtaataagtttgaccccagcctgacccagcgcgacagttttcacctagatgagcagtttacagtgcccgttgagatgatgcaagcccggacgtatccattgcgctggtttttgctcgagcaaccagagattcaggtcgcacattttccattcaagaacaacatgtcctttgtggtactcgtgcctacccatttcgagtggaatgtgtcccaggtgctcgccaatctgtcctgggacaccctccatccgccgctcgtgtgggagaggcccactaaggtccgccttccaaagttgtacctgaagcaccaaatggacctggtggccacactcagtcagctgggcctgcaggagctatttcaggccccagatctgcgtgggatctctgaacaaagtttggttgtgtctggagtgcagcatcagtcgacccttgagctgtcagaggtgggtgtggaagcggcagcggccaccagcatcgcaatgtcccggatgtctttgtccagcttctcagtgaaccggcccttccttttcttcatctttgaagataccacagggctgcctttatttgtaggcagtgtcaggaatcctaacccctccgctccaagggagctgaaagaacaacaggatagtcccgggaataaagattttttgcaaagcctcaagggcttcccgcggggagacaagctcttcggaccagaccttaaactggtgccacctatggaggaggactacccccaatttggctcaccaaag

SEQ ID NO: 19032 - DNA, 1473 bp, synthetic construct
  misc_feature 1..1473: note = source = /note="Description of Artificial Sequence: Synthetic coding sequence"
  source 1..1473: mol_type = other DNA
atggcgctcctctggggcctgttggtgctgtcctggtcatgtctccagggcccttgcagcgtcttctcaccagtcagcgctatggagcctctggggagacaattaacctctggacccaaccaggaacaggtaagtcccctcacactgctcaaactcgggaatcaagaaccagggggccagaccgctttaaagtcaccccctggagtttgcagccgagatcccacccccgaacagacccaccgcttagcccgcgcgatgatggcttttactgccgacctatttagcttagtggctcagacgtcaacttgtcccaatctcattctcagtccacttagtgtcgctctagcactatcgcatctcgctctgggagcgcagaaccataccttgcagaggttgcaacaggtattacacgctgggtcagggccctgtctgcctcatttgttgtccaggttgtgccaggatttgggtcccggcgccttcagacttgctgcacgcatgtacttgcaaaaagggttcccaattaaagaggactttcttgagcagagcgagcagctgtttggagcaaagccagtttctctgacagggaagcaggaggacgacctggcaaacataaatcagtgggtcaaagaggccaccgaggggaaaatccaggaatttctatcagggctccctgaagatacagtgctgctgctccttaatgcaattcattttcagggtttctggcggaataagtttgaccccagccttacacaaagggattcctttcatctcgatgagcagttcaccgtcccagtcgagatgatgcaggccaggacctatccccttcgttggttccttctggaacaaccggagatccaagtagcgcactttccgttcaaaaataatatgtcctttgttgttctagtccctacacacttcgagtggaatgtgtcccaagttctagctaacctctcttgggatacacttcatccccctttggtgtgggaacgtcccacaaaggtcaggctccccaagctatatctcaaacatcaaatggacctcgtggccaccctttcgcagttgggacttcaggaattgttccaagcaccagatctccggggcatctccgagcaatccctggtggtctctggagttcagcaccagagtacccttgagcttagtgaggtgggcgtggaagcggcggctgccactagcatcgccatgagtaggatgagcctgagcagtttctcagtgaatcgcccttttctgttcttcatatttgaggatacaacaggccttcccttgtttgtgggctctgtgcgcaatccgaaccctagtgctcctagggagctcaaggagcagcaagactcacctggtaacaaagatttcctgcagtccctcaagggctttcctcgtggcgataagctgttcggccctgatcttaaacttgttcctccaatggaggaggactacccccagtttggctccccaaag

SEQ ID NO: 19033 - DNA, 1473 bp, synthetic construct
  misc_feature 1..1473: note = source = /note="Description of Artificial Sequence: Synthetic coding sequence"
  source 1..1473: mol_type = other DNA
atggccctgctatgggggctgttagtcctgtcgtggtcttgcctacaggggccttgttcagtatttagccctgtatccgcaatggagcctcttgggaggcagctcacatctggacccaatcaggagcaggtaagccccctcaccctgcttaagctaggcaaccaggagcccggcgggcagaccgcactgaagagtccacccggcgtctgtagccgggaccctacccctgagcaaacacatcggctggctcgggccatgatggcgtttaccgccgacctgtttagccttgtggctcagacctccacttgtccaaacctgattctatccccgttaagcgtggccttggcccttagtcatctggccctcggcgcccagaaccatacactgcagcgcctgcaacaggtactgcatgccggttctgggccctgtcttccgcacctgctttctagactatgccaggacttaggacctggagcttttcgcttggcagccaggatgtatctgcagaaagggttccccataaaagaggactttctggaacagtccgaacaattgtttggagctaaacctgtttctttgacagggaaacaagaggacgatctcgcgaacatcaaccagtgggttaaggaggcaacggagggtaagatccaggagttcctctctgggttgcccgaggacactgtattgctgctgttgaacgcgatccatttccagggtttctggcgcaacaaattcgatccaagccttactcaaagagattctttccatctagatgaacaattcaccgtgcccgtggagatgatgcaggcaaggacttacccccttagatggtttttgctcgagcagcctgaaattcaggttgcccactttccattcaaaaataacatgtcttttgttgttctggtacccacacacttcgagtggaacgtgagccaagtactcgcaaacttgtcttgggataccctgcatcctccattagtgtgggagagacctaccaaggtgagattaccaaaactatacttgaagcaccagatggacctagtggctacgctttcccagctgggcctgcaagagttgttccaggccccggatttgcggggtatttccgaacagtccctggtagtgtcgggcgtacagcatcagagtacattggaattgagcgaagtaggcgtggaagctgctgcagccacaagtatcgccatgtccagaatgagcttgagctccttcagcgttaaccggcccttcctgttcttcatctttgaggatacaaccggactgccactgttcgtcggatcagtgcggaaccctaacccttctgctcctcgggagctgaaggagcagcaggacagccctggaaacaaggactttctacaatcgctgaagggatttcctagaggcgataaactgttcgggcctgatctgaagctcgtaccacctatggaagaagactacccacagtttggaagtccaaaa

SEQ ID NO: 19034 - DNA, 1473 bp, synthetic construct
  misc_feature 1..1473: note = source = /note="Description of Artificial Sequence: Synthetic coding sequence"
  source 1..1473: mol_type = other DNA
atggcgctcttgtgggggctgcttgtcctgtcttggagctgtttgcaaggtccatgtagcgttttcagccctgtgagcgcaatggagccactgggtcgccaacttacttcgggtccaaaccaagaacaagtttcccctctgactttgttgaaacttggtaaccaggagccaggcggtcaaaccgctctgaaatcgccaccgggagtctgctctcgcgacccaacccctgagcagactcaccgcctggcacgcgccatgatggcatttaccgcagatctgttctcattggtggcgcaaaccagcacctgtcccaacctgatactgagcccccttagtgtggctctggcgctgtcccatctggccctgggtgcccagaaccacactctgcagcgccttcagcaagtcctgcacgcgggtagcggtccttgtttgcctcacttgctgagtcggctatgtcaagatctggggccgggtgcgttccgcctggcggcgcgcatgtacctgcagaaaggctttcccattaaagaagacttcctcgagcagtccgagcaactgtttggggctaagccagtgtccctgaccgggaagcaggaagacgaccttgctaatatcaatcagtgggtgaaggaagcaaccgagggtaagattcaagaattcctgtcgggtctgccggaggacaccgttctgttgttactgaatgcaatccactttcaaggattctggcgcaacaagtttgatcctagtttgactcagcgtgacagcttccatctggacgagcaattcaccgtgccggtggagatgatgcaggctcgtacgtatccactgcggtggtttcttttggagcagcctgaaatccaggtcgcacacttcccgttcaaaaataacatgtcttttgtcgttctggtcccgacacactttgaatggaatgtgtcccaggtcctggcaaatctgtcttgggatacgctgcatccgccgctggtctgggagcgcccaacgaaggtcagattgcctaagctctacttgaagcaccagatggatctagtggcaaccctgtcgcagcttggcttgcaagaattattccaagctccagatttgcgcggtatttctgagcagagcttggttgtgtccggcgttcagcatcagagcaccttggaactgtcagaagtaggcgtcgaagccgcagccgccacttccatcgcaatgagccgcatgtcgctgagcagcttttctgttaataggccctttctgttttttatatttgaggacactaccggtctgccgttgtttgttggaagcgtccgtaaccctaacccctccgcacctcgtgaactaaaggaacagcaggattcccctggaaataaggacttcctccaaagcctgaagggctttccacggggtgataaactatttggtccagatctgaaactggtgccaccaatggaggaagactatcctcaatttggttcgccgaaa

SEQ ID NO: 19035 - DNA, 1473 bp, synthetic construct
  misc_feature 1..1473: note = source = /note="Description of Artificial Sequence: Synthetic coding sequence"
  source 1..1473: mol_type = other DNA
atggccttgctgtggggcctgttggtcctgtcttggtcctgccttcaaggaccttgttctgttttctcccctgtgtcagcaatggagcctttggggaggcagctcacgtcggggcctaatcaagaacaggtgtcccccttgacactgctgaagctcggtaatcaggagcccggtggacaaacggctttgaagtcaccaccaggagtatgcagccgagatcccaccccggaacagacgcatcgccttgcccgagctatgatggcttttaccgccgatttgttctcccttgttgcacaaacttccacctgtcccaatctgatactatcgcccttgtccgtcgccctggcactctcccatctcgccctcggggcccaaaaccacactctccaacggcttcaacaggtactgcatgctgggtccggcccttgcttgccgcacctgctctcccggctctgtcaggatctcggtcccggcgcgttcagactcgcagcccgaatgtaccttcagaaaggcttcccgatcaaggaggatttccttgagcaaagcgaacaactgtttggcgccaagcctgtttccctcaccggtaagcaggaagatgacttagccaacatcaatcagtgggtcaaagaagcaactgaaggaaagattcaggaattcctctccgggttgcctgaggataccgttcttctgctccttaacgcgatccattttcaaggcttctggcgcaacaaattcgatccgtcactaactcagcgagatagcttccacttagatgagcaattcaccgtgcctgttgaaatgatgcaagctcgcacgtaccccttacgctggtttcttctggagcagcccgagatccaggtcgcccactttcccttcaaaaacaacatgtccttcgtggttttagtcccgacccattttgaatggaacgtatcgcaagtcttggcaaatctaagttgggatacactgcatcccccacttgtctgggaaaggcccacgaaggtccggctgccaaagctctaccttaagcatcagatggacttggtagcaaccttgagccaactgggtctccaagagcttttccaagcgcccgacttgcgcggtatcagcgaacaaagtttggtggttagtggagtccaacaccagtccacccttgagctgagtgaagtgggcgtcgaagcggccgccgcaacatcgattgcaatgagccgcatgtcgctgagcagcttttctgttaatcgcccgtttctattcttcatctttgaggacaccaccggtctaccactctttgttggaagtgtgcgaaatcccaacccttctgcgcctcgcgaacttaaggagcaacaagattccccgggcaacaaggacttcctgcagtccctgaagggcttcccccgtggcgacaagctatttggccccgacctgaaacttgttccacctatggaagaggactatccccaatttggaagtcctaag

SEQ ID NO: 19036 - DNA, 1473 bp, synthetic construct
  misc_feature 1..1473: note = source = /note="Description of Artificial Sequence: Synthetic coding sequence"
  source 1..1473: mol_type = other DNA
atggccctcctctggggcttacttgtgctctcctggtcatgcctccagggaccttgctccgtgtttagtccggtgagcgctatggagccactcggcagacaacttacttctggccccaatcaggaacaggtgtctcccctgactttactgaagcttgggaaccaagaaccgggcgggcaaacagccctgaagagcccccccggagtgtgttccagagatcctacaccagagcagacgcaccggctagctcgcgccatgatggcatttaccgcagacctctttagtctggtcgcgcaaacatccacatgtcctaatctaatcctgtctcccctttccgtcgcacttgctttaagccacctcgccctgggtgcccagaatcacacactccagcgcctacaacaggtcttacacgccgggtctggaccttgcttaccccatttactgtctaggttatgtcaagatcttggacctggggcctttaggctggcggctaggatgtaccttcagaaaggcttccccattaaggaggactttctggagcagagtgaacaactgtttggcgcaaaacctgtgtccctgaccgggaagcaggaggacgatctggctaacattaaccagtgggtgaaagaggcaacagaaggaaagattcaagagttcctgagcggcttgcccgaggataccgttctgctgcttcttaatgctattcattttcaaggattctggcggaataagttcgacccttcattgacccagcgagatagtttccatttagacgaacagtttactgtcccagtagagatgatgcaggctagaacctacccactgcggtggtttctgctcgagcagccagaaatccaggtagcccacttccccttcaagaacaatatgagtttcgttgtgctggtgccgacacatttcgagtggaacgtgtcccaggtgcttgctaacttgtcctgggacaccctgcatccaccactggtgtgggagaggcctactaaggtccggctacctaaactctatttgaaacaccagatggacctggtggctaccctaagccaactggggctccaggagttgtttcaggcgccagacctaaggggaatatccgagcagagcctagtcgtgagcggggtgcagcaccaatccactttggagctttccgaagtaggagtggaggcagcagccgccacttctattgctatgtctaggatgtctttgtctagtttcagcgtgaatagaccattcctgttttttatattcgaagacacaaccgggttacccctgttcgtaggatcagtgcgcaacccgaatccgagcgcaccaagggaacttaaagagcaacaggacagtccaggtaataaggactttcttcaaagtctgaagggcttccctcgtggcgataaactgttcggcccagacttaaagctggttccacctatggaggaggattatccccagtttggaagtccgaaa

SEQ ID NO: 19037 - DNA, 1473 bp, synthetic construct
  misc_feature 1..1473: note = source = /note="Description of Artificial Sequence: Synthetic coding sequence"
  source 1..1473: mol_type = other DNA
atggcgctgttgtgggggcttcttgtcctttcttggtcctgtctacaaggaccctgctcagtattcagcccagtgagtgccatggagccccttgggaggcaactgactagtgggcccaaccaagagcaggtgtcccccttaacactcctgaaactaggcaatcaggagcccggcggacagaccgcgctgaaaagcccgccaggcgtgtgctctagggatcccactcccgagcagacgcacagactagctcgcgcaatgatggctttcacggcagacctgttctcactcgttgcacagactagcacttgtccaaacctaatcctgagcccgttgtctgtcgcactagccctctctcatcttgccctgggagcgcaaaaccatacactccaacggttgcaacaggttctgcacgccgggtccgggccatgcctgccacacttgctcagtcgcctgtgccaagacctcgggccgggtgcctttagactggctgcccggatgtacctccaaaagggattccctatcaaagaggactttctggagcagtcagagcagctgtttggtgccaagcccgtgtcattaactggtaaacaggaggacgacctcgccaatatcaatcagtgggtgaaggaggccaccgaaggtaaaatccaggaattcctgtccgggctgccagaagatactgtgctgctactattgaatgccattcatttccagggcttctggaggaataaatttgacccctcactgactcagcgggactcctttcaccttgatgagcagttcactgtcccagttgagatgatgcaggcaagaacatacccgctgaggtggttcctgttggaacagcccgagattcaggtcgctcactttccattcaagaataacatgagctttgttgtcctggtacccacccacttcgagtggaatgtgagccaggtcttagccaacctatcatgggacacactgcaccctcccctggtatgggaacgacctacgaaggtcagactcccaaagctctatctgaagcaccagatggacttggttgctacactgtctcagctcgggctgcaggaactcttccaggctcctgatctgcgtggcatcagtgaacagtctctcgtcgtgtcaggcgttcagcaccaatcaactttagagctatcagaggtgggagtggaggcagccgctgctacctcgatagccatgtcaagaatgtctctgtcctctttttcagtaaaccggcccttcttattctttatcttcgaagacacaaccggactgcccctctttgtgggatctgtgagaaatccaaacccaagcgctccccgagagttgaaggagcagcaggacagccctggcaataaggattttttacaaagcctcaaggggtttcccagaggagacaaacttttcgggcctgacttgaaactggtgcctccgatggaggaagattacccccaattcggaagtcctaaa

SEQ ID NO: 19038 - DNA, 1473 bp, synthetic construct
  misc_feature 1..1473: note = source = /note="Description of Artificial Sequence: Synthetic coding sequence"
  source 1..1473: mol_type = other DNA
atggcactgctgtgggggctattggtgctttcctggtcgtgtctacagggcccttgttccgtgtttagccccgtgtctgccatggagcctctcggacggcagctcacttccggcccgaatcaggaacaggtgtcaccattgacactgctcaaactaggcaaccaggagcctggcggccagacagctctgaagagtcctccgggcgtgtgctcgagggatcctacacccgagcagactcataggctggcaagggccatgatggccttcacggctgacctattctcccttgtcgcccagacctccacctgccctaacttaattctatcgcccctaagtgtagctctcgctctgtctcacctcgctctgggcgcccagaaccacacccttcaaagactgcagcaagttttgcatgccggttccggcccttgcctcccccatctgttgagtaggctctgccaagacctggggccgggcgctttccggctagctgcgagaatgtatctgcagaaggggttcccgataaaagaagattttctcgagcaatcagagcagctctttggagcaaagcctgtgtcactgacaggcaagcaggaggacgacctcgctaacatcaaccagtgggtcaaggaagccactgaaggcaaaattcaggagttcctaagtggactacccgaagacactgtgcttttacttctgaacgctattcatttccagggcttctggagaaacaaattcgacccttcacttacacagcgcgactcgttccatctcgatgaacagtttacagtccctgtcgaaatgatgcaggcgcggacataccctcttaggtggttcttgctggaacagcctgagatccaggtggcccatttcccatttaaaaataatatgagttttgtcgtcctcgtgcccacacattttgagtggaatgtctcgcaggtgcttgcaaacctgtcttgggatacactccatccgcccctcgtgtgggaaaggcctactaaggtccggttgcccaaactttatctgaagcaccagatggacctcgtagctactctgagccaactggggctgcaagagctgtttcaggccccggacctccgcggaattagcgagcaaagcctggtggtcagcggagttcagcaccaatctacactagagttgtctgaggtcggtgttgaggctgcggcggccacttcgattgcaatgagcagaatgagcttgtctagcttctccgttaatcggccctttctcttcttcatcttcgaggatacaaccggcctacccctcttcgtgggatctgtgcggaaccccaatccctctgccccgcgggaactgaaggagcaacaggattcacccggaaataaggattttttgcagagtctcaaggggtttccacggggcgacaagttgttcgggcctgacctgaaactggttcctcccatggaggaggattacccacagttcggaagcccaaag

SEQ ID NO: 19039 - DNA, 1473 bp, synthetic construct
  misc_feature 1..1473: note = source = /note="Description of Artificial Sequence: Synthetic coding sequence"
  source 1..1473: mol_type = other DNA
atggcattactctggggcttgcttgtgctatcttggtcatgtttgcaaggaccttgcagtgtattctctcccgtcagtgccatggagcccctcgggaggcaacttacctccggacccaatcaggagcaagtttcacctctcacactcttgaagctcggcaaccaggaacccggaggacaaactgctctcaaaagtccacctggcgtatgctcccgtgatcccaccccagaacaaacacatcgtctggcaagagctatgatggcattcaccgcagaccttttttcactggttgctcaaacttccacatgccccaatttgattttaagtccactgtcagttgccctcgcactaagccacctggctctaggcgctcagaatcacaccctgcagagattgcagcaagtgctgcacgcgggtagcgggccttgtctgccacatttattatccagactgtgtcaggacctggggccgggagcctttaggttggccgcccgaatgtaccttcagaagggatttcctattaaggaggactttctagaacagtccgagcagttgttcggagccaagcccgtctctctgactggtaaacaggaggatgacctagcaaatatcaatcagtgggtcaaagaagctaccgagggaaagatacaggagttcctgagcggacttcccgaagatacagttctgttattgctgaacgcaattcactttcaggggttttggaggaacaaattcgatccctcactgactcagcgggattccttccatctggacgagcagttcactgtgcctgttgaaatgatgcaggctcgcacgtaccctctgcggtggtttcttctggagcaaccggagatccaagttgcccattttccttttaaaaacaacatgtcttttgtggtactcgtgcccacacattttgagtggaacgtttcgcaagttttggctaacctgtcctgggatacgctgcaccctcccctggtgtgggagagacccacaaaagtccggttgccgaaactgtacctgaagcatcaaatggacctagtagcgactctctctcaacttggactacaggagctcttccaggccccagatctgcgggggatatctgaacagtctctagtggtaagtggcgtgcagcatcagtctaccctcgagctctctgaagtcggagtcgaggcagctgctgctacgagtatcgctatgtcgcggatgtctttatcgtcattctcggttaatcggccttttctcttctttattttcgaggataccacaggtttgccccttttcgtgggaagcgttcggaacccaaaccctagtgcccccagagagctgaaggagcagcaagactcacccgggaataaagactttttgcagagtctaaaaggcttccccagaggcgacaagctgttcggccctgatttgaagcttgtgcctccgatggaagaagactacccacagtttggcagccctaaa

SEQ ID NO: 19040 - DNA, 1473 bp, synthetic construct
  misc_feature 1..1473: note = source = /note="Description of Artificial Sequence: Synthetic coding sequence"
  source 1..1473: mol_type = other DNA
atggccctgctttgggggctccttgtgttgagctggagctgcctgcagggtccttgttccgtgttttcgcctgtcagcgctatggaaccgctgggcagacagttaacatcaggacccaatcaggaacaggtgagccctttgacactccttaaactggggaaccaggagcctggaggtcagaccgcactgaagtcaccgccaggcgtttgctccagagatccaaccccagagcagactcaccgcctggcccgggccatgatggcattcacagcagacctgttctccctggtagcacagacatctacttgtccaaatctaatcctgtcgccactgagcgtcgctttggcactctctcatctcgcccttggagcccagaaccataccctgcagcgcctccagcaggtgctgcacgctggctcgggcccttgccttccccacctgctcagccggctctgtcaagatcttggacccggggccttccgtcttgcggcccggatgtacctgcaaaagggtttccccatcaaagaggattttctggagcagtctgaacagttgttcggggccaaacctgtcagtctgacaggtaaacaggaagatgatctggccaacattaaccagtgggtaaaggaggccacggaagggaagatccaagagtttctgagtggccttcccgaggatacagtactgctgctgctgaatgctatccacttccagggcttctggcgaaacaaatttgatccctcattgacccagagagactctttccatctagatgaacagtttactgttcctgtcgaaatgatgcaggcccggacgtacccattgcggtggttcctgctcgaacagccagagatccaggtggcgcatttcccttttaagaacaatatgagcttcgtagttttggttcccacacactttgagtggaacgtaagtcaggttctggccaatcttagttgggacaccctgcacccacctctggtatgggagaggccaacgaaggtgaggctgcctaaactgtacctgaaacaccagatggacctggtggctaccctgtcccaattaggcctgcaggagttatttcaggctcccgaccttaggggcatctccgagcagtctctagtcgtgagtggggtgcaacaccaaagtactctcgagcttagcgaagtaggcgtggaagctgccgcggccacttctattgcaatgtcgcggatgtctctgtcttcgttctcagtaaaccgccccttcctcttcttcatcttcgaagatacgactggactcccactcttcgtgggcagcgtgcggaatccgaatccatctgctccaagggaactaaaggagcagcaggactccccagggaataaggattttctccagtcactgaaagggttcccccgaggcgacaagctgttcggaccggatcttaagttagtcccccctatggaggaggattacccacagttcggctctccaaag

SEQ ID NO: 19041 - DNA, 1473 bp, synthetic construct
  misc_feature 1..1473: note = source = /note="Description of Artificial Sequence: Synthetic coding sequence"
  source 1..1473: mol_type = other DNA
atggcactgctttgggggctgcttgtgttatcctggagctgcttgcaggggccatgctccgtgttttcgccagttagcgctatggagccgctgggtaggcaactgactagcggaccaaaccaggagcaagtgtctcctctgacgctgctgaagctgggcaaccaagaacccggcggccagaccgctttaaagagcccgcccggcgtttgctccagagatcctacccccgagcagacccaccgactggcacgggccatgatggcatttacggctgacctgttttccctggtcgcacagacgtcaacatgtccgaatctgatcctcagccctctgtctgtggcactggctttgtcgcacctggccctgggggcacagaaccacaccctccagagacttcagcaggtcttacacgcagggagtggtccgtgcctgccacatttgctctcccggctctgccaggacctgggtcctggcgccttccgtctggcagcacgaatgtatttgcagaaggggtttcctattaaggaagattttctggagcagtcggagcagctgttcggagcaaaacctgtaagccttaccgggaaacaggaggatgacctagctaatattaatcagtgggtcaaggaggccacagaaggcaagattcaagagttcttatccggactccctgaggacactgtcctcctccttttgaacgctatccactttcagggcttctggagaaacaagttcgatccttctctcactcagagagattcctttcacttggatgaacagttcacagttccagtggagatgatgcaggccagaacttatccattgagatggttcctactggaacagccagaaatccaggtggcccacttcccatttaagaataacatgtcctttgttgtcctggtccctacccattttgagtggaatgtcagtcaggtgctagctaacctatcttgggacacccttcaccctccgcttgtttgggagaggccaaccaaggtgaggcttccaaagctgtaccttaaacaccaaatggatttggtggcgactctgagccaacttggcctgcaagaactgtttcaagcaccagatcttcggggcatcagcgaacaaagcctggtggtgagcggcgtccaacaccagtcaacacttgaactctcagaagtgggtgttgaagcagccgctgctacgtcgatcgctatgagccgaatgagtctctcctcattcagcgtcaacaggcccttccttttttttatatttgaagacactactggcctccctctgttcgtgggaagcgtcagaaaccctaatccatccgccccacgagagttaaaggagcagcaggatagcccaggaaataaggattttctgcagtcattaaaaggatttcctaggggggataagctgttcggcccagaccttaagcttgtgccccctatggaagaggattaccctcagttcgggagtcctaaa

SEQ ID NO: 19042 - DNA, 1473 bp, synthetic construct
  misc_feature 1..1473: note = source = /note="Description of Artificial Sequence: Synthetic coding sequence"
  source 1..1473: mol_type = other DNA
atggcacttctatggggacttctagtcctttcttggtcctgccttcaaggaccatgtagtgttttttctcctgtgtctgcgatggaacctctcggacggcagctcacatccgggccaaaccaggaacaggtcagtccactcactttactcaaactcgggaaccaagaacctgggggacagacagcactcaaaagtcctccaggagtttgttccagagatcccactcccgagcagacacatagactagctcgggccatgatggcctttacagccgatctgttttcgctggtcgctcagactagtacttgtccaaatctgatcctcagtccactttccgtagccctcgctctgtcccatctcgccctgggagcccagaaccacacattgcagcgcctccaacaagtgctccatgctggaagtgggccctgtttgccacatttgctatcacggctctgtcaggatctgggacccggggcgttcaggctggctgctagaatgtacctgcagaaagggttccccatcaaagaagatttcctcgaacaaagtgaacagttattcggagccaaacctgtttctctcacaggaaaacaggaggatgatctcgctaatataaaccagtgggtgaaagaagctactgagggaaaaatccaggaatttctctccggactccctgaagatacagttctccttttgttaaacgccatacattttcagggattttggcggaataaatttgacccttcattgactcagcgcgactccttccatctggacgaacagtttacagtgcctgtcgaaatgatgcaagcccgcacttatccactacggtggttccttctcgaacagcctgagatccaggtggctcattttccctttaaaaataatatgtccttcgtcgttctcgtgcccacacactttgaatggaacgtttcccaggtgttagccaatctcagttgggatactctgcatccccccctcgtgtgggaaagacctactaaggtaaggctcccaaaactgtatcttaaacatcaaatggatctagttgctacactctcacagcttggactccaggaactgttccaggctccagatcttagaggaatttctgaacagtctctcgtggtgagtggagtgcagcaccaatctacactagaactttctgaggtcggggtagaagccgctgcagctacatctattgctatgagtcggatgtctctttctagtttctctgttaatcggccttttctcttctttatctttgaagatactactggactgccactcttcgtggggtcagttcggaaccctaacccatctgcaccaagagaacttaaggagcagcaagattcacccggaaataaggatttcctacaaagtctaaagggattcccccgaggggataaactctttgggcctgatcttaaactcgtgccacccatggaagaagattatcctcagtttgggagtccaaag

SEQ ID NO: 19043 - DNA, 1473 bp, synthetic construct
  misc_feature 1..1473: note = source = /note="Description of Artificial Sequence: Synthetic coding sequence"
  source 1..1473: mol_type = other DNA
atggccctgctgtgggggctgcttgttctgtcatggtcctgcttgcagggtccgtgtagtgtattctctcccgtatccgcaatggagccacttggccgccagctgacaagcgggccaaatcaggagcaggtctccccacttactctcctgaaactcggcaatcaggagcccggcggtcaaacagccttgaagtctccacccggagtgtgctctcgcgatcccactccagagcagacacatagactggctagagcaatgatggccttcaccgccgatctgttctccctggtggcacaaacctcgacgtgtcctaacctgattttgtctcctctgagcgtggcactggcgctgtcacacctggctctgggagcacaaaaccacactttgcagaggctgcagcaagtgttgcacgctggatccggtccatgtctgccgcatcttctgtccagattatgtcaggacctcggccccggtgccttccgattggccgctagaatgtacctgcaaaagggattccctatcaaggaagattttctggaacaatccgagcagcttttcggtgccaaaccagttagccttacagggaagcaggaggatgaccttgctaatattaaccaatgggtgaaagaggcaaccgagggaaagattcaggaatttttgtccggcctcccagaagacacagttttgttactgctgaacgcaattcactttcaaggtttttggagaaacaaattcgatcccagtttgacccagcgcgatagttttcacctggacgagcagttcacagtgcccgtggaaatgatgcaggcgcgcacttatcccctaagatggtttctgctagaacagccagagattcaggtcgcccattttccctttaagaacaacatgagcttcgtggtgttggtcccaacccacttcgagtggaacgtgagtcaggtgctggcgaatctttcatgggacaccctccaccctcccctcgtctgggaacgacccactaaagttaggctaccaaaactgtatcttaagcatcagatggacctggtcgctaccctcagccaacttgggctgcaggagctgtttcaggcccctgatctaagaggtatctcagagcagtctctcgtggtgagtggagtgcagcaccagtccactctggaattatctgaagtgggagtggaagctgccgccgccacatccatagctatgtctaggatgtctctttcaagcttctccgtgaaccgccccttcctgttctttatttttgaggatactaccggccttcccctgttcgtcggctccgttcgcaatcctaaccccagcgctcctcgggagttgaaggagcagcaggactcacccgggaacaaggactttttgcaatcattaaagggctttccacggggtgacaagctgtttggaccagacctgaaactggtccccccaatggaagaagattacccccagttcggttcgcccaag

SEQ ID NO: 19044 - DNA, 1473 bp, synthetic construct
  misc_feature 1..1473: note = source = /note="Description of Artificial Sequence: Synthetic coding sequence"
  source 1..1473: mol_type = other DNA
atggccctgctttggggccttctggtcctctcttggtcttgtctccagggcccttgctcagtattcagtccggtttcagcaatggaacccttgggacggcagctaacttcaggtccaaaccaggaacaggtgagcccactgaccttgctcaagcttggcaaccaggaacccggtggacagaccgctctgaaatcacctccaggagtgtgtagcagagacccaacaccagaacagacacaccggctcgctcgcgcaatgatggcctttacagctgacctgttctctcttgtcgcgcagacgtccacttgtcccaatctgattttaagccctctgagcgttgccctcgccctaagccacctggctttgggggcccaaaatcacacgcttcagaggctccagcaggtgttgcacgctggctcaggcccatgtttgccccatctcctgagccgactatgccaggacctaggcccaggggcgttccggctagctgctagaatgtatctgcagaaaggatttcctatcaaggaggacttcctggagcagtccgagcagctgttcggtgcgaagccagtgtcactaaccggcaaacaggaggatgacctcgctaatattaaccaatgggtgaaggaggctacagaaggcaaaatccaggagtttctgagtgggctgcccgaggacaccgtcctgttgttgctaaatgcaatacatttccaggggttttggcggaacaagtttgacccctcattgacgcagcgagattcattccaccttgacgaacagttcactgtgcccgttgagatgatgcaagctaggacttaccccttacgttggttccttctggaacagccagagatacaggtcgcccacttccccttcaagaacaacatgtcctttgtcgttctggtgcccacccatttcgagtggaacgtcagccaagtcctggccaacctctcctgggacaccctgcatcctcccctggtgtgggaaagaccaactaaggttaggctgccaaaactctacctgaagcaccagatggatttggtggcgaccttatctcaattggggctccaggagctcttccaggcgcccgatctacgcgggatcagcgaacagtccttggtggtgagtggcgtccagcaccaatcaacactcgaactttccgaagtgggcgtcgaggcagcagccgccacttcaatcgccatgagtaggatgagtttatcttcattcagtgtgaacaggcccttcctgttcttcattttcgaggatacgactggactgccactgttcgtgggctccgtccgcaatcccaatccttcggctcctagggagcttaaagagcaacaggactctcctggaaataaagactttcttcagagcctgaaggggttcccgagaggtgataagctcttcggtcccgacctgaagctagtgcctcccatggaggaagactatccacaattcggatcaccaaaa

SEQ ID NO: 19045 - DNA, 1473 bp, synthetic construct
  misc_feature 1..1473: note = source = /note="Description of Artificial Sequence: Synthetic coding sequence"
  source 1..1473: mol_type = other DNA
atggcattactgtggggtttgctcgtattgagctggtcatgcctccagggaccgtgctctgtgttcagcccagtgtccgcaatggagccgctgggccgccagctgacgagcggcccaaaccaggagcaggtctcgccccttaccctcctgaaactgggaaatcaggagcccggcggtcaaactgcactgaagtccccacccggcgtgtgttcccgagaccccaccccggagcagacccacaggttggcccgcgccatgatggcgtttactgcagacctgttttcgcttgtcgcgcaaacttccacctgccccaacctcattttgtcgcccttgtccgtggcactcgccctgtcgcacctggcgctgggtgcgcaaaaccacaccctgcagcgccttcagcaggtgttgcacgccggcagtggcccatgcttgccgcacctactgtcccgattgtgccaggacctgggccccggagcctttcggctggctgccagaatgtatctgcagaagggtttcccgattaaggaggatttcctcgagcagtccgaacaactgttcggtgccaagccggtaagcctgaccggaaaacaggaggatgatttggccaacatcaaccagtgggtgaaagaggccacggagggaaagattcaggaatttcttagcggcctgcccgaagacacagtgttgctgttgctgaacgccatccactttcagggcttctggagaaacaagtttgatccatcgcttacgcaacgggatagctttcacttagacgaacaattcacggtgcctgtcgagatgatgcaggctcgcacttatccgttgcgctggtttctcctggagcagccggagatacaggtcgcccattttccattcaagaataatatgagcttcgtggtcctggtcccgactcacttcgaatggaacgtgtcgcaggtgttggcgaacttgtcgtgggacactttacatcctccgctcgtttgggagagaccgaccaaggtccgcctacccaagttgtacctgaagcatcaaatggacctggttgcgaccttatcccagttgggcctacaggagctgtttcaggctcctgatttaaggggcatttcagagcaatcgctggtggtttctggtgtccaacaccagtccactctcgagctatcagaggtcggggtagaggccgccgccgccacgtctatagctatgagccggatgagtctcagctcctttagcgtgaatcgtccatttctattctttatctttgaggacacaacaggcctcccgctgttcgttggttccgtaaggaacccaaatccatcggcgccacgagagctgaaagagcaacaggatagcccaggtaataaagatttccttcagtcattgaagggcttcccccggggagataagctgtttggaccggacctgaaacttgtgccgccaatggaagaagattacccccagttcggcagcccgaag

SEQ ID NO: 19046 - DNA, 1473 bp, synthetic construct
  misc_feature 1..1473: note = source = /note="Description of Artificial Sequence: Synthetic coding sequence"
  source 1..1473: mol_type = other DNA
atggcgttgctgtggggattgctggtgctgagctggtcgtgcctgcagggcccttgtagcgtattcagtcccgtctctgctatggagcctctgggcagacaacttacctccggccctaaccaggagcaggtgagccctttgacccttcttaagctgggtaaccaggagccaggcggccaaaccgccctgaagagccccccgggtgtgtgcagtcgggatcccacacctgaacaaacccatcgcctggctcgcgcaatgatggcctttactgcagacctgtttagcctcgtcgcgcagactagcacctgtcccaatctgatcttaagcccattgtcagttgctttagctctgtcccatcttgctctcggcgcccagaaccatacccttcagcggctgcaacaggtactccacgcaggttcaggtccttgtcttcctcatctcctcagcagactttgccaagacctcggtcccggagcttttcgtcttgctgcgaggatgtaccttcagaagggatttcctatcaaagaggatttcttggagcaaagcgaacagctctttggcgctaagccagtgagcctcacggggaaacaagaagacgatctcgctaacatcaatcaatgggtaaaggaagctacagaagggaagatccaggagttcctgagcggattgccggaggacacagtgttgctgcttcttaacgccatccactttcagggattctggcggaacaaatttgacccaagcttgacacagcgggactctttccacttggacgagcaatttaccgtgccagtggaaatgatgcaggcaaggacctatcctctgcgatggttcctcctggaacaaccggagatccaggtggcacacttcccattcaaaaacaatatgtctttcgtcgtgcttgtgccaactcactttgaatggaacgtgtcccaggttctcgccaacttgtcctgggataccttacaccccccactcgtctgggagcgcccgacaaaagtgcggctccctaaactttatctgaaacatcagatggacttggttgcaacattaagtcagctcggtttgcaggagctgttccaagcgcctgacttgagaggaattagcgagcaaagcctcgttgtttcaggtgtccagcaccagagcaccctggagttaagcgaagtgggcgttgaagccgcagcagctacaagcattgcaatgagccgcatgtccttgtcctcattttctgtcaacaggcccttcttgttcttcatttttgaggacacaaccggattgcccttgttcgtcggaagtgtgcgcaacccaaacccgtcagctcctcgcgagctcaaagaacagcaagatagtccgggaaacaaggacttcttacaatctttaaagggatttcccaggggcgataaactgtttggacctgatctcaaactggttcccccgatggaagaggattacccgcagttcggctctccgaag

SEQ ID NO: 19047 - DNA, 1473 bp, synthetic construct
  misc_feature 1..1473: note = source = /note="Description of Artificial Sequence: Synthetic coding sequence"
  source 1..1473: mol_type = other DNA
atggctctgttatggggactgctggtgctctcgtggagctgcttgcagggaccttgcagcgtgttttctcccgtcagtgcaatggagccactgggccggcaactcacatcgggccctaatcaggaacaggttagcccgctcactttactgaagctcgggaaccaggagcctgggggacagactgcacttaagtctcccccaggggtttgttctcgggaccctactcctgagcagacccaccgtctggcgagggcaatgatggcattcaccgctgacttgttttcattggtcgcccagacatccacttgccctaaccttatcctgtcacccctgagtgtggctctggccctgagccacctggccctgggcgcacagaatcacacgctgcagaggctccaacaggttcttcacgcaggttcagggccttgtctcccccatctgctgagtcggttgtgtcaggacctgggacctggagcgttccgtctagcagctcggatgtatctgcaaaagggctttccgataaaggaagactttctggagcaatctgaacagctctttggtgccaagcccgtgtcattgacaggaaagcaggaggacgacctcgcaaacattaaccagtgggtgaaagaagccaccgaagggaagatccaggaatttctgtcaggactgcccgaggatacagttttgctgctgctcaacgccatacacttccagggattctggcggaataagtttgacccttcactgactcaacgcgactctttccacctggacgagcagtttacagttcccgtagagatgatgcaagccaggacctaccccttgcgctggtttctgttggaacaacctgagatacaggtagctcatttcccctttaaaaataacatgagcttcgtggtgctggttcctacccactttgaatggaacgtttctcaagtcttggcaaatctgtcctgggacacacttcatcctcccctcgtatgggaaaggccaactaaagttcgtcttcctaagctgtacctgaaacaccaaatggatcttgtagcgacactgtcacagcttggcctgcaggagctgtttcaggcacccgacctcaggggcatttccgaacaatcgctggtggtcagcggggtgcagcatcagagcaccctggagctatcagaagtaggcgtggaagcggccgctgccacttccatcgccatgtctagaatgtcactctcatccttcagcgtgaacaggccttttctgtttttcattttcgaggatacaaccggcctgccgctcttcgtgggcagcgtgcggaatcccaatccttcagccccacgggaattgaaggagcagcaggattcacctggcaataaagactttttgcagagtcttaaagggttcccacgcggtgataaactcttcgggccagatttaaaactcgtcccacccatggaggaggactatccccagtttggttctcctaaa

SEQ ID NO: 19048 - DNA, 1473 bp, synthetic construct
  misc_feature 1..1473: note = source = /note="Description of Artificial Sequence: Synthetic coding sequence"
  source 1..1473: mol_type = other DNA
atggcccttttgtggggtctcctggtattgagctggagttgcctccagggaccctgtagcgtgttttctcccgtctcagcaatggagcccctgggtagacagttgacttccggtcccaaccaggagcaagtatccccgctcactctgttgaagctgggaaatcaggagcctggaggacagacagcgcttaaatcaccacccggcgtgtgctcccgggatcccacacctgagcagacacaccgtctggcgagggcgatgatggcctttaccgcggacctgttttccctagttgcccagacgtccacttgtcctaacctcatacttagtccactgagcgtggcgctggccctatcccacctggcactgggagcgcagaaccatacgttgcagagactgcagcaggtgttgcatgccggctctggcccctgcctgccccatctgctctcccgtttgtgccaagacctgggccctggcgccttcaggctagctgcacgtatgtacctccagaagggttttccaatcaaggaggacttcctggaacagagcgagcagctcttcggggcaaaaccagtatccctgaccggtaagcaagaggatgatctggctaatatcaatcagtgggtgaaggaagcgactgagggaaaaattcaggagtttctgtcaggcctgccagaggatacggttttgctcctgcttaatgctatccactttcagggcttctggcgtaacaaatttgacccttcacttacccaacgggatagcttccacttagatgaacaattcaccgtcccagtggagatgatgcaagcacggacatatcctctaagatggttcctgcttgagcagcccgaaatccaggtagctcacttcccctttaagaataatatgtcttttgtcgtgctagtccccacccactttgagtggaacgtatcacaagttcttgctaatctgtcatgggatactctacacccacccctggtgtgggagcgtcccaccaaggtgcgtctgcctaaactgtatctgaaacaccagatggatttagtcgccacactcagccaactggggttacaggagctgtttcaggcccccgatcttcggggaatcagcgagcagtcattggtcgtcagtggtgtgcagcatcagtcgacactggagcttagcgaagttggtgttgaggccgccgccgccactagcatcgccatgtcccgaatgagtctctcttctttcagcgtcaatagaccttttcttttttttattttcgaggatacgaccggtttgccactatttgtcggctctgtgaggaacccaaatccatctgccccacgggagctgaaggagcagcaagactcacccggcaacaaggatttcctgcagtctctgaaaggattccctagaggcgataagttgtttggacctgatttgaagctggtgccccccatggaggaggactatcctcagtttgggagcccaaag

SEQ ID NO: 19049 - DNA, 1473 bp, synthetic construct
  misc_feature 1..1473: note = source = /note="Description of Artificial Sequence: Synthetic coding sequence"
  source 1..1473: mol_type = other DNA
atggcattattatgggggctgcttgtgctctcgtggtcatgtttacaggggccctgctctgttttcagtcccgttagtgccatggagccccttgggcggcagctgacatctggacccaaccaggagcaggtcagtccacttacactactgaaactgggaaaccaggaaccagggggacagacagcgttaaagtctccaccaggggtatgttcaagagatcctactcccgaacagacacataggctggcaagagccatgatggcctttactgcagatctgttcagtcttgtggcccagacttccacttgtcctaatctgatcttgagtcctctctcagtggcattggccctcagtcaccttgctcttggagcgcagaaccatacactccagagacttcaacaagtactacacgccgggtctgggccatgcctccctcacttgctgagtaggctgtgccaggatcttggacctggggctttcaggctcgcggctagaatgtatcttcagaaagggtttcccataaaagaagattttcttgaacagtctgaacagctctttggggcaaaaccagtgtcccttacaggaaaacaggaagatgatctagcgaatattaaccagtgggtaaaagaagctacagaagggaaaatccaggaatttctctccgggctccctgaagatactgtactgttgttgctgaacgcaatacatttccaggggttctggagaaacaaattcgatccctctttaacacagcgggactcattccatcttgatgaacagtttactgtgcctgtcgaaatgatgcaggcacgaacttatcctttacgctggttcctgcttgaacagccagaaatccaggtagcgcatttcccatttaagaacaatatgagtttcgttgtgctagttcccacacacttcgaatggaacgtgagtcaagtgttggctaacctgtcttgggatactctgcatccacctctggtctgggaacggcccacaaaagttcgactgcccaaactgtatctcaaacatcaaatggatttggtggctacactgtcccagctggggctccaggaactcttccaggctccagatctgcgaggaatctctgaacagtccctggttgtatccggggtccagcatcagagtactctagagctctcagaggtgggggtcgaagctgccgctgcaacatcgattgctatgagtcgcatgtctctgtcttcgttctctgtgaaccggccatttctcttttttatcttcgaagatacaacaggactaccattgttcgtaggatctgtgcggaaccctaatccctcagcccccagggaactcaaagaacagcaggactcccctgggaacaaagattttcttcagtctcttaaaggatttccacgcggggacaaactctttggaccagatctcaagctagtgcctcctatggaagaagattatcctcaatttgggtcaccaaag

SEQ ID NO: 19050 - DNA, 1473 bp, synthetic construct
  misc_feature 1..1473: note = source = /note="Description of Artificial Sequence: Synthetic coding sequence"
  source 1..1473: mol_type = other DNA
atggctctgctgtggggcttgttagtgctaagctggtcctgcctgcagggcccgtgctcggtgttcagcccagtgagcgctatggagccactcggacggcaactaactagtggcccgaatcaggaacaagtctctccactcacattattaaaattgggcaaccaagagcctggcgggcagaccgccctgaagagcccccctggcgtttgtagcagggacccaactcctgaacaaacgcaccgtcttgcccgtgccatgatggctttcacagccgaccttttctcactagttgcccagacctcaacttgcccaaatttgattctcagccctctgtctgtggccctagctctgagtcatctggcactgggtgcacagaatcatacactgcagcggctccagcaggtcctacacgcaggaagcggtccctgcctcccccacctgctgagccggttgtgtcaagacttaggacccggagcttttcggctggccgcacgcatgtacctgcagaaggggtttccaatcaaagaagactttttggagcagtcagaacagctttttggggcaaaacccgtcagtcttacaggtaagcaggaagacgacctcgccaacatcaaccagtgggttaaggaagccacagaggggaagatccaggagttcctgtcgggtctaccggaggacacagtgctgctgctcttaaacgcgattcactttcaaggtttctggaggaacaagtttgatccaagcctcacccagagggacagctttcaccttgacgagcagttcacggtacccgtggagatgatgcaggcacgtacctaccctctgcgatggtttcttctagagcagccagagattcaggttgcccactttccatttaagaataacatgtccttcgttgtcctggttcctactcactttgaatggaatgtgtcccaggtcctggccaacctctcttgggatacgcttcacccccctctcgtatgggaacggccaacgaaggtacggctgccgaaactttacttgaagcatcagatggacttggtcgctaccctgagccagcttgggcttcaggaactgtttcaagcaccagatctgagaggcatctccgaacagagcctcgtggtaagcggggtccagcatcagtctaccctcgagttatcagaagtgggggtggaggccgctgcagctaccagtattgctatgtctaggatgagtttatcctccttttccgtgaatagaccgttcttattttttatattcgaagacacgacggggctccctctgttcgtcgggtcagtgcgaaatccgaacccatcagcaccccgggaactgaaagaacagcaggattcccctggaaataaagattttctgcaatccctcaaaggttttccccgaggcgataaactgttcggtccggatctgaagctcgtacctccaatggaagaggattacccccagttcggttcccccaaa

SEQ ID NO: 19051 - DNA, 1473 bp, synthetic construct
  misc_feature 1..1473: note = source = /note="Description of Artificial Sequence: Synthetic coding sequence"
  source 1..1473: mol_type = other DNA
atggcgctgctatggggtttgctcgtcctgagttggagctgcttgcaaggaccttgttccgtgttcagtccggtatcagccatggagcccctcggccgtcagctgacctccggccctaaccaggagcaggttagtccactcaccctgctcaagctgggcaaccaggagcctggaggacaaaccgctttgaagtcgccacctggcgtgtgtagccgtgaccccactcccgaacaaacccatcgcctggctagagcaatgatggccttcacagcggatctgttctctcttgttgcccaaacttcaacatgcccgaacctcatcctgtccccccttagcgttgccctggcactctcccacctggctcttggggcccagaaccacaccctccagagactgcaacaggtgctgcacgctggcagcgggccatgtctccctcacctgctaagcagactctgccaggatctgggtcctggcgcattccgacttgctgcaagaatgtacttacagaaaggctttcctattaaggaagacttcttggaacagagcgagcaactgtttggcgcaaaacccgtgagcctgacaggcaagcaagaggacgatcttgctaacatcaatcaatgggtcaaagaagcaactgagggcaagatccaagagtttctctcaggcctaccagaggacactgtgctgctgctgttgaatgctattcattttcagggattttggaggaacaaattcgatccttcgttgacccagagagattcgtttcatctagacgaacagtttacagtccctgtcgaaatgatgcaagcgcggacgtatcctttgcggtggtttctgttagagcaaccggagattcaggttgcacatttccctttcaagaataatatgtcttttgtggtgcttgtgcctactcatttcgagtggaacgtgtcacaggtactggcgaacttgtcttgggataccttgcacccacctcttgtctgggagaggcctactaaggtgcggctacctaagctttacctaaagcaccagatggatctggtggccactttgagccaacttggccttcaagagctcttccaagcccccgatctgagggggatctccgagcagagcttggtggtctcgggagtacaacaccagagtaccctggaactcagtgaagtgggggtggaagcagcagccgcaacatcgattgcaatgagtcgaatgtccttgagttcattttcagtgaacaggccatttctgttttttatcttcgaagatactacaggactgccactgttcgtggggagtgtgcggaatcccaatccttctgcaccccgcgagctaaaggaacagcaggactcacccggcaacaaagattttctgcagtctctgaaaggctttccgcgaggcgacaaattatttgggccagatctgaagctcgtgcctcccatggaggaagattacccacagtttggaagcccaaaa

SEQ ID NO: 19052 - DNA, 1473 bp, synthetic construct
  misc_feature 1..1473: note = source = /note="Description of Artificial Sequence: Synthetic coding sequence"
  source 1..1473: mol_type = other DNA
atggccttgttgtggggcctgctggtactgagctggtcctgcctgcagggcccttgttccgtattctctcccgtgagcgccatggagcctctcggaagacagctcaccagtggtcccaaccaggagcaggtctctccgctgaccttgttaaaactgggcaatcaagaacccggaggacagaccgcattgaagtcaccccctggagtttgctctagggaccccacaccagagcagacccatcgactcgccagagcaatgatggccttcacagccgacctgttctctttagttgcccaaacatccacctgccccaacctgattctgagccccctgtctgtggctcttgcactgtcccacctagccctcggtgcgcagaatcacaccttgcagcgacttcagcaggtgctgcatgctggatccgggccttgtctgccacaccttttgagtaggctctgccaggacctcggccctggcgcgttcaggctcgctgccaggatgtacctgcagaaaggattcccaattaaagaagattttctcgaacagagcgagcagctcttcggcgcaaagcccgtgtcactgaccgggaagcaggaggatgacctggctaacatcaaccagtgggtaaaggaggcgactgagggtaaaattcaggagttccttagcgggctgccagaggatactgttctcctgctcctcaacgccatccacttccaaggcttttggcgcaataaattcgaccccagtctgactcaacgcgattctttccatctggacgaacagtttaccgtacccgtggagatgatgcaggcccggacatatccgctgcgctggtttcttctagaacagcctgaaatccaggtcgcacactttcccttcaagaacaatatgtcgttcgtggtgctggtgcctacacatttcgagtggaatgtgagtcaggtccttgctaatctgtcttgggataccttacaccccccactcgtgtgggaacgtcccacaaaagtccgcctccctaagctgtatcttaaacatcagatggacctggtagccaccttgtcacagcttgggcttcaagaattatttcaggcacctgatctcagggggatctctgaacaatctctggtcgtctcaggagtccaacaccaaagtacactggaactgtccgaagtcggggtcgaggccgcagctgcgacttccatagccatgagcagaatgagcctctccagcttcagtgtaaatagaccttttttgttttttatctttgaagacaccaccggtttgcccctcttcgtgggatccgtgaggaacccaaatcctagtgccccacgcgagctgaaagagcagcaggacagtccagggaacaaagacttcctgcagtcactaaagggattcccaagaggtgataaactattcgggcccgacctgaaactggtccccccgatggaggaggactatccccagtttgggtctcccaag

SEQ ID NO: 19053 - DNA, 1473 bp, synthetic construct
  misc_feature 1..1473: note = source = /note="Description of Artificial Sequence: Synthetic coding sequence"
  source 1..1473: mol_type = other DNA
atggctctcctctggggcctccttgtcctgtcctggtcttgtctccagggcccttgttctgtcttctcccccgtgtccgccatggagcccctcggcagacagctgaccagcggcccaaatcaggagcaggtcagcccactcaccctgctaaagctgggcaatcaggaaccagggggccagacagcactgaaaagcccacccggtgtgtgttctcgcgaccctactcccgagcagacacacagattggctcgcgctatgatggcttttaccgccgacctgtttagcctggtggctcagactagtacatgcccaaacctaattctaagccccctctctgttgccctggccctgtcccatctggccctaggcgcccagaatcataccctgcaacggctgcagcaagtgctgcacgctgggagtgggccttgtctgccacatctgctaagtcgactctgccaggacctgggacccggcgcctttaggctggcagccagaatgtacctacaaaagggctttcccatcaaggaagacttcctggaacagtctgaacaactgtttggagccaaacccgtgagtctgactgggaagcaagaggacgatctggctaacattaatcagtgggttaaagaggccaccgaggggaagatccaggagttcctttccgggttgcccgaggacactgtgctcttattactaaatgccattcattttcagggcttttggagaaacaagtttgatccttctctgacacagcgagactcttttcaccttgacgagcagtttaccgtgccagtggagatgatgcaggctcgcacctaccctcttcgttggtttttactagagcaaccagaaatccaagttgcccactttcccttcaaaaacaatatgtccttcgtggtgttggtgcccacccacttcgaatggaacgtgagtcaggtcttagcaaatctgtcctgggacactctgcaccccccgctggtgtgggagcgccctaccaaagttcgattgccaaaactgtacctgaagcaccaaatggacctggtcgccactctgtcccaattaggcctccaggagctctttcaggcacccgacctcagggggatctccgagcagtctcttgtagtgtcaggcgtccagcaccagtccaccctggagctgtccgaagttggcgtggaggctgctgctgctacatccattgctatgagccggatgagcctatcctctttttccgttaaccggccatttctgttttttatttttgaggacaccaccggcttacctctcttcgtgggttctgtccgaaacccaaacccatcagctccaagagaactgaaagagcaacaggactctcctggcaataaggatttcctgcagtctctcaaaggtttccctcgtggtgacaaactgttcggcccagaccttaagctagttccccccatggaagaagattatccccaattcggttcccctaag

SEQ ID NO: 19054 - DNA, 1473 bp, synthetic construct
  misc_feature 1..1473: note = source = /note="Description of Artificial Sequence: Synthetic coding sequence"
  source 1..1473: mol_type = other DNA
atggcgctgctgtgggggttattggttctgtcctggtcttgcttgcagggcccatgtagtgtgttcagccctgtctctgccatggagcccctaggaaggcagctaacttctggacccaatcaggaacaggtgtctccactgaccctgctcaagctcggtaatcaagagcccggtggccaaacggccctaaagagccctcccggagtctgctcgagggatcccacacccgagcagacgcataggcttgccagggcgatgatggccttcacagcggatcttttctctttagtcgcacagactagcacctgccctaacctgattttatcccccttgtctgttgcattagcgttatctcatctcgccttgggagctcagaatcatacactgcagaggctgcagcaggtgctgcacgctgggtctgggccttgtctgccccatttgctgtctcgcctttgccaggacctgggtcccggagcatttcgtctggctgcccgcatgtacctccagaaaggttttcccatcaaagaggactttctggaacagtctgaacaactttttggcgccaagccagtgagtctgaccgggaagcaagaggatgatctggccaacattaatcaatgggtcaaggaagctaccgagggtaagattcaggagttcctcagtggactgcccgaggacaccgtcctgctgctcttaaacgctatccacttccaggggttttggagaaataagtttgatccttcactcacccagagggacagcttccacctggacgagcagtttaccgtgccagtggagatgatgcaggctaggacttatcctttgcgatggttcctcctagagcaaccagaaattcaggtcgcacactttcctttcaaaaacaacatgagttttgtcgttctcgtaccaacccacttcgagtggaatgtgtcgcaggtgctggccaatctgagctgggataccctgcaccctccactcgtctgggagaggcccaccaaagtccgtttgcctaaactgtacctgaagcatcaaatggacctggttgccacgctcagccagctggggctgcaagaactgtttcaggcacccgatctgcggggcattagcgagcaaagtctggtggtttccggtgtgcagcaccagagtaccctggaactgtccgaggtgggcgtcgaggcagcagcagctacaagtatcgctatgagtaggatgtcactcagctcttttagtgtgaaccgtccctttctcttctttattttcgaggacactacaggactacctctgttcgtagggagtgtgcggaacccaaatccatccgcccccagagaattaaaagagcaacaggacagtcctggcaataaagattttctgcagtccttgaaggggtttccacgtggggataagttatttggcccagacctgaaattggtccccccaatggaagaggactacccgcagtttgggagcccgaaa

SEQ ID NO: 19055 - DNA, 1473 bp, synthetic construct
  misc_feature 1..1473: note = source = /note="Description of Artificial Sequence: Synthetic coding sequence"
  source 1..1473: mol_type = other DNA
atggccttgctgtggggcctcttagttctgtcatggagctgcctgcaggggccgtgcagcgttttctctcccgtctctgccatggaaccactggggagacagctgacctccggccccaatcaggagcaggttagccccctgaccctgctgaaactcggaaaccaggagcctgggggtcagactgcactcaaaagtccccctggcgtatgttcccgtgatcctacgcccgagcaaacccatagactcgctagggcgatgatggcattcacagcagatctcttttccctggtagcccagacgtcaacatgcccaaacctcattctctcgcccctgagtgtggcgttggctctgtcccacctggctctcggcgctcaaaatcatacactgcaacgcctccagcaggtgctgcacgcaggatcaggcccatgtctgccccacctgttatctaggctttgtcaggatctgggaccaggggcattccgtctggcggctcggatgtacctgcaaaagggcttccctattaaggaggattttttagagcagagtgaacagctgttcggcgcgaaacccgtgtccttgaccggcaagcaagaagatgatctagccaatattaatcagtgggtgaaggaggccacagaagggaagatacaggaatttctgtcgggcctcccagaggataccgttcttctactccttaacgccattcacttccagggattttggagaaacaaatttgatcccagcttaactcagcgggactcctttcacttggacgaacaattcacagtaccagtggaaatgatgcaggcgcggacttatcctctgcgctggtttcttttagagcaacccgaaatccaggtggcccacttcccttttaaaaacaatatgtctttcgtagtcttggtccctactcatttcgagtggaatgtctcccaagtgctggctaatctgtcatgggacacactgcaccctccactggtgtgggagaggcccaccaaggtccgccttccaaagttatatctgaagcaccagatggacctcgtggccacattatcacagctggggcttcaggagctcttccaggctcccgacctgcggggaatttccgaacagtctttggttgtatctggggttcaacatcagtcgaccctcgaactgtctgaggtgggcgtcgaggcagcggccgcaacctcaatcgctatgtctcgcatgagccttagtagttttagtgtgaataggcccttcctctttttcatcttcgaagacaccacaggcctgcccctatttgtgggaagcgtgcgcaatcccaatccctccgcaccacgggaattgaaagaacagcaagatagtcccggcaacaaagattttttgcaaagcttgaagggcttccctcgtggcgacaagctttttggacccgacctaaagcttgtgccccccatggaggaagattaccctcaatttggatccccaaag

SEQ ID NO: 19056 - DNA, 1473 bp, synthetic construct
  misc_feature 1..1473: note = source = /note="Description of Artificial Sequence: Synthetic coding sequence"
  source 1..1473: mol_type = other DNA
atggcgctgctgtggggattgttagtgctgagttggtcctgcctacagggaccttgttcagtttttagcccagtgagtgctatggaacccctgggcagacagctcacatcaggtcccaaccaggagcaggtgtctcctctgaccttgctcaaactcgggaaccaggaaccgggcggccaaaccgctctcaaatcacctccaggcgtttgtagccgtgacccgactccagagcagacacacagactggcccgggcgatgatggcattcactgctgatctgttctccctcgtggctcagaccagcacctgtcccaaccttatccttagccctttgtctgtggcactagccctgtctcatcttgcactgggggcccagaaccatacgctgcagaggctccaacaggttctgcacgctggatctggtccgtgcttgccccacctgctcagtaggctttgtcaggatctgggcccaggggcttttaggctcgcagcccgtatgtatctacagaaggggttccctattaaggaagattttttggagcagagtgaacagctattcggcgccaagcccgtgagcctgacaggtaagcaggaagacgaccttgccaacatcaatcagtgggtcaaggaagccaccgaaggaaagatacaggagttcctgtctggcctccctgaggacacagttcttctgctcctgaatgcaatccacttccagggcttttggcggaataaatttgacccctcactcacgcaaagggattcatttcacctcgacgagcagttcactgtgcctgtggaaatgatgcaggccagaacctatcctctgcgatggtttttgctggaacagcccgagattcaggtggcacacttcccattcaaaaacaacatgtccttcgtggtcttagtcccaacgcacttcgagtggaatgtgagccaggtgctcgctaatttgtcttgggatacgctccatccccccctcgtgtgggaacggccaacaaaggtgcggctcccgaaattgtacctgaagcaccagatggatctcgtcgccacgctgagccaactgggcctacaagaacttttccaggccccggacctcagaggaatcagcgaacagtcactcgtcgtcagcggtgtgcagcaccagtcaaccctggagctaagcgaggtcggtgtggaagcagcagccgctacctcgatcgccatgtcccgcatgtccctgagcagcttctccgttaacaggccctttctcttcttcatttttgaggacaccaccggccttcccctgtttgtcgggtcagtcaggaatccaaatccttccgcgccgcgagagttgaaagaacagcaggatagccctggaaataaggactttttgcagtcactgaagggattcccacgcggggacaaactgtttgggccagacctcaaactggttcctccgatggaagaggactacccgcagtttggtagcccaaag

SEQ ID NO: 19057 - DNA, 1473 bp, synthetic construct
  misc_feature 1..1473: note = source = /note="Description of Artificial Sequence: Synthetic coding sequence"
  source 1..1473: mol_type = other DNA
atggctctgctatgggggttgctggtgctgagctggtcttgcctgcaaggtccctgctccgtattctcaccagtgagtgccatggaacctttgggtaggcaattgacctctggacccaaccaggagcaggtgagtccgctgacactgctgaaactgggtaaccaggagcccggagggcagactgcccttaagagccccccgggtgtgtgttctcgggacccaacccctgagcagactcacaggttagccagggccatgatggccttcaccgccgatctgttcagtctggttgcccagacaagcacttgcccaaatctgatattgtcaccactcagtgtcgctctcgcgctgagccatctggcgttgggagcgcagaatcacacgcttcagcgcctgcagcaggttctgcacgccgggtctgggccttgcttgccacaccttctttcgagactgtgccaggatctggggcccggggcctttaggctggctgccaggatgtacctccagaagggcttccctatcaaggaagacttcctggagcagagtgaacagctgtttggggccaagcctgtctcccttacagggaagcaggaagacgatttagccaatattaaccagtgggtcaaggaagcgacggaaggcaagatccaagaattcctgtcagggctccctgaggacacggtgctcctgctcctcaacgctattcacttccaaggtttttggaggaacaagtttgacccttccctgacacagagggacagcttccacctggatgaacagttcacggtccccgtcgaaatgatgcaggcccggacctaccctctccgttggtttttactggaacagcctgaaatccaagtggcacactttcctttcaaaaacaatatgagcttcgtagtcctggtgccaacccacttcgagtggaatgtgtcccaggtcctcgcaaacctctcttgggatacactgcacccccccctcgtatgggagaggcctacgaaagtgaggctgcccaaactctatttaaagcaccagatggacttggtagctactctgtctcaactcggcctccaggagctgttccaggccccagacctgagaggcatatcggaacaaagtttggtggtgagcggagtccaacaccagagcactctggaattgtctgaggtgggcgttgaggcagctgcagctacatccatcgccatgtctagaatgtctctgagttccttctctgtcaatagaccttttctgttcttcatcttcgaagacaccactgggttaccccttttcgtgggcagcgttcgcaacccaaacccttctgccccacgagagctcaaggaacagcaggattcaccagggaataaagacttcctacagagtctgaagggatttccacgaggggataagctgtttgggccagacttaaagctggtgcctccaatggaagaggattaccctcaatttggctccccaaaa

SEQ ID NO: 19058 - DNA, 1473 bp, synthetic construct
  misc_feature 1..1473: note = source = /note="Description of Artificial Sequence: Synthetic coding sequence"
  source 1..1473: mol_type = other DNA
atggctctgttgtgggggctccttgtgctctcttggagctgtctgcagggtccttgttctgtgtttagtcccgtctcagctatggaaccgctgggaaggcaactgacatccggtccaaaccaggagcaggtgagccctttaaccctgctcaaattggggaatcaggaaccaggcggccaaacagcgttaaaatccccgccgggggtctgttcgcgagatcccacccccgagcagactcatagactcgcaagggccatgatggctttcacagccgatctattcagtttggtcgcacagactagtacctgcccgaacctgattctgagccctctgtcagtcgcgctcgccctgagccacttagccctcggagcccagaatcatactctgcagcgtctccagcaggtcctgcatgcggggtcagggccatgtcttccacacctgctttcaagactatgccaggatctgggtcctggggcatttcgtctggccgcgcgcatgtatctccagaagggatttcccataaaggaagattttctcgaacagtctgaacaactgttcggagcaaagccagtgtcactgactggcaagcaggaggacgacctagctaacataaatcagtgggtgaaggaggcaaccgaaggaaaaatccaggagttcctgtccggactaccggaagacaccgttctcctgctgctgaatgcaattcactttcaggggttctggcgcaataagttcgaccctagcctgacacagcgagatagcttccatctcgacgaacagttcacagtaccagtcgaaatgatgcaggccagaacctaccctctgagatggtttctactggagcagccagagatccaggtcgcccattttccctttaaaaacaacatgtctttcgtcgtgctggtacctacccacttcgagtggaacgtgagtcaggtactggccaatctgtcttgggacactctccatcccccgctggtctgggagcggcctacaaaggttcgcctccccaagctctacctgaagcaccagatggatctagtagctactctgtctcagctgggactgcaagaactgttccaggcacccgatttacggggtattagtgaacagtccctcgtagttagtggagtgcagcaccagtcgacgctggagctctccgaggtgggcgtcgaagcagctgcagctacatccatcgcaatgtctagaatgtcgctgtccagcttcagtgtcaacaggccgttcctgttttttatttttgaagatactactggccttcctcttttcgtcgggtccgttaggaaccctaatcctagcgccccacgcgaactaaaagagcagcaggattcccccgggaataaggattttctgcagagtctgaagggcttcccacgaggtgacaaactgttcggaccagacctcaagttggtgcccccaatggaggaggactacccccagttcggctcacccaaa

SEQ ID NO: 19059 - DNA, 1473 bp, synthetic construct; identical to SEQ ID NO: 19023
  misc_feature 1..1473: note = source = /note="Description of Artificial Sequence: Synthetic coding sequence"
  source 1..1473: mol_type = other DNA

SEQ ID NO: 19060 - DNA, 1473 bp, synthetic construct
  misc_feature 1..1473: note = source = /note="Description of Artificial Sequence: Synthetic coding sequence"
  source 1..1473: mol_type = other DNA
atggccctcttgtggggcctgctggttttgtcctggtcctgcctccagggcccttgcagcgttttcagccccgtttccgcgatggaacccttaggacggcaattgacatctgggcccaaccaagagcaggtgagtcctttgaccctgttaaagctggggaaccaggagccagggggccaaaccgccttaaagagcccccctggggtgtgtagcagagaccccacgcctgaacagacacaccgattagcgcgggcaatgatggctttcactgctgaccttttctcattggttgcacagacttccacatgccccaatctgatcctttcacccctttccgtagcgctcgctctttcccaccttgctctgggggctcagaatcatacattgcagaggctgcagcaggtgcttcacgcgggcagcggaccctgtttgccccatttgctgagccgactctgccaggatctagggcccggggccttccgtcttgcagcccgtatgtatctgcaaaagggttttcccatcaaagaggatttcttggagcagagtgaacaactcttcggagcaaaacccgttagcttgaccggcaaacaggaggacgatctggcgaatatcaaccagtgggtaaaggaggcaactgaagggaagatccaggagtttttatcagggttgccggaggatactgttctgctacttctgaatgccattcacttccagggtttctggcgtaacaagtttgatccttccctgactcagcgcgactccttccatcttgacgagcagttcacggtgccagtcgagatgatgcaggcccggacttacccactgagatggttcctattggaacagccagaaatacaggtggcccattttccgttcaagaacaatatgtcctttgttgtgctagtacctacgcacttcgaatggaatgtgagccaagttttggccaacctcagttgggatactctgcatcccccgctagtgtgggagcggcccaccaaagtgaggttacccaagctttatttaaagcatcagatggaccttgtggctacactgtcacagcttggcctccaggagctatttcaggctccagacctgagggggatatcagagcagtcccttgttgtgtcaggggtccagcaccaaagcacactagaattatcagaggtcggagtggaggccgctgcagcgacctccattgcaatgtctaggatgtcactctctagctttagcgtgaacagaccgtttttgtttttcatcttcgaagataccaccggcttgcccctgttcgtcggctcagtcagaaacccaaacccctctgccccacgcgaactcaaagagcaacaggactcaccgggcaataaagacttcctgcagtcgctgaaggggtttcccagaggcgacaaattgtttggtcctgatctgaaattggtgccacctatggaggaggattacccgcagtttggttcccctaag

SEQ ID NO: 19061 - DNA, 1473 bp, synthetic construct
  misc_feature 1..1473: note = source = /note="Description of Artificial Sequence: Synthetic coding sequence"
  source 1..1473: mol_type = other DNA
atggctctgctttggggattgctggtgctgtcttggtcttgtctccagggtccctgttcagtcttcagtccagtctccgccatggaaccactgggacgccagcttacttccggtccaaaccaggagcaagtgtctcctttgactcttttgaaactcggtaaccaggagccaggcggccagaccgctctgaagtctcccccaggcgtttgttctagagatccaactcctgaacaaactcaccgtctcgcaagggcaatgatggcttttactgccgatcttttctccctcgtcgctcaaaccagcacatgccccaacctgatcctctcacccctgtccgtggctctcgcactctctcacctcgccctcggtgcacaaaaccacactctccaaaggctgcagcaggtcctgcatgctggctccggcccttgcttgccccatctgttgagtcgcttgtgccaggatttgggacctggcgccttccgtctcgctgcccgtatgtacttgcagaagggattcccaatcaaggaagacttcctggaacaatcagagcaactgttcggcgctaaacctgtcagcctgaccggcaaacaggaggatgatctcgctaatataaatcagtgggtgaaagaagccaccgaaggaaagattcaggagtttctgagtggtttgcccgaagataccgtacttctgttgctgaatgccattcacttccagggattttggaggaacaaattcgatccttcactcacacaaagagactctttccacctggatgaacaatttaccgtgccagtggagatgatgcaagccaggacttaccccctcaggtggtttctgctggaacagcctgaaatccaggtggcccacttcccattcaagaacaacatgtcattcgttgtgcttgtcccaactcacttcgagtggaatgtgtctcaggtgcttgctaacttgtcatgggacaccctgcaccctcccctggtgtgggagaggccaactaaggttaggctcccaaaactctacttgaaacaccagatggacctggtcgcaacactctcccagttgggattgcaggagctcttccaggcccccgacctgaggggtatttctgaacaaagtttggtcgtttctggtgtgcagcaccagtccaccctggaactttccgaagttggtgtcgaggcagctgccgccacctccatcgccatgtccaggatgagcctgagctctttttcagtgaatcgcccctttcttttctttatcttcgaggatactaccggccttccattgtttgtgggatccgtgagaaatccaaacccttcagctccacgtgaactcaaggagcaacaggattcaccaggaaacaaggattttctgcaaagccttaagggtttccctaggggagacaagttgttcggccctgatttgaaactggttcctccaatggaagaggattaccctcagttcggttcccccaag

SEQ ID NO: 19062 - DNA, 1473 bp, synthetic construct
  misc_feature 1..1473: note = source = /note="Description of Artificial Sequence: Synthetic coding sequence"
  source 1..1473: mol_type = other DNA
atggcgttattatggggtttactagtattatcgtggtcgtgtctacaaggtccgtgttcggtattttcgccggtttcggcgatggaaccgctaggtcgtcaattaacgtcgggtccgaatcaagaacaagtatcgccgctaacgctactaaaactaggtaatcaagaaccgggtggtcaaacggcgctaaaatcgccgccgggtgtttgttcgcgagatccgacgccggaacaaacgcatcgactagcgcgagcgatgatggcgtttacggcggatttattttcgctagtagcgcaaacgtcgacgtgtccgaatctaatactatcgccgctatcggtagcgttagcgctatcgcatctagcgctaggtgcgcaaaatcatacgttacaacgtctacaacaagttttacatgcgggttcgggtccgtgtttaccgcatttactatcgcgtctatgtcaagatctaggtccgggtgcgtttcgtttagcggcgcgaatgtatctacaaaaaggttttccgataaaagaagattttctagaacaatcggaacaactatttggtgcgaaaccggtttcgctaacgggtaaacaagaagatgatctagcgaatataaatcaatgggtaaaagaagcgacggaaggtaaaatacaagaatttttatcgggtttaccggaagatacggttctactattactaaatgcgatacattttcaaggtttttggcgtaataaatttgatccgtcgctaacgcaacgagattcgtttcatttagatgaacaatttacggtaccggttgaaatgatgcaagcgcgtacgtatccgctacgatggtttttactagaacaaccggaaatacaagttgcgcattttccgtttaaaaataatatgtcgtttgttgttttagttccgacgcattttgaatggaatgtatcgcaagtactagcgaatttatcgtgggatacgttacatccgccgttagtttgggaacgtccgacgaaagttcgactaccgaaactatatttaaaacatcaaatggatttagttgcgacgctatcgcaattaggtctacaagaactatttcaagcgccggatctacgaggtatatcggaacaatcgttagttgtatcgggtgtacaacatcaatcgacgctagaattatcggaagttggtgttgaagcggcggcggcgacgtcgatagcgatgtcgcgaatgtcgctatcgtcgttttcggtaaatcgtccgtttttattttttatatttgaagatacgacgggtttaccgttatttgttggttcggtacgaaatccgaatccgtcggcgccgcgtgaactaaaagaacaacaagattcgccgggtaataaagattttttacaatcgttaaaaggttttccgcgtggtgataaactatttggtccggatctaaaactagttccgccgatggaagaagattatccgcaatttggttcgccgaaa

SEQ ID NO: 19063 - DNA, 1473 bp, synthetic construct
  misc_feature 1..1473: note = source = /note="Description of Artificial Sequence: Synthetic coding sequence"
  source 1..1473: mol_type = other DNA
atggcgctcctttggggattgttggtgcttagttggtcatgtttgcagggaccttgttccgttttctctcctgtatcagcaatggaaccgctcggacgacaacttacttcaggaccaaaccaagaacaagtgagtcctcttacattgctcaaacttgggaatcaagagccaggaggccaaacagcccttaaatcccctccgggagtgtgctcgcgagatccgactccagaacagactcacagactggcgagagccatgatggcctttactgcagatcttttctcccttgtagcacaaacttctacttgtccgaacttgattctttctccgctctcagtagctctggcactgtcacatctggcattgggagctcaaaatcatactctgcaacgacttcaacaagttctacacgctggatctggaccatgtttgccacatctcctctcacggttgtgtcaagatcttgggccaggagcgttccgtcttgccgctcggatgtatttacagaaaggattcccaattaaagaagatttcttagaacagtcggaacaactgttcggagcaaaaccagtgtcactgacaggaaagcaagaggacgatctcgctaatattaaccagtgggtgaaagaagcaactgaaggtaagatacaagaatttctttctggattgccagaagataccgttttgctcttattgaatgcaatccacttccaaggtttttggagaaacaaattcgacccgtccctcacgcagcgtgatagtttccatttggacgagcaattcactgttcctgtggaaatgatgcaagcacgtacatatccattgcgttggttccttcttgagcaacctgaaattcaagtagcacatttcccgtttaaaaataatatgtctttcgtcgttctcgtcccgactcactttgaatggaatgtttcacaagttcttgccaatttgtcatgggatacccttcacccaccgcttgtatgggagaggccaacgaaggtgagattaccaaaactatacctgaaacaccagatggacctggtggccacattaagtcaactcggactacaagaattgtttcaggcgccagatttgagaggaatttccgaacaaagtctcgttgtgtctggtgtccagcaccaatccacacttgagttgtccgaagtaggagtggaagcagcagcagcgactagtatagctatgtcgcgtatgtctctctcgtcatttagcgtgaataggcctttcttattcttcatcttcgaggataccacgggcttaccattattcgtgggaagtgtgcgcaatccgaatccatcagcacctcgggagcttaaagagcaacaagactctccaggaaacaaggacttcttgcagagtcttaaagggttcccaagaggtgataaactgttcggaccagaccttaagcttgtcccaccaatggaggaagattatccacagttcggctctccaaaa

SEQ ID NO: 19064 - DNA, 1473 bp, synthetic construct
  misc_feature 1..1473: note = source = /note="Description of Artificial Sequence: Synthetic coding sequence"
  source 1..1473: mol_type = other DNA
atggctttattatggggactacttgtattaagttggtcatgtcttcaaggaccttgttctgttttttcaccagtctcagctatggaacctttagggaggcaattaacatcaggaccaaatcaagaacaagtttctccattaactttattaaagttaggaaaccaagaacctggagggcaaaccgcactcaaatcaccaccaggagtttgttctagggatccaactcctgaacaaactcatagacttgcaagagctatgatggcttttaccgcagatttattttcattagtagctcagacttcaacttgtcctaatcttattttatctcctcttagtgttgcacttgctttatctcatttagctttaggagcacaaaaccatacattgcaaagattacaacaggtattacatgcaggatcaggtccatgtttacctcaccttctttctagattatgtcaagatctaggaccaggagccttcagacttgcagctagaatgtatttacaaaaaggattcccaattaaagaagattttttggaacaatctgaacaactttttggtgcaaagcctgtttctttaacaggaaaacaagaagatgaccttgctaatattaatcaatgggtaaaggaagctactgagggaaaaattcaagaatttcttagtggattaccagaagatacagttttattattattgaatgcaattcattttcaaggattttggcgaaataaatttgatccatcattaactcaaagagattcatttcatttagatgaacaatttacagtaccagtcgaaatgatgcaagctagaacatatccacttagatggtttttgttagaacaaccagaaattcaagtcgctcatttcccttttaaaaataatatgagttttgttgttttagttccaacacattttgaatggaatgttagtcaagttcttgcaaatttaagttgggatactttacatcctccattagtttgggaaagaccaacaaaagttagattacctaaactttatcttaaacaccaaatggatttagttgcaacattatctcaattaggattacaagaactttttcaagcaccagatcttcgtggaatttctgaacaatcacttgttgtatctggagtacaacatcaaagtacacttgaacttagtgaagtaggtgttgaagcagcagctgctacatcaattgctatgtcaagaatgagtttatcatcttttagtgtcaatagaccatttttattttttatttttgaagatactacaggattgccactttttgttggaagtgttagaaatccaaacccatcagctcctagggaacttaaagaacaacaagattctccaggtaataaagactttttacaaagtttaaaaggatttccacgaggtgataaattattcggacctgatttaaaattagtaccacctatggaggaagattatccacaatttggatcacctaaa

SEQ ID NO: 19065 - DNA, 1473 bp, synthetic construct
  misc_feature 1..1473: note = source = /note="Description of Artificial Sequence: Synthetic coding sequence"
  source 1..1473: mol_type = other DNA
atggctctgttgtgggggctgctggtgttgtcgtggtcttgtctgcagggaccatgcagcgtcttctcgcctgtgtccgccatggagccgcttggacgccagcttacatctggtccaaaccaagagcaggtctcgccattaactctcctaaaattggggaatcaagagccgggtggccagacagccctcaaatcgcctcccggagtgtgctcccgcgatccaacgcctgaacagacccacaggttagcaagagctatgatggccttcactgccgatctcttctcattggtcgcacaaacaagcacgtgccctaatttaatcctgtcccccttatcggtggcattggccctgtcccatctggcgcttggtgcccagaatcacactctgcagcgacttcagcaagtgctccacgcaggaagtggaccctgtcttccacatctactgagtaggctctgtcaagacttgggccccggcgccttccgactggctgccagaatgtacctccagaaagggtttcctatcaaagaggatttccttgaacagagtgagcagttgtttggggccaagcccgtttccctcaccgggaagcaagaggacgacctggctaatataaaccagtgggtgaaggaggctacagagggtaaaattcaggagttcctgtctggcctgccagaagacacggtcctgctactgctgaacgcaatccatttccagggcttctggcgcaataagttcgacccttcactgacacagagagatagttttcaccttgatgaacagttcaccgttcccgtcgagatgatgcaagctcggacctaccctcttcgatggttcctcctggaacagccagaaatccaggttgcacacttcccctttaaaaataacatgagcttcgttgtgctcgtgccgacccactttgagtggaatgtgtctcaggtgctggctaatctgtcatgggataccctgcaccctcccttggtgtgggagcgccccacaaaggtgcggttgcccaaactgtatctgaagcaccagatggacctggtggctacattgtcgcagcttggtctccaggagctatttcaggcccccgatctgcgtggcatttccgagcaatctcttgtggtgagtggtgttcaacaccagtcaaccctggaactttccgaagtgggagtagaagccgccgccgccacctctatcgcgatgtcacggatgagtctgtctagcttcagtgtcaataggccatttctgtttttcattttcgaggacacgacaggactccctctgttcgttggaagcgttaggaacccgaacccctccgcaccgagagaactcaaggagcaacaggattccccagggaataaggatttcctgcagtccctgaaggggtttccacgaggggataagctatttggacccgatctgaaactagtcccgccaatggaagaggactaccctcagtttggctcacctaaa

SEQ ID NO: 19066 - DNA, 1473 bp, synthetic construct
  misc_feature 1..1473: note = source = /note="Description of Artificial Sequence: Synthetic coding sequence"
  source 1..1473: mol_type = other DNA
atggctctattgtggggcctattagtgctctcctggtcttgcctgcaaggtccatgctctgtctttagccctgttagtgcaatggaaccgttgggacgccagctcacatctggacccaaccaggagcaagtgtcacccctgactctgctgaagctagggaaccaggagcctgggggccagaccgctctgaagagtccccctggcgtttgttcacgcgatccgacgccagagcaaacgcacaggctggctagagcgatgatggcatttacggccgatctgttctctttggtggcccagacatcaacgtgcccaaatctgatcctgtctcctctgtcagtggccttggcactgtctcatttagccctgggtgctcagaaccacaccttgcaacgtctccagcaggtgctccatgctggctccgggccctgtttaccccatcttttatctcgactctgtcaggacctcggcccaggggccttccgccttgccgccagaatgtatctgcagaagggctttccgataaaggaggatttcttagaacagagcgagcaactgttcggggctaaaccagtgtccttaactggcaaacaggaagacgatctcgctaacattaaccagtgggttaaggaggcaactgaaggaaaaatacaagagttcctgagtggactccctgaggataccgttctccttcttcttaacgctatccactttcaaggattttggcgcaacaaatttgaccctagtctgacacagagagattcatttcacctcgacgagcagttcaccgtgcctgtggaaatgatgcaagcaaggacgtatcctttgcgatggttcctattagagcagccagagatccaagtagctcatttccccttcaagaacaatatgtccttcgtggtacttgtgcccacacattttgagtggaacgtctctcaagtgctggccaatctgagttgggatacactgcacccccctctcgtctgggagaggcctacgaaggttcggctgcccaaactatatctcaaacatcaaatggacctagtggccacacttagccagctgggcctgcaggagctgttccaagcacctgacctgcgtgggattagcgaacagtcactggttgtgtccggagtgcagcatcagtccacactggagctttccgaggttggagtagaagcggccgctgcaacttctattgcgatgagcagaatgagtctgtcgtccttcagcgtgaataggccctttttgttttttatcttcgaggataccaccgggctgccactttttgtgggatcagtgaggaatcctaacccttctgccccccgggaactgaaggaacagcaggatagcccaggtaataaagatttcctacaaagccttaaaggatttcccaggggggacaaactgtttggtcccgatctgaagctggttcctccgatggaggaagattacccacagttcgggtcccccaag

SEQ ID NO: 19067 - DNA, 1473 bp, synthetic construct
  misc_feature 1..1473: note = source = /note="Description of Artificial Sequence: Synthetic coding sequence"
  source 1..1473: mol_type = other DNA
atggctctgttgtggggcctgttggtgctaagttggagctgcctgcaaggaccatgctccgtattctcgcccgtcagcgccatggagcccttggggaggcagttgacgtcagggccaaaccaggagcaggtgtctccactgaccctcctgaagctcggcaatcaggagccaggaggccagaccgcattgaagagtcctccaggtgtatgcagccgggaccccacgcctgaacaaacccatagactggcaagggccatgatggcctttaccgcagatttattctctctcgtggctcaaacttccacctgccccaatctcatcctgagtcccttgtccgtcgccctggctctgtctcatctagcgctgggagcacagaaccacacgctccagcggctccagcaggtgttacacgctgggtctggtccctgtctgccgcaccttttatccagactgtgccaagatctcggacctggtgcctttcgactcgccgcacgcatgtaccttcagaaggggttccccattaaggaagatttccttgagcagagcgaacagctgttcggggcgaagcccgtaagcctcactggcaaacaggaggacgatctcgcgaacatcaatcaatgggtgaaagaggctactgaagggaagatccaggagttcctttctggactccctgaagacacggttctgctgctgctgaatgctatccatttccagggcttttggcgtaataaattcgacccctctttaacacagcgtgacagttttcatctggatgagcaatttactgtgcctgtggaaatgatgcaggctcgtacgtaccccctgagatggtttcttctggagcagcctgagatccaagtagctcattttccattcaaaaataatatgtcattcgtggttctggtgcccactcacttcgaatggaatgtcagccaagtgctcgcaaacctctcttgggataccttacatccaccccttgtgtgggagcggcccaccaaagtgcgcctgccaaagctgtatttgaaacatcagatggatttggtcgctacgttgtctcagctcggactgcaggaactgttccaggcacccgatctcagaggaatctccgagcagtcattagtggtgtctggggtgcaacatcaaagtactctcgaattaagtgaagtaggagtagaggcggcagctgccacatccatcgctatgtccagaatgagcttgagttctttctcggtgaaccgacccttcctgttttttatcttcgaagacactacaggcctcccattgtttgtcggctccgtccgaaatcctaacccatctgcaccgcgggagctcaaggagcagcaggactctccgggtaacaaagatttcttacagtcgcttaaagggtttccaagaggcgacaaattatttggaccagacttgaagttggttccaccaatggaggaagactaccctcaattcggaagtcctaag

SEQ ID NO: 19068 - DNA, 1473 bp, synthetic construct
  misc_feature 1..1473: note = source = /note="Description of Artificial Sequence: Synthetic coding sequence"
  source 1..1473: mol_type = other DNA
atggccctgctgtggggtcttctcgtgttatcttggtcctgcctccagggtccatgttctgtcttttctcccgtttcagccatggaaccattgggcaggcagttgaccagtggacccaatcaagagcaagtgagcccactgacgctcttaaaattaggaaaccaggagccaggaggtcagactgcgctgaagagcccgccaggcgtctgtagccgagacccaacaccagaacagacccataggcttgcgcgtgcaatgatggcttttaccgccgacctcttttccctggtggctcagaccagcacttgccctaacctgattctgtctccactgtctgtcgcgctcgcactctcccacctggcgctcggcgctcagaaccacaccctgcagcggttgcaacaggtgctccatgctggctccgggccctgtcttccccatttgctgtcgcgattgtgtcaggacctaggcccaggagcgttcagactggccgcaagaatgtacctgcagaagggattccctatcaaagaggatttccttgaacagtctgagcagcttttcggcgcaaaaccagtgtcactgacaggcaaacaggaagatgatctcgctaatataaatcagtgggtgaaagaggctactgaaggaaaaatacaagagttcctaagcgggttgccagaggatacggtgctcctcctgctgaatgcaatccacttccagggcttttggcggaataagttcgatcctagcttgacacagcgtgattcttttcatctcgatgagcagttcacagtacccgttgaaatgatgcaggcccgcacatacccactcaggtggtttcttctggagcagccagaaattcaggtggcccacttccccttcaaaaataacatgtcctttgtcgtgctggtgcccacccactttgaatggaatgttagtcaggttctggccaacctgagctgggacaccctccacccccccctggtttgggagcggcccacaaaggtgagactcccaaagttgtatctgaagcaccagatggatctcgtggccacactgagtcagcttggtttacaggaactattccaggctcccgatctgcggggaatatcagagcagagccttgtggtgtcaggagtacaacaccagagcacactcgagctcagcgaggtgggggtggaggcagcagctgcgacctccattgcgatgtctagaatgtcattgagcagcttctccgtgaacagaccatttctctttttcatctttgaggatacaacagggttgccactgtttgttggctctgttaggaaccccaatccatccgccccccgcgagctgaaggagcagcaggacagccctggcaacaaggactttctacaatctctcaaaggctttcctcggggagataagttgtttgggcctgatctcaagctcgtcccacccatggaagaagattacccccagttcggcagtcctaag

SEQ ID NO: 19069 - DNA, 1473 bp, synthetic construct
  misc_feature 1..1473: note = source = /note="Description of Artificial Sequence: Synthetic coding sequence"
  source 1..1473: mol_type = other DNA
atggcgctgctgtggggcttactcgtgttatcgtggtcatgtttgcagggaccatgttctgtctttagccccgtgtctgcaatggagccattgggaaggcagttgaccagtggtcctaatcaggagcaagtcagtcccctgacattgctcaagcttggcaatcaagaacccgggggacaaaccgccttgaaatccccgcccggggtgtgctcccgtgaccctacaccggagcagacgcaccggttggcacgggctatgatggcattcaccgctgatttgttctctctggttgcacaaacttctacatgtccaaacctgatcctgagccccctgtccgtcgcattagccctttctcacctggccctcggtgcccagaaccataccctgcagcgattgcagcaggtgctgcacgcaggatcagggccttgcttaccccacctcctgagtcgcctgtgccaggacctggggcccggggcttttcgcctggccgctcggatgtatctgcagaaaggctttcccatcaaggaggactttctggaacagagcgaacaactgtttggagcgaagcctgtgtctctgactgggaaacaagaggatgacctggcaaacattaaccagtgggtcaaggaggcgactgagggtaagatccaggagttcctgagtggcctgccggaggataccgtgcttctgctcttgaacgccattcactttcaggggttttggagaaataagttcgatcccagcctaactcagagggattcatttcaccttgacgagcagtttaccgtgccagttgagatgatgcaggctcgcacttacccattgaggtggttcctcttggaacagcctgagatccaggttgcgcattttccatttaagaacaatatgtcattcgtcgtgctggttccaacccattttgagtggaacgttagccaagtgctggcaaacctcagctgggacacactccatccaccattagtttgggaacgacctaccaaggtacgtctccccaaattgtacctgaagcaccaaatggacttggtagcgactctgtcacagttagggctccaggaattgtttcaggctccagatctgaggggcatctccgagcagtcgctggttgtaagtggggttcaacaccagtcaaccctcgagttgtctgaagttggagtggaagcagccgccgctacaagtattgccatgtcccggatgtccctcagtagtttctccgtgaatcggccatttctgttctttatctttgaggatacgactggtctgcctctcttcgtgggaagtgtaagaaatccaaatccctcagcacccagagagctgaaagagcaacaggacagccccggcaacaaagattttctgcagtctctcaaggggttccctagaggagacaagttatttggcccggacctcaagctagtgcctcctatggaggaggattatccccagttcggttcccccaaa

SEQ ID NO: 19070 - DNA, 1473 bp, synthetic construct
  misc_feature 1..1473: note = source = /note="Description of Artificial Sequence: Synthetic coding sequence"
  source 1..1473: mol_type = other DNA
atggcacttttgtggggacttttggtgttgagttggtcttgtttacaaggaccttgcagcgtgttttcacccgttagtgcaatggagcctttggggagacaactcacctcaggtccaaatcaggagcaagttagcccattgacgttgcttaagctgggtaatcaagagcctggggggcaaacagcattgaagagcccacctggcgtgtgctctcgcgatccaactccagagcagacgcacaggttagcgagagctatgatggctttcacagctgatttgttctctctggtggctcagacatctacctgcccaaatttgatcttgtctcctttatccgtcgctttggctctgtctcacctcgccttaggggcccaaaatcatacactccagcgtttgcaacaagtcttgcatgccgggagtggaccttgtttgcctcaccttctctctcgattatgccaagatttgggaccgggtgccttcagattggctgcacgaatgtatctgcagaagggcttccctattaaagaagattttcttgaacaatcggagcagctgtttggggccaaacctgtgtctctaacaggaaagcaagaggacgatctagctaacatcaatcagtgggtaaaagaagccacagaaggtaaaatccaggagtttttgtcgggtttgcccgaggatacagttctactactgcttaatgctattcattttcagggtttctggagaaataagtttgatccatctctcacccaacgtgatagttttcatttggatgagcaatttactgttcctgtcgagatgatgcaagctagaacatatccgctacgttggttccttcttgaacaaccagaaatccaggtagctcatttcccatttaaaaataatatgtcatttgttgttttagttcccacccacttcgagtggaatgtgtcacaagtgctcgccaatctctcttgggatactctccatccaccacttgtatgggagaggccaacaaaggttcgattgcctaaactctacctaaaacaccaaatggatctggtcgcaacattgagtcagctaggtcttcaagagctcttccaagcacccgatttgcgtggtatcagcgagcagtcacttgtcgtttcaggcgttcaacaccaatcgacccttgaattatctgaagttggtgttgaggctgcggcggcgacctcgatagcaatgtctcgcatgtccctgtcatctttcagcgtaaatcgtcctttcttgtttttcatctttgaagatacaaccggcttgccattgtttgtcggctctgttagaaatcctaaccctagcgcgccgcgggaactcaaagagcaacaagattctcccggaaacaaggattttcttcagagtctaaagggattcccgaggggcgataagttgttcggcccagacctgaaactcgtgccaccaatggaggaagattaccctcaatttggttcccctaag

SEQ ID NO: 19071 - DNA, 1473 bp, synthetic construct
  misc_feature 1..1473: note = source = /note="Description of Artificial Sequence: Synthetic coding sequence"
  source 1..1473: mol_type = other DNA
atggctcttctctggggcctattagtgttgtcttggtcgtgcctgcagggaccatgttcggttttttctcctgtctctgcaatggagccactgggacgacaactgactagtgggccaaatcaggaacaagtctccccactcacgctcctaaagctgggtaatcaggagccagggggacaaacggcgctcaagtcaccgccaggcgtgtgtagtcgcgatcctacaccggaacagactcaccgcctggcccgtgccatgatggcattcaccgccgacctcttttcattagtcgcccaaacctcaacgtgccctaatcttatcttatccccactatcagtggcactagcgctctctcatttggccctgggtgctcaaaatcacacgctgcagaggctgcagcaagtgctgcatgctggaagtggtccatgcctgccacatttgttgagcaggctatgccaggatctgggtccaggcgcatttaggcttgccgcacgcatgtatctgcagaaaggtttcccaatcaaggaagatttcctcgagcagagcgagcagctctttggcgctaaaccagtgtctctcaccggaaaacaggaggatgatctggctaatataaaccagtgggtgaaggaggcgactgaaggcaagattcaggaattcctgtccggcttaccagaggatacggtgttgctcctgcttaacgctatccactttcagggcttctggcgaaataagttcgacccttcattaacacaaagagactcctttcacctggatgaacagtttactgttcccgtcgaaatgatgcaagccaggacctatccactccggtggtttctgctggagcagccagagatacaggtggcgcattttccatttaagaacaacatgtcctttgtggtgctggtgccaacacatttcgagtggaatgtgtctcaggtgctggccaacctctcctgggacacgctccacccacccttggtttgggagagacccacaaaggtccgtctgccaaagctttatctgaaacatcagatggacctcgtggcaactcttagccagttggggctacaggagctttttcaggcgcctgacctgagaggaatctcagagcagtctctcgtggtctcaggggttcagcatcagtccaccctcgagctgtccgaggtaggcgtggaagctgcggccgctacttcaatcgctatgagccggatgtccttgtcatccttcagcgtgaaccgaccgttcctattctttattttcgaggatacaacgggcttgccactcttcgtgggcagcgttagaaatcccaatccttccgccccacgcgagttaaaagaacagcaggatagtccgggaaataaggactttctgcagtccttgaaaggtttcccacgcggagacaaactgtttggtcctgatctcaagctggtgcctccaatggaggaggactatccacagttcggcagtccaaag

SEQ ID NO: 19072 - DNA, 1500 bp, synthetic construct
  misc_feature 1..1500: note = source = /note="Description of Artificial Sequence: Synthetic coding sequence"
  source 1..1500: mol_type = other DNA
atggcttcaaggctcacgttgctgacactgttactacttttactggccggggacagggccagctctaacccaaacgccactagctcttcctcacaagacccagagtctctgcaggaccgcggggagggtaaggttgccaccaccgtaattagcaagatgctgttcgtggaaccaatccttgaggtgtcttcacttccaaccacaaatagcaccacgaattcagccaccaagatcactgcgaacacgaccgacgagcccacgactcagcctaccaccgagcctaccacccagcccaccatccaacctacccagccaacaacccagttaccaactgactctccaactcagcccactactggatccttttgtcctggcccagtcactctgtgcagcgacctggaatcacactcgaccgaagccgtgcttggcgacgctctggtagacttctcgttgaaactttaccatgctttttctgcgatgaagaaagtagagacaaacatggccttcagccccttctccatcgcatccctgcttactcaagtcttgctgggcgccggggaaaataccaagacgaacctagagtccatcctgagctatcccaaagattttacatgtgtgcatcaggcgttgaagggattcaccactaagggcgttacttccgtctcacagatctttcatagccccgatctcgcaatacgcgatacctttgtgaatgcatctcgcactttgtactcttcctctccaagagtgcttagcaacaacagtgacgccaacctggaactgattaacacatgggtagctaagaatactaataacaagatctctagactgctggattctctgccaagcgatacacggctcgtccttctgaacgctatctatctatcagcaaagtggaaaactacctttgatccaaaaaaaacccgcatggaacccttccatttcaagaatagtgtcataaaagtgcccatgatgaatagcaagaaatatcccgtcgcccacttcatcgatcagactcttaaagctaaggtagggcagctccagctgagccacaacctgagcctggtgatcttagtgccccagaaccttaagcatcggctcgaggacatggaacaagccctctctcctagcgtgttcaaagcaatcatggagaaactggaaatgtcaaagttccaacctacactgttaactctgccccggattaaagtaactacttctcaggacatgctgtcaatcatggaaaaactggaattcttcgacttttcctacgatctgaatctatgcggcctcaccgaggacccagacctacaggtttcagcgatgcagcaccaaactgttctcgaactgacagaaaccggtgtggaggcggccgctgcttcagccatcagcgtagccagaactctgctggtgtttgaagtccagcagcctttcttgtttgttttatgggatcagcagcataagtttcctgtgttcatgggccgcgtttacgatcctagagcc

SEQ ID NO: 19073 - DNA, 1500 bp, synthetic construct
  misc_feature 1..1500: note = source = /note="Description of Artificial Sequence: Synthetic coding sequence"
  source 1..1500: mol_type = other DNA
atggcgagccgactcacattgctcaccttgctgctgctgttattggccggggaccgagccagctctaatccaaatgccacctcttcaagttcccaggatccagagagccttcaggaccgtggcgaggggaaggtcgctacaaccgtcatttcgaaaatgctgtttgttgaacctatccttgaggtcagttcactccctacaacaaactcgaccactaactcagcaaccaagatcaccgcaaacactaccgacgaacccaccacacagccgaccaccgaacccacaactcaacccactatccagcctactcaacctaccacccagctgcccacagattctcctacgcagcccactaccgggagcttctgcccaggacctgttacactttgcagcgatctggagagtcatagtaccgaggccgtgttgggcgacgccctggtagatttcagcctcaagctctaccacgcattcagcgctatgaaaaaagtggagaccaatatggccttcagccctttctcaatcgcctcattgctgactcaggtgctgctcggagcaggggagaacactaaaactaacttagagagcatcctctcttacccgaaggatttcacctgtgtccaccaggcgctgaaaggctttacaactaagggggtaacgagtgttagccagatctttcattcacctgatctggcaatcagagatacatttgtaaacgcatctcgaactctttacagcagcagtcccagggtgttaagcaacaatagcgacgcaaatctggagctgattaatacttgggtggcaaaaaataccaacaataagatcagccgattgctggactcattgcccagcgatactagactggttttactgaacgccatctacctgtcagctaaatggaagactacgttcgacccaaagaagacgcggatggaaccctttcatttcaaaaattctgtgatcaaagtgccaatgatgaactccaagaagtatccagtcgcgcacttcatagaccagaccctcaaggctaaggtgggccagctgcagctctcgcacaatctttcgttggttattcttgtgccacaaaatctgaagcaccgacttgaagacatggagcaagcattgtcaccgtcagtctttaaggctataatggagaagctggagatgtctaagttccaaccaactctgctgactttgcctaggatcaaggtgacaacctctcaggacatgctatccattatggagaagctagagttctttgacttttcgtatgatttgaatctctgtggtctgacagaagacccagacctgcaggtgtcagccatgcaacatcaaactgtcctggaactcaccgaaacaggagtggaggcagcagccgcctccgcaattagcgttgctagaactctgctggtctttgaagttcagcaaccgtttctcttcgttttatgggaccagcagcacaaatttcccgtgtttatgggtagggtttacgatcctcgagcc

SEQ ID NO: 19074 - DNA, 1500 bp, synthetic construct
  misc_feature 1..1500: note = source = /note="Description of Artificial Sequence: Synthetic coding sequence"
  source 1..1500: mol_type = other DNA
atggcgtcccggcttaccctgttaaccctgctgctgttgctgctggccggcgacagggcatcctccaatcctaatgccacttcttcttctagccaggaccctgagtcgctccaggataggggggagggcaaggtggcgaccactgttatttcgaagatgctttttgtggagcctattcttgaggtctcgtccctgcccactaccaatagcacgacaaactccgccaccaaaattaccgctaacacgactgatgagccaaccactcagcctactactgagcccaccacccaaccaactatccagcccactcagcccacgacacagctgccgacagatagtccgacacagcccacgactggttcgttttgccccgggccagtgacgctatgttctgatctcgagtcacatagcaccgaagcagttctcggcgatgctctggtcgattttagtctcaaactctaccacgcgttctccgccatgaagaaagtcgagaccaatatggcattctcaccgttcagtatcgcttcactgctcacccaggttctgttgggagccggagagaacactaaaaccaacctggaatcaatcctctcctatcccaaggatttcacctgcgtgcaccaggcccttaaaggctttacaaccaagggggttacgtcagtgtcccagatatttcactcccctgatttggcaatcagggacaccttcgtgaacgcaagtagaaccctatatagctctagccctcgggtgcttagtaacaattctgacgcaaatcttgaactcattaacacctgggtcgctaagaataccaataataagataagcaggctcctggattctctcccttcagatactaggttggttctactgaacgccatttacttgtctgccaaatggaaaactacatttgatcccaaaaaaacccggatggaaccttttcactttaagaattccgtaataaaggtccccatgatgaactctaaaaagtatcctgtggcgcacttcatagatcaaaccctgaaagccaaggttgggcagctgcagctgagccacaacttgtctctggtaattttggtgcctcagaacctgaagcacaggctggaagatatggagcaggctctgtctccatccgtgttcaaagcaatcatggaaaagctcgaaatgtcgaaattccagccgaccttgttaactctccctcggatcaaggtcacgacttctcaagacatgcttagcataatggagaaactggaattcttcgacttcagctatgatcttaacttatgcggtttgaccgaagacccagatctgcaggtatccgccatgcaacatcagacggtcttagaactgacggagacaggggttgaggcggccgcggcatccgcaatttccgtggcgcgtactctgctggtctttgaagtgcagcaaccattcttgtttgtgctctgggaccagcagcacaagttccccgttttcatggggagggtttatgaccctcgagcc

SEQ ID NO: 19075 - DNA, 1500 bp, synthetic construct
  misc_feature 1..1500: note = source = /note="Description of Artificial Sequence: Synthetic coding sequence"
  source 1..1500: mol_type = other DNA
atggcttcgcggctgacgctgctgaccctcctccttcttcttctggcaggagatagagcatcgagcaacccaaatgccacttcaagctcaagccaggatcctgagagccttcaagatcgaggtgagggaaaagtggccaccaccgtcatatccaagatgctcttcgtcgagccaatactcgaagtctcgtcacttcctacgaccaatagcactactaactcggccactaagattactgcgaatacgaccgatgagccaaccacccaaccgactactgaacctaccacccaacctaccatacaacctacccagccaaccacgcagctgccaactgattcgccgacccaacccaccactggctctttctgcccaggacctgtcactctttgttcggaccttgaatcgcactcgactgaagctgtgcttggtgatgcacttgtggatttcagccttaagctgtaccacgctttctctgcaatgaagaaggtggaaacgaacatggcctttagccctttttcaattgcatcgctcctcacccaagtgttgcttggagcaggtgagaacaccaagacgaacctggaatccattcttagctaccctaaagattttacctgtgtgcatcaagcacttaaagggtttaccaccaagggggtcactagcgtctcccagattttccactcccctgatttggcaatcagagatactttcgttaatgcatcaagaactttgtacagcagctcgccgagggtgttgagcaacaactcggatgcaaacctggagctgatcaatacgtgggttgcgaagaatactaacaataagatttcacggctgctcgactcgctgccctcagatactagactggtgctgctgaacgcaatttacctttccgcgaaatggaaaactacctttgatcctaaaaagacccgtatggaaccttttcatttcaaaaactccgtcataaaggtgcccatgatgaactcgaagaaataccctgtggcccatttcattgatcaaactcttaaggccaaagtcggccagcttcagctctcacataatctgtccctggtcattcttgtccctcagaaccttaagcaccgcctggaggatatggagcaggctctgtccccttcggtgtttaaggcaataatggaaaagctcgaaatgtccaagttccagcctacgctgcttacccttccgcgtattaaggtgaccacctctcaagatatgctttcaataatggagaagttggaattctttgacttttcgtacgacctgaatctgtgcggactcactgaagatccagacctccaagtgagcgccatgcaacatcagactgtcttggaattgaccgaaacgggagtggaggccgcagccgcctccgcaatctcagtggcccgcactcttctggtctttgaggtgcaacagccctttctgtttgtgctttgggatcaacagcacaagttcccggtgtttatgggacgggtctatgatccaagagcg

SEQ ID NO: 19076 - DNA, 1500 bp, synthetic construct
  misc_feature 1..1500: note = source = /note="Description of Artificial Sequence: Synthetic coding sequence"
  source 1..1500: mol_type = other DNA
atggcgtcacggctcaccttgctgacgttgctgctcctgctgctggcaggtgaccgcgcaagctcaaatcctaatgccactagctcctcgagccaagacccggagtcgctccaagataggggcgaaggcaaggtggcgaccaccgtgatcagcaagatgctgttcgtggagcccattctggaagtgtccagcctgccgaccacgaactccaccactaactctgccactaagatcaccgctaacactacggatgaaccaacgacccaaccaacgactgaaccgaccacccagccaacgatccagccaacgcagccgaccacccaactccccacggatagccctacgcagcctactactggatcattctgcccgggaccggtcactctgtgtagcgacctggagtcacattcaaccgaggcggtcttgggtgatgcgctcgtggatttttcccttaagctgtaccacgcgttctccgcaatgaagaaggtcgagactaatatggcatttagcccattctcaatcgcctccctcctcactcaagtcctgctgggagccggcgagaataccaagactaacctggagagcatcctctcgtatccgaaggatttcacttgcgtgcaccaggccctgaaaggattcactactaagggagtcacttcggtgtcccagatctttcactccccggacctggccattcgcgatacttttgtgaacgcctcgcggaccctgtactcatcgagcccgcgtgtgctctcgaacaattcggatgccaatcttgaactcattaacacttgggtggcaaagaatactaacaacaagatttcccgcctgttggactcgttgccatcggacaccagactcgtgttgctgaatgctatctacctgtccgcaaagtggaaaaccaccttcgacccgaagaaaactcgcatggaaccgtttcactttaagaactcggtgattaaggtgccgatgatgaattcgaagaagtatccggtggcccacttcatcgatcagactttgaaggcgaaggtcggacaactgcagctgtcccacaacctgtcattggtgatcttggtgccacagaacttgaagcatagactcgaggacatggaacaggccctcagcccgtcggtgttcaaagcaatcatggaaaagctggagatgagcaaatttcagccgactctgctgactctgcccaggattaaagtgactacctcacaggatatgctgtccattatggagaagttggagttcttcgacttttcatacgacctcaatctctgcggactgaccgaggacccggaccttcaagtctccgcaatgcagcaccaaaccgtgctcgaactgaccgaaaccggtgtggaggctgctgcggcgtccgccatctccgtggcgagaaccctcctcgtgtttgaggttcagcagccattcctgttcgtgttgtgggatcaacaacacaaattcccagtgttcatgggccgcgtgtacgacccgcgggcg

SEQ ID NO: 19077 - DNA, 1500 bp, synthetic construct
  misc_feature 1..1500: note = source = /note="Description of Artificial Sequence: Synthetic coding sequence"
  source 1..1500: mol_type = other DNA
atggcctcaagattaacactgctgactctattattgctgctgctcgctggcgaccgggcttcatccaatcccaacgctacctctagtagttcacaagaccccgaaagtctgcaggacaggggagagggtaaggtggccaccacggtaatctcaaagatgctgttcgtggaacccattcttgaggttagcagtctccctacaacgaatagcacaactaactccgctacaaaaatcactgctaatacaactgatgaaccgacaacccagccaactactgaacctacaacccagccaactatccagccaacgcaacctaccacccaactcccaacagacagccccacccagcctactacaggcagcttctgccctggtcctgttactctctgttccgatttggagtcccatagcacagaggcggtgcttggggacgcattggtcgactttagccttaagctgtatcatgcattcagtgcaatgaaaaaagtcgaaacaaatatggccttttccccattttccatcgcatcgctgttgacacaggtgctcctcggcgcaggggagaataccaagaccaatctcgagtccatcctcagctatccaaaagacttcacatgcgtacaccaggcccttaaaggcttcacaaccaagggcgtgactagcgtgtcccaaatcttccactcccccgatctcgctattcgagacaccttcgtcaacgcgtccaggactctgtactccagctccccaagagtgctctccaacaattcagacgcaaacctagaactgattaacacatgggtcgccaagaataccaacaataaaatcagcagactactagactctctcccctctgatactagacttgtgttactgaatgctatatacctatccgccaagtggaaaacgactttcgaccctaagaaaactaggatggagccctttcacttcaagaattccgtcatcaaagtgcccatgatgaacagcaagaagtaccccgttgcccacttcatagatcagacactgaaggcaaaggtcggccagctacagctttctcataacctctccctcgtgattcttgtcccccagaatctgaagcaccgcttggaggatatggagcaggccctgagcccgagtgtgtttaaggctataatggagaaactggagatgtctaagttccagccgaccctgctgaccctgccacgcattaaggtcaccaccagccaggacatgctctctattatggaaaaactcgagtttttcgatttcagttacgacctgaacctctgtggactaacagaggacccggaccttcaggtgtctgcaatgcagcatcaaacagtactcgagctgaccgaaaccggcgtggaagcagccgctgcctcggccatttcagttgccaggactctcctagtgttcgaagtgcagcagcccttcttgttcgtgctgtgggatcagcagcacaaatttccagtgttcatgggaagagtgtatgatcctagggcg

SEQ ID NO: 19078 - DNA, 1500 bp, synthetic construct
  misc_feature 1..1500: note = source = /note="Description of Artificial Sequence: Synthetic coding sequence"
  source 1..1500: mol_type = other DNA
atggcctcaaggttgacactccttactctgctcctcctgctcctggctggagacagggcctcttcaaacccaaacgcgacatcgtctagttcacaggatcctgagagcttgcaggatcgaggtgaaggcaaggtcgccactaccgttatctccaagatgctttttgtcgaaccaatcctagaagtgtcctctttgccaaccacaaacagcacaacaaattcggctaccaagattaccgctaacacgacagacgaaccgacaacccagcctaccactgagcccaccacccagccaacaattcagcctacccagccaacaacgcagctgccaactgacagtcccacacagcccaccacaggcagcttctgccccgggccagtaaccctatgcagcgaccttgagagtcactccactgaagccgtgctcggagatgctctggtagatttctcgctgaagctctatcatgctttttcggccatgaagaaagtagaaacgaatatggccttctcccctttttccattgcctcgcttctgacgcaggtgctgctcggagctggagagaacaccaaaactaatctcgagtctatcttgagttaccccaaggactttacatgtgtccatcaggccctgaagggcttcactacaaaaggagttacctcagtcagccagattttccactccccggacctggcgatcagggacacttttgttaacgctagcaggacgctgtattcaagtagcccccgggtcctgagtaacaacagtgacgccaacctggagctgatcaatacatgggtcgccaagaacactaataacaagatttccaggttactggactctctccccagtgatacgcgtctggtgctactgaacgcaatttacttgagcgcgaagtggaagacaactttcgaccctaagaaaacaagaatggaaccatttcacttcaagaattcggtcattaaagtgccaatgatgaacagcaaaaagtaccccgtggctcacttcatagaccagactttaaaggctaaggtagggcagctgcagctttctcacaatttaagcttagtgatccttgtgccccaaaaccttaagcatagacttgaggatatggaacaggctctctcaccttccgtgttcaaagccataatggagaagctggagatgagtaaatttcagccaactttactcaccctgcccagaattaaggtgaccacgtctcaggacatgttatccattatggaaaagttagaatttttcgatttttcatacgacttgaacctttgtggcctgactgaggatcctgatctgcaggtgtccgctatgcagcatcagaccgtgctcgaacttactgagaccggggttgaggcagcagcagcttctgcaatttccgtcgcccggacactgttagtgtttgaggtgcagcagcctttcctgtttgtgttgtgggatcagcaacacaaattccccgttttcatgggtcgcgtgtacgatccacgtgct

SEQ ID NO: 19079 - DNA, 1500 bp, synthetic construct
  misc_feature 1..1500: note = source = /note="Description of Artificial Sequence: Synthetic coding sequence"
  source 1..1500: mol_type = other DNA
atggcaagccgtctcaccctccttacgttgctgcttctgctgcttgctggggatcgggcttcctcaaaccctaacgcgacgagctctagcagccaggacccagaatccttgcaagaccgcggagagggaaaagtggccacgactgttatcagcaagatgctcttcgttgaacctatcttggaagtatcgagcctcccaaccaccaacagcaccacgaacagcgctactaaaatcaccgcaaatactactgacgaaccgactacccagccaaccactgagcccactactcaaccaactattcagccgactcaaccaaccacgcagctgccaaccgacagccccacccaacccaccaccggttcgttttgccctggaccggtgactctgtgttctgatctggagtcacattcgactgaagcggtgcttggagatgccctggtggacttctcgctcaaactctaccatgcgttttcggccatgaagaaagtggagacgaatatggcattctccccattctcaatagcctcgctgctgacccaggtcctccttggagcaggcgaaaacaccaagaccaatctcgagtcgatcttgtcgtatccaaaggatttcacgtgcgtgcaccaagctctcaagggtttcactactaagggggtcacttcggtgtcgcaaatctttcattcgccggacctggcgattagagataccttcgtgaatgcctcccgcactctctactcatcctcacctcgagtgctttcaaataactccgatgcgaatctggaactcattaacacctgggtggcgaaaaacactaataacaagatctcccgtctgctggactcgttgccgtcggacactcggttggtcctcctcaacgcaatttacttgtccgctaagtggaaaactaccttcgaccctaagaaaacgcggatggagccgttccacttcaagaacagcgtcatcaaagtccctatgatgaactccaaaaagtacccggtcgctcatttcatcgaccagactctgaaagcgaaagtcgggcaactgcagctgtcacacaatctctccctggtgatcctggtcccgcagaaccttaaacacaggctggaggacatggagcaggccctgagcccgtcggtctttaaggcaataatggagaagctcgaaatgtcgaagttccagccaactctgcttaccttgcctcgcatcaaggtgaccacttcgcaagacatgctctccatcatggaaaagttggagtttttcgacttttcgtacgacctgaacctgtgcggactcaccgaagatcccgatctgcaggtgtcggcgatgcagcaccagaccgtgctcgagctgaccgaaacgggcgtggaggcggccgccgcctcggctatctcagtcgctcgcaccctcctggtttttgaagtgcagcagcctttcctgtttgtcctgtgggaccaacaacacaagttccccgtgttcatggggcgggtgtacgatcctagggcc

SEQ ID NO: 19080 - DNA, 1500 bp, synthetic construct
  misc_feature 1..1500: note = source = /note="Description of Artificial Sequence: Synthetic coding sequence"
  source 1..1500: mol_type = other DNA
atggcttccaggctgactctgttaaccttgctgttgctgctgctggccggcgaccgcgcctcttccaacccaaacgcaaccagctcttcctcacaagatccagaatccctccaagatcgcggggaaggaaaggtagccaccacggtgatatctaagatgcttttcgttgagcctattctggaggtttcgagtctgcctactactaacagcactacaaacagcgcaacaaaaattaccgcgaatacgacagatgagcctaccacccaaccgaccactgagcctactacacaacctactattcagccaacccagccaaccactcagctgccaacagatagtccgacacagcctacaacaggtagcttctgccccggacccgtaactttatgtagtgatctagagagccattccaccgaggctgtgctgggcgatgccctggtggatttcagtctgaagctgtatcatgccttttcggccatgaagaaggtcgagaccaatatggcgtttagcccgttttcaatcgctagtctgctgactcaagtactgctgggggccggagaaaatacaaagacgaatctcgaatcaattctgtcgtacccaaaggatttcacgtgtgtgcaccaagctttgaagggatttacaacgaagggcgtgacatctgtgagtcagatatttcatagtccagatttggcgatcagagacactttcgtgaatgcttcccggacactctatagttcttcaccacgggttctgtcaaataattcagacgctaatctggagcttataaacacatgggttgccaaaaatactaataacaaaatatctcgcttgctggattcactgccttctgacacccgcttggtgctgctaaatgccatctatctgtccgcaaagtggaagacgactttcgaccctaagaagacccgtatggagccattccacttcaaaaacagtgtcatcaaggttcccatgatgaatagcaagaagtatccagtggcacattttattgatcagactttgaaagctaaggtggggcagttgcagctctcccataatttgtcactggtcatcctggttcctcagaatttgaaacaccggttggaggacatggagcaggccctcagtccatcagtattcaaagccatcatggagaaactcgagatgtcaaagttccagcccacccttttaaccctgccccgcattaaagtgaccaccagccaggacatgctgagcatcatggaaaagctcgaatttttcgacttctcgtacgatcttaatctgtgcgggctgacagaagacccagacctgcaggtaagtgcaatgcagcatcagacagtgctggaactcaccgaaactggtgtggaggccgcagcagcaagcgctatttcagtcgcaaggactctgctcgtcttcgaagtccagcaaccatttcttttcgttctgtgggaccagcagcataagttccccgtattcatgggcagagtctacgatccccgcgcc

SEQ ID NO: 19081 - DNA, 1500 bp, synthetic construct
  misc_feature 1..1500: note = source = /note="Description of Artificial Sequence: Synthetic coding sequence"
  source 1..1500: mol_type = other DNA
atggcctcaagattgaccttgctgacgctgctgctgcttcttctggccggcgatagagcatcgtcgaacccaaatgcaacctcctcgtcgagccaggaccctgaaagcctgcaagacaggggagaaggtaaggtggcaactactgtgatctccaagatgctgtttgtcgaaccaattctcgaagtgtcgtcgctgcccactactaattccactactaactccgctaccaagatcactgctaacaccactgatgaaccaactacccaaccaaccacggaacccaccactcaaccaaccattcagccaactcagcctactacccagcttcctaccgattcaccgactcagcctaccaccggatccttttgtcccggacctgtgactctctgctccgatcttgagtcgcactctactgaggcagtgcttggcgatgcccttgtggacttctcgctgaaactctaccatgctttttccgcaatgaagaaggtggagactaatatggccttttcaccattttcgatagcatcactgctcacgcaagttctgctgggcgccggagaaaacaccaaaactaaccttgagtctattctttcttaccctaaggatttcacttgtgtgcatcaggcacttaagggttttactactaagggcgtcaccagcgtgtcccagatattccactcccccgaccttgcaattcgtgatactttcgtgaacgcatcgcgaaccctttactcgagcagccctagggtgctttcgaataactcggacgcaaatctggaactgatcaacacgtgggtcgcaaagaatacgaataacaagatcagcaggcttctggatagtctcccttcagatacccggcttgtgctccttaacgcaatttacctttctgccaagtggaaaaccacctttgaccctaagaaaacccggatggaaccatttcactttaagaactctgtgataaaagtgccaatgatgaatagcaagaagtaccctgtggcacactttatcgatcagactcttaaagcaaaagtgggtcagcttcagctgagccataatctttcattggtcattcttgtcccgcaaaatcttaagcatcgacttgaggatatggaacaggctctgtcgccctcggtgttcaaggctattatggaaaagctggagatgtcgaaatttcagccaaccctgctcaccctgccgcggatcaaggtgaccacctcgcaagatatgctctcaattatggagaagctggagtttttcgacttttcctacgatctgaatctgtgtggtctgaccgaagatcctgatcttcaagtctcagcgatgcagcatcaaaccgtgctggaactgaccgaaaccggcgtggaggcggccgctgcttcagcaatttcggtggcaagaaccttgctcgtattcgaggtgcagcagccatttctttttgtgctctgggatcaacaacataagttcccagtctttatggggagagtctacgatcctagagct

SEQ ID NO: 19082 - DNA, 1500 bp, synthetic construct
  misc_feature 1..1500: note = source = /note="Description of Artificial Sequence: Synthetic coding sequence"
  source 1..1500: mol_type = other DNA
atggcaagccgcctcaccctgctgactctcctgctgctgctgctcgctggagacagagcctcctcaaacccgaatgcaaccagctcgtccagccaagacccggaatcgcttcaagaccggggcgaaggaaaggtggccaccactgtgatctccaaaatgctcttcgtcgaacctatcctcgaggtgtcatcacttcctaccaccaactcaaccaccaactccgcaactaagatcaccgccaatactacggacgaaccgacgacccagccgacgactgaaccaactactcagccgaccatccagccgactcagccgactacccagctccctactgattccccaactcaaccgaccaccgggtccttctgccctggaccggtgaccctgtgtagcgatcttgaatcgcactcgaccgaggccgtcttgggagatgcgctggtcgacttttcccttaaactctaccatgccttctccgctatgaaaaaggtagaaaccaatatggcattctcccccttctcaatcgcgtcactgctgactcaggtgctgctcggagcgggcgaaaatactaagactaacctggagtcgatcctgtcctacccaaaggacttcacgtgcgtccatcaggcactcaaaggatttactactaagggcgtgacttccgtctcgcagatctttcacagcccggatctggcaattcgggacacctttgtgaacgcctcccgtaccctgtacagtagctccccgcgggtgctctccaacaattcggacgccaatctggaactgatcaacacctgggtggcaaagaacaccaacaacaagatttcacgcttgttggactccctgccgtccgatactcgcctggtgctgctgaacgccatctatttgagcgccaagtggaaaaccacgtttgacccaaaaaagacccgtatggaacctttccacttcaagaactcggtcatcaaagtgccgatgatgaactctaagaaataccccgtcgcgcatttcatcgaccaaaccctgaaggccaaggtgggacagctccagctcagccataatctctcactggtgatcctggtgccgcagaacctgaagcatcgcctggaggatatggagcaggccctgtcgccttccgtctttaaggccatcatggaaaagctggaaatgtccaaattccagccaacgctgctgaccctgcctagaatcaaggtcaccacttcccaggacatgctttcgatcatggagaaacttgaattcttcgacttctcgtacgatctgaacttgtgtggactgactgaagatcccgacctccaggtgtcagcaatgcaacaccaaaccgtgctggaactcactgagacgggagtggaagcggctgccgcctccgcgatctcagttgcccgcacccttctcgtgtttgaagtccaacagccgtttctgttcgtgctctgggaccagcaacacaagttccccgtctttatgggccgggtgtacgacccccgcgct

SEQ ID NO: 19083 - DNA, 1500 bp, synthetic construct
  misc_feature 1..1500: note = source = /note="Description of Artificial Sequence: Synthetic coding sequence"
  source 1..1500: mol_type = other DNA
atggcctcacgcctgactctgttgacccttctcctgctgctgctggccggcgatagggcatcatctaaccctaatgcaactagttcctcaagccaagaccccgagagtctgcaggatagaggcgagggtaaagtcgccacgaccgttatctccaagatgctctttgtggaacccatcctcgaagtatcctcattaccaactacaaattcgactactaactctgccaccaaaattaccgccaatacgacagatgagcccactacccagcctacaactgagccaaccacccagcctaccattcagcctactcagcccactacacagcttcccacggactccccgacgcagcctacgaccgggagcttttgtcccggacctgtgaccctgtgctcagatctggaatcacactccaccgaggcagtactgggagatgcgcttgttgatttttctcttaaactgtaccacgccttctctgctatgaaaaaggtggagactaatatggccttctcgcccttttcaatagcttccttgctgacacaggtcctactgggtgccggcgagaataccaaaacaaatctggagtctatcctttcctatcccaaggacttcacttgcgtgcaccaggcactcaagggcttcacgacaaagggagtcacgagcgtgtctcagatctttcacagtcctgatttagctatccgcgacacctttgtgaacgcatcacggacactttactcctccagccccagagtgctgagcaacaatagtgacgccaatcttgagcttatcaatacctgggtggccaagaacaccaataataaaatcagcagactgctcgactcactgccctcggataccagattggtactccttaatgctatctatttgagcgcaaagtggaagacgacattcgaccccaaaaaaacacggatggagccttttcactttaagaattcagtaattaaagttcctatgatgaatagtaaaaagtatccagttgcgcatttcatcgaccaaacgcttaaggccaaggtgggccaactccaactctcacacaatttaagtctggtgatattggttcctcagaacctgaagcaccgcctggaggatatggagcaggcattatctccgagtgtgttcaaggcgattatggagaagctggaaatgtctaagttccagcccactctactgacccttccccggatcaaggtgacaacaagccaggacatgttgtccataatggaaaagctagagttctttgacttctcatatgatctgaacctgtgcgggcttaccgaggacccggatcttcaggtgtccgccatgcaacatcagacggttttggagttgaccgaaaccggcgtggaggcagccgcagccagcgcaattagtgtggctagaacactcttggtgttcgaggtgcagcaaccttttctgtttgtactgtgggaccagcaacacaaattccctgtcttcatgggtagagtttacgaccccagagcc

SEQ ID NO: 19084 - DNA, 1500 bp, synthetic construct
  misc_feature 1..1500: note = source = /note="Description of Artificial Sequence: Synthetic coding sequence"
  source 1..1500: mol_type = other DNA
atggcaagtcgactcacattgcttaccctacttctgctgttgttggctggcgacagagccagctcaaatcctaatgccacaagcagctcaagccaggatcccgagtccttgcaggaccgcggggaaggcaaggtggccacgacagtgataagtaagatgctctttgtggaacccatcctcgaagttagtagcttaccaaccactaacagcacaacgaattccgcaacaaagatcaccgccaacacaacagatgagccaacgacacagccgaccacagagcccacaacccagccgacgatccagcccacccagcctaccacccagctgccaaccgattcacccactcagccaactacgggctccttctgtccaggccctgtgacgctctgctctgacttggaatctcacagcacagaggcggtgcttggggatgcactggtggacttttctctgaaattgtatcacgcattcagcgccatgaagaaagtggaaactaatatggcattctctcctttcagtattgcctccctgcttacccaagtgctgctcggcgctggggagaatactaaaactaatctggagagcatcctgtcctatcctaaagacttcacgtgcgtgcaccaggcactcaaggggtttactacaaaaggagtgacttctgtgagccagatcttccacagtcccgacctcgctatccgggatacctttgttaacgccagtcggacgttgtacagcagttcccccagagtgctgtctaacaactctgatgctaacctggaactgatcaacacttgggtggccaagaataccaataacaagatttccaggctgctggactctttgcctagcgacacacgcttagtgctgctgaacgccatatacctgtctgccaaatggaagactacctttgacccaaagaagactcgcatggagccatttcacttcaagaactcagtgattaaggtgcctatgatgaattctaagaagtaccccgtggcacacttcatcgaccagaccttaaaggccaaagtaggccagcttcagctgtcccacaatctgagtttggtcatactggttccacagaatctaaagcaccggctagaggacatggagcaggctctgtctcctagtgtgtttaaggccattatggaaaagctggagatgagcaagtttcagcctaccctcctgacactgccaaggattaaagtcaccacatcacaggatatgctgagtattatggagaaactggagttcttcgatttttcttacgacctgaacctctgtggacttacagaggatcctgatttgcaggtgtccgctatgcagcatcagactgtgctggagttaaccgagactggagttgaggcagcagctgcatccgcgatatcagtggcaaggactttgctcgttttcgaggtacaacagccttttctcttcgtgttgtgggatcagcaacataagttcccagtgttcatgggacgggtctatgacccccgagcg

SEQ ID NO: 19085 - DNA, 1500 bp, synthetic construct
  misc_feature 1..1500: note = source = /note="Description of Artificial Sequence: Synthetic coding sequence"
  source 1..1500: mol_type = other DNA
atggcatcaagactgactcttcttacccttctgctgctgctgcttgcaggagatcgcgctagttccaatcccaacgccactagctcttcttcgcaggacccggaatcactgcaagatcgaggagagggtaaggtggcgaccaccgtgatatctaagatgttgttcgtagagcctattctggaagtgtcgtcgcttcccacgactaatagcacgaccaattctgccacgaagattacggcaaataccaccgatgaaccaactacccaacctactaccgaacctactactcagcctactatccaaccaactcagcccacgactcaactgccgacggatagtcctactcaaccaacgacgggttcattttgcccagggcccgtgacgctttgttcggatcttgaatcacatagtactgaagccgtcctgggcgatgcacttgtggattttagccttaagttgtaccatgcattttcggctatgaagaaggttgagacgaacatggcgttcagcccttttagcattgcatcactcttgacgcaagtgctcctcggcgcaggggaaaacaccaagactaaccttgaatcgattctgtcgtacccaaaggactttacctgtgtgcatcaggccctgaagggttttacgacgaagggagtcacctcggtgtcccaaatcttccactccccagaccttgcaatccgtgacactttcgtgaatgcatctcggaccttgtatagctcgtcgccacgggtgcttagcaacaacagcgatgcaaaccttgaattgattaacacctgggtcgcaaaaaacaccaacaacaagatctcgagactgctcgactctcttccctccgacactcgcctcgtgctgctcaacgctatttacctgtcagctaagtggaaaactacctttgatccgaaaaagaccaggatggagccattccatttcaaaaactccgtcataaaagtcccaatgatgaattccaaaaagtacccggtggcccatttcatcgaccagactctgaaggcaaaggtggggcaactgcaactgtcacacaaccttagccttgtcatcttggtcccacagaatcttaaacacagattggaggatatggagcaggccttgtccccttcagtgttcaaggccattatggagaagctggaaatgtcgaagtttcaacctaccctgctgaccctgccccggatcaaggttactacttcgcaagatatgcttagcatcatggaaaaacttgagttttttgatttctcatacgacctcaatctgtgtggactgactgaagatcctgatttgcaagtgtcagcaatgcagcatcagaccgtgctggaacttaccgaaaccggcgtcgaggcagccgcagcaagcgcaatttccgtcgctaggacgctcctggtgtttgaggtgcagcagccatttctcttcgtgctgtgggatcaacaacacaaatttccagttttcatgggacgggtgtacgaccctagagca

SEQ ID NO: 19086 - DNA, 1500 bp, synthetic construct
  misc_feature 1..1500: note = source = /note="Description of Artificial Sequence: Synthetic coding sequence"
  source 1..1500: mol_type = other DNA
atggccagcaggcttacgctcttgaccttgctgttgctactccttgccggagatagggctagctctaaccctaacgcaacctcatcttcaagccaggatcccgagtctttacaggatagaggcgaaggaaaggtcgccacaactgtgatatccaaaatgctctttgtagaacctatactggaagtgtccagcctgccaaccactaactcaactacaaatagtgcaactaagatcacagccaacacgacggatgagcctacgacccagccaaccaccgagcccacaacacagccaacgatccaacccactcagcccaccactcagctgcccacagattctcccactcagcccactaccggctcattctgcccaggccccgtgacactgtgttccgatttagagtctcactcaacggaggctgtgcttggggatgctttggtcgatttttcgcttaaattgtatcacgcatttagcgccatgaaaaaggtggagacaaatatggccttcagtccattttccattgcgtcccttctcacccaggtgttactgggggcaggagagaacacaaaaacaaacctcgagtctatactttcgtatccaaaggactttacgtgtgtacatcaggccttaaaggggtttactaccaaaggcgtgacatctgtttcacagatttttcatagccccgatctcgcaatcagagatacattcgtgaacgccagtagaacactctactcttcttcacctcgggtgctctccaacaacagtgacgccaacttggaactaattaacacctgggtggctaagaacacaaataataagatatccagactcctggacagtctcccatctgataccaggttggtgctgctgaacgcgatctatctatcagccaaatggaagacaacattcgacccaaagaaaacccggatggagccattccactttaagaacagtgtgattaaggtaccaatgatgaatagtaaaaagtacccggttgcccatttcatcgatcaaacactgaaagcaaaagtgggtcagttgcagttgtctcacaatctgagcctggtgatccttgtgccacagaatctcaagcatagactcgaagacatggaacaggccctgtcaccctccgtctttaaagcaattatggagaagctagaaatgtctaagttccagccaactctcttgacactccctcggatcaaagtgaccacttctcaggacatgctcagcattatggaaaagctcgagtttttcgacttttcatatgacctcaacctctgcggattgacggaggacccagacctacaagtctctgccatgcagcaccagaccgtgctggagctgactgagaccggggtcgaagctgctgctgcatcagcgatttcagtcgcccggacccttttagtctttgaggttcagcagccattcctgtttgtgctctgggaccagcagcataaatttccggtgttcatgggacgagtctacgacccaagagca

SEQ ID NO: 19087 - DNA, 1500 bp, synthetic construct
  misc_feature 1..1500: note = source = /note="Description of Artificial Sequence: Synthetic coding sequence"
  source 1..1500: mol_type = other DNA
atggcctctcgactcaccctgctcactcttctgctgttgctcttggcgggagatagagcgtccagtaaccccaatgccacttcttcctcctctcaggatcccgagtccctccaggaccggggggagggcaaggtggcaacaactgtcatatccaaaatgctcttcgtggaacccatcctcgaagttagctctctccccacaaccaactctactaccaacagtgcaacaaagattacggcgaacactacagatgagccaacaactcagccgactacagaaccaactacccagccaaccattcagcccacacagcctaccactcagctcccaactgactcccccactcagccgacaactggaagcttctgcccaggccctgtaaccctgtgttccgatctggagtcgcattctaccgaggccgtgctaggggacgccctggtggacttttctctgaagttgtatcacgcatttagcgccatgaaaaaggtggaaacaaacatggccttttcccctttctcaattgcatccctattaacgcaagtcctactgggtgccggggaaaacactaagaccaacctggagagcattctgagctatcccaaagacttcacgtgcgttcaccaggctctaaaaggcttcacgactaagggagttacttctgtgagtcaaattttccattccccagaccttgccatccgcgacacattcgtcaatgcaagtcgcactctgtactcctcatcacccagggttctgtccaacaacagcgatgccaatctggagctgattaacacgtgggttgcaaagaacacaaacaacaagatttcacgcctcctagatagccttccgtccgacacacggctagtgctgttaaacgcaatatacctgtccgcaaaatggaaaaccactttcgacccaaaaaagacccgcatggagcctttccacttcaagaacagtgttatcaaagtaccaatgatgaatagcaaaaagtaccctgtggcccactttatagaccagacgcttaaggctaaggtagggcagttacagttaagccacaatttgagcctcgttatcttggtgcctcagaacctgaaacaccggctggaagatatggaacaggccctgagcccctcagtttttaaggcgatcatggagaagctcgagatgagtaagtttcagcctaccctgttgactttgccgaggataaaggtcaccacatctcaggatatgctcagcattatggagaagcttgagttctttgatttttcttacgacctaaatctctgcggccttactgaggacccagatctacaggtcagtgcaatgcagcaccaaacagttttagaactgactgagacaggagtggaggctgcagcagcatctgctatcagtgttgcgcggaccttgctcgttttcgaggtgcagcagcccttcctgtttgtgttgtgggaccaacagcataagtttcccgttttcatgggccgagtctacgatccgcgagca

SEQ ID NO: 19088 - DNA, 1500 bp, synthetic construct
  misc_feature 1..1500: note = source = /note="Description of Artificial Sequence: Synthetic coding sequence"
  source 1..1500: mol_type = other DNA
atggcctcgcgactgaccttgctgaccctcctcctcctgcttctcgctggagatagagcctcgagcaacccgaatgcgaccagctcttcgtcgcaggacccggaatcgctgcaggatcgtggagaagggaaagtggcaaccaccgtgatatcgaagatgttgtttgtggagccaattctcgaagtgtcgtccctcccaaccactaactcgaccacgaacagcgctacgaaaatcaccgccaatacgaccgacgaaccgaccactcaaccaactactgagccaactacccagccgactatccaaccgacgcagccaacgacccaactccccactgatagcccgacccagcctactaccggatccttctgtccggggccagtgaccctgtgctcagaccttgagtcccattccaccgaagctgttctcggtgacgccctggtggacttctcgctgaagctctaccacgcattttccgcgatgaagaaggtcgaaaccaacatggcattctccccgtttagcatcgcgtccctgcttacccaggtgctgctcggcgcaggagagaacaccaaaaccaacctcgagtcgattctgtcctaccctaaggatttcacttgcgttcaccaagctctgaagggatttacgaccaagggagtgacgagcgtgtctcagattttccattcgccagacctggccattcgcgatacctttgtcaacgcctccaggactctttactcctcctcgccgcgcgtgctgtctaacaatagtgacgctaatctggagctcattaacacctgggtggccaaaaacacgaacaataagatctcacggcttctcgactcactcccgtcagacactaggctggtcctgttgaacgctatctacctgtcggccaagtggaaaactaccttcgacccgaagaaaacccgcatggagccgttccacttcaaaaactccgttatcaaggtcccgatgatgaacagcaagaaatacccggtggcgcacttcatcgaccaaacccttaaggccaaagtgggacaactgcagctcagtcataacctgtccctcgtgatcttggtgccacaaaacctgaaacaccggctggaggatatggaacaggcgctctcgccaagcgtgtttaaggcaatcatggaaaaactggaaatgtcaaaattccagccgactctcctcacgctgccccggatcaaggtcacgactagccaggacatgctgtccattatggagaaactggagttcttcgactttagctacgacctgaacctgtgcggactgaccgaagatccggacctgcaagtctcggcgatgcaacatcagaccgtgttggagctgaccgaaaccggggtggaagcggctgccgcgtcagccatctccgttgctcggaccttgctcgtgtttgaggtgcagcaacctttcctgttcgtcctttgggaccagcagcacaaattcccggtgtttatgggccgggtctacgacccgcgcgcc

SEQ ID NO: 19089 - DNA, 1500 bp, synthetic construct
  misc_feature 1..1500: note = source = /note="Description of Artificial Sequence: Synthetic coding sequence"
  source 1..1500: mol_type = other DNA
atggccagcaggcttacactcttaacgctcttgcttctcttgctcgctggagatcgcgcttcgagcaaccctaacgcgacgagctcctccagccaggacccggagtccctgcaggatcggggcgaaggtaaggtggccaccaccgttattagtaagatgctgtttgtggagcctatcttggaggtctcctcactccctacgacgaatagtaccaccaactctgctaccaagataaccgcgaacacaaccgatgaacccacgacccagcctaccaccgagcctactactcagcccacaatccagccgacacaacctactactcagcttcccaccgatagtcccactcaacctactactggatctttctgcccggggccggtcaccctgtgctcggatttggagtcccacagcacagaggcggtactgggtgatgcactcgtcgatttcagtctgaagctgtatcatgcattctcggccatgaaaaaggttgagactaacatggctttttcccctttcagcattgccagcctgctgacacaggtacttttgggtgcgggagagaacaccaagactaacctcgagtcgatcctttcctatccgaaggacttcacctgcgtccaccaggcgctgaagggcttcacgacaaagggggtgaccagcgtctctcagatctttcactcgcccgaccttgccatccgggatacgtttgtgaacgcctcccgtacgctgtactccagctctccgcgcgttctgtccaacaactcagatgccaatctggagctcattaatacttgggtcgcaaaaaacaccaacaataaaattagtcgcttgttggatagcctgcccagtgacacccgtctcgtcctgctgaatgctatttacctctctgccaagtggaagaccacgtttgatcccaagaaaactcggatggagcccttccacttcaagaatagcgtgataaaggtacctatgatgaactccaagaagtacccggtggcgcattttatcgaccagacccttaaggccaaggtgggacaactccagctgagccacaacttgtctctggtcattctagtccctcaaaaccttaaacaccgtcttgaggatatggagcaggccctctctccaagtgttttcaaggccattatggaaaagctggaaatgtcgaagttccagccgacgcttctaaccctgccccgtatcaaagtcactacctcacaggacatgctgtccatcatggagaagctggaatttttcgacttttcgtatgatctcaatctctgcgggcttaccgaggaccctgatctgcaggttagcgctatgcaacaccagaccgtgcttgagctgaccgaaacaggcgtcgaagccgcggcggcgtccgccatctccgtcgcccgcactttgctcgttttcgaggtccagcagcccttcctctttgtgctctgggaccaacagcacaagttcccggtcttcatgggcagggtctacgatcctagggcg

SEQ ID NO: 19090 - DNA, 1500 bp, synthetic construct
  misc_feature 1..1500: note = source = /note="Description of Artificial Sequence: Synthetic coding sequence"
  source 1..1500: mol_type = other DNA
atggctagtcgtctgacccttttgactctcctgctcctgctgttggccggggaccgagcttcgagcaaccctaatgcaacgagctcctctagtcaagaccccgagtccctacaggataggggtgaaggtaaggtggcaactactgtgatctctaagatgctcttcgtggaacccattcttgaggtgtcctccctcccgaccacaaattctactacaaattctgccaccaaaattactgcgaataccactgatgagcctaccactcagcccactacggagcctaccacccagcccacaatacaacccacacaacccacgacccagctacccacagatagcccaacccagcccaccaccggaagtttctgtccagggccggtgactctttgcagcgatctagaatctcactccaccgaagccgttctgggcgacgctcttgtggatttctccctgaaactgtaccacgcctttagcgccatgaagaaggtggagacaaacatggcattctcgcctttctcaatcgcatccctcctgacccaggtgctcctgggtgccggggaaaataccaaaaccaatctggagagtatcctgagctaccctaaagactttacgtgcgtgcaccaggctctaaagggcttcaccactaagggtgtcacaagtgtttcacagatctttcattctccggatctggccattagggatacatttgtcaatgcatctagaacgttgtactcaagtagcccgcgggtgctgtccaataactccgatgccaatctggagcttatcaacacgtgggtagccaaaaacaccaacaataagatctcccggctcctggattcattgccatccgacactcgcctcgtgctgctgaatgctatttacctcagtgctaaatggaagactacatttgacccaaaaaagacacgcatggagccatttcattttaagaacagtgtcataaaggtcccgatgatgaattcaaagaagtaccctgttgcacacttcattgatcagacattgaaagccaaagtcggacagttgcagctttctcacaatctttccttggtgattctggtgccccagaacctgaagcacaggctagaggatatggagcaggctctgtcaccatcagttttcaaggcgatcatggagaagctcgaaatgtctaagttccaaccaacattgcttacactaccaaggattaaggttaccactagccaagatatgctctccataatggagaagcttgagttctttgacttcagttatgatctgaacttgtgtggcttgaccgaagatcccgacttgcaggtatcagcaatgcagcatcaaactgtgctggagttgacggagaccggagtcgaagcagctgccgcctccgccatttccgtggcgcgcacccttctggtattcgaggtacagcagccatttctattcgtgttatgggatcaacagcacaagttccccgtctttatggggcgcgtgtatgaccccagagca

SEQ ID NO: 19091 - DNA, 1500 bp, synthetic construct
  misc_feature 1..1500: note = source = /note="Description of Artificial Sequence: Synthetic coding sequence"
  source 1..1500: mol_type = other DNA
atggcctcacggctgactttgctgacgctgcttctgctgttgctcgctggagacagggcgagctcaaaccccaatgcaacttcgtccagcagccaggacccagagtcactgcaggaccgcggagaggggaaggtggccaccaccgttatctcaaagatgctgttcgtggagcccattctggaggtgtcatcgcttccgaccaccaactcgactaccaattcggctactaagatcaccgccaacaccactgacgagccgacgactcagccgacgactgaacccaccacccagccgactatccagccgacgcaacccaccactcaactgccaaccgactctccgactcaaccaacgactggatctttttgcccaggaccagtgactttgtgctcggacctggaatcacatagcaccgaggctgtgctcggtgacgccttggttgatttttccctgaagctgtaccatgcattttccgccatgaagaaagtcgagactaacatggcgttctccccgttctctattgcatcactgctgactcaggtcttgctgggcgctggagagaatacgaagactaacctggagtccatcctctcgtaccccaaggacttcacttgtgtgcatcaagccctcaaaggtttcactaccaagggtgtcacctccgtttcacagatttttcactcaccagacctggccatccgggatacgttcgttaatgccagccgcactctgtattcttcgtcccctcgagtcctttccaacaactctgatgcaaatcttgaactcatcaatacctgggtggcgaaaaacacgaacaacaaaatcagccggctccttgactccctcccctcagataccagactcgtgttgctgaacgcgatctacctgagcgctaagtggaaaactaccttcgatcccaagaagaccagaatggaaccatttcatttcaagaattcagtcatcaaggtgccgatgatgaactccaagaagtacccggtggcccacttcatcgaccagaccctgaaagcaaaggtggggcagctgcaactgtcccacaacttgagcctggtgattctggtccctcaaaatctgaagcaccgactcgaagatatggagcaggcactcagcccttcggtgttcaaggccatcatggagaaattggaaatgagtaagttccagccaaccctgctgaccttgccgcgcatcaaagtgaccacttcgcaggacatgctctcgattatggaaaagttggaattcttcgatttttcgtacgatctgaacctgtgtggcctcactgaagacccggaccttcaggtgtcggctatgcaacaccaaaccgtcttggaattgaccgagactggggttgaagcggccgctgcctctgcaattagcgtggcacggactctccttgtgtttgaagtgcagcaaccgttcttgtttgtgctgtgggatcaacagcataagttcccggtgttcatgggacgggtgtacgatcctcgcgcc

SEQ ID NO: 19092 - DNA, 1500 bp, synthetic construct
  misc_feature 1..1500: note = source = /note="Description of Artificial Sequence: Synthetic coding sequence"
  source 1..1500: mol_type = other DNA
atggctagcaggttgactttgcttaccttgctgctgctcctgttggccggcgatcgcgcatccagcaatccaaacgcaacctcttccagttcgcaggacccagaaagcctgcaggacaggggggaaggcaaagtggctaccacagtgatcagcaaaatgctctttgtggagccaatcctggaagtgagttccctgcccaccactaactccaccactaattccgcgactaagattaccgctaatacaaccgacgaaccaactacccagccaactaccgagcccaccacacagcctacaatccagcctacccagccaactacgcaactccccacagacagccctactcaaccaaccactggaagtttttgcccaggaccagtcacgctgtgctcggatctggagtctcactctacagaggccgtgcttggagatgcacttgtagacttctcactcaaactgtaccacgcgttctcagctatgaaaaaggttgagactaatatggcgttcagcccattcagcatcgctagtctcctgacacaggtcctgctcggggctggcgaaaatacaaagacaaacctggagagtattctcagctaccccaaagattttacttgcgtgcatcaagcattgaaaggattcacaactaagggggtcaccagcgtgtcacagatctttcattcaccggacctggctattcgcgataccttcgttaacgcatcgaggactctttactctagctcacccagggtcctgtctaacaattctgatgccaacctggagcttatcaacacttgggtggccaagaacaccaacaataaaatcagtaggctgctggactcacttcctagtgatacccgccttgttcttctgaacgctatctacctgtcagcgaagtggaaaaccaccttcgatcccaaaaaaacaaggatggaacctttccactttaaaaactccgtgattaaagttcccatgatgaactctaaaaagtacccagtcgctcacttcatcgaccagactttgaaagctaaggtcggacaactccagctcagtcataatctgtccctggtaattctggtgccccagaatctcaagcaccgactggaggatatggagcaggctctgagcccttcggtgttcaaagctatcatggagaagttggaaatgagcaagtttcagcctactcttctgacactccccaggattaaagtgactacaagccaggacatgctgtctatcatggaaaagctggaattttttgacttctcctatgacctcaacctgtgtggtctgactgaggaccccgatctgcaggtcagcgccatgcaacaccagaccgttttagaattgacagagactggggttgaggctgctgccgcctctgcgatttctgttgcacggaccctgttggtgtttgaggtccagcagccctttctgttcgtcctgtgggatcagcaacataaatttcccgttttcatggggagggtctatgaccctagagca

SEQ ID NO: 19093 - DNA, 1500 bp, synthetic construct
  misc_feature 1..1500: note = source = /note="Description of Artificial Sequence: Synthetic coding sequence"
  source 1..1500: mol_type = other DNA
atggcatcacggctcacgcttctgacactgctgctgctgctgctggccggtgaccgcgcgagctctaacccgaatgccacatccagctcttctcaggaccctgaatccctgcaggaccgaggcgaggggaaagtcgcgacgactgtcataagcaagatgctgttcgtggagcctatcctggaagtgagcagccttcctaccacaaatagcaccacgaacagcgcgacgaagatcacagcaaataccaccgacgaaccaaccacgcagccgactacggagcctactacccaaccaaccatccagccgacacagccaaccacgcagctgccgaccgacagcccgacgcaaccgacgaccgggagcttctgtccgggtcccgtgacgctgtgtagcgatctggaatctcattctaccgaggccgttctgggagatgccctagtggatttctcactcaaactgtaccacgccttctctgccatgaaaaaggtggagaccaacatggctttcagtcctttttccattgcgtctctgctgacgcaagtgttgctgggtgccggcgaaaacacgaagaccaatctggagtcgattctgagctacccgaaagatttcacatgtgtacatcaggcgttgaaaggttttaccaccaagggtgtgacctccgtcagccagatatttcactcccctgatctggcgattcgtgatactttcgtcaacgcgagccgcaccctttacagctccagcccacgtgtcctgtccaacaacagcgatgcgaatttggaactgattaacacttgggtggcaaaaaacacgaataacaaaattagccggctgctggatagcctgccttccgatactcgcctagtcctgcttaacgcaatctacctgagcgctaagtggaagaccaccttcgaccctaagaagacgcggatggaaccgtttcactttaagaactctgtcatcaaagttcctatgatgaacagtaaaaagtatcctgttgctcactttattgaccaaactctgaaggcaaaggtcggacagctgcaactgagccataatctgagcctggtcatattggtcccacaaaacctaaagcaccgtcttgaagacatggagcaggctctgtctccgtccgtctttaaagctattatggagaagttggaaatgtctaaattccaaccaactctgctgaccttacctcggattaaagttactacctcgcaggatatgctgtctatcatggagaagctggagttcttcgacttctcttatgacctgaatctctgcggtctgaccgaggatcccgacctgcaggtcagcgcaatgcagcaccagaccgtcctggaactgactgagactggagttgaagccgccgcagcgagcgctatctctgttgcccgcactctgctcgtgttcgaggtgcaacagcccttcctgtttgttctgtgggaccagcagcacaaattcccggtgttcatgggccgagtttacgacccacgtgca

SEQ ID NO: 19094 - DNA, 1500 bp, synthetic construct
  misc_feature 1..1500: note = source = /note="Description of Artificial Sequence: Synthetic coding sequence"
  source 1..1500: mol_type = other DNA
atggcttccagactgacactactgaccctcctcttgctgctcttggcgggagatcgagcctcgagtaatcctaacgccaccagcagcagcagccaggatcccgagtcgttgcaggatcgaggcgaaggaaaggttgcaactaccgtcatcagtaagatgctgttcgtggagcctattctggaggtgagcagcctcccaaccacaaactctacaacaaactctgccacaaaaatcaccgccaataccactgatgaacctaccactcaacccactacagagccaaccacgcagcccaccatccaaccaactcaaccaacaacccagctgcccacagatagtcccactcagcccaccactgggtccttctgtccaggcccagttaccctatgttctgacctggagtcacacagcactgaggctgtgctcggagacgccctggtggacttcagcctgaaactctaccatgcattcagcgccatgaaaaaggtcgagacaaacatggccttctcgcccttctccattgcatcgctcctaacccaggtacttctgggcgcaggagagaacacaaaaactaacctggaatcaatactctcttaccctaaagacttcacttgtgtgcaccaagcccttaagggcttcactacaaagggcgtaacaagcgtgtctcaaatcttccatagtcccgatctagcaattcgagatacttttgtgaacgcaagtagaactctttactcatcatcccctcgggtgctatccaacaactccgacgcaaatctcgagctgattaatacctgggtcgccaagaacacaaataataagatctcccgtctgctggatagccttccctccgacacgcgtttagttctgctgaatgccatatatctcagcgcgaaatggaagactactttcgaccctaaaaagactaggatggaaccattccatttcaaaaactccgttatcaaggtgcctatgatgaattctaagaaataccctgtggctcatttcatcgatcagaccctgaaggcgaaagtggggcaattgcagttgtcacacaacctgagcctagttattctggtcccgcagaatcttaagcatcggctggaggatatggagcaggccctctcaccctcagtgttcaaggccataatggagaagcttgagatgtctaaatttcagcccacactgcttactctgccgcgaatcaaagtaactacctcccaggacatgctgtccataatggaaaagctcgaatttttcgactttagttacgacctaaacctgtgcggactgactgaagatccggacctgcaagtctctgcaatgcagcaccagaccgtccttgaactgactgagaccggagtcgaagctgctgctgcaagcgcgatctccgtcgccagaacgctgctggtctttgaggtgcaacagccctttctgttcgtactgtgggaccaacagcacaagttccccgtgttcatgggacgcgtctatgacccccgcgcc

SEQ ID NO: 19095 - DNA, 1500 bp, synthetic construct
  misc_feature 1..1500: note = source = /note="Description of Artificial Sequence: Synthetic coding sequence"
  source 1..1500: mol_type = other DNA
atggcttcaagacttacccttttgactctacttttgttattgcttgcaggcgatagagctagctcgaatccaaatgctaccagcagtagctcgcaagatccggaatcattacaggatcgtggagaaggaaaagttgcaaccactgtcatcagtaaaatgttatttgtcgagccaattctggaggtgtcaagtcttcctacaaccaattcaactacgaattctgcgaccaagataacggcaaacactacagacgaacccacaactcaaccaacaacagagccgacaacgcaaccgactatccagccaactcagccaacgactcagttgccaacagactcaccgacacaacctacaacaggctcgttctgtccaggaccagtcaccctttgttcagatctcgaatctcatagtacagaagcagtccttggagatgctctcgtggatttctctctcaagctttatcatgcattctcagctatgaaaaaggttgaaacaaacatggctttcagtccattctccattgcttccctgttaacacaagtattattgggagctggagaaaacaccaaaaccaatttagaatcaatattgtcgtatccaaaggacttcacttgcgtccaccaggctcttaaaggatttacaacgaaaggagtgacttcagtgtctcagatctttcattcaccggatctcgccatacgagatacattcgtcaatgcatctcgtactctttactcctcctccccaagagtgttatctaataatagcgatgctaatttggaattgataaacacatgggtggcgaaaaacaccaataataagatatcacggctactagatagcctaccgagcgatactaggctcgtcttgctcaatgcaatatatttgtctgcaaagtggaaaacaacgtttgatccaaagaagactcgaatggagccatttcactttaagaatagtgtgataaaagttccaatgatgaattcgaaaaagtaccctgtggcgcatttcattgaccaaactctcaaggccaaggttggtcagcttcaattgtcacataacttatcgcttgttatccttgttccgcagaatctaaaacatcgacttgaagacatggagcaagctttatcgccaagcgtatttaaggctatcatggaaaaattagaaatgtcaaagtttcagccaactttactaactcttccaagaattaaagttaccacgagtcaggatatgctttcaattatggaaaaacttgaatttttcgacttttcatatgacctgaatctttgcggattgacagaagatcccgatcttcaagtgagcgcgatgcaacatcaaacagttctagagctgacagaaactggcgtggaagccgcagcggcgtctgcaatttctgtagctcgcactttactggttttcgaggtgcaacaaccatttcttttcgtcctttgggatcaacagcataagtttcccgttttcatgggtcgagtatacgacccacgagcg

SEQ ID NO: 19096 - DNA, 1500 bp, synthetic construct
  misc_feature 1..1500: note = source = /note="Description of Artificial Sequence: Synthetic coding sequence"
  source 1..1500: mol_type = other DNA
atggcctcccgcctcacccttctgacccttctgctcctgctgctggccggggaccgggccagctctaatccaaacgccacctcatcctcctcccaagatccggaatccttgcaggaccgcggcgaaggaaaggtcgccaccacggtcatcagtaagatgctcttcgtcgaacccatcctggaggtttcgtccttgccaacgacgaattcaactaccaattcagcgaccaagatcaccgccaacactactgatgaaccaaccacccaaccaactaccgagcctactacccagccgactatccagccgactcaaccaacgacccagctgccgaccgactcgcctacccagccaaccactggatctttctgtcctggccccgtgactctctgcagcgacctggaaagccactcgactgaagcggtcctgggagatgccctggtggatttctcccttaagttgtaccatgctttctcagctatgaaaaaggtggaaaccaacatggccttctcacctttctcgatcgcatcgctcctgacccaagtgcttctgggagcgggggagaataccaaaacgaacctggagtcgattctctcctacccaaaggacttcacctgtgtccatcaagcgctgaaaggattcaccaccaaaggagtgacttccgtcagccagatcttccactccccagatctcgccattcgcgacacctttgtgaacgcatcgcggactctgtactcatcgagccctagggtcctgtctaacaattcagatgccaaccttgaactcatcaacacgtgggttgccaagaataccaataacaagatctcgcggttgctggattcgctcccaagcgacacccggcttgtgctgcttaacgccatctacctctccgcgaaatggaaaaccacctttgacccaaaaaagacccgaatggaaccgttccatttcaagaattcggtgatcaaggtccctatgatgaattccaagaagtacccggtggcccactttattgatcaaaccctgaaggcaaaggtgggtcagctccaactttcacataacctgagcctggtcatcctggtcccgcagaatttgaagcaccggctggaggacatggagcaggcgctgtcgccttcggtctttaaggcgatcatggaaaagctggaaatgtcgaagttccagcctacgttgcttaccctccctcggatcaaggtgaccacctcacaggacatgctgtccatcatggaaaaactggagtttttcgattttagctacgacctgaatctgtgtggactcactgaggacccggaccttcaggtgtcggccatgcagcaccagactgtgctggagctgactgaaactggtgtggaggcagcggcggcttccgcgatcagcgtggctcgcaccctgttggtctttgaggtgcaacaacccttcctgttcgtactgtgggatcaacaacataagtttccagtctttatggggagagtctacgatcctcgggca

SEQ ID NO: 19097 - DNA, 1500 bp, synthetic construct
  misc_feature 1..1500: note = source = /note="Description of Artificial Sequence: Synthetic coding sequence"
  source 1..1500: mol_type = other DNA
atggcttctcggctgaccctcctgactttgctcctgctgctgttggccggcgatcgggcatcctcgaaccctaatgccacttcgtcatcgtcccaagatccggaatctctgcaggacaggggtgaaggaaaggtggcgactaccgtaatctcaaagatgctcttcgtggaaccgatcttggaggtgagctcacttcctaccactaactctaccaccaactccgcaactaagatcaccgcgaacactactgacgagcctacgacgcagcccactactgaaccgactacccagccgactatccagccgacccagccgaccacccagctcccgacggattccccaactcaaccaaccaccggatccttttgcccgggaccagtgaccctgtgctccgacctggagagccatagcacggaagcggtgctgggagatgccctcgtcgacttctcactcaagctctaccatgctttctctgccatgaagaaagtggaaactaacatggcattctcgcccttttccatcgcctcgcttctgacccaagtgcttctcggggctggcgagaacaccaagacgaatttggaatccatcctgagctacccaaaagatttcacctgtgtgcaccaggccctgaagggtttcaccaccaagggagttacttctgtgagccagatctttcattcccctgacctggccatcagagacactttcgtcaatgcttcccggacgctgtatagttcatcaccgcgcgtcctgtcgaacaactcggatgcgaacctcgaactcattaacacctgggtggcgaagaatactaacaataagatctcgagactgctggacagccttccgagcgacacccgcctcgtgctcctcaacgccatctacctgagcgccaagtggaaaacgacttttgaccccaaaaagactaggatggaaccatttcacttcaagaattccgtgatcaaggtcccgatgatgaactccaagaaatacccagtcgcccatttcatcgaccagaccctgaaggcgaaggttggccagctgcaactgtcgcacaatctgtctctcgtgattttggtaccccaaaatctgaagcacagacttgaggacatggagcaggcgttgagcccgagcgtgttcaaagctattatggaaaaactggaaatgtcaaagttccagcccacgcttcttaccctgccgcgcattaaggtcaccacttcgcaagatatgctgtcgatcatggagaagctggaattcttcgacttctcctacgatcttaacctgtgcgggctgaccgaggaccctgatttgcaggtgagcgccatgcagcaccaaaccgtactggagctgaccgaaactggagtggaggccgcagcagcaagcgctatctcagtggcgcggaccttgctcgtgttcgaggtgcaacagccatttctgttcgtcctctgggatcaacagcacaaatttcctgtgttcatgggacgagtctacgacccacgcgct

SEQ ID NO: 19098 - DNA, 1500 bp, synthetic construct
  misc_feature 1..1500: note = source = /note="Description of Artificial Sequence: Synthetic coding sequence"
  source 1..1500: mol_type = other DNA
atggcctcccgcctgactctattgaccctgttgctcttgctgctcgccggcgaccgggcatccagtaaccctaatgccacatcaagcagttcccaggacccagaatcccttcaagatcggggcgagggcaaggtggctaccaccgtgatttcaaagatgctctttgttgagcccatcttggaagtgtccagccttcctaccacaaactctaccacgaactcggcgacaaagattaccgcaaataccaccgacgagcccacaacccagccgacaaccgaacccacgacccagcccaccatccagcctacacagcccaccactcaactgcccaccgatagccctacccaacctacaactgggtcgttctgcccggggccagttactttgtgctctgatctggagtcccactccaccgaggcagtgctgggagatgctcttgtcgatttctcactgaaattgtaccatgccttttccgcaatgaaaaaagtggaaactaacatggcattttcaccgtttagcattgcctcactgctgacccaggtgctgctgggcgccggcgaaaacactaaaacaaacctggaatcaatcttaagttacccaaaagacttcacgtgcgtgcatcaggccctgaagggctttacaacgaagggcgtgaccagcgtgtcgcagattttccacagccccgatctggcgatcagagacacattcgtcaacgcctcccgaacactgtattccagctccccccgcgtgctctccaataactccgacgcgaacctcgaactgatcaacacctgggttgcgaagaacacaaataataagatttcgcgtctcctcgatagtcttcccagtgataccagactagtactgctgaatgcaatctacctgtccgcaaaatggaagaccacattcgacccaaagaaaacacgaatggagccattccactttaagaactctgtgattaaagtgcccatgatgaactctaaaaagtatcccgtggcacattttatagatcagacacttaaagcaaaagtgggtcagttgcagctcagccataatctgtcactggtgattctggtgcctcagaacctgaagcaccgcctggaggacatggagcaagcactgagcccatccgtattcaaggctatcatggagaagctcgaaatgtccaagtttcagcctaccctgctgacactcccccggattaaagttaccacgtctcaagacatgttgagtataatggaaaaacttgagttttttgacttcagttatgatctgaatctgtgtgggcttactgaagaccccgatttacaggtctctgccatgcagcatcaaaccgtgctggagctgactgaaaccggagtggaagctgcggctgcatccgctatcagcgtcgcccgcacactgctggtattcgaagtacagcagccttttctgttcgtgttatgggatcaacagcacaagtttcctgtgttcatgggccgggtgtacgatccacgggct

SEQ ID NO: 19099 - DNA, 1500 bp, synthetic construct
  misc_feature 1..1500: note = source = /note="Description of Artificial Sequence: Synthetic coding sequence"
  source 1..1500: mol_type = other DNA
atggctagcagactcacgcttcttactctccttctgctccttcttgccggggatcgtgcatcgtcgaacccaaatgcaactagctcctcgtcacaggatcctgaatccctccaagatcgtggagaagggaaggtcgcaaccactgtcattagcaaaatgcttttcgtggagccgattcttgaagtctccagcctgcctaccaccaatagcactaccaactcagcaactaagataaccgccaataccacggacgaaccaaccacccagcccactactgaacccaccacccaacctaccattcaaccaacccaacccaccactcaacttcccaccgatagcccaacccaacctacgaccggatcgttttgtcctggtcctgtgactctgtgcagcgatctggaatcacattcgaccgaggcagtgcttggggacgcacttgtggacttttcgctgaagttgtaccatgcattctcggcaatgaagaaggtcgaaactaacatggcgttcagcccattctcaatcgcatcacttcttacccaggtcctgcttggagcgggagaaaatacgaaaactaatctggaatccatcctgtcctaccctaaggatttcacttgtgtgcatcaagccctgaagggcttcactactaagggcgtcacctcggtgtcccaaatcttccattcccctgaccttgcaattcgtgatacctttgtcaacgcatccagaaccttgtattcttcgtctccgcgggtgctgagcaacaattccgatgcaaacctggaactgattaacacctgggtggcaaaaaacaccaacaacaagataagtagactgctggattctcttccttccgatactaggctcgtgcttttgaatgcaatttacctttcagcaaagtggaaaaccacgtttgacccgaaaaagaccagaatggagccctttcactttaagaactcggtgattaaagtccctatgatgaattccaagaaataccctgtggcacactttatcgatcagaccctgaaagcgaaagtagggcagctgcaactttcgcataacctttcactcgtcattcttgtcccacagaacctgaagcatcggctggaagatatggagcaggcactttcaccttccgtctttaaggcaattatggaaaagctggagatgtccaagttccagcccaccctccttacccttcctcggattaaggtgactactagccaagatatgctttccatcatggagaagctggagttttttgatttttcatacgatctgaacctgtgtggtcttaccgaggacccggaccttcaggtgtcggccatgcaacaccaaaccgtgctcgagctgactgaaactggagtcgaggcagcagctgccagcgcaatttcggtggcacggacccttctggtctttgaggtccagcagccgtttctttttgtgctttgggatcagcaacataagtttccggtgttcatgggtcgagtgtacgatcctcgcgca

SEQ ID NO: 19100 - DNA, 1500 bp, synthetic construct
  misc_feature 1..1500: note = source = /note="Description of Artificial Sequence: Synthetic coding sequence"
  source 1..1500: mol_type = other DNA
atggcctctagactgacccttctgactctgctactactccttcttgctggcgaccgcgcaagcagcaatccgaacgccacctctagctcatcgcaggatcctgagtccttacaggacagaggtgaagggaaggtggctactacagtcatatccaagatgctgttcgtggagcccattctggaagtttcaagcctgcctacaacaaatagcaccacaaacagcgcaacaaagattacagctaacaccaccgatgagccaacaacacagcctaccacagagcctaccactcaacctactatccagcccacacagcctactacacagctacctacagattcacctacacagcctaccacagggagcttctgtccaggccctgtaaccctgtgctccgatttggaatcacatagcaccgaggctgtgctgggcgacgctctcgtcgacttctcactgaaactgtaccacgctttctcagccatgaagaaggtcgagacaaatatggccttctcccccttcagcattgccagcctgctgacgcaggtgcttttgggggccggcgagaatactaagaccaatctggagagtatcctgtcttatcccaaggactttacgtgcgtgcatcaagcacttaaggggtttacaaccaagggagtcacctccgtctcccagatctttcatagtccagacttggcaattagggatactttcgttaacgcttcaaggacactgtattccagtagtcctcgggtgttaagtaacaattctgacgccaacctggaactgattaatacttgggtggctaaaaatactaataataaaattagccgtctgctggacagcctaccctcggacacaaggttggttcttctgaacgctatttatttgagcgcaaaatggaagacgactttcgacccgaaaaaaacgcgcatggagccctttcatttcaagaattctgtgattaaagtccccatgatgaattctaagaaatatccagtggctcatttcatagaccagacacttaaggcaaaagtaggtcaactccagctttctcacaatttatcactagttatactcgtgccgcaaaaccttaaacatcgactagaagatatggaacaggctctttcccccagcgtgttcaaggccatcatggagaaattagagatgtctaagttccagcccactcttctgaccctgcccaggattaaagtaactacatcccaagacatgctaagcattatggagaagctggaatttttcgacttcagctacgatttgaatttatgcggtcttaccgaggacccagacctgcaggtgtcggcaatgcaacaccaaacagtcctcgagctgactgaaaccggcgttgaagcagcagctgcttctgcaatttccgtggcacgcacgctgctggttttcgaagtccagcagccattcctgtttgtgctgtgggatcagcaacataagtttcctgttttcatgggacgggtgtacgatccccgcgca

SEQ ID NO: 19101 - DNA, 1500 bp, synthetic construct
  misc_feature 1..1500: note = source = /note="Description of Artificial Sequence: Synthetic coding sequence"
  source 1..1500: mol_type = other DNA
atggcttcacggctgactctgctcactctgctgctgcttctgctcgctggcgatcgcgccagcagcaacccgaatgcgacttcgtcgtcgagccaagatccggagtccttgcaagatcggggggaaggtaaggtcgccaccactgtcattagcaagatgctgtttgtggagccgatcctggaggtgtcctcgctgcctactactaattcgaccacgaattcggcgactaagatcaccgcgaatactaccgacgaacctaccactcaacccactactgaaccaaccactcaaccgaccatccaaccaacccagcctaccacgcagcttccgactgactccccaacccagccgactactggatcgttttgcccgggaccggtcaccctgtgttcagatttggagtcccactccacggaagccgtgctgggagacgcgctggttgacttttcgttgaagttgtaccacgcattctcagctatgaagaaggtggaaactaacatggccttctccccattctccatcgcctcgcttctgacccaagtgctgctgggggctggtgaaaacaccaagaccaacctggagagcatccttagctacccgaaggatttcacctgcgtgcatcaggctctcaaaggcttcaccactaagggagtgacctccgtctcgcagatattccacagcccggacctggccatcagggacacctttgtgaacgcatcacggacgttgtactcctcatcaccacgggtcctgtccaacaacagcgatgctaatctcgagctgatcaatacctgggtggcaaagaatactaacaataagattagcagactgctcgactcattgccgtcggacactcggctggtgctgttgaacgctatctacctctcagccaagtggaaaacgaccttcgaccccaagaaaactcggatggaacccttccactttaagaattcagtgatcaaggtgccgatgatgaactcgaagaagtaccccgtggcccactttatcgaccaaaccctgaaggcaaaggtgggtcagctgcaactcagccataacctctcgctggtgatcctcgtcccacagaacttgaagcatagactggaggatatggaacaggccttgtcgccgagcgtctttaaagcgattatggagaagctcgaaatgtcgaagttccagcctaccctgctgactctgccgcgcatcaaagtgaccacctcgcaggacatgctctcgatcatggagaagttggaattcttcgacttctcatacgacctgaacctgtgcggactgacggaggaccctgacctgcaggtttcggccatgcagcaccagaccgtgctcgaactgaccgaaaccggggtcgaagccgccgcagccagcgccatctccgtggcacgcactctgctcgtgtttgaagtgcaacaaccgttcctgtttgtgttgtgggatcaacaacacaaattcccggtgttcatgggacgcgtgtacgacccgagagcc

SEQ ID NO: 19102 - DNA, 1500 bp, synthetic construct
  misc_feature 1..1500: note = source = /note="Description of Artificial Sequence: Synthetic coding sequence"
  source 1..1500: mol_type = other DNA
atggctagtcggcttaccctcctgacactgctgctgctgctgctggccggggacagggcctccagcaacccaaacgccacaagttcctcatctcaagatccagaaagtctgcaggaccgcggtgaaggcaaggtggcgactacagtcatttctaagatgctttttgttgagcccattcttgaggtaagcagcctacctactacgaattccaccacaaactccgctaccaaaattactgccaatacaaccgatgagcctacaacccagcccacgacagagcctaccacgcagcctacaatccagcccacccagccaaccactcagttaccgaccgactcacccactcagcctaccactgggtctttttgtccaggtccggtgacgctctgctccgatttggagagccatagcactgaagccgttttgggtgatgcactggtagatttcagcctcaaactgtatcacgccttctccgccatgaaaaaagtggagacgaatatggccttctcacccttctccattgcgtcactactgactcaggtgctgttgggagccggagaaaataccaagacaaacctggagtccatcttgagctatcccaaagattttacgtgtgtccatcaagccttgaaaggatttacaacaaagggcgttacaagcgtgtctcagatttttcatagcccagatctcgccatccgggatacctttgtgaacgcatcaagaactctctactccagctccccacgggtcctttccaacaattccgatgccaacctggagttgattaatacctgggttgcgaaaaatacgaacaataagatctcaaggctgctagacagcctacctagtgatactagactggtgttactcaatgccatatacctgtcagctaagtggaagactacctttgatcctaagaagaccaggatggagccatttcattttaagaatagtgtgatcaaggtcccaatgatgaactccaaaaagtaccctgttgcccacttcattgaccaaaccctaaaggcaaaggtggggcagctacagctgtcccacaatcttagtcttgtcattctggtgccacagaacctgaagcaccggcttgaggacatggaacaggcactgtccccgagcgtgtttaaagccatcatggagaaacttgaaatgtccaaattccagccaacattgctcaccctgccacgtatcaaggtgacaacttctcaggatatgctcagtatcatggaaaagttggaattttttgattttagctacgacctgaacctgtgcggcctgaccgaggatcccgacctgcaggtgagtgccatgcagcatcaaactgtgctcgaactcactgaaactggggtggaagcagccgcggcctccgctattagcgtggctcgcactcttttggtgtttgaggttcagcaaccgtttttattcgtactctgggatcaacagcacaagttccccgtattcatgggccgagtgtacgacccccgggcg

SEQ ID NO: 19103 - DNA, 1500 bp, synthetic construct
  misc_feature 1..1500: note = source = /note="Description of Artificial Sequence: Synthetic coding sequence"
  source 1..1500: mol_type = other DNA
atggcctcacgcctgactctgctgactttgctcttgctgctcctcgctggtgaccgagcgtccagcaacccgaatgcgacctcgtcgtcgtcccaagatccggagtcactgcaagacagaggagagggcaaagtggccaccacggtgatctcgaaaatgctgttcgtcgaaccgatcctggaagtgtcgagcctgcctactaccaactcgactaccaatagcgccaccaagatcaccgcaaacaccaccgatgaacctactacgcagccaaccacggaaccaaccacccaacccactatccaaccaacccaaccgactacccaattgccgacggactccccgacccagccgaccacgggttcattctgccctgggccggttactctctgttcggacctcgagtcccattccactgaggccgtcctcggcgatgcgctggtggatttttcgcttaagctgtaccacgctttcagcgcgatgaaaaaggtggaaaccaatatggcttttagcccattcagcatcgccagtctgcttacgcaggtgttgctgggcgccggagagaacactaaaactaacctggagtccattctgagctacccgaaggacttcacctgtgtgcaccaagctctgaaaggatttactaccaagggggtgacctcggtgtcacagatttttcatagcccggacctggccatcagggatacgttcgtgaacgcctcccggaccctctactcctcgtcgccgcgagtcctgtcaaacaattcggatgccaacctggaactgattaacacctgggtcgccaagaatacgaacaataagatctcgaggcttctggactcactcccgtctgatactcgcctggtgctgctgaatgcaatctacctgtccgccaagtggaaaaccaccttcgacccgaaaaagacccgcatggaaccgttccacttcaagaattccgtgataaaagtaccaatgatgaacagtaagaagtatcctgtggcccatttcatcgatcagaccctgaaagcaaaggtcggacagctgcagctctcgcacaacctctcgctcgtcattctggttccgcaaaacctcaagcacaggttggaagatatggagcaggcgctgtcccctagcgtctttaaggcgatcatggagaagctcgagatgtctaaattccagccaaccttgttgacgcttccaaggatcaaggtgaccacttcacaggacatgctctccatcatggaaaagctcgagttctttgacttctcgtacgacctgaacctctgtggactcaccgaggatcccgacctccaggtgtcggcaatgcaacaccagactgtcctcgagctcacggagactggagtcgaagccgcggcagcttcggcgatctcggtcgcacggactcttttggtgtttgaagtacagcagccattcctgttcgtgctttgggaccagcagcataagttcccagtgtttatggggcgcgtgtacgacccccgggcg

SEQ ID NO: 19104 - DNA, 1500 bp, synthetic construct
  misc_feature 1..1500: note = source = /note="Description of Artificial Sequence: Synthetic coding sequence"
  source 1..1500: mol_type = other DNA
atggcatcccgactgactctgttgaccctgctcctgctccttcttgcgggggatcgagcatcgagcaaccctaatgcaacctcctcctcatcacaagaccctgagtcacttcaagatcggggcgaaggtaaagtggcgactactgtgatatcgaagatgctttttgtcgaaccaattcttgaagtgtcctcccttcccactaccaactcaaccactaactccgccaccaagattaccgcgaacaccaccgatgagccaaccacccaaccgaccaccgagcctactacccaacctactattcaaccgactcaaccaaccactcagcttcccaccgatagcccaactcaacccactaccggatccttttgccccggaccggtgactttgtgtagcgacctggagtcacatagcacggaggcagtgcttggtgacgcactcgtggacttttcgttgaagctgtaccatgcctttagcgcgatgaaaaaagtggaaacgaatatggcattttccccttttagcattgcatccctgctgactcaagtcctcctcggagcgggagagaacaccaagaccaacctggaatcgatcctctcgtacccaaaggactttacttgcgttcaccaagctctgaagggattcaccactaagggtgtcacctcagtgagccagatattccatagccctgaccttgctatccgtgatacctttgtgaatgctagtcggactctttatagcagctcgcctagagtcctttcgaacaattcggatgcaaaccttgaactcatcaacacctgggtggcaaaaaacaccaataacaagatctcgcgtctcctggattcactgccgagcgatacccgtctcgtgctgctcaatgcaatctacctgtccgcaaagtggaaaactacttttgatcctaaaaagacccgaatggaaccttttcactttaagaactcggtgatcaaggtccctatgatgaacagcaagaaatacccagtggcccactttattgatcagaccctcaaggcaaaggtcggtcaactgcagctgtcgcacaatctgtccctggtgattctcgttcctcagaacctgaaacatcgtcttgaagatatggaacaagccctgtcgccatccgtgttcaaagccattatggagaaactggagatgtcgaagtttcaacccactcttctgactctgcctcgcatcaaggtgaccacctcgcaggacatgctctcgattatggaaaagctcgagttctttgatttttcttacgatctcaacctttgcggactgacggaggaccctgatcttcaagtatcagcgatgcagcatcaaactgtcctggaactcactgaaactggagttgaagcagccgcagcgtcggcaatcagcgtggcacgcacgctgttggtgttcgaagtccagcaaccgttcctctttgtcctttgggatcagcaacataagtttccggtgtttatgggaagagtctacgaccctcgagcc

SEQ ID NO: 19105 - DNA, 1500 bp, synthetic construct
  misc_feature 1..1500: note = source = /note="Description of Artificial Sequence: Synthetic coding sequence"
  source 1..1500: mol_type = other DNA
atggcctccagattgaccttactaacactgctgcttttacttttagctggggacagagccagttcaaaccctaacgccacatcctcttccagtcaggatccggagagtcttcaagacagaggtgagggcaaagtagctaccactgttatttctaaaatgctgttcgtcgagcctattcttgaggtgtccagtctgcctactaccaattcaaccaccaatagtgccacgaagatcaccgccaacacaacagatgaacccacaacccagccaacaacagaacctacaacccagcccacaatccaacctacacaaccaacaactcaactgcctacagattcacccactcaacctactaccggcagtttttgccctggtcctgtgactctctgctcagacctcgagagtcactccactgaggccgttctgggggacgccctggtggatttttcactgaagctgtaccacgcattctctgccatgaaaaaagtagagaccaacatggcctttagtcctttttcaatcgcctcactgctgacacaagttctgttaggagccggcgaaaacactaaaacaaacctcgaatcaatacttagctatccgaaggattttacctgcgtgcaccaagccctgaaaggctttaccactaagggagtcacatcagtgtctcagatctttcacagccctgaccttgctatccgcgataccttcgttaacgctagcagaaccctctattctagcagtcccagagtgctttcaaacaattctgacgctaacctggagctcattaacacctgggtagctaagaacaccaataacaagatctcacggctgctggactctctccccagcgacactcggttggtccttttaaacgccatctacctgagcgcgaaatggaagacgacctttgatcccaaaaaaactcgaatggaaccattccacttcaaaaacagcgtgatcaaggtgcccatgatgaatagtaaaaaatacccagtcgcacattttatcgaccaaacactgaaagcaaaggtgggccagcttcagctaagccataacctgagcctggtcatattggtcccgcaaaacttgaagcaccggctcgaagacatggaacaagcattatcccctagtgtgttcaaagcaattatggagaaactggaaatgtcgaagtttcagccaacccttctgacgctgccaaggatcaaggttaccacatctcaagacatgctttccatcatggagaaactggagttcttcgatttcagctacgatctgaatctttgcggacttacagaagacccagatctgcaggtctcagccatgcagcaccagaccgtgctggagctcaccgaaaccggagtagaagccgcagctgcctcagcaatttccgtggccagaacactccttgtgtttgaggttcaacagcctttcctgttcgttttgtgggaccagcagcacaaatttccagtctttatgggcagagtgtacgatccacgggcc

SEQ ID NO: 19106 - DNA, 1500 bp, synthetic construct
  misc_feature 1..1500: note = source = /note="Description of Artificial Sequence: Synthetic coding sequence"
  source 1..1500: mol_type = other DNA
atggcgagccgtctcactctgctcacattgctgctactcttgctggccggggacagagccagctccaaccccaacgccactagttctagctcacaagaccccgaaagcctccaagatagaggggagggcaaggtggccactaccgtcatcagtaagatgctcttcgttgaaccaattctggaggttagctcgctgcctactacaaactccacaaccaactctgccactaagattacagcgaatacaacggacgagcctaccacacaacccactaccgaaccgacaacacaaccaactatccagcccacacaaccaaccacccagctgccgacagactcacccacacagcccacgacagggagtttctgccctgggccggtaacactgtgttccgatctggagtcccattccaccgaagctgtgctcggcgatgcattggtggacttctcactcaaattataccacgccttttcagctatgaaaaaagtggagaccaacatggccttctcacccttttctattgctagtttgctgacccaggtgttgttgggcgcaggtgagaacaccaaaaccaaccttgagagtatcctctcgtacccaaaagattttacttgcgtccatcaggctctgaaaggtttcacaacgaagggtgttaccagcgtcagtcagatcttccattcccccgatttggcaattcgagatacctttgtgaatgcctcacggacgctgtattcctcttcaccccgcgtgctgtccaataactccgatgccaatctggaactgatcaacacatgggtggccaagaataccaacaataagatctctagactcctcgattcactgccgtctgacacgcgacttgtgttgttgaatgcaatctatctctcagctaagtggaagacaacctttgacccgaagaagaccaggatggaacccttccattttaaaaattcagtgattaaggttcctatgatgaactcaaagaagtatccagtggcccacttcatcgaccagacactcaaggcgaaagtgggccagctacagttgtcccacaacctgtccctggtcatcttggtgccacagaatctgaaacaccgacttgaagatatggagcaggccttgtcccccagcgtgttcaaggccatcatggaaaagctggaaatgagtaagtttcaaccaacattgctgacactgccacgcattaaagtgacaacatctcaggatatgctatcaataatggagaaactggagttttttgactttagttatgatttgaatctctgcggattgaccgaggatccagacttgcaggtgagcgcgatgcaacaccagaccgtactcgagcttacagaaactggagtggaggcggctgccgcgtccgccatttcagtcgctagaacactgttggtgttcgaggtccagcagccattcctgtttgtcctatgggatcagcagcataagtttcccgtcttcatgggcagagtgtatgatcctcgagcc

SEQ ID NO: 19107 - DNA, 1500 bp, synthetic construct
  misc_feature 1..1500: note = source = /note="Description of Artificial Sequence: Synthetic coding sequence"
  source 1..1500: mol_type = other DNA
atggcctcaaggttgaccctcttgactctgctcctcctactgcttgcaggagaccgcgcttcctctaaccctaatgctacctcatcaagttctcaggatccggagagcctccaagacaggggggagggaaaggtggctacaactgtaatttccaaaatgctgttcgtggaaccaatccttgaggtttcttcgctccccacaaccaacagtacaacaaactccgccaccaagattaccgccaatactactgacgagcctaccacccagcctactaccgaacctacgacgcagcctacaatccagccgacacagcccaccacccaattgcccaccgacagtccgacccagcctacgacagggtctttctgtccggggcccgtgacactctgttccgacctggagagtcatagcacagaagcagtgctcggcgatgcacttgtagactttagcctgaagctctatcatgcctttagcgcgatgaaaaaagtggagaccaacatggcgttttcacccttctcaatcgctagcctgctcacacaggtcctgttaggggcgggagagaacaccaagacaaatctggagtccatactgagctaccctaaggatttcacctgtgtgcaccaagcgcttaaaggattcaccacgaagggggtgactagcgtgagtcagatattccacagtcccgacctagccatacgggacaccttcgttaatgcaagtcggactctatacagcagctcccctagagttcttagcaacaacagtgatgccaaccttgagctcattaacacgtgggtggcgaagaacacgaacaacaaaatctccaggctcctcgacagcctgccctctgatacccgtttggtgcttctgaatgcaatctacttgtccgcaaaatggaaaaccacatttgatcccaaaaaaactaggatggaacctttccatttcaagaattccgtaataaaggtccctatgatgaactccaagaagtatccagtcgcccacttcattgatcagaccctaaaagccaaagttggacaattgcagttatctcacaacctcagtctcgtcatattagtaccacagaatctgaagcaccgcctggaagatatggagcaggcactgagtccatccgttttcaaggctatcatggaaaaactggaaatgtccaaattccaacccacactactgaccctcccccggattaaagtcaccacgtcgcaggacatgctgagtatcatggagaaactggagtttttcgacttcagctacgacctcaacctatgcgggctgacagaggatcctgatctccaggtgtcagccatgcagcatcagaccgtgctggaactcaccgaaaccggggtagaggctgctgccgcttctgctatcagcgtggcccgtacactgttagtcttcgaggttcaacagccatttttgttcgttctgtgggaccagcagcacaagttcccagtgttcatggggagagtgtatgatccaagggcc

SEQ ID NO: 19108 - DNA, 1500 bp, synthetic construct
  misc_feature 1..1500: note = source = /note="Description of Artificial Sequence: Synthetic coding sequence"
  source 1..1500: mol_type = other DNA
atggcatcacggttgactctcctcacccttctccttttgttgctggcgggggatcgggcctccagcaatcccaatgctacctcctcctccagccaggatccggagtccttgcaggaccggggcgagggtaaggtggcgactactgtcatttctaaaatgctgtttgtggagccgatcctcgaggtctcttctctcccaaccactaactcaaccacaaacagtgccacaaagattaccgccaacacgactgacgagcctaccactcagccaacaaccgagcccaccactcagcctacaatccagcccacgcagccaacgacccaactgccaactgacagccccacacagcccacaactgggtccttctgtcccggcccggttacactgtgcagcgacttggagtcacactccacagaggctgttctgggcgacgctctggtggacttcagcctgaaactgtatcacgctttttccgctatgaagaaggtggagacaaatatggcgtttagtccattctcaatcgcttctctcctgacacaggtgctgctgggcgcgggcgaaaatacgaagacaaatctggaatcaatactttcttaccctaaggactttacgtgcgtgcaccaagccctgaaaggctttaccactaaaggcgtcacctccgtgtctcagatcttccacagtccagacctggcaatcagagacaccttcgtgaatgctagccggaccttgtacagcagttcaccaagagtcctgagtaacaatagtgacgcgaatctggagctgattaatacttgggtggccaagaatactaataacaagatcagccggttgctggactctctgcctagtgacacgcgcctcgtgttgctcaatgccatctacttgagtgccaagtggaaaactaccttcgaccctaagaagaccagaatggagcctttccattttaaaaacagcgttatcaaggttccgatgatgaacagtaagaagtacccagtagcccattttatcgaccagactctgaaagccaaggttgggcagctgcagctgagccacaacctcagcctggtgatcctggttccgcagaatctgaaacataggttggaggacatggagcaagctctgagcccgtctgtctttaaagcgattatggagaagttggagatgtccaagttccaaccaaccctcctgacccttcctcggatcaaggtcaccacaagccaggacatgctgtcaattatggagaaactggaatttttcgatttctcatacgaccttaacttgtgcgggctcacagaagaccccgatttgcaagtttcagccatgcagcaccagaccgtgctcgaattgactgagaccggcgtcgaagccgccgctgcatccgcaatcagcgttgccaggactctgctggtctttgaggttcagcagccatttttgttcgtcctctgggatcagcagcacaagttccccgtgttcatgggcagagtatatgatccccgagct

SEQ ID NO: 19109 - DNA, 1500 bp, synthetic construct
  misc_feature 1..1500: note = source = /note="Description of Artificial Sequence: Synthetic coding sequence"
  source 1..1500: mol_type = other DNA
atggcttcacggttgaccctccttactcttctgcttctgctgcttgcaggagatagagcatccagcaatcccaacgctacctcatcctcctcgcaagatcctgaatcccttcaggatcgaggtgaaggtaaggtcgccactaccgtgatttctaaaatgctgttcgtggaaccaatactggaagtgtcatcgctgccaaccactaacagcactaccaactccgcgaccaagattactgcaaataccaccgatgaacctactactcagcctaccaccgagccgacgactcaaccaaccattcagcctacgcaacccacgacccaacttccaaccgattccccaacccaacctaccacgggttcattttgccctggcccagtgaccctttgttcagacctcgaatcccactcaacggaagcagtgcttggagatgcgctggtggacttttcgcttaaactttaccatgccttctcggcaatgaaaaaagtggaaaccaacatggccttttcacctttctccattgcgtccctcctgacccaggtgctgctcggtgccggtgaaaatactaagacgaaccttgagtctattctttcgtatccaaaagactttacctgtgtgcaccaggctttgaaaggtttcaccacgaaaggcgtcacttcagtttcgcaaatctttcacagccctgaccttgcgataagagacacctttgtgaatgcaagccggaccctttactcgtcatcaccccgagttctgtcgaacaattcggatgcaaacttggagctgatcaatacttgggtggctaagaatactaacaacaagatctccagactgctcgattctcttccaagcgacactcgactggtgcttttgaatgcaatttacctgagcgcaaagtggaaaaccaccttcgatccgaagaaaactaggatggaacctttccactttaagaattcggtgattaaagtccctatgatgaactcgaagaagtacccggtggcacactttattgatcaaacgctcaaggcgaaggtcggtcaattgcaactttcccataacctttccctggtgattctggtgccgcaaaatcttaagcacaggttggaagatatggaacaagcactttccccttcggtctttaaagctattatggaaaagctggaaatgagcaagtttcagccaactctcttgaccctcccaagaattaaggttacgacttcacaggatatgctgtcgattatggaaaaacttgaattcttcgatttttcatacgacctcaatctctgtggcctgactgaggatcccgatcttcaggtgagcgccatgcaacatcagaccgtgctggaattgactgaaaccggggtggaagccgcagccgcaagcgcaatctccgtggcaagaactcttctcgtctttgaagtgcagcaaccatttctctttgtgctctgggaccaacagcataagtttccggtgtttatggggagggtgtacgatcctcgtgca

SEQ ID NO: 19110 - DNA, 1500 bp, synthetic construct
  misc_feature 1..1500: note = source = /note="Description of Artificial Sequence: Synthetic coding sequence"
  source 1..1500: mol_type = other DNA
atggcatcccgcttgacgcttttgacgctcctccttctgcttcttgctggtgacagggcatcctccaatcctaacgctacttcgtccagttcgcaggacccggaaagcctgcaagatagaggcgaaggcaaagtggcaactactgtgatctccaaaatgctctttgtggagcctattctcgaagtgagctccctcccaactaccaattcgacgactaactccgccaccaaaatcaccgctaacaccactgacgaaccaacgacccaacccactactgaacccacgactcagcccactattcaaccaacgcaaccgaccacccaacttccgactgattcgcctactcaaccaaccacgggctcattttgccctgggcccgtcaccctttgttccgatctcgaatcgcatagcaccgaggccgtccttggagatgcccttgtcgatttttcgcttaagctctaccacgcattttcagccatgaagaaagtggaaaccaatatggcgttcagtcctttctccatcgcgtcgctgctgactcaggtgctgcttggtgcaggagagaatactaagaccaacctggagtccatcctcagttaccccaaggactttacctgcgtccatcaggcgctcaagggatttaccaccaagggggtgacttcggttagtcagattttccattcacccgatcttgcaataagggataccttcgtgaacgcgtccagaaccctttactcgtcgtcacctcgtgtgcttagcaacaactcagacgccaatcttgaattgattaacacctgggtggccaagaacaccaacaacaagatcagccggctgctggactccctgccttcggacacccggcttgtgctgttgaatgcaatttacctgtcagcaaagtggaaaactacctttgatcctaagaaaaccagaatggaaccttttcactttaagaactccgtaatcaaagtcccgatgatgaattcgaagaagtaccctgtcgcccatttcattgaccagaccttgaaagccaaagtgggacaactgcaactctctcataatctttcacttgtgattctggtgccacagaacctcaagcacagactcgaggatatggaacaggctctttcaccaagcgtattcaaggccatcatggaaaaacttgaaatgagcaagtttcagcctaccctgcttactctgcccagaattaaggtcactacttcacaagatatgctgagtataatggaaaagctcgaattctttgatttttcgtatgatctgaatctgtgtggactgactgaggatcccgatctccaagtgtcagcgatgcagcaccagaccgtgcttgagctgactgaaactggagtggaggcagccgcagcaagcgcgatttccgtcgcaaggacgcttctcgtgttcgaggttcaacaaccattcctttttgtgctgtgggatcagcaacataagtttccagttttcatgggtcgagtttacgacccacgggcg

SEQ ID NO: 19111 - DNA, 1500 bp, synthetic construct
  misc_feature 1..1500: note = source = /note="Description of Artificial Sequence: Synthetic coding sequence"
  source 1..1500: mol_type = other DNA
atggcatcacggctgactctgctgactctcctgctgctgttgctcgcgggggatcgcgcatcgtctaatcccaacgccacctcatccagctcacaggacccggaaagcctccaggacagaggagagggaaaggtggccaccaccgtcatcagcaagatgctgtttgtcgaaccaatcctggaagtgtcctccctgcctactaccaacagcaccacgaactcagccaccaagatcaccgcaaatacgactgatgagccgaccacccagccgaccactgaaccgaccactcagccgactatccagccgactcagccaactactcagctccctaccgattcaccaacccagcccaccaccggttcgttctgcccgggcccagtgaccctgtgttccgaccttgaatcccactcgaccgaagccgttctgggagacgcattggtggacttctctctgaagctctaccacgcgttttctgctatgaaaaaggtggagacgaacatggcattttccccattctcgatcgcgtccctcctcactcaagtcctgctgggagcgggagaaaacaccaaaacgaacctcgaatctattctgtcatacccgaaggacttcacttgcgtgcaccaagcgttgaagggattcaccaccaagggagtgacttccgtgtcccagatcttccactcaccggacctggccatccgagacaccttcgtcaacgcttcgcgcaccctctactcatccagcccgcgcgtgctctcgaacaactcagacgctaacctggaactgatcaatacttgggttgctaagaatactaacaataagatctcgcggttgctggactcacttccttcggatactcgcctggtgttgttgaacgccatctatctcagcgcgaaatggaaaactaccttcgacccgaaaaagacccgtatggaacctttccactttaagaactccgtcatcaaggtcccgatgatgaacagcaagaaataccctgtggcgcacttcatcgatcagaccctgaaggcaaaggtgggacagctccagctttcccacaacctgtccttggtcatcctggtgcctcaaaatctgaagcaccgcctcgaagatatggagcaggcactgtccccatccgtgttcaaggcgatcatggaaaaactggagatgtccaaattccaaccgaccctcctcaccctgccgcgcattaaggtgaccacttcccaggacatgctctcaatcatggaaaagctggaattcttcgacttcagctacgacctcaacctgtgcggccttaccgaagatccagacctgcaagtgtccgctatgcaacatcaaactgtgcttgagctgactgaaaccggagtggaggctgccgccgcaagcgcgatcagcgtggcccgcactctgctggtgttcgaggtgcagcagccatttctgtttgtgctgtgggaccaacaacataagtttccggttttcatgggccgcgtgtacgacccgcgcgcc

SEQ ID NO: 19112 - DNA, 1500 bp, synthetic construct
  misc_feature 1..1500: note = source = /note="Description of Artificial Sequence: Synthetic coding sequence"
  source 1..1500: mol_type = other DNA
atggccagtaggttaacactgctcactctcctcctcctgctgctcgctggcgacagggcttctagcaatcccaacgccacaagctcctcatcccaggatcctgaatctttgcaggaccggggggaagggaaagtcgccaccaccgtgatatccaaaatgctatttgttgaacctatcctggaggtcagttctctgcccaccaccaatagcacaaccaattctgccacaaaaatcacagccaacaccacagacgagcctaccacccaacctaccaccgagcctaccactcagcctaccatccagcccacacaacccacgactcagctgcccaccgattctccaactcaacctaccactgggagcttctgccctggaccagtgacgttatgttcggatttggaatctcactccactgaggcggtgctgggggatgcccttgttgacttctccctcaagctgtatcacgcgttttccgccatgaagaaagtagagactaacatggccttttctcccttttctatcgcttccttgctgacacaggtgttactcggagctggggagaatacaaaaactaacttggagtcaatattatcctatccgaaggattttacttgcgttcaccaagcactgaagggattcacaaccaaaggtgtgacttctgtcagccagattttccattcccccgatctggcaatccgcgatacttttgttaacgcctccagaacactgtacagcagctccccaagggtgttatcaaataatagcgacgctaatctagaattgatcaatacctgggtcgctaaaaatactaacaacaagatctctcgcctgctggatagcctaccctccgacaccaggttagtgttgctgaacgccatttatcttagtgcaaaatggaaaactacttttgatcccaaaaaaacgcgtatggaacccttccatttcaagaatagcgtgattaaggttcctatgatgaacagcaagaaatacccagtcgcccacttcattgaccagacactgaaggcgaaggttgggcaacttcaactgtcccataatcttagcctggtgattctagtcccccagaatctgaaacacaggctggaggacatggagcaggccctgtcaccttctgtctttaaggccattatggaaaagctcgagatgtccaagttccagcccaccttgttaaccttgccacgaattaaagtcacgacatcacaagacatgctatctatcatggaaaaactggagttctttgatttcagctatgacctgaacctgtgtggccttaccgaggatccggatctccaggtgagcgcaatgcaacatcaaaccgtcttggagctgactgaaaccggtgtcgaagcagccgccgcaagtgcgatatcggtggccaggaccctacttgtattcgaggtccaacagcccttcctgtttgtcctgtgggaccagcaacacaaattccccgtttttatgggccgtgtctacgacccacgcgcc

SEQ ID NO: 19113 - DNA, 1500 bp, synthetic construct
  misc_feature 1..1500: note = source = /note="Description of Artificial Sequence: Synthetic coding sequence"
  source 1..1500: mol_type = other DNA
atggcaagccgattgacccttctcactctgttactgctactgctggccggggaccgtgctagcagcaatcctaacgccacgtcctctagttctcaggacccagagtccctgcaggacaggggcgaggggaaggtcgccaccacggtcatcagtaaaatgctgttcgtggagccgattctggaagtgtcttccctcccaaccacaaactcaacgacaaactctgctactaagatcaccgccaatactaccgacgaaccaaccacccaaccaaccaccgagccgacaacccagccaacaatacagcctacccagccaaccactcagttgcccaccgattcacccacccaacctacgaccggatccttttgtccaggccctgtgacgctatgctctgatctggagagtcactctacagaagctgtacttggcgatgcactggtcgatttttccctcaaattatatcacgccttcagcgccatgaaaaaggtagagactaatatggccttctcgccattctctatcgcttctttactgacacaagtgctcctaggtgccggagagaacaccaaaacaaatcttgagagcatcctttcttacccgaaggacttcacctgcgtccatcaagccctgaaaggattcaccactaaaggcgtgacctctgtctctcagattttccattcacccgatctggcaatccgggatacctttgtgaacgcatccaggaccttgtacagttccagcccacgcgtcctgtccaacaattctgacgctaacctggagttaataaacacatgggtggcaaagaacacaaacaataagataagtcggctactggactccttgccttccgacactcggctggtgctcttgaacgccatctacctatccgctaaatggaagacaacgttcgatcctaagaaaacccggatggagccttttcacttcaagaactccgtgatcaaggttcctatgatgaacagcaagaagtatccggtggctcacttcattgaccagacactcaaggcgaaggtggggcaacttcagctttctcataatctgtctctggtcatcctcgtgccacagaacctgaagcatcgactggaagacatggaacaagccctttccccatctgtcttcaaggctataatggaaaaactggagatgtctaagttccagcctaccctactcaccctaccccgaattaaagtgaccacctctcaagacatgttaagtataatggaaaagttagagttcttcgatttctcgtatgacctgaacctgtgtggactcacggaagatcccgaccttcaggtgtctgcaatgcaacaccaaacagttctggaactgactgagacaggcgtagaggcggctgccgcgagtgctattagcgttgcgagaacattgctggttttcgaagtgcagcaaccctttctgttcgtgctctgggatcaacagcacaagttccctgtcttcatggggcgcgtctatgacccacgagct

SEQ ID NO: 19114 - DNA, 1500 bp, synthetic construct
  misc_feature 1..1500: note = source = /note="Description of Artificial Sequence: Synthetic coding sequence"
  source 1..1500: mol_type = other DNA
atggcttcgcgactgacccttcttactttactacttttgttactggccggcgacagggcctcaagcaacccaaatgcgacctcatcatcttcgcaggaccccgagagcctccaggataggggggagggcaaggtggccactaccgtgattagtaaaatgctgtttgtggaacctatcctcgaggtgtcaagccttcctacaacaaatagcaccaccaactcagccacgaagattaccgccaataccactgacgaacccaccacccagcccacaactgagcctaccacccagcccaccatacagccgacacagccaactacgcagctgccgacagattcaccaactcaacctacaactgggtctttttgccccgggcccgtgactttgtgttccgacctcgaatcccattccacagaggctgtactgggagatgcgcttgtagacttcagcctgaagctataccacgcgttttctgctatgaaaaaagtggagacgaatatggcattttcgcccttttccatcgccagtctcctgacccaggtgttgttaggagctggagagaatacaaaaactaacctcgaatccatcctatcttatccgaaagactttacctgtgtccaccaggcactgaagggctttactactaagggagtgacttcagtgtcgcagatattccatagcccagaccttgcaattcgtgacaccttcgttaacgcgagccgcacactctactcatcttcaccgagagtgctgtctaacaacagcgatgcaaatctggagctcatcaatacgtgggtcgcaaagaataccaacaataagatatctcgcctgttggactctttgccgagtgatacgcgtttggtgctgctaaacgcaatctacctgtccgcgaagtggaagactaccttcgatccaaagaagactcgaatggagccgtttcactttaaaaattccgtgatcaaggtgcccatgatgaacagtaaaaagtaccccgttgctcattttattgaccagaccctgaaggccaaggtgggccaactacagctatctcataacctcagccttgtcatcctcgttccacagaatctcaaacaccgcttggaggacatggagcaggctctgtctccctccgtcttcaaagccatcatggaaaagctggaaatgtcgaagttccagcctacactgctcactctgccacgcataaaggtcacaacctcgcaagacatgttgagcattatggaaaagctggagttcttcgatttttcatatgacttgaacttgtgcggcttaactgaggatccagacctgcaggtgtcagctatgcaacaccagaccgttcttgaactgacagagacaggagtggaggcagctgcggcctccgctatttcggtggcacgcacattgctggtgtttgaggttcagcagccgtttcttttcgtactatgggatcagcagcacaagtttccggtgttcatgggtagggtgtacgacccacgcgcc

SEQ ID NO: 19115 - DNA, 1500 bp, synthetic construct
  misc_feature 1..1500: note = source = /note="Description of Artificial Sequence: Synthetic coding sequence"
  source 1..1500: mol_type = other DNA
atggcaagtcgattgacattgttaaccttattactgttactgctggccggtgacagagcttcttctaaccccaacgcaaccagctcctccagtcaagatcccgagtctttgcaggatagaggcgaaggcaaggtggcgactaccgtgatcagtaagatgctgtttgtggagccgattctggaggtcagctctctgccgactacaaattctacaacaaattcggcaaccaaaatcacagcaaatactacagacgagcctacaacacagcctactacggagcctacaacgcagcctacgatacaaccaacgcagccaaccacccagttgcccaccgactcaccaactcaaccaactactgggtcattctgccctgggcctgtgaccctctgttccgacctggaatcccactcaactgaagctgtcctcggggacgctctcgtggacttttcactgaaactctaccacgcattcagcgctatgaagaaggtggagacaaatatggcatttagccctttcagtattgcttccctgttgactcaggtcctcttgggggcgggagaaaatactaaaaccaatctggagtccattctgtcatacccaaaagacttcacgtgcgtgcatcaagccctcaaaggatttactaccaagggcgtcacctctgttagccagatcttccacagccccgaccttgcaattcgggatacattcgtgaatgcatcacgcaccctgtactccagtagccccagggtcctctcaaacaacagcgacgccaacctggagctaataaacacctgggtcgccaaaaacaccaacaacaaaatttcacgcttgctagatagcctgcccagtgatacccgccttgtcctgctgaatgccatataccttagcgccaaatggaaaacgacctttgatcccaagaagacaagaatggagccctttcacttcaaaaactcggtgatcaaagtccccatgatgaactccaagaaatatccagtcgcccactttattgaccagacactcaaagcaaaggtggggcaactccagctaagtcataacctaagtctggtgattcttgtgccccagaacctcaaacatcgcctagaagacatggaacaggccttgtccccttcagtgttcaaagctatcatggaaaaactggaaatgagtaaatttcagccgacattgttgacgctacctagaatcaaggtgaccacctcccaggatatgctttctatcatggaaaaactggaattcttcgatttctcctacgatctgaacctgtgtggattgaccgaagacccagacctgcaagtgtctgctatgcaacaccagacggtgttggagttgactgagacgggggttgaagcagctgcggcatccgccatctccgttgcccggacgttactggtttttgaagtgcaacagcctttcctattcgtgctatgggaccaacagcacaagttccctgtcttcatgggccgggtatacgaccctagagca

SEQ ID NO: 19116 - DNA, 1500 bp, synthetic construct
  misc_feature 1..1500: note = source = /note="Description of Artificial Sequence: Synthetic coding sequence"
  source 1..1500: mol_type = other DNA
atggcctcgcgccttaccttgcttactctgttgctgcttcttctcgccggagacagagcatccagcaatccaaacgcaacctcctcatcatcccaagacccagaaagtctccaagatagaggcgaagggaaggtggccaccaccgttatcagcaagatgctgttcgtcgaacccattcttgaagtgtcctccctcccgaccaccaattccaccaccaactctgcaaccaaaatcactgcaaataccaccgatgaacctactacccagccgactacggaaccaactacccaaccaaccattcagccaactcaacccactacccagcttccaactgatagccctacgcaacctacgactggatccttttgtccaggtcctgtgaccctttgttcagatctcgagagccattccactgaagcagtgctgggagatgcattggtggatttttcactcaagttgtaccatgcattctcagcaatgaaaaaggtggaaaccaacatggcttttagcccattctcgattgcatcgctgctgacccaggtgctccttggtgcaggggaaaataccaaaaccaatcttgaaagcatcctgtcatacccaaaagattttacttgtgtgcatcaagcacttaagggttttacgactaaaggtgtgacgtcggtgtcacagatcttccatagcccagacctcgcgataagggatacttttgtgaacgcaagcagaaccctttactctagctcgccaagagtcctctccaataactccgatgcaaacctggaattgataaacacctgggtcgcgaagaataccaacaacaagatttctaggctgctggacagcctgccttccgatacccggctggtgctgcttaacgcaatttaccttagcgcaaagtggaaaactacctttgatccaaaaaagaccagaatggagccgtttcacttcaagaactccgtgattaaggtccctatgatgaatagcaagaagtaccctgtcgcgcatttcatcgaccaaaccctgaaggcaaaggttggccagctccaactttcccacaacctttccctggtgattctggttccacagaaccttaaacatcggttggaagatatggagcaagcactctccccttcggtctttaaggcaattatggaaaaacttgagatgagcaagtttcagccaaccctgctcacccttccgagaattaaggtgaccacctcccaggatatgctgagcattatggaaaagctggagtttttcgatttttcctacgacctgaatctgtgtggacttactgaggaccccgatctccaggtatccgcaatgcaacatcaaactgtgcttgagctcactgaaaccggagtcgaggctgccgcagcttcggcaatttcggttgccagaactctcctcgttttcgaggtgcaacaacccttcctttttgtcctttgggatcaacaacataagtttcccgtgtttatgggtcgggtctacgatcctagagcc

SEQ ID NO: 19117 - DNA, 1500 bp, synthetic construct
  misc_feature 1..1500: note = source = /note="Description of Artificial Sequence: Synthetic coding sequence"
  source 1..1500: mol_type = other DNA
atggcgtccaggttgaccctgctcaccctgctgcttctgcttctcgcgggagatagagcgtccagcaatccaaacgcaacctcctcgtcgtcgcaggatcctgaaagcctccaggatcgtggagagggcaaagtcgctactacggtgatctccaagatgctgtttgtagagcccatacttgaagtttcgagcctgcctactactaactcaaccactaactctgcaaccaaaatcaccgccaacactacggatgagccaacgacgcaaccaaccactgaacctaccacgcaaccgacgatacagccaactcagcctactacccagcttcccactgattcccccactcaacctacgaccggatcgttctgtcctggtcccgtcactctgtgcagcgatctggaatcacattcaactgaggcggtcctgggagatgcactggtggacttttcacttaagctctaccacgcatttagcgccatgaagaaggtagaaactaacatggcctttagccctttttccatcgcatcactgttgacccaagtgctccttggtgcgggagagaataccaaaactaacctggaaagcatcctttcataccctaaagactttacttgtgtgcatcaagccctgaagggcttcaccacgaagggggtgacctccgtgtcgcagatttttcacagcccagatctcgctattcgggacacgtttgtgaatgcctcgagaaccttgtacagttcgagcccacgcgtgttgagcaataactccgacgctaaccttgaactcattaacacctgggtggccaagaacaccaacaataagatctcacggctcctcgactccctgccctcggacaccagacttgtgctgctgaatgcaatctacctgtctgccaaatggaaaaccacctttgaccctaagaaaactaggatggagcctttccatttcaaaaactctgtgataaaggtaccgatgatgaacagcaagaagtacccggtcgcacactttattgaccaaacccttaaggctaaggtcggtcaacttcaactcagtcataatctgtctctggtcattctggttcctcaaaacttgaagcaccgactggaggatatggaacaggcactgtccccctcggtctttaaggcaatcatggaaaagctcgaaatgtcgaagtttcaaccaaccctgctgaccttgccacgcattaaagtgaccacctcccaggatatgcttagcattatggaaaagttggaattcttcgatttctcttacgatcttaatctgtgtggcttgactgaagatcctgacctccaggtgagcgcgatgcagcatcaaactgtccttgagctcacggaaactggggttgaggcagcagcagcaagcgccatttccgtggcacgcacgctgcttgtctttgaggtgcagcagccattcctttttgtgctttgggatcaacaacataagttcccagtgtttatgggacgagtgtatgatccacgtgcc

SEQ ID NO: 19118 - DNA, 1500 bp, synthetic construct
  misc_feature 1..1500: note = source = /note="Description of Artificial Sequence: Synthetic coding sequence"
  source 1..1500: mol_type = other DNA
atggcatcaaggctaacactgctgactcttctcctgctcctgctcgccggcgatcgtgctagctcaaaccctaatgcaacctcaagctcctcgcaagacccagagtctctgcaagatcgcggagaaggtaaagtagcaaccaccgtcatttcgaaaatgctgtttgtggagcctattcttgaggtctccagcttgccgaccaccaacagcaccactaatagtgcaacaaagattaccgcgaatacaactgatgaacccacaactcaaccgaccactgagccaaccacccagcccacgattcaacccacacaaccaacgactcagcttcctacggacagccctactcaacccacgacgggaagtttctgccctggcccggttactctgtgctccgacctggagtcccatagtacggaggcagtgctgggagacgcgcttgttgatttctcattgaagttgtatcacgccttctcggccatgaagaaagttgaaacaaacatggccttttccccgttcagtatcgcctcgttgctcacccaagtgctactgggcgcgggagaaaataccaaaacaaacctagagtcaatcctatcttaccccaaagatttcacatgcgttcaccaggcactcaagggtttcacaaccaaaggcgtaacgtccgtgagccagatcttccattctccggaccttgctatccgagatacattcgtgaacgccagcaggacgctttactcgtcgtccccccgtgttttatcgaataactcggacgcgaatctggaactaatcaatacatgggtggcgaagaacaccaacaataagattagccgtctcctggatagtttgccctcggacacacgcctagtacttctcaatgcaatttacttaagtgctaagtggaagacaacattcgatccgaaaaaaaccaggatggaacccttccatttcaagaactccgtcataaaggtgcccatgatgaactctaaaaagtatccagtggcccatttcatcgaccagactcttaaggccaaggttggccagctgcaactatctcataacttgagcttggtgattctagtgccacagaacctcaaacaccgtcttgaagacatggagcaagcacttagtccctccgtgtttaaggctatcatggaaaagctcgagatgtccaagttccagcccaccttgttgacgttgcctcgtatcaaggttacgacgagccaggacatgctgtctatcatggaaaagctcgagttcttcgatttcagctacgacctcaatctgtgcgggttgactgaagaccctgatcttcaggtttcggccatgcaacatcaaacagttctggagcttaccgaaacaggcgtcgaggctgctgccgcttcggccatatctgtcgcgcgtactttattggtattcgaggtccaacagccattccttttcgtcctgtgggatcaacagcacaagtttccagtattcatgggacgcgtctatgacccccgggcc

SEQ ID NO: 19119 - DNA, 1500 bp, synthetic construct
  misc_feature 1..1500: note = source = /note="Description of Artificial Sequence: Synthetic coding sequence"
  source 1..1500: mol_type = other DNA
atggcgagtagacttactttgctcacgctccttctcctgctcctcgccggtgaccgggcgtcctccaacccaaacgcaacctcatccagcagccaagatcccgaaagcctgcaggatcgcggtgagggaaaggtcgcaactaccgtgatttccaaaatgctttttgtggagccaatcctggaagttagctcccttcccactactaactccactaccaactccgcaactaagattacggctaacacgactgacgaacctaccactcagcctaccactgaacccaccacgcaacctaccatccaacctacccaacctactacccaactgccaactgattcacccacccagcctaccacgggatccttttgccctggtcctgtcaccctttgttctgatctggaatcccatagcaccgaagcagtgctgggagatgccctggtcgatttttcgctgaagttgtaccatgctttttccgcaatgaagaaagtggaaaccaacatggcattttcaccattctcgatcgcatcacttcttactcaggtgctgctgggagcgggtgaaaataccaaaacgaacttggagtcgattctctcctaccccaaggattttacctgtgtccatcaagcactgaaggggtttactactaaaggagtgacctcagtgtcccagatctttcattcacctgacctggccattagagacacctttgtaaacgcttccaggaccctttactcgagctcgcctagagtgctgtcaaacaattcagatgcgaatctggagcttatcaatacctgggtcgccaaaaacaccaacaacaagataagccgactgttggacagcctgccttcggatacgcgtctggtgctcctgaatgcaatttacctgtcggcgaagtggaaaactaccttcgaccctaaaaagacccggatggagccgtttcactttaagaatagcgtgattaaagtgcctatgatgaactcaaagaagtatcctgtggcccactttatagatcagactcttaaggcgaaggtcggtcagctccagcttagccataatctcagcctggtgattcttgtgcctcagaatctgaagcatcgactggaagatatggagcaggcactgagcccttcagtgttcaaggcaatcatggaaaagttggagatgtcgaagtttcaaccaaccctgctcactcttcctcgcattaaagtcactacttcacaagatatgctttcgataatggaaaaactggagttttttgacttttcatatgatctgaacctgtgcggactcacggaagatcctgatctccaagtttccgccatgcaacatcagacggtcttggagctgacggaaaccggagtggaagcagcagcagctagcgcaatttccgtggcaagaactttgctggtctttgaggtccagcaaccgttcctgttcgttctgtgggaccaacaacataagttcccagtgtttatgggacgggtgtatgatccgagagcg

SEQ ID NO: 19120 - DNA, 1500 bp, synthetic construct
  misc_feature 1..1500: note = source = /note="Description of Artificial Sequence: Synthetic coding sequence"
  source 1..1500: mol_type = other DNA
atggcctcacggctgactctcctgacgctgctccttctgttgcttgccggtgaccgagcctcgtccaaccctaacgcaactagctccagctcccaagatcccgaaagcctccaagataggggtgaaggcaaggtggcgacgactgtcatttccaagatgctgttcgtggaaccaatcctcgaagtctcgagcctccctaccacgaattccaccaccaatagcgcgactaagatcaccgccaacactaccgacgaacctactactcagccgactaccgagccaaccactcaaccgactattcaaccgactcagccgaccacccaactgcccactgattcaccgacccagccaacgactggtagcttctgccctggaccagtcaccctctgttccgaccttgaatcgcattcgaccgaggctgtgctcggagacgccctcgtggatttctcgttgaaattgtaccacgcattttctgctatgaaaaaagtggaaaccaacatggcattttcgccgttctccattgcgagccttcttacccaggtgctgctgggagcaggcgagaacactaagactaaccttgagtcgatcctcagctatccaaaagactttacttgtgtgcatcaagcactcaagggatttactacgaaaggtgtgacttcggtttctcaaatctttcatagcccagatcttgccattcgcgatacttttgtgaatgcttcgagaaccctgtactcgagcagcccccgggtgctctcgaacaactccgacgcaaaccttgagcttatcaacacctgggtggcaaaaaacacgaataacaagatttcaaggttgctggatagccttccatctgataccagacttgtccttctgaatgccatttacctttctgcaaagtggaaaaccacttttgatcctaagaaaaccagaatggaaccctttcactttaagaattcggtcattaaggtccccatgatgaattcgaaaaagtaccctgtggctcatttcatcgaccaaaccctcaaggcgaaggtggggcaactccaactttcccacaatctcagcttggtcatcctggtgccacaaaatcttaagcatcgcctcgaggacatggagcaagcactttctcctagcgtgttcaaagcgataatggaaaagctcgaaatgtcaaagtttcaacctacccttctgactctcccaagaattaaggtgacgacctcgcaagacatgctgtccattatggagaagctggagttctttgatttctcatacgatctgaacctttgcggtcttaccgaagatcccgatctgcaagtgagcgcaatgcagcaccagaccgtgcttgaactcactgaaacgggcgtggaagcagcagcagcgtcagctatcagcgtcgcccgtactctcctcgtgtttgaagtccagcaacccttcctttttgtgctttgggatcaacagcataagtttcccgttttcatgggacgcgtgtacgaccctagggcc

SEQ ID NO: 19121 - DNA, 1500 bp, synthetic construct
  misc_feature 1..1500: note = source = /note="Description of Artificial Sequence: Synthetic coding sequence"
  source 1..1500: mol_type = other DNA
atggcgtcacggctgacgctcctcactctgttgctccttctccttgcgggcgatagggccagcagcaatccgaatgctaccagctcgtcctcacaagatccagagtcgctccaagatcggggggaggggaaggtcgctaccacggtcatttcaaagatgctgttcgtcgagcctatcctggaagtgtcatctctgccgaccaccaattcaaccaccaactcagccactaagatcaccgcaaacactactgacgaaccaaccacgcagccaactactgagccaacgactcagccgactatacagcctacccagccaaccactcagctgccgactgactcgcctactcagcccacgacgggatccttctgcccaggtccggtgactctgtgttccgaccttgagagccacagcaccgaggctgtgctgggagatgcgcttgtggacttctcgctgaagctctaccacgccttctccgctatgaaaaaagttgaaactaatatggccttctcccccttctccatcgcatccctcttgacgcaagtgctcttgggagccggagaaaacaccaaaactaaccttgaatccatcctgtcgtaccctaaggacttcacctgcgtgcaccaggcactgaagggttttactactaagggcgtcacttccgtgagccaaatcttccacagcccggatctggcgattagagatactttcgtcaacgcctcgagaactttgtactcgtcgtctccgcgcgtgctgtcaaacaactcggacgccaacctggagctcatcaatacctgggtcgcgaagaataccaacaataaaatctcgaggctgttggactcgctgccgagcgacaccagactggtcctgttgaacgctatttacctgagcgcaaagtggaaaaccacctttgaccccaagaaaactcgaatggaaccgtttcatttcaagaactccgtgatcaaggtgccgatgatgaactccaaaaagtatcctgtggctcacttcatcgaccaaaccctgaaggcgaaggtgggccagctccagttgtcgcacaatctctccctggtgatcctggtaccacagaacctgaagcatcgcctggaagatatggagcaggcgctgtcaccctcagtgtttaaggcaatcatggagaagctggagatgtcgaagttccaaccaaccctgctcacccttccgcgcatcaaggtgaccacttcgcaagatatgctcagcatcatggaaaaactggaattctttgatttctcgtacgacctcaacctctgcggactcaccgaagatcctgacctgcaagtctccgcgatgcagcatcagaccgtgctcgaactcaccgagactggagtggaagcagccgccgccagtgccatcagcgtggcccgcacccttctggtgtttgaagtccagcagccgttcctgttcgtcctgtgggaccagcaacataaattcccggtttttatgggacgggtgtacgacccgcgggcc

SEQ ID NO: 19122 - DNA, 1500 bp, synthetic construct
  misc_feature 1..1500: note = source = /note="Description of Artificial Sequence: Synthetic coding sequence"
  source 1..1500: mol_type = other DNA
atggcttctcgcctgacactgctcaccctcctgctgcttcttcttgcaggagatcgtgcttctagcaaccccaatgctacctcaagctcctcccaagatcccgagagcctgcaggaccgtggcgagggtaaggtggctacaaccgttatctctaagatgctgtttgttgagcctatactcgaggtttcttcactgccaacaaccaactccactactaattccgctactaagattaccgcaaataccaccgacgagccaaccactcagcctacaactgaaccaaccactcagcctacaatccagcccacccaacctacaacacagctgcctaccgactctccaacacaacctacaaccggtagtttttgccccggtccagttaccttgtgcagtgatcttgagtcccattctaccgaggctgtgctgggtgacgcactcgttgacttcagtttgaaactttaccacgctttttcagctatgaagaaggttgagactaatatggcttttagtccattctcaatcgccagtttgctcacacaagttttgttgggcgctggcgaaaacacaaagacaaatctggaatcaattctctcttaccctaaggactttacctgcgtccaccaggcattgaagggctttactacaaagggcgtaaccagcgtgtcccagattttccattctccagacttggcaatcagggacaccttcgtgaacgcttctaggacactgtactctagctcaccccgtgtattgtcaaataactcagatgccaatctggagctgattaacacctgggtagcaaagaacacaaacaacaagatttccagacttttggatagcctcccatccgacacaagattggtactgttgaacgccatatacctttctgcaaagtggaaaacaactttcgacccaaagaaaacaagaatggagccttttcatttcaaaaactctgttatcaaggtcccaatgatgaacagtaagaagtacccagttgcccacttcatcgatcagacacttaaggccaaggtgggtcaactgcagctgtcacacaacctgtccctggttatcctcgtccctcagaacctgaagcaccgtctcgaggacatggagcaggctctgagcccctcagtgttcaaggccataatggagaagttggaaatgagtaagtttcagccaacactgctgactctccctcgcattaaggttacaacttcccaggacatgctcagcatcatggaaaagctggaattcttcgatttttcctatgacctcaacctctgcggtttgacagaagaccctgacctgcaggtgtccgcaatgcagcatcaaaccgtcctggaacttacagagacaggagtcgaggcagccgctgcttctgcaatttccgtggctaggacactgctggtgtttgaggtgcaacagccctttcttttcgtgttgtgggatcagcagcacaaattcccagtattcatgggaagagtctacgatcctagagct

SEQ ID NO: 19123 - DNA, 1500 bp, synthetic construct
  misc_feature 1..1500: note = source = /note="Description of Artificial Sequence: Synthetic coding sequence"
  source 1..1500: mol_type = other DNA
atggcctcccgccttaccctgttaaccctcctgctgctcttgttggccggggatagggcttcttcaaacccgaatgctacctcttcctctagccaggatcccgaaagtcttcaagaccgtggtgagggcaaggtcgccacgactgttatctcgaagatgcttttcgtggagcccattctcgaggtcagtagtttgcctacaactaatagcactaccaacagcgctaccaaaatcacagctaacaccacggacgagcccacgacccagcccactacagagccgactacacagccgactatccagcctactcagccaacaacacagctgcctaccgactcaccgacccagccaaccaccggctcattctgtccaggtcccgtcaccctgtgctctgatctggagtctcactcaacagaagccgtgttaggcgacgcattggtcgacttctccctgaagctgtatcatgccttcagcgcgatgaaaaaggtggagacaaacatggccttttcgcccttcagcattgcgtctcttttgacacaagtgctgcttggcgcaggcgagaacaccaagaccaaccttgaaagtattctgagctacccaaaggattttacttgcgtccaccaagctctgaaaggttttacaactaagggggtgacatccgtgagtcaaatttttcacagtccagatctcgctattcgggatactttcgtgaacgcttccagaacactctactccagttcacctcgagtcctttctaacaacagcgacgcgaacctggagctcataaatacatgggtggccaagaatacaaacaacaaaatcagtaggctgctggattccttgccttctgatactaggctcgtgctcctgaacgctatctacctgtcagcaaagtggaaaaccacgttcgatcctaaaaaaacacgcatggaaccatttcactttaaaaatagtgtcatcaaggttcccatgatgaatagtaaaaaatacccagttgcccattttatcgatcagaccctgaaggccaaggtgggacaactgcaactgtcacacaatttatcgctggtcatcctggtcccgcagaatctgaaacaccgcctggaggacatggaacaagccctgtcccctagtgtctttaaggcaattatggaaaagcttgagatgagtaaatttcaaccaacgctgttaaccttacctagaatcaaagtgaccacaagtcaggacatgctaagcattatggagaagctggagtttttcgatttcagctacgatctgaatctctgtggcctgactgaagacccagatctgcaagtgagtgccatgcagcatcagacagtgttagaattaacagagaccggggttgaggccgctgccgcaagcgcgatttccgttgctcgaacgctccttgtgtttgaggtgcagcaacctttcctcttcgtgttatgggatcaacaacacaagtttcccgtcttcatgggcagagtctatgaccctagggcc

SEQ ID NO: 19124 - DNA, 1500 bp, synthetic construct
  misc_feature 1..1500: note = source = /note="Description of Artificial Sequence: Synthetic coding sequence"
  source 1..1500: mol_type = other DNA
atggccagccggcttaccttgttgactctgcttctgttgctccttgccggagatagagcaagctctaatcccaacgcaacttcttcaagctcacaagatcctgagtccttgcaggatagaggagaaggtaaagtggcaactaccgtgatctcgaagatgctctttgttgagccgatcctcgaggtatcatcactgcctactactaacagcaccactaactcggccaccaagattacggcgaataccactgatgaaccaactacccagccgaccactgagcccactacccaacctaccatccaacctactcagccaactactcaactgccaaccgactcgccgacccaacctactactgggtcgttttgtcctggacctgtgactctttgcagcgaccttgagagccactcaacggaagcagtgctcggcgacgcactggtggattttagccttaaactttaccacgcgttcagcgccatgaagaaggttgaaaccaacatggcatttagccctttttcgattgcttcacttcttacccaggtcctgctgggagcgggcgaaaacaccaagaccaacctggaatcgattctctcttacccaaaagatttcacttgtgtacatcaggctttgaagggattcaccactaagggtgtcacgtccgtgtcgcagatcttccactccccggatcttgcaattcgagatacttttgtgaacgcatcgcggactctgtatagttcgtccccccgtgtgctgtcgaataacagcgacgctaacctggaactcataaacacttgggtggccaagaacaccaataacaaaatcagccggctcttggattccctgccaagtgacacgagacttgtcctgctgaacgcaatttacctctccgcaaaatggaaaacgactttcgacccaaagaaaaccaggatggaacctttccatttcaagaactccgtcataaaggtcccaatgatgaattcaaagaagtaccccgtggcccatttcatcgaccaaactctcaaggcaaaggtgggccaactgcagctgtcacataacctgtcactggtgattctggttcctcaaaatctgaagcatcgcctcgaagatatggagcaggcactttccccatccgtgtttaaggcaatcatggagaaattggagatgagcaaatttcagccaacgcttctcactctgcccaggataaaggtcactacttcgcaagatatgctttccattatggaaaagctggagttttttgatttttcctacgatcttaatctctgcggtcttactgaggaccctgatcttcaagtttcggcgatgcagcatcagaccgtgcttgaactcactgaaacgggtgtagaagcggccgcagcatcggcaatttcggtggccagaacccttttggtctttgaagtccaacaaccgttcctgtttgtcctgtgggaccaacaacacaagtttcctgtgtttatgggacgcgtgtacgatccgagagcc

SEQ ID NO: 19125 - DNA, 1500 bp, synthetic construct
  misc_feature 1..1500: note = source = /note="Description of Artificial Sequence: Synthetic coding sequence"
  source 1..1500: mol_type = other DNA
atggcttctcggctgactctgctgaccttgctccttctcctcttggcaggagatcgcgcgtcatccaatccaaatgccacttcgtcgtccagccaggacccggaatctctccaagaccgcggcgagggaaaagtggcaactaccgttatcagcaagatgctgttcgttgaaccgattttggaagtcagcagcctgccgactaccaatagcaccactaactccgccaccaaaatcacggcaaacacgactgacgagccaaccactcaaccaactactgaaccaaccacgcaaccaactatccaacccacccagccgacgacccaactgccaactgattccccgacccagccgactactggatcattctgtcctggaccggtgaccctctgttcagacctcgagagccattccaccgaggctgttctcggagacgctctggtcgatttctccctgaagctgtaccacgctttttccgccatgaagaaggtcgaaactaatatggccttttcgcctttcagcatcgcttcgctgctgacccaagtcctgttgggggccggcgagaacaccaagactaacttggaatccatcctgtcgtaccccaaggattttacctgtgtgcaccaggccttgaaggggttcactacgaagggtgtgacctcagtctcacagatcttccacagccccgacctcgcgatccgcgacaccttcgtgaatgcgtcacggaccctgtactcttcctccccgagggtcctgtcaaacaacagcgacgcgaatctggagcttatcaacacgtgggtcgccaagaatactaataacaagatctcaagactgctggattccttgccgtccgacacccggctcgtgcttctgaacgcgatttacctgtccgctaagtggaaaactactttcgatcctaagaaaactcgcatggaaccgttccactttaagaactcagtgatcaaggttccaatgatgaactccaaaaagtacccagtggcccacttcatcgaccaaaccctcaaagccaaagtcggacaactccaactgtcacataacctgtccctggtgatcttggtcccgcagaacctgaagcatcgcctcgaggacatggagcaagccctgtcgccgtccgtgttcaaggccatcatggaaaaacttgaaatgtccaagtttcagccaactttgctgaccctgccacggatcaaagtcacgacttcgcaagatatgctttcaatcatggaaaagctcgaattcttcgacttcagctacgacctgaacctctgcggactgactgaggaccctgacctccaagtctcggcgatgcagcaccagactgtgctggagctgactgaaaccggggtggaggcggccgccgcctcggcaatctcagtcgcccgcaccctgctggtgttcgaagtgcagcagccttttctcttcgtgctgtgggatcagcagcataagttccctgttttcatgggaagagtgtatgatccgcgagcc

SEQ ID NO: 19126 - DNA, 1500 bp, synthetic construct
  misc_feature 1..1500: note = source = /note="Description of Artificial Sequence: Synthetic coding sequence"
  source 1..1500: mol_type = other DNA
atggcgtcgcgtctaacgctattaacgttattattactactattagcgggtgatcgtgcgtcgtcgaatccgaatgcgacgtcgtcgtcgtcgcaagatccggaatcgctacaagatcgtggtgaaggtaaagtagcgacgacggttatatcgaaaatgctatttgttgaaccgatattagaagtatcgtcgttaccgacgacgaattcgacgacgaattcggcgacgaaaataacggcgaatacgacggatgaaccgacgacgcaaccgacgacggaaccgacgacgcaaccgacgatacaaccgacgcaaccgacgacgcaactaccgacggattcgccgacgcaaccgacgacgggttcgttttgtccgggtccggttacgctatgttcggatttagaatcgcattcgacggaagcggtattaggtgatgcgttagttgatttttcgttaaaactatatcatgcgttttcggcgatgaaaaaagttgaaacgaatatggcgttttcgccgttttcgatagcgtcgctactaacgcaagtattactaggtgcgggtgaaaatacgaaaacgaatttagaatcgatattatcgtatccgaaagattttacgtgtgtacatcaagcgctaaaaggttttacgacgaaaggtgttacgtcggtatcgcaaatatttcattcgccggatctagcgatacgagatacgtttgtaaatgcgtcgcgaacgttatattcgtcgtcgccgcgagttctatcgaataattcggatgcgaatttagaactaataaatacgtgggttgcgaaaaatacgaataataaaatatcgcgtctattagattcgctaccgtcggatacgcgattagttttattaaatgcgatatatctatcggcgaaatggaaaacgacgtttgatccgaaaaaaacgcgaatggaaccgtttcattttaaaaattcggtaataaaagttccgatgatgaattcgaaaaaatatccggttgcgcattttatagatcaaacgctaaaagcgaaagttggtcaactacaactatcgcataatctatcgctagtaatattagttccgcaaaatttaaaacatcgtttagaagatatggaacaagcgttatcgccgtcggtatttaaagcgataatggaaaaattagaaatgtcgaaatttcaaccgacgctattaacgttaccgcgaataaaagtaacgacgtcgcaagatatgctatcgataatggaaaaactagaattttttgatttttcgtatgatttaaatttatgtggtctaacggaagatccggatctacaagtatcggcgatgcaacatcaaacggttctagaattaacggaaacgggtgtagaagcggcggcggcgtcggcgatatcggttgcgcgtacgttattagtttttgaagtacaacaaccgtttctatttgtattatgggatcaacaacataaatttccggtttttatgggtcgtgtatatgatccgcgagcg

SEQ ID NO: 19127 - DNA, 1500 bp, synthetic construct
  misc_feature 1..1500: note = source = /note="Description of Artificial Sequence: Synthetic coding sequence"
  source 1..1500: mol_type = other DNA
atggcgagtcgcctcactctgctgacgctgctgctgctgttgctcgcgggagatcgtgcgtcgtccaatccgaacgcgactagtagctcaagccaagacccagaatctcttcaagaccggggcgaaggaaaggtggctactactgtgatctccaagatgctcttcgtcgagccgattctggaggtcagcagccttccaaccactaattctaccaccaactccgccactaagatcaccgcaaacactactgacgagccgaccacgcagcctactaccgagcctaccacgcaaccgaccattcaaccaacccagcccacgactcaattgccaacggactctccgacccaaccgacgactgggagcttctgtcccggtccagtcaccctgtgcagcgacctcgaatctcactccaccgaagccgtcttgggtgacgccctggtggacttctcactcaaactgtatcatgcattttccgccatgaagaaagttgagactaatatggccttttccccattttcaatcgcgagcctcctcactcaggtgctgctgggagcaggagaaaacaccaaaactaatttggaatcgattttgtcctaccctaaggatttcacttgcgtgcatcaggccttgaagggcttcaccaccaagggggtcacctctgtcagccagatcttccacagcccagatctggcgatccgcgataccttcgtgaatgcgtcgcggaccctgtactcgtcatccccccgcgtgctctcgaacaactccgatgcaaacctggagcttatcaacacttgggtggccaaaaacaccaacaacaagattagtaggctcctggattcactgccatcagacacgaggctggtcctgctcaacgccatctacctgtccgcaaagtggaaaactacctttgacccgaagaaaactcggatggagccattccatttcaagaattcggtgatcaaagtgcccatgatgaattcaaagaagtaccctgttgctcacttcatcgatcagaccctgaaggcgaaggtaggacagcttcaactgtcgcataacctgtcgctcgtgatccttgtcccgcagaatctgaagcacagactcgaagatatggaacaagcactgtcaccgtcggtgttcaaggcaatcatggaaaagctcgagatgagcaagtttcagccgactctgctcaccctccctcgtatcaaagtgaccacgagccaggatatgctgtcgatcatggaaaaactcgaattcttcgacttctcttacgatttgaacctttgcggcctcaccgaggacccggacctgcaggtgtcagccatgcagcaccagacggtgcttgaactgactgagacgggcgtggaagcagctgccgcctcggctatctcggtcgcacgcacccttctggtatttgaggttcagcaaccattcctcttcgtgctgtgggaccagcagcacaagttcccggtgttcatgggaagagtgtacgaccctcgagct

SEQ ID NO: 19128 - DNA, 1500 bp, synthetic construct
  misc_feature 1..1500: note = source = /note="Description of Artificial Sequence: Synthetic coding sequence"
  source 1..1500: mol_type = other DNA
atggcatcacgcctgactctgctgaccctcctcctcctgctcctggccggagatcgagcgtcatcgaacccgaacgccactagctcctcgtcccaggacccagaatcgcttcaggatcgcggcgagggcaaggtggccacgaccgtgatttcgaagatgctgttcgtggaacccatcttggaagtgtcctcgttgccgactactaactcaaccacgaacagcgccactaagattactgcgaacactaccgacgaacctaccactcagccaactacggaaccgacgactcaaccgactattcaaccaacccaaccgaccacgcagctcccgactgacagccctacccagccgaccactgggagcttctgtcctggaccggtgactctgtgctcggaccttgagtcccattccactgaggcggtgctcggcgacgctctggtcgatttctcgttgaagctctaccacgcattttcagctatgaagaaggtggaaactaatatggctttctcgccattcagcatcgcgtcgctgctgactcaggtcttgctcggagcgggtgaaaataccaagaccaatcttgagagcatcctgtcttacccaaaagacttcacctgcgtccatcaggcgctgaaaggatttaccaccaagggcgtgacttcagtctcacaaatctttcactctccagacttggcaattagagacaccttcgtgaacgcgtcaaggaccctgtacagctcctccccacgcgtgctgtcgaacaactcggacgccaaccttgagctgatcaacacctgggtcgctaaaaacactaacaacaagatctcgagactgctggactccttgccatcagacaccaggctggtgctcctcaatgccatctacctgtcggcgaagtggaaaacgactttcgatccaaaaaagacccggatggagccgttccatttcaagaatagcgtgattaaagtgccgatgatgaactcgaagaaatacccggtcgcccactttatcgatcagactctgaaggcgaaggttgggcagctgcaactgtcgcataacttgagcctggtgatcctggtgccccaaaacctgaagcaccgcctcgaggacatggagcaagcgctctccccatccgtgtttaaagcgatcatggaaaagctggaaatgagcaagtttcagccaaccctccttaccctgcctagaatcaaagtgaccactagccaggatatgctgtctatcatggagaagttggaattctttgatttctcctacgacctgaacctgtgcggactgactgaggatccggatctgcaagtctccgcgatgcaacatcagaccgtgctggaactgactgaaaccggtgttgaagccgcggctgcctccgccatctccgtggcccgaactctgctcgtgttcgaagtgcagcagccgttcttgttcgtgctgtgggatcagcagcacaaatttccggtgttcatgggtcgcgtctacgatccgcgggcc

SEQ ID NO: 19129 - DNA, 1500 bp, synthetic construct
  misc_feature 1..1500: note = source = /note="Description of Artificial Sequence: Synthetic coding sequence"
  source 1..1500: mol_type = other DNA
atggcatcgcgcttaacgcttctcaccctgctcctcctactgcttgcgggagatagagcaagttcaaacccaaacgccacgtcctcaagctcacaggacccagaatcgcttcaggatcggggagaaggtaaggtggcaacaaccgttatctctaagatgttgttcgtggaacctattctggaggtgtcttcactgcccaccaccaactcaaccactaacagtgctactaagatcacggcgaacacgaccgacgagcccactactcagccgacgactgagcctaccacccagcctaccatccagccaacccagccaaccacccagcttccaactgacagtcccactcagcctactaccggctctttctgtcccggtcctgtcaccctgtgctccgatctggagtcccactccacagaagcagtcctcggcgacgcactcgtcgatttttctctgaagctctaccatgctttcagtgcaatgaagaaggtggagacaaacatggcattctcacctttctccatcgcctctttgctgacccaggttctgctgggagcaggagagaacactaagactaacctcgaatctatcctttcctatcctaaggacttcacctgcgtccatcaggcgcttaagggattcacaaccaaaggggtgacctctgtgagccagatcttccattcaccggatttggcgattagagacaccttcgtgaatgcatcaagaacactgtattcttccagtccccgagtcctgagcaataatagtgatgcaaacctggaactgattaacacgtgggtggcgaagaataccaacaacaagatcagtaggttactcgactctctaccctctgatactaggttggtactgctcaatgcaatctacctcagtgctaagtggaaaactactttcgaccccaaaaagaccaggatggaaccattccactttaaaaactccgtgataaaggtgccaatgatgaattctaagaagtatccggtcgcacatttcattgatcaaacactcaaggcgaaggtgggtcaactacagctatcacacaatctaagcctggttatcctggtaccgcaaaacctgaaacacagactggaagacatggaacaagctctatcaccctccgtctttaaagccataatggagaaactcgagatgagcaagttccaacctaccctcctgacccttccccggataaaggtaacgactagtcaagatatgctttcaattatggaaaaactggaattctttgacttctcctacgatctgaatttatgtggcctgaccgaagatcctgatcttcaagtctcggcaatgcagcaccagactgtgcttgagctcactgagacaggcgtcgaggccgcagccgcgtccgctatttcagtcgccagaaccctccttgtgtttgaagttcagcagccgtttctctttgttctgtgggatcagcaacacaaattccccgttttcatgggtagggtatacgacccccgggcg

SEQ ID NO: 19130 - DNA, 1500 bp, synthetic construct
  misc_feature 1..1500: note = source = /note="Description of Artificial Sequence: Synthetic coding sequence"
  source 1..1500: mol_type = other DNA
atggcatccaggctcaccttgctgacactcctgttgctgctgcttgcaggagatcgggcatccagcaacccaaacgcaacgtctagctcttctcaggaccccgagtccctgcaggaccggggcgagggcaaggttgcaactacggttatttccaaaatgctgtttgtcgagcccatactcgaggtcagctctcttcctactaccaatagcacgacaaattctgctactaagattacagcaaataccaccgatgaaccaactacccagcctacaacagagcccactacacagcctacaatccagcccacgcagccaactacacagctgccaaccgattcccccacccaacctaccacgggaagcttctgcccagggccggttacactctgcagcgatctcgagagccatagtaccgaagccgtcctgggggacgccttagtcgatttctcgctgaaattataccacgcattctctgccatgaaaaaagtggaaacaaatatggcctttagtcccttctctattgcgtcactactaacacaggtgctcctgggcgctggggagaacactaaaacaaatctggaatccatcttgtcatatccgaaagacttcacctgcgttcaccaagctcttaagggatttaccactaaaggcgttaccagcgtgagtcagatcttccattctccagacttagccatacgagatacttttgtgaacgctagccggacactgtactcgagctcccctcgcgtgctctccaacaacagtgacgcgaaccttgaactgatcaatacgtgggtggcaaaaaacactaataataaaatatctaggctgctggattccctgcccagcgatacgaggcttgttctcctgaacgcaatctacctgtctgctaaatggaagaccacattcgacccaaagaaaaccagaatggaaccatttcatttcaaaaattcggttataaaagtgccaatgatgaactccaagaaataccctgtcgcccatttcattgaccagaccctgaaggctaaggttgggcagttacagttgagtcacaacctctcgttggtcatactcgtaccgcagaatctgaagcacagacttgaagatatggagcaggctctgtctcctagtgtgttcaaagcaatcatggagaaactggagatgagcaagttccagcccacgctcctgaccttaccgcgaatcaaggtcaccacttcccaggatatgctctctatcatggagaaactggagtttttcgacttttcttatgatcttaacctttgtggactcaccgaggatcccgatcttcaagtatctgccatgcagcaccagactgtgctggaactcacagagaccggcgtggaagcggcagcagcttccgctataagcgtggctcgaacacttctagtttttgaggtccaacaacctttccttttcgtgctgtgggaccagcagcacaaattccccgtattcatgggcagggtttacgacccaagagcc

SEQ ID NO: 19131 - DNA, 1500 bp, synthetic construct
  misc_feature 1..1500: note = source = /note="Description of Artificial Sequence: Synthetic coding sequence"
  source 1..1500: mol_type = other DNA
atggcgagtaggctcaccctgctcacgctgctgctcctcctgcttgccggggatagagcaagttccaacccaaacgctacttcctcctcatcccaggaccccgaaagtttgcaggaccggggtgagggcaaggtggcaactaccgttatcagtaaaatgttgtttgtggaacccatcctcgaggtgtcctctttgccaacgacaaacagcaccaccaattccgccacaaagattacagctaatacgacggatgagcctaccactcagcctacaaccgagcccacgacccagcctaccatccagccaacgcagcccaccacccagctccctacggactctcctacccagcctaccacagggtccttctgtcccggtcctgtgacactgtgttctgatctggagtctcattccaccgaggccgtgctcggcgacgccctggtggacttcagtcttaaattgtatcatgctttcagcgcaatgaaaaaggtggagactaacatggcctttagtcccttcagtatagccagccttctgactcaggtgttgctgggtgctggcgagaacaccaaaacgaatttggagtctatcttgagctaccccaaagatttcacttgtgtgcaccaagcactcaagggatttaccactaaaggagtcacttccgtgtcccaaatcttccattcccccgatttggcaatccgggacacgttcgtgaatgcctctagaacactgtactcctctagtccccgggtcctgtctaataactctgatgctaatctcgagctgatcaacacctgggtcgctaaaaacacgaacaataagatttcccggttgcttgactcccttccctctgatacgaggctggtgctgttgaatgccatctatctgtctgccaaatggaagacgacctttgacccgaaaaaaacgagaatggagccgttccattttaagaattccgtgattaaggtaccgatgatgaacagtaaaaaataccccgtagcccatttcatcgaccagaccctcaaagccaaagttggacagctgcagctgtcccacaacctgagtctggtgatcctggtgccacagaacctgaaacaccgcctggaagatatggaacaggcactcagcccttctgtgtttaaggctatcatggaaaagctcgaaatgtccaagttccagcccaccctcttgaccctcccacggatcaaggtcactacctctcaagacatgctgtctatcatggagaaattggaattttttgattttagctatgacttgaatctgtgtggtttgactgaggaccctgatctccaggtgagtgctatgcagcatcagacggtcctggaattgaccgagactggcgtcgaggccgccgccgcctccgcaataagcgtagccagaaccctgctggtgtttgaggtacaacagccctttcttttcgtgctgtgggatcagcaacacaaattccctgttttcatggggcgagtgtacgatccgcgcgcc

SEQ ID NO: 19132 - DNA, 1500 bp, synthetic construct
  misc_feature 1..1500: note = source = /note="Description of Artificial Sequence: Synthetic coding sequence"
  source 1..1500: mol_type = other DNA
atggcttctcggcttacattattgacactactattgctacttctcgcgggggacagagcatcctcgaacccaaacgctacatcaagtagtagtcaggatcccgaatcattacaggataggggagaagggaaggtcgctacaacagttatctctaaaatgctctttgtggagccaatcctggaagtttccagtctccctacaacgaatagtacaactaattccgctacaaagatcacagccaatactactgatgaacccactacacagcctacaactgaacctacaactcaacccacaatccagcctacacagcctactacacagttacctactgactcccccacacagcctacaactggatccttctgccccggaccagttacactctgctctgacctggaaagtcactccacagaagcagtcttaggggatgccctcgtggacttctcgcttaaactataccatgcattctcagccatgaaaaaggtagaaacaaatatggctttcagtccattctcaatcgcttccctgttaacacaggtcctcttaggagccggagaaaacactaagacaaacctcgaatctatcctttcttatcccaaagattttacttgcgtgcaccaggccctcaaaggatttactactaaaggggtcacgtctgtctctcagatttttcattctccagatctcgctattcgggatacattcgttaatgcctcccggacattatattctagttcaccccgcgtgctctcgaacaactcagatgccaatttagaacttataaatacttgggttgcaaaaaacactaataataaaatatcccggctacttgatagtctgccatctgatacaagactggtactcctaaatgccatctatctttccgccaaatggaaaactacttttgatcctaaaaaaactcgaatggaaccttttcacttcaaaaacagtgtcataaaagtgcctatgatgaactctaaaaaataccccgtggcccacttcattgatcagacactcaaagccaaagtcggacagctgcagctctcccacaatctctctctggtgatcctggtaccacagaacttaaaacatagactagaagacatggaacaggccctctcaccaagtgtgttcaaagccatcatggaaaaactcgaaatgtcaaaatttcagcccacattactcactcttccacggatcaaagtcactacttcccaggacatgttaagtataatggagaaacttgagttttttgacttctcatatgatcttaatttatgcgggttaactgaagatcctgacctgcaggtgtcagcgatgcagcatcagactgtgctagaactcactgaaacaggagttgaggccgctgccgcttctgcaatatcagtcgcccggactttattggttttcgaagtccagcagccttttctcttcgtgctctgggatcagcaacataaatttccagtgttcatggggcgcgtgtatgatccaagagct

SEQ ID NO: 19133 - DNA, 1500 bp, synthetic construct
  misc_feature 1..1500: note = source = /note="Description of Artificial Sequence: Synthetic coding sequence"
  source 1..1500: mol_type = other DNA
atggcatccagactgactttactgacactcctgcttctcctactggccggagatagagcctccagtaatccaaatgcaacttcgtcttcatcacaggatcccgaatcactgcaggatagaggggaaggaaaagtggcaacaactgtgataagtaaaatgctgttcgtggagcccatactcgaagtctcatcattacctacaactaattccacaacaaattctgcaacaaagatcactgccaacacaacagatgagcctacaacacagcctactacagaacctactacacagcccactattcagcctacacagccaactactcagttaccaacagactcgcccacacagcctacaactgggtccttttgccccgggcctgtaactttgtgttctgatctagaaagtcacagtacagaagctgtcctgggagatgcccttgtggacttctctttaaaactgtatcacgcattttcagccatgaaaaaagttgaaactaatatggccttttcgccttttagtatagcttccttactaacacaagtgttgttaggagctggggaaaatactaaaacaaatctggaatccatcctatcttatcccaaagactttacatgcgtccatcaggcactgaaagggttcacaacaaaaggagtgacttctgtgagtcagatatttcatagtcccgatctagccatcagagatacttttgtcaacgcctctaggacattatactcttcatccccgagagtcctgtccaataattctgatgctaacttagaacttatcaacacttgggtcgcaaaaaatacaaataacaaaatatcccggctacttgatagtttgcctagtgatactagactggtgcttctaaatgctatctatctgtccgctaaatggaaaactacatttgatcccaaaaaaacacggatggaacctttccacttcaaaaatagtgtcattaaagttcccatgatgaattccaaaaaataccctgtggctcattttatcgatcagacactgaaagctaaggtggggcagctccagctgtcccataatttatccctcgtgatcctggttccccagaacctcaaacatagacttgaagacatggaacaggcactgagtccatccgtcttcaaagcaataatggaaaaactagaaatgtccaaattccagccaactcttctaactctcccacgcatcaaagttactacatcccaggatatgctgtcaattatggaaaaattagagttctttgatttctcctacgatctgaatctgtgtggactgactgaggatcctgacctacaggtgtccgccatgcagcaccagacggtgttggagctcactgaaacaggagtagaagccgcagcagcctccgcaatctccgttgcacggacactcctagtgtttgaggtgcagcaaccatttctgtttgtattatgggatcagcagcataagttcccagttttcatggggcgggtctatgatcccagggct

SEQ ID NO: 19134 - DNA, 1500 bp, synthetic construct
  misc_feature 1..1500: note = source = /note="Description of Artificial Sequence: Synthetic coding sequence"
  source 1..1500: mol_type = other DNA
atggcctcccggctgaccttactcacccttttgctgctgctcctggctggggaccgggcttccagcaatcccaatgctacatcatcaagttcccaggacccggaaagcctacaggataggggagaagggaaagtggccacaaccgtgatcagtaaaatgctttttgtggagccgattctcgaggtgtctagcctgcctactacgaacagcaccactaatagtgccacaaagatcaccgcaaataccacggatgaacctactacccagcctaccaccgaacccactacccagccaacaattcaaccaactcagcctacaactcaacttccgaccgacagccctacacaaccaacgacgggttccttctgtcccggcccagtcacactgtgcagtgatttggaatctcattctacagaagctgttctgggggacgcactggtggatttctcccttaagctttaccacgccttctccgctatgaagaaggtagagaccaatatggcgtttagtccatttagtattgcttctctgctgactcaggtgctccttggcgcaggagagaacactaagacgaatctggagtcaatactgtcgtacccaaaagacttcacttgcgtgcaccaggccctgaaagggttcactaccaagggagtgacaagtgtttcacagattttccatagccccgacctagcaatacgcgatacattcgtgaatgctagcaggacgctatattcatcgtccccaagggttttgagtaacaattcagacgctaatctggaactgattaatacgtgggtcgcaaaaaatactaataacaaaatcagcagactgctcgattccttgccttctgacacccgcttggtcctcctgaatgctatatatctgtccgctaagtggaaaacaacattcgaccctaaaaagaccagaatggagccatttcactttaaaaactctgtgataaaggtaccgatgatgaactctaagaaataccctgtggcacacttcattgaccaaaccctgaaagcaaaggtgggacaactgcagctgagtcataaccttagtttggtgatcctggtgccccagaacctgaaacatagactggaggacatggaacaggccttgtcaccctcagtcttcaaagccattatggagaaactcgaaatgtctaaatttcaacccaccttgctcaccctgcctcggatcaaggtgaccactagccaggacatgctttctatcatggagaagctagaattcttcgacttcagctacgatcttaatttgtgtggtctaactgaggaccctgacctgcaggtctccgccatgcagcatcagaccgtacttgaattgaccgagaccggggtggaagcagcggcggctagtgctatctcggtagcccgtacgttgctcgtgttcgaggtgcagcaaccctttttgttcgttctctgggaccagcagcacaaattccccgtgtttatggggcgggtctatgatcccagagcc

SEQ ID NO: 19135 - DNA, 1500 bp, synthetic construct
  misc_feature 1..1500: note = source = /note="Description of Artificial Sequence: Synthetic coding sequence"
  source 1..1500: mol_type = other DNA
atggcctcccgactcacactcctcactctattgcttctgctgctggctggcgatagggcatcctccaatcctaatgcaacttcaagcagcagtcaggatcctgagagccttcaggacaggggggagggaaaggtggccactactgtgatttccaagatgttatttgtcgagccaatcctggaagtgtcctccctgcctaccactaactccaccactaacagtgccactaaaatcaccgcgaacacgactgatgaacctaccactcagccaacaacggaacccacgacgcagcctaccatccagccaacccaacccacaacacaactgccaacagattcacccacccagccaaccaccggcagtttctgccccggacccgttacactgtgttccgacttggaatctcattcgaccgaggcagtactcggcgacgcactggtggactttagtcttaaactgtaccatgccttctctgccatgaagaaggtggagactaacatggcttttagcccgttcagtatcgcatctttacttacccaggttctgttgggggcaggagaaaatacaaaaactaatcttgagtctatcctgtcatacccaaaagattttacctgcgtgcaccaggcccttaagggattcactaccaaaggcgtgacgtctgttagtcagatattccactcccctgatctcgctatacgagacacgttcgtgaacgcaagccggacactttattcctcaagtccacgagttctgagtaataattctgacgcaaacttagaactgattaacacctgggtggcgaagaacaccaacaacaaaatctcgcgcttgctcgattcactcccatctgacacaagactcgtcttgcttaatgcaatctacctgtcggccaagtggaaaaccacttttgatccaaagaaaaccaggatggagcccttccactttaaaaactcggtaattaaggtaccgatgatgaactccaaaaagtacccagtcgctcatttcattgaccagactttgaaggccaaagtggggcaattgcagctttcccataatctatcattggtcattcttgtgcctcagaacctaaagcacaggctggaagatatggaacaggcattgtcaccctctgtgttcaaggccattatggagaaactggaaatgagcaaatttcaaccaacactgctgacactgccaagaataaaggttacaacttcgcaggacatgttaagcatcatggagaaactggagtttttcgatttttcctacgacctcaatctatgcggcctgaccgaggacccagaccttcaggtatccgccatgcagcaccagactgtgctcgagctgaccgaaacaggggtggaggccgctgcagcatcagccatctccgtcgcacgcacactcctggtatttgaggtgcagcagcctttcctctttgttctttgggaccagcaacataaattcccagtgtttatgggtagggtgtatgatccacgggct

SEQ ID NO: 19136 - DNA, 1500 bp, synthetic construct
  misc_feature 1..1500: note = source = /note="Description of Artificial Sequence: Synthetic coding sequence"
  source 1..1500: mol_type = other DNA
atggcctcccggctgactctcctcacacttctgctgctgctcctggctggagacagagccagtagtaacccaaatgccacttcatctagcagccaggatcctgagagcctccaggatcggggagaagggaaggtggccacaaccgttatttccaagatgctctttgtagagccgatcctcgaagtgtcctcattgcccaccacaaattcaaccactaatagtgctactaaaattaccgcaaacacaaccgatgagcctacaacacagcccacgactgagcccactacccagcccaccatacagcctacccagccaacaactcagctgcccacagattctcctacacagccaaccacggggtccttttgtcctggaccagtaacactttgttccgatctggagtcccatagtacagaagcggttctgggtgatgctttggtcgacttcagccttaagctttaccatgctttttccgcgatgaaaaaagtagaaaccaatatggcgttctcccctttcagtatcgcctctctcctcacccaggtgctgctgggagccggtgagaacacgaaaacaaacctggagtcaatcctgtcataccctaaggatttcacttgtgtacaccaggcactcaagggttttaccacaaagggagtgacctccgttagtcagatcttccactctcctgatctcgcgatcagggacacttttgtcaatgcctctagaactttgtattcctcttccccccgagttctgtccaataactccgatgctaacttggagctgatcaatacatgggtagccaagaatactaacaacaagatcagcagattgcttgacagcctgccttctgacacccgattggtcttgcttaacgcaatttatctttctgccaagtggaagaccacttttgacccaaagaagactagaatggagccgttccattttaagaattccgtgattaaggtgcccatgatgaatagcaagaaatatccggttgctcactttatcgaccagaccttgaaggcaaaggtgggacagcttcagctctcccataacctgagcctggttatcttggtgccacaaaacctcaaacatagactcgaggacatggagcaagcactttccccatctgtctttaaagctattatggagaagctcgaaatgagtaagtttcagccaaccctgctgacacttccccggatcaaagttactactagccaggacatgctgagcataatggagaaattggagttctttgacttctcctatgacttgaatctgtgtgggctgacagaggaccctgacctgcaggtgagcgccatgcagcatcagaccgtgctggagctgacggagacgggcgtcgaagcggccgccgcgagtgccatctctgtggcaaggacccttctggtctttgaggtgcagcagccctttctttttgtgctctgggatcaacagcataagttccctgtattcatgggacgggtgtacgatccaagagcc

SEQ ID NO: 19137 - DNA, 1500 bp, synthetic construct
  misc_feature 1..1500: note = source = /note="Description of Artificial Sequence: Synthetic coding sequence"
  source 1..1500: mol_type = other DNA
atggcaagtcgtcttacgctgctgaccctgcttttattgcttctggcaggggatcgcgcatcgtcgaatcccaatgctaccagcagtagctcgcaagatcctgagtcactccaggaccggggcgagggcaaggttgcgaccaccgtgatcagtaagatgctgtttgtcgaaccgatcctggaggtgagttccctgcccacgactaatagtacgaccaacagcgcgactaagattaccgctaacacgacagacgagcccaccactcagccaaccaccgagccaacgacacagcccactatacagccaactcaaccgaccacacagctgccgacggattccccgacccagcccactacgggcagcttttgccctggacccgttactctctgcagcgatttggagtctcactctacagaggcagtgttgggtgatgccctggtggacttcagcctgaagctgtatcacgcattcagcgccatgaagaaggtggagacgaacatggccttcagcccgttcagcattgctagcttgctgacccaggtcctcctgggcgcgggagagaataccaagaccaaccttgagagtatattgtcgtacccgaaggattttacatgcgtgcaccaggctctgaagggcttcactacaaagggagtcaccagcgtttcacagatcttccactcgcccgacctggctatcagggatacctttgtcaatgccagtcggaccctatacagtagctctccaagggtactatcgaataacagtgacgccaacttggagttgatcaatacatgggtcgccaaaaacacaaataataaaatatcgcgacttctcgacagtttgcccagcgacaccagactagtccttctgaatgccatctacttgtccgccaagtggaagaccacattcgatcccaagaagacacgtatggaaccattccactttaagaactccgttattaaggtgccgatgatgaactccaagaagtaccctgtggcccacttcattgatcagactttgaaagccaaggtgggccaattgcaactgagccacaacctcagtctggttattctggtgccccaaaacctgaagcaccgcctggaggacatggagcaagccctgagtccctccgtgtttaaggctatcatggagaagctggagatgagcaaatttcagcccacccttctgacattgccgcggataaaggtgaccacaagccaagatatgctaagcattatggagaagctagaatttttcgatttcagttacgacctgaacctatgtggccttaccgaagatccggatctgcaggtctcggcaatgcagcaccagacagtgctcgagttgacggagaccggagttgaggctgctgccgcatcggctatctccgttgcccgtactctcctggtgttcgaggtgcagcagccgttcctgtttgtgctttgggaccagcagcataaatttccggtgttcatgggacgggtgtacgaccctagagca

SEQ ID NO: 19138 - DNA, 1500 bp, synthetic construct
  misc_feature 1..1500: note = source = /note="Description of Artificial Sequence: Synthetic coding sequence"
  source 1..1500: mol_type = other DNA
atggcttcgaggctcactttgctcacattacttctgctgctgcttgctggtgatagagcatcttccaaccctaatgcgacctcttcatccagtcaagatcctgagtctttacaagatagaggtgaaggaaaggttgcaactactgtaatcagcaaaatgttgtttgtggaacctatcttggaagtgtcatccttaccaaccactaactctaccacaaattctgctactaaaataactgctaacacaacagacgagccgacaacgcagcctactactgaaccaactactcaaccgaccatacagccaacccagccaactacacagctccccactgattctcctactcaacccactactggtagcttttgccctgggccagtgacattgtgtagcgacttggaatcccattccacagaggcggtgttgggagatgccttggtggatttttcattgaagctttatcatgcattcagtgccatgaaaaaagtcgagactaacatggcatttagcccattttccatcgcttcactgttgacacaagtgttgcttggcgctggagagaatacgaagaccaatcttgagtcaatcttgtcgtatcctaaagattttacttgcgttcatcaggcattgaagggattcactacaaaaggagtcacatctgttagtcagatatttcattcgccagatttagcgatcagagatactttcgtaaacgcgtcacgaaccttatactcatctagcccgagggtattatcaaataatagtgatgcgaatctcgaactcatcaacacctgggttgctaaaaacactaacaacaaaatctccagactcttagattccctaccatccgacactaggttggtgctccttaacgctatttacttgtcagctaaatggaagacaacttttgatccaaaaaagactagaatggaaccattccatttcaagaacagtgttatcaaggtgcccatgatgaactccaagaagtatccagttgcccatttcatcgatcaaactttgaaagcaaaggtcgggcagttacaactgtctcacaatttatcactcgtgatcctggtgccccaaaaccttaaacacagattggaggatatggaacaagccttaagtccttctgtgtttaaagctattatggaaaagcttgagatgtctaagtttcagccaacgcttcttacacttcctcggatcaaggtaacaactagccaagatatgttgtctattatggagaagcttgagttctttgattttagttacgatttgaatctttgcggattgactgaggaccctgatctccaagtttctgcaatgcaacatcagaccgtcctagaattaaccgagactggtgttgaggccgccgcagcttcagccattagtgttgcacgtactttgttggtcttcgaagtgcaacagccttttctgttcgttctttgggatcaacaacacaagtttcccgtttttatgggtagagtgtatgatcctagggct

SEQ ID NO: 19139 - DNA, 1500 bp, synthetic construct
  misc_feature 1..1500: note = source = /note="Description of Artificial Sequence: Synthetic coding sequence"
  source 1..1500: mol_type = other DNA
atggccagccgcttgaccctcctgacgctgcttctgctcctgctggccggagacagagcatcctcaaaccccaacgcgacttcatcctcctcccaagaccccgagtccctgcaggaccggggggaaggtaaagtggcaactactgttatctcaaagatgctcttcgtggaacctatcctcgaagtgtcatctctgccgactactaacagcaccacgaactccgcaactaaaatcaccgccaacaccaccgacgagcccaccacgcagcccaccaccgaaccaaccacgcaacctactatccaaccaactcagcccactacccagctgcctactgactcccccactcagccaactactggctccttctgccccggtcctgtgaccctgtgctcagacctggaatcccattccacggaggccgtgctgggcgatgccctggtcgactttagcctcaaactctaccacgccttctcagccatgaaaaaagttgaaaccaacatggcgttcagccctttctctatcgcctcgctcctgactcaggtgctgttgggagcaggagagaacaccaagacgaacctcgagtccatcttgtcgtacccgaaggacttcacctgcgtgcaccaagctctcaagggattcaccaccaagggagtgactagcgtgtcgcagattttccactccccggacctcgctattcgcgatactttcgtgaacgcctcgagaaccctgtactcaagctcgccgcgggtcctgtcgaacaactccgatgccaatctggagctgattaacacttgggtggccaagaatacgaacaataagatcagccgcctcctcgatagcctgccttcggacacgaggctcgtgcttctgaacgccatctacctgtccgcgaagtggaaaacgaccttcgacccgaaaaagaccaggatggagccgttccactttaagaactcggtgattaaggtgccgatgatgaatagcaagaaatatcctgtggcacacttcatcgatcagaccctcaaggctaaagtgggacagctccaactctctcacaacctgtcgctggtcatcctggtgccacaaaatctgaagcaccggctcgaggacatggagcaggcgctttcaccgtcagtgttcaaagcaatcatggagaaacttgaaatgtccaaatttcagccgacgctcctgaccctcccgcgcatcaaagtgactacttcgcaagacatgctgtccatcatggaaaagctggagttttttgacttctcgtacgatctgaacctttgcggactcactgaggacccagatctgcaggtgagcgcaatgcagcatcaaactgtcctggaactgactgagactggagtcgaagccgcggccgcctcggcaatcagcgtggccagaactctgctcgtgttcgaagttcaacagccgttcctgttcgtcctgtgggatcagcagcataagttccccgttttcatgggacgggtgtacgatccaagagcg

SEQ ID NO: 19140 - DNA, 1500 bp, synthetic construct
  misc_feature 1..1500: note = source = /note="Description of Artificial Sequence: Synthetic coding sequence"
  source 1..1500: mol_type = other DNA
atggcatcacgattgaccctgctcaccttgttgctgctgctcctcgcaggtgacagagcctccagcaacccgaatgctacttcctcgtcgtcccaagatccggagtcccttcaggatcggggcgaagggaaggtggctaccacggtcatctccaagatgctcttcgtggagccgatcctcgaggtgtccagccttcccactactaattcaactactaattcggcgaccaagatcaccgccaacactacggatgagcctactactcaaccaactaccgaaccgactactcagccaacgatccagccaacccagccgacgactcagctgccgaccgatagcccaacccaaccgactacgggatctttttgccccggaccagtgactctctgttcagacctcgagtcgcattcgactgaagccgtgctcggggatgctctggtggacttcagccttaagctctaccacgcattttctgcaatgaagaaggtcgaaaccaacatggcattctcgccgttctccatcgctagcttgctgactcaagtgctgctgggcgccggtgaaaacaccaagactaacctggagtcaatcctctcctatcccaaggacttcacctgcgtccaccaagctctgaagggattcactactaagggcgtgacttccgtgtcccagatcttccactcgccggaccttgctattcgcgacaccttcgtgaacgcctccagaacgctgtactcctcaagccctcgtgtgctcagcaataactccgacgccaacctcgagttgattaacacctgggtggccaagaacactaataacaagatcagccggctgctggattcgctgcctagcgacacccggctggtgctcctcaacgcgatctacctttcggccaagtggaaaaccaccttcgatcccaaaaagacgaggatggaaccttttcacttcaagaatagcgtgatcaaagtcccgatgatgaattccaagaaatatccagttgcccacttcatcgaccaaactctgaaagccaaggtgggccaactgcaactgagtcacaatctgtccctcgtgatcctggtgccacaaaacctcaaacatagactggaagatatggaacaagcgctttccccatccgtctttaaggccatcatggaaaagctggagatgagcaagttccagccgaccctgcttaccctgccgagaatcaaggtcactactagccaagacatgctgagcatcatggagaaactcgaattcttcgatttctcgtacgacttgaacctctgcgggctcacggaagatccggacctccaggtcagcgctatgcagcatcagactgtcctggagttgactgaaaccggagtcgaggcagcagccgcatccgcgatcagcgtcgctcggactctcttggttttcgaggtccagcaaccatttctcttcgttttgtgggaccagcaacacaagtttccggtgttcatgggacgggtctacgatccacgcgcc

SEQ ID NO: 19141 - DNA, 1500 bp, synthetic construct
  misc_feature 1..1500: note = source = /note="Description of Artificial Sequence: Synthetic coding sequence"
  source 1..1500: mol_type = other DNA
atggccagccgcctgaccctgttgaccctgctcctcctgcttctggcgggggatagagcgtcctccaacccgaacgcaacctcgtcgtcctcgcaggatccagaatccctgcaggaccggggagagggtaaagttgcgaccaccgtgatctcgaagatgctgttcgtggaaccgatcctcgaagtctcgtcactcccgactaccaacagcactaccaactcggcgactaagatcaccgctaacactactgacgagcccactacccagccgactactgaaccgaccacccagcccacgatccaaccaacccagccaactactcagctccctactgacagtccgactcagcctaccactgggtcgttctgcccaggacctgtgaccctgtgttcggaccttgaatcacattcaactgaagctgtgctgggagacgcactcgtggacttttccctcaaactgtaccatgccttttcagcaatgaaaaaagtggaaaccaacatggcgttctcacctttttcaattgcgtcgcttcttacccaggtgctcctgggcgccggcgaaaacaccaagactaacctcgaatccatcctctcctaccccaaggacttcacctgtgtgcatcaagctcttaagggatttactaccaagggagtgacctccgtgtcacagattttccacagcccagatctggcaatcagagatactttcgtgaatgcctcaagaactctctactcatcatcgcctcgcgtcttgtcgaacaattccgacgccaatctggaactcatcaacacctgggtggccaagaacaccaataacaagatatcacgcctgctggattccctgccaagcgatacgcggctcgtgctcctgaacgctatctacctgagcgccaagtggaaaacgactttcgaccctaagaaaactcggatggaaccgttccacttcaaaaactctgttatcaaagtcccaatgatgaattcgaaaaagtaccctgtggcccatttcattgaccagactcttaaggccaaagtgggacagctgcaactctcgcacaacctgtccctcgtcattctggtccctcaaaacctgaagcatcggttggaggatatggagcaagcgctgtcgccgtcggtgttcaaggccattatggaaaaactggagatgagcaagttccagcccactttgctgactctcccacgcatcaaggtgactacctcgcaagatatgctcagcattatggagaaattggaattcttcgacttttcatatgatctcaacctgtgcgggctgactgaagatccggacctgcaagtctccgctatgcaacatcagactgtgctggagctcacggaaaccggagtcgaagctgcagccgcatcggcgatctccgtggcgcggactctgcttgtgttcgaggtgcaacaaccgttcctgtttgtgctgtgggaccaacagcacaagttccctgtgttcatgggccgggtgtatgacccgagagca

SEQ ID NO: 19142 - DNA, 1500 bp, synthetic construct
  misc_feature 1..1500: note = source = /note="Description of Artificial Sequence: Synthetic coding sequence"
  source 1..1500: mol_type = other DNA
atggcttctcggctcaccctcctgacactgctgctgctactgctggcaggcgaccgggcatcctctaatccaaacgcaacaagctccagttcccaggatcctgaatccttgcaagatcgaggggaggggaaagtcgctacaacagttatatccaaaatgctgtttgttgaacccatcttagaagtgtcctctcttcccactaccaacagtaccacaaactccgccacaaaaataaccgcaaatactactgacgaaccaaccacacagcctacaacagaaccaaccacccagccaaccatacaacctactcaaccaaccacccagctgcctaccgactcacctacacagcccacaaccggatctttctgccctggccccgtgacactctgcagcgatctcgaatctcactccaccgaggccgtgctaggcgatgctctggtcgattttagcctgaaactgtaccacgccttttctgccatgaagaaggtggaaaccaatatggcttttagtcccttctccattgcctctctcctgacacaggtcttactcggggccggtgagaatacaaagaccaacctggaaagcatactctcttacccaaaggactttacctgtgtgcaccaggcactgaaaggctttactacaaagggcgttactagtgttagccaaatctttcattctcctgatcttgcaatccgcgataccttcgttaacgccagtaggaccctctatagctcatctccccgtgttttgagcaataatagcgacgctaacttagagctcattaacacttgggtcgccaagaataccaacaacaaaatcagtcgcctgctggacagtctcccttctgacaccaggctggtgctcctcaacgcaatttacctctctgccaagtggaagaccactttcgaccccaagaagactcggatggaacctttccacttcaagaactctgtgattaaagttccaatgatgaatagcaagaaataccctgttgcccacttcattgaccagactctgaaagccaaagtgggccaactccagttatcccataatctcagcctggttatcctggtgccgcagaatctgaaacatcgtttagaagatatggagcaggcccttagtccttctgtcttcaaggccatcatggagaaactggagatgtctaagttccagccgacattgctgaccctgcctcggattaaggtgaccactagccaggacatgttatccatcatggaaaaactcgagttcttcgatttcagctacgacctgaacttatgcgggctgactgaggacccagacctgcaggtctcagcaatgcagcatcagacagtcctggagctgaccgaaaccggcgttgaagccgctgctgcctccgccatctcagttgctagaacactattagtcttcgaggtgcagcagccattcttatttgttctgtgggaccagcaacacaagtttccagtattcatgggcagggtgtatgaccctcgagcc

SEQ ID NO: 19143 - DNA, 1500 bp, synthetic construct
  misc_feature 1..1500: note = source = /note="Description of Artificial Sequence: Synthetic coding sequence"
  source 1..1500: mol_type = other DNA
atggcatccagacttactctgcttactctccttcttcttctcctggcgggcgaccgggcatcatccaaccctaacgcgaccagctccagctcgcaggaccccgaatctctccaggaccgtggagagggaaaagtggccaccactgtaattagcaaaatgttgttcgtggaaccgatcctggaagtgtcctccctccccactactaattctaccactaatagcgcgaccaagattactgcaaacactaccgatgagcccaccactcaaccaaccaccgaacccactacccagcctaccatacagccaacccagcctactacccaactgcctacggattcaccaacccaacccaccactgggtcgttttgtcctggccctgtgactctgtgctccgatcttgaaagccatagcaccgaagcagtccttggagacgcacttgtggactttagccttaaactgtaccatgcattttcagcaatgaagaaggtcgaaaccaacatggcatttagcccatttagcatcgcaagcctgttgacgcaagtgctcctgggagcaggtgaaaacactaaaaccaacctggagtcaattttgtcctacccaaaagattttacctgcgtccatcaggcgcttaaaggctttactaccaaaggtgttacctcggtgtcccaaatctttcacagcccagacctggccattagggacactttcgtcaatgcatcgagaactctgtactcatcctcgcctagagtgctttcgaacaactcggatgcgaatctggagctcattaacacttgggtggccaagaatactaacaacaaaatctcacgcctgctcgattctctgccctcggacacgagactggtgcttctgaacgctatctacttgtcggctaagtggaaaactaccttcgatcctaaaaagacgcgcatggaaccttttcacttcaaaaactccgtgattaaggtccctatgatgaactccaaaaagtaccctgtggcgcatttcattgatcagacccttaaggcaaaggtgggacaactgcagctttcccataatctctctctggtcattctcgtgcctcaaaaccttaaacacagacttgaagatatggaacaggcgctctccccttcggttttcaaggccattatggaaaagctggagatgtcgaagtttcaacccactcttctgactctccctagaatcaaggtgactacctcccaagacatgctgagcatcatggagaagctggaattctttgatttcagctacgatctcaacctgtgtggacttaccgaggatccagatctgcaggtgtcagccatgcaacatcagaccgttctggaactgaccgaaactggcgtggaagctgctgcagcctccgctatctcagtggcccgtactcttctcgtgttcgaagtgcaacaaccatttcttttcgtcctgtgggaccaacaacataagtttcctgtgtttatgggaagagtctacgacccacgcgca

SEQ ID NO: 19144 - DNA, 1500 bp, synthetic construct
  misc_feature 1..1500: note = source = /note="Description of Artificial Sequence: Synthetic coding sequence"
  source 1..1500: mol_type = other DNA
atggcatcacgcctcactcttttgacactgctgctgctgcttctggctggcgatagggcctcttccaatccaaacgccaccagcagtagttcacaagatcctgagtcactgcaggacaggggcgagggaaaggtcgcaactacagtaatctccaaaatgctgttcgttgagccgatacttgaggtctcaagtctgccaaccactaattctacaacaaacagcgccactaagatcaccgcgaacacaaccgacgaacctacaacacagcctacaaccgagcctacaacccagccaaccattcaacccacccaacccacgacacagcttccgacggactctccaacccagcctactactggctccttctgcccaggaccagtcactctttgtagcgacctggaatcccacagcaccgaggctgtgttgggcgatgcactcgtggacttctcccttaagttgtatcatgcctttagcgcaatgaaaaaggtcgagactaacatggctttctctccctttagcatcgcatccctgttgacccaggtgctcttgggcgccggtgaaaataccaaaaccaacctggagagtattctcagctatccaaaggacttcacatgcgtgcatcaagccctcaagggtttcacaaccaaaggagtcaccagcgtttcacagatcttccattcccccgaccttgcgatccgcgatacattcgttaatgcttctcgcacactgtactcaagctcaccccgcgtgctttccaataattctgacgctaatctggagctcattaacacctgggtcgcaaagaacaccaataacaagattagcagactgctcgactctctgccttccgacactcgcttggtattgctgaacgctatctacctgagcgctaagtggaagactaccttcgacccaaagaagacccgcatggagccctttcattttaagaattctgtgatcaaggtccccatgatgaattctaagaagtacccagtggcccattttatcgatcagactttgaaagcaaaagtgggacagctccagctcagccacaatctctccctcgtcattttggtcccacaaaatctgaaacatcgcctcgaggatatggagcaggcactctctcctagtgtttttaaggcaattatggaaaaattggaaatgtccaagtttcagccaactctcctgactctgccaagaattaaagtcacaacgtcccaggatatgctgagcatcatggaaaaactggagttttttgatttctcatatgacctgaacctttgtggcctcacggaagacccggaccttcaagtgtccgcaatgcagcaccagacagtgctcgagttgacagaaacgggagtggaggccgctgctgcctcagctatctcagttgccaggactttgctcgtgtttgaggtccagcaacctttcctgttcgtcctgtgggaccaacagcataaattccctgtgttcatgggccgcgtttacgatccacgcgcc

SEQ ID NO: 19145 - DNA, 1500 bp, synthetic construct
  misc_feature 1..1500: note = source = /note="Description of Artificial Sequence: Synthetic coding sequence"
  source 1..1500: mol_type = other DNA
atggccagcaggcttactctgcttaccctgctgctgcttctgctggccggggaccgggccagctcaaatcccaacgctaccagttcatcaagccaggacccggaatcactgcaagatagaggagaagggaaagtcgccactacagtgatctcaaagatgttatttgttgagcccattctggaagtgagctcgctgcccactacaaactctacaaccaatagtgccactaaaattaccgccaatacgacagacgaaccaacgacccaacctaccacggagcccacgacacagcctacaattcagcccacccaacccaccactcaactgcctacggatagcccaacccaacccacaaccggttctttctgcccaggtcccgttacgctctgctccgacctggagtcacactcaaccgaggcagtgttaggtgatgccctcgttgatttttccctgaagctgtaccacgctttcagcgcgatgaagaaggtcgagactaacatggcgtttagccctttttctatcgccagtttattgactcaggtgcttctgggagcaggcgagaataccaagacaaacctggagagcatcctcagctaccctaaggacttcacttgcgtgcaccaggctctgaaaggcttcacaacaaagggagtgacttctgttagccagatcttccattccccggacttggcaatcagagacacatttgtcaatgcgagccggaccctgtactccagctctcccagagtcctctccaacaactctgatgctaatctggagctgatcaacacctgggtcgcgaagaatactaacaataaaatctcccgattgttggactcattaccatcggacacgcgcctggtcctgttgaatgccatttacctgagcgccaaatggaagacaacttttgatcccaagaaaacccggatggagccgtttcatttcaagaactccgtgataaaggtgcctatgatgaactctaaaaaataccctgtcgctcacttcatcgaccagacactgaaagccaaagtgggtcaattgcaactgagccataacctgtctctagtcatcctggtgcctcaaaacctcaagcacaggttagaagatatggaacaagctctgtcacctagcgttttcaaagctatcatggagaagcttgagatgagtaaattccagccaaccctcctgactttgcctaggatcaaggtaaccacaagtcaagacatgctgtctataatggagaagcttgagtttttcgacttctcttacgacctgaacctctgtgggcttacagaggatcctgacctgcaagttagcgcaatgcagcaccagaccgtgctcgagctgacagagactggcgtggaggcagccgccgcgtctgctatctcagtggccaggacactgctggttttcgaagttcagcagcctttcctgtttgttctgtgggaccagcaacacaagtttccagttttcatggggagagtgtatgatccccgtgcc

SEQ ID NO: 19146 - DNA, 1500 bp, synthetic construct
  misc_feature 1..1500: note = source = /note="Description of Artificial Sequence: Synthetic coding sequence"
  source 1..1500: mol_type = other DNA
atggccagcaggctgaccctgctgactctgctgctgctccttttggcaggagatagagccagcagcaaccctaacgctaccagctcttccagccaggatccagaatctctgcaagatcggggagagggcaaggtcgcgaccactgtgatatccaagatgctgtttgttgagcctattcttgaagtctcctccctgccaaccaccaacagcaccactaatagcgcaactaagataaccgcaaacactaccgatgaacctacgacccaacctactaccgaaccaaccactcagccaaccattcagccaacccagccgactactcaacttcctactgattcccccactcaacctactactgggtctttttgtccgggtcctgtcaccctgtgttcggacctggagtcgcatagcaccgaagcagtgcttggagacgcactcgtggatttcagccttaagctgtaccatgctttttcggctatgaagaaagtggaaaccaacatggcattctccccattctccatcgcctcgcttcttacgcaggtgctgcttggagccggcgaaaacactaaaaccaacctcgaatccattctgtcatatccgaaggactttacctgcgttcatcaagcactcaagggatttactacgaaaggagtgacctccgtgtcacagattttccattcaccggatttggctattcgtgatactttcgtgaatgcaagccggaccctttactccagctcacccagggtgctgagcaacaattcggatgcaaatctggaactgattaacacctgggtggcaaagaacaccaataacaagatctcgcgccttctggactcccttccttcagacacccggctggtccttcttaacgcaatctacttgtcagctaaatggaaaactacttttgatccaaagaaaactcggatggagccattccactttaagaatagcgtcattaaagtgcccatgatgaactcgaagaaataccctgtcgcacactttatagaccaaactctgaaggccaaggtgggtcagctgcaactcagccacaacctttcgctcgtcatcctggtgccccagaatctcaagcatagactggaggatatggaacaagcactttcgccttcagtgttcaaagcaattatggagaagctcgaaatgagcaagtttcaacctacgttgctgacccttccaaggatcaaggttactacctcgcaagacatgctttcgataatggaaaagctggaattctttgacttttcatatgacttgaatctctgtggcctgacggaagatcctgatctgcaagtctccgcaatgcagcatcagaccgtccttgaactgaccgaaactggagtggaagcggccgcggcgtccgccatttcggtggcccgaactctgcttgtgtttgaagtgcaacaaccgtttctctttgtcctctgggatcaacaacataagtttccggtgttcatgggcagagtctatgatcctagagca

SEQ ID NO: 19147 - DNA, 1500 bp, synthetic construct
  misc_feature 1..1500: note = source = /note="Description of Artificial Sequence: Synthetic coding sequence"
  source 1..1500: mol_type = other DNA
atggcctctagactaacgttattaacacttttgttgcttctgctggccggggatagggctagttctaaccctaacgccacgtcaagctcctcccaggacccagagagtcttcaggatcgtggtgagggcaaggttgcaactacagttatcagtaaaatgctctttgtagagcccatattagaagtgtcttctctgcctaccaccaactccaccacaaactccgccactaagatcaccgccaatactaccgacgagcctacaacacagccaactacagagccaaccacccagcctacaatccagccgacgcagcccacaactcagttgccaacagattcaccgacacagcctacaacgggtagcttttgcccaggacctgttactctgtgttcagacttggagtctcattctacggaggccgtacttggggatgcattggtggattttagcctcaaactgtaccacgcttttagtgccatgaagaaagtcgaaaccaacatggccttttctccattctctatcgcgtctctgctgacccaagtactgctgggcgcgggagagaataccaagacaaacctggaaagcattctttcctaccctaaagacttcacatgcgttcaccaggcactcaagggttttactacaaagggagtgaccagtgtaagccagatctttcattcgccagacctcgctatcagggataccttcgtgaatgcaagtcgcaccttgtactcatccagccccagagtcctgtctaacaattccgatgcaaatctagagctgatcaacacatgggtcgccaagaacaccaataacaagatcagtagacttttggattccctgccttctgacacccgacttgttctattaaatgcgatatacctgagcgccaagtggaaaacaacctttgaccccaagaagacgcgcatggagccttttcattttaagaattccgtaataaaagtgccaatgatgaactctaagaaatatccagtcgcacattttatcgatcagactctgaaggccaaggtcggccagctgcagctttcacacaatctctccttggttattctcgtaccgcagaatttgaagcatcgcctcgaagatatggaacaggccctgtcaccttccgtgtttaaggctatcatggagaaactggagatgagtaagttccagcctacattgctgacccttcccagaataaaagtgaccacctcccaggatatgctcagcattatggagaagctggagtttttcgacttctcatatgatctgaacttgtgcgggttaacagaggacccagacctccaagtgagcgctatgcaacaccagactgtcctcgagttgaccgagacgggcgtggaggctgccgctgcttcagctatctctgtggcgaggactctcctggtgtttgaagtacagcaaccgtttctcttcgtgctgtgggaccagcagcataaatttccggtatttatggggcgtgtctatgaccccagagca

SEQ ID NO: 19148 - DNA, 1500 bp, synthetic construct
  misc_feature 1..1500: note = source = /note="Description of Artificial Sequence: Synthetic coding sequence"
  source 1..1500: mol_type = other DNA
atggcaagtcgtttaacgctgctgacgttgttattattgctattagcaggagacagggcatctagcaatcctaacgccacttcgtcctcttcacaggatccggaatctctgcaggatcgcggtgagggaaaggtggcaacaacagttatctcaaagatgctctttgtggagccaatcttggaggtgagctctctgcccacaacaaattcaacaacaaatagcgctaccaagattacagcgaacactacagatgagccaacaacacaaccgacaactgaacctacgacgcagcctacgattcaacctacacagccaaccacacaattaccgaccgactcaccaacacagccgacaaccggaagcttttgtccgggacccgtcacactgtgcagcgatctggaatctcattcaacagaagcggttctgggagacgcactcgttgatttttccctgaaactctatcatgctttttcggctatgaaaaaggttgaaacaaatatggcattttccccattttctatcgcgagcttacttacacaagttcttttgggagctggcgaaaacacaaaaacgaatttagagtcaattcttagctatccgaaggactttacatgcgtacatcaagctttaaaggggttcacaacaaagggggttacatctgttagccaaatttttcatagcccggacttagctataagagataccttcgttaacgcaagccgcacattgtattcttcaagtccgcgtgttctgtctaataacagcgatgcaaatttagagttgataaatacctgggtcgcgaaaaacaccaacaataaaatcagcaggttactggactcgctcccgagcgacacacgactagtattgttgaatgctatttatctgtcggcgaagtggaagaccacgttcgacccgaaaaaaacccgcatggagccttttcattttaaaaactctgtcatcaaagttccgatgatgaacagcaaaaaatatcctgtggctcatttcatcgatcagacgctgaaagctaaagtggggcaactgcagttgagccataatctttctttggtgattctggtgcctcaaaatttaaaacacaggttagaggatatggaacaggctttatcgccatcagttttcaaagcaattatggagaaactggaaatgtccaaattccaacctacattgcttacactgccaaggatcaaggtaacaacaagtcaagatatgttatcaattatggaaaagctagagttttttgatttctcatacgatcttaatctgtgtggattgactgaagatccggatctgcaggttagcgcaatgcagcatcaaaccgtattggaattaacagagacaggagttgaagcagccgctgcctcagctatttctgttgcgcggactcttttggtgtttgaggttcaacagccatttctttttgtgctgtgggaccaacaacataaattcccggtctttatgggtcgggtttacgatcctcgcgcg

SEQ ID NO: 19149 - DNA, 1500 bp, synthetic construct
  misc_feature 1..1500: note = source = /note="Description of Artificial Sequence: Synthetic coding sequence"
  source 1..1500: mol_type = other DNA
atggcttcccggctcaccctgttgaccctcttgctgctgctgctggccggggacagggcatcgtccaacccaaatgccacctcgagttcgagccaggacccggaatcattgcaggatcggggcgagggcaaggtggcaaccaccgtcatctctaaaatgctgtttgtggagccgattttggaagtctcatcgctcccgactaccaattccactactaactcagcgacgaagattaccgctaataccactgacgagccaaccactcagccgacgactgaacccacgacccaaccgaccatccagccgactcaaccgaccactcaactgccgactgactcaccgacgcaaccaactacggggtcattttgcccaggaccggtcaccctgtgctcggacctcgaatcgcattccaccgaggccgtgctcggagatgcgctggtcgattttagccttaagctgtaccacgccttctcggccatgaaaaaggtcgagactaacatggccttctcacccttctccatcgcttccctgctgacccaggtgctgctcggagcaggcgagaacaccaaaactaacctggagtccatcctgtcatacccgaaggatttcacttgcgtgcaccaggcgctgaagggcttcactaccaagggagtgacctccgtgtctcagatcttccacagcccagatctggcaatccgtgacacttttgttaacgccagcagaacgctgtattccagcagcccacgcgtgttgtccaacaattccgatgccaatctggagctgataaacacctgggtggccaagaacaccaataacaaaatctcaaggctgctcgactccttgccatcagacactagactggtgttgctcaatgccatctacctcagcgcaaagtggaaaaccactttcgacccgaagaaaacgcgcatggaacctttccacttcaaaaacagcgtgatcaaggtgccgatgatgaattcgaagaagtaccctgtcgcccacttcattgaccagaccctgaaagctaaggtcggacaactgcaactgtcccacaatctgtcactcgtgattttggtcccacaaaatctgaagcaccgcctggaggacatggaacaggccctctccccgtcagtgttcaaggctatcatggagaagctggaaatgagcaagttccagcctacgctgctcactctcccgcgcatcaaagtgactacctcacaagacatgctcagcattatggaaaagctggagttctttgacttctcgtatgatttgaacctgtgcgggctgacggaagatcctgatctgcaggtgagcgccatgcagcatcagaccgtgcttgagctgactgaaactggggtggaggctgcagcggcctcggctatctctgtggccaggacgctgctggtgttcgaagtgcagcagccgttcctgttcgtgctctgggatcagcagcacaaatttccggtattcatgggtcgggtctacgatcccagggcc

SEQ ID NO: 19150 - DNA, 1500 bp, synthetic construct
  misc_feature 1..1500: note = source = /note="Description of Artificial Sequence: Synthetic coding sequence"
  source 1..1500: mol_type = other DNA
atggcatcgcgccttaccctccttacccttcttctgctccttctggcgggtgatagagcatcctcgaacccgaatgcaacctcgtcatcgtcgcaggatccagaatcactgcaggaccgcggagagggaaaggttgccaccactgtcatttccaagatgctctttgtggaaccaatcctggaagtgtcctctctgcctactaccaactcaacgaccaactcagccaccaaaatcactgcgaatactactgatgaaccaaccactcaaccaaccaccgaacctactactcagcccactatacaacccacccagcctacgactcaactcccaaccgactctcctacccagccaaccaccggcagcttttgtcccgggccagtcacgctttgttcggacttggaatcgcattccactgaagcagtgctgggcgatgcactggtcgacttttcgctgaaactttaccatgctttctcggcaatgaaaaaggttgaaaccaacatggcattttctccattttccattgcaagtttgctcacccaagtgctgttgggcgccggtgaaaatacgaaaactaacctggagagcatcctttcgtatcctaaggatttcacctgtgtgcaccaagcgctcaaaggttttaccactaagggtgtaaccagcgtgtcccaaatctttcatagcccagatttggccatacgggatacttttgtgaatgcgagcaggactctttacagctcctccccaagggtgctgagtaataactccgacgccaatctggagttgattaacacttgggtggcgaagaatactaacaataagatctcgaggcttctcgattctctgccctcggacactcgcctggtccttctgaacgcaatttaccttagcgcaaaatggaaaactacctttgatcctaagaaaacccgcatggagccttttcacttcaagaactcggtgatcaaggtgcccatgatgaacagcaagaagtaccctgtggcgcactttattgatcagacccttaaagccaaagtgggacagctgcagttgtcacacaatcttagccttgtgatccttgtgccacagaatctgaaacatcgtctggaggatatggagcaggcgcttagcccttcggtgttcaaggcaattatggaaaaactcgaaatgtccaagttccagccgaccctcctgactctccctcgaattaaggtcaccaccagccaagatatgctgtcaataatggaaaagctggaattctttgatttttcatacgatctgaacctttgtggactcactgaagatccagaccttcaggtgtcagcgatgcaacatcaaacggtgcttgaacttaccgagactggagtggaggcagccgcagcttctgccatctctgtggcacgtacgctgctggtctttgaggtgcagcaaccctttctttttgttctctgggatcaacaacataagttccccgtctttatgggacgtgtctacgaccctagggcg

SEQ ID NO: 19151 - DNA, 1500 bp, synthetic construct
  misc_feature 1..1500: note = source = /note="Description of Artificial Sequence: Synthetic coding sequence"
  source 1..1500: mol_type = other DNA
atggcctctaggctgacgttgctgaccctgctgcttttactgttagctggcgatcgcgcctccagcaaccctaacgcaacctcaagttctagccaggatcccgagagtctacaggaccgcggtgaaggaaaggtcgcaacaacagttatatctaagatgctgtttgtggagcccatccttgaggtctcaagcctgcctactactaacagcactactaactccgccaccaaaattaccgctaacaccactgacgaaccaacaacgcagcctaccaccgaaccaaccacccagcccacaatacaaccaacgcagcctacaacccagctgcccactgactcacctacacagcccactactggctcattctgcccggggccggttacattgtgctccgacctggagtcacactctaccgaagccgtactaggggatgccttggtcgatttctccctcaagctataccatgcctttagtgctatgaagaaggtggaaaccaacatggcttttagtccgttttcaatcgctagcctactgacccaggtcctcctcggtgcaggcgaaaataccaagactaatctagagtcaattttgtcatacccaaaggattttacttgcgtacaccaggctttgaaaggtttcactactaaaggagtcacttccgttagtcagatcttccattccccagatctagctattcgcgatacctttgtcaatgcctcccggacactctattcatctagcccccgggtgctttcgaataactctgatgcaaatctggagcttattaatacttgggtggctaagaacaccaacaacaaaatcagtaggctgttagattccctccctagcgacacgagactggttcttctcaacgctatctatctgtccgctaagtggaaaaccacctttgatcccaagaagacaaggatggaaccttttcacttcaagaattccgtgataaaggtgcctatgatgaatagtaaaaagtatcccgtcgctcacttcatcgaccaaactcttaaggcgaaagtgggtcagctgcagctgtcccacaatctgtccctggtgatcttagtgccacagaacctgaagcatagattggaggacatggagcaggccctgtccccttctgtgttcaaggctatcatggagaagcttgaaatgtcgaaattccagccgacgctgctgactctgccacgtattaaagtcactacctctcaggatatgctctccatcatggaaaagcttgaattctttgactttagttatgaccttaacctctgtggtctcaccgaggacccagacctgcaggtgtccgcgatgcagcaccagacagtgcttgaactgacagaaacaggggtggaggcagcggcggcctccgccatctccgtggctagaacactgcttgttttcgaggtgcaacagccatttctgtttgtcctgtgggaccagcaacacaagtttccagtctttatgggccgggtgtatgacccacgggct

SEQ ID NO: 19152 - DNA, 1500 bp, synthetic construct
  misc_feature 1..1500: note = source = /note="Description of Artificial Sequence: Synthetic coding sequence"
  source 1..1500: mol_type = other DNA
atggcttcacgactaacacttttgacattactattacttcttttggcaggagacagagcatcatcaaatccaaatgctacatcttcttcatcacaagatcctgaaagtcttcaagatagaggagaaggtaaggtagcaactactgttatttcaaagatgttatttgttgaaccaattttagaagtttcctctttaccaacaactaatagtactactaattcagctactaagattacggcaaatacaacagatgaaccaacaactcaaccaacaacagaaccaacaacacaaccaactattcaacctactcagccaactacacaattaccaactgatagtccaacacaaccaacaactggttcattctgtcctggaccagtcactttatgttcagatttagaatctcattcaactgaagcagttttaggagacgcacttgttgatttttcacttaaattataccatgcctttagtgcaatgaagaaagttgagacaaatatggctttttcacctttttctattgcatctttgcttactcaagttttattgggtgcaggagaaaatacgaaaactaatcttgaatcaattttatcttacccaaaagattttacttgcgtacatcaagcattaaagggttttactacaaagggagttacatcagtttctcaaatttttcatagtccagatttagctattagagacacatttgttaatgcatctagaactttatattcttcatctccaagagttttatcaaataattcagatgctaatttggaattaattaatacatgggtagctaaaaatacaaataataaaatttcaagacttttagattctttaccaagtgatacccgtttagtcttattaaatgcaatttatttatctgctaaatggaaaactacttttgacccaaaaaaaactcgtatggaaccatttcattttaaaaattcagtaataaaagtcccaatgatgaatagtaaaaaatatccagtagcacattttattgatcaaactttaaaagctaaagtgggtcaacttcaattatctcataatttatcactagttattttagttccacaaaacttaaaacatcgacttgaagatatggaacaagcactttcaccatcagtttttaaagctattatggaaaaacttgagatgagtaaatttcaaccaacacttttaacacttccaagaattaaggttacaacatcacaagatatgttatcaataatggaaaaattagaattttttgatttttcatatgacttaaatctttgtggacttacagaagatccagacttacaagtatccgctatgcaacatcaaaccgttttagaattaactgaaacaggagttgaagctgcagcagcaagtgcaattagtgtagctagaacacttttggtttttgaagtgcaacaaccttttcttttcgttctttgggatcaacaacataaattccctgtctttatgggtagagtttatgatccaagagct

SEQ ID NO: 19153 - DNA, 1500 bp, synthetic construct
  misc_feature 1..1500: note = source = /note="Description of Artificial Sequence: Synthetic coding sequence"
  source 1..1500: mol_type = other DNA
atggcctccagacttaccctgctcactcttcttctgctgcttctcgccggtgatagagcatcgagcaaccctaatgcgacctccagctcatcacaggacccggaatcgcttcaagacaggggagaaggcaaagtcgcgaccactgtgatttcaaaaatgctttttgtggagccaattctggaggtttcatcgctgccaaccactaacagcactactaatagcgcaactaagattaccgccaataccaccgatgaacctaccactcaacccaccaccgagccaactactcagccgacgatccagcctactcagcctaccacccagctgcctaccgacagcccaacccaaccgaccaccggttcattttgtccaggcccagtgaccctgtgttccgatctggagagccattccaccgaagcagtgctgggggacgcactcgtcgacttcagcctgaagctgtatcatgcattctccgcgatgaagaaggtggagactaacatggcattttcgcccttttccattgcatcactccttacccaagtcctcttgggagccggagagaataccaagactaacttggaatctattctctcgtacccgaaggactttacttgtgtgcaccaagcactgaagggatttaccaccaaaggtgtcacctcggtcagccagatatttcattcgcccgaccttgcaatccgcgatacctttgtgaatgcgtccaggaccctgtactcctcctcgcctagggtgctctcgaataacagcgacgcaaatcttgagcttatcaatacttgggtcgcaaagaacaccaacaacaagataagtagacttcttgattcgctgccctccgacactcgtctggtgctcctgaatgcaatttacctgtcggcaaaatggaaaacgacctttgatccaaagaaaaccaggatggagccatttcacttcaaaaactcggtgataaaggtgcccatgatgaattccaaaaagtacccagtggcgcatttcatcgaccaaactttgaaggcaaaggtcggtcaactccagctgtcccacaatttgtctcttgtgatcctggtgcctcaaaacctgaaacatcggcttgaagatatggaacaagccctctcgccatcggtgtttaaagctattatggagaagctggaaatgtccaagttccaaccgacgcttttgactctgccgagaataaaggtgacgacctcccaagacatgctgtccattatggagaaattggagttcttcgatttcagctacgatctgaatctgtgtggactgactgaggaccctgatctgcaagtatccgccatgcaacaccaaactgtccttgaacttaccgaaaccggagtcgaagctgcagccgcaagcgctatttccgtcgcccgtaccttgcttgtctttgaagtgcagcaaccttttctttttgtgctttgggatcaacaacacaagtttcctgtgtttatgggtagggtgtacgatcctagagca

SEQ ID NO: 19154 - DNA, 1500 bp, synthetic construct
  misc_feature 1..1500: note = source = /note="Description of Artificial Sequence: Synthetic coding sequence"
  source 1..1500: mol_type = other DNA
atggccagccgcctgactctgctcactctgcttctcctgttgctcgcaggcgaccgcgcctcgtccaatcctaatgccacgtcgtcgtcgagccaagatccggagtccctgcaagatagaggagaggggaaagtggccactaccgtcatttcaaaaatgctgttcgtggagcccatcctggaagtgagctcgctcccaacgaccaactccactactaactcggccaccaagattaccgccaacacgactgacgagcctaccactcagccaaccaccgagccgactacccaaccgaccatccagccaacccaacccactacccagctgccgaccgattccccgacccaaccgactactggctcgttttgccccggccccgtgaccctgtgctccgacctggaatcccattccaccgaagccgtgctcggggatgcacttgtggacttcagcctcaagctgtaccacgcattcagcgccatgaagaaggtggaaactaacatggcattctcaccgttttccatcgcatccttgctgacccaggttctgctgggagccggtgagaataccaaaaccaatttggagtcgatccttagctacccgaaggacttcacttgtgtccaccaggccctcaagggctttactaccaagggcgtcacctcggtgtcacaaatctttcattcaccagacttggccatccgggacaccttcgtgaacgcatctcggaccctgtactcctcatcgccgagagtcctttcaaataactcggacgccaacctggaactgatcaacacttgggtggcaaagaataccaacaacaagatctcacggctgcttgatagcctcccctcagatacgagactggtgctgctcaatgccatctaccttagcgcgaaatggaaaactaccttcgacccaaagaaaacccgcatggaacccttccacttcaagaactccgtgataaaggtgccgatgatgaattcgaagaaataccccgtggctcatttcatcgaccagacccttaaagccaaggtgggacagttgcaactttcccataacctgtcgctggtgatcctggtcccgcagaatctgaagcaccgcctggaggacatggaacaagccctgagccctagcgtgttcaaggcaataatggagaagctcgaaatgtctaagttccagccgacgctgttgactttgccgagaatcaaggtgaccacctcgcaagatatgctgtccatcatggaaaagctcgagttctttgacttctcatacgacctcaatctgtgcggactgaccgaggacccggaccttcaagtctccgcaatgcaacaccaaaccgtgctggaactgactgaaaccggagtcgaagcggcggctgcgtcggcgatctccgtggctagaactctgcttgtgtttgaagtccagcaaccatttctgttcgtgctgtgggaccagcaacacaagttcccggtgttcatgggccgggtctatgacccgagggcc

SEQ ID NO: 19155 - DNA, 1500 bp, synthetic construct
  misc_feature 1..1500: note = source = /note="Description of Artificial Sequence: Synthetic coding sequence"
  source 1..1500: mol_type = other DNA
atggcatcacgcctaacgcttttgactttgctgctgctgctgctggccggtgatagagccagctctaacccaaacgctaccagttcaagctctcaggaccctgaaagcctccaagacaggggagagggcaaggtagccacgaccgttatcagtaagatgcttttcgtcgagcctattctggaagtgagctccttgccgacgacgaattctactaccaattcggctacaaaaattacagcaaatactaccgacgagcccaccacacagcctactactgagcctaccactcagccaacaatccagcctactcaacctaccactcagctccctactgacagtccgacccagcccacaactggctccttctgtcccggccctgtcacactctgctctgaccttgaatctcactcgaccgaggccgtgttgggtgatgcgctagtggatttttctctgaagctctatcacgcgttttcagccatgaagaaagtggaaaccaacatggctttcagtccattcagtatagcctcgctgctgacccaagtcctgctgggtgctggagaaaataccaaaaccaatttggaatcgattttgagctatcccaaggactttacatgtgttcaccaggcattaaagggatttacaaccaagggtgttacttctgtgtctcagatctttcactctccagatttagcgataagggatacatttgtcaacgctagccgaaccctgtattctagctcgcctagagtgctgtcaaacaattcagacgcaaatctggagctgataaatacctgggtcgccaaaaatactaataataagatctcccgactactggactcgctgcctagtgacacccgcctggtgctgttgaacgctatttacttgagcgcgaagtggaagacgacgttcgacccaaagaagactagaatggagcctttccacttcaaaaattctgtgatcaaagtgccaatgatgaacagtaagaagtatcctgtggcccactttattgatcagacattgaaagccaaagtggggcagctacagctgtcgcataatctctccctggttattctggttcctcagaatttgaagcatagactcgaggacatggagcaggctctaagtcctagcgtgtttaaggcaataatggagaaacttgaaatgtcaaaattccaaccaacgctcctcacactacctcgaatcaaagtgactacctcacaggacatgctgtctatcatggaaaagctcgagtttttcgatttctcatacgatctaaacctgtgcggactgaccgaggacccagatctgcaggtaagtgccatgcagcatcagactgtgctggagctcaccgagactggcgtcgaagcagccgcagcatcagctatctcggtggccagaactcttcttgtgttcgaggtgcagcaacccttcttgtttgtgctgtgggatcagcagcataagtttccggtcttcatggggcgagtatacgacccccgggca

SEQ ID NO: 19156 - DNA, 1500 bp, synthetic construct
  misc_feature 1..1500: note = source = /note="Description of Artificial Sequence: Synthetic coding sequence"
  source 1..1500: mol_type = other DNA
atggcatcacggctgacgcttttgactcttcttcttctgctgctcgccggcgatagggcaagcagcaacccaaatgcaacctcaagctccagccaggatcccgaatcgcttcaggacagaggagagggtaaagtggcgaccacggtgatatcaaagatgttgtttgtggagccgatcctggaagtgtcgtcgctgcctactaccaattcaaccaccaattccgctactaagatcaccgctaacacgaccgacgaacctaccacccaacccaccaccgaaccaaccactcaacctaccattcagcctacccagccaactacccaacttcctacggatagccctacccaaccaacgacgggatcgttctgtccgggacctgtgacgctttgctccgatctcgaatcccattcaactgaggcagtgttgggcgatgcccttgtggatttctcacttaagctctaccatgcattctccgccatgaagaaggtggaaactaatatggcctttagccccttctcaattgctagcctcctcactcaggtccttctgggggcgggtgagaacactaagaccaatcttgaatcgattctctcatatcctaaggactttacgtgtgtgcatcaggcacttaagggatttacgaccaagggtgtgacgagcgtgtcgcagatttttcactcccccgatctggccattcgcgacacctttgtcaacgcctcgcgtactttgtacagctcaagccctcgcgtgctttcgaacaactcagatgccaacctggaattgatcaatacttgggtcgctaagaacactaacaacaagatctcgcgcctgcttgattcgctgccatccgatacccgtttggtcctgctgaacgcgatttaccttagcgcgaagtggaaaacgactttcgatccaaaaaagaccagaatggaaccgttccatttcaagaactcggtgataaaagtgccaatgatgaactcaaagaaatacccggtggcacactttattgaccaaaccctcaaagccaaggtcgggcagttgcagctctcgcataacctgtcccttgtgatcctggtccctcagaacctgaaacaccgactcgaagatatggagcaagcacttagtccatctgtattcaaggccatcatggaaaaacttgagatgtccaaattccaacccacgttgctgactcttccacgaattaaggtcaccacttcgcaagacatgctttcaataatggagaagctggagttttttgatttttcatacgatctgaatctctgtggactcaccgaagatcccgaccttcaagtgtctgcaatgcagcaccaaactgtcctggaactgaccgagactggtgtggaagcagccgcagcatcagccatttccgttgcacggactctgttggtatttgaagtgcaacaaccgtttctgttcgtcctgtgggaccaacaacataagtttccggtctttatgggaagggtgtacgaccctcgggca

SEQ ID NO: 19157 - DNA, 1500 bp, synthetic construct; identical to SEQ ID NO: 19129
  misc_feature 1..1500: note = source = /note="Description of Artificial Sequence: Synthetic coding sequence"
  source 1..1500: mol_type = other DNA

SEQ ID NO: 19158 - DNA, 1500 bp, synthetic construct
  misc_feature 1..1500: note = source = /note="Description of Artificial Sequence: Synthetic coding sequence"
  source 1..1500: mol_type = other DNA
atggcaagccgcctaactcttctgacactcttgcttctgctgctcgcgggggaccgagctagctctaaccctaacgctactagttcttcatcccaggaccccgaatctctacaagacaggggcgaagggaaagtagccacgaccgtgatttccaaaatgctttttgtggaacccattctagaagtctcttccctgcccacgactaattcaaccaccaacagcgcaactaagatcacagcaaacacgaccgatgaacccacaactcaacccactacagaaccaacaacacagcctactatccagcccacacagcccactacccagctgcccaccgatagtccgacacaaccaacaacagggtcattttgtcccggccccgtgaccctgtgttcagaccttgaatcacacagcaccgaagcagttctcggtgacgccctggtggatttctcactgaagctctaccatgcttttagtgcaatgaaaaaagtcgagacaaatatggcttttagcccattcagtattgcatcattgctcactcaggtcctcctgggggccggagagaacacaaagactaacttagaatccatcctctcctatcctaaagactttacctgcgtgcaccaggctctgaaggggtttaccacaaagggagtcacatctgtgtcccaaatcttccactccccggatctagctatcagggatacatttgtgaacgcgtctcggacactctacagctcttctcctagggtgctgtcgaataacagcgatgccaatctggagctcataaacacatgggtggccaaaaacacaaacaacaaaatctctaggctgctggactcactcccaagcgacacaaggctggtgctcttgaatgcaatatatctcagtgccaagtggaaaaccacttttgaccctaaaaagaccagaatggaaccatttcattttaagaactccgtgatcaaggtgcctatgatgaattcaaaaaagtaccctgtggctcactttatagatcagacactgaaggcaaaggttggtcagctccagctctcccataatttgtctttagtgattttagttccacagaatcttaagcaccgtttggaagatatggagcaggccctctcaccatcggtgtttaaagcgatcatggaaaaattggagatgtctaagttccaacctacactgttgacgcttccccgtattaaggtcacgactagtcaggacatgttatccattatggaaaagctggaatttttcgacttttcatacgatctaaatctgtgtggacttacagaggacccagacctccaagttagtgcaatgcaacaccagaccgtcctggagctgacagaaacaggcgtagaggctgctgctgccagcgctatctctgtcgcccggacactactagtcttcgaggttcagcagcctttcctattcgtcctttgggaccagcagcataagttccctgtgttcatggggcgagtttatgacccccgggca

SEQ ID NO: 19159 - DNA, 1500 bp, synthetic construct
  misc_feature 1..1500: note = source = /note="Description of Artificial Sequence: Synthetic coding sequence"
  source 1..1500: mol_type = other DNA
atggcctcgaggttgacactcttgactcttctgttgctgttgctcgccggagatcgtgcttcgagtaatccaaatgccacaagttctagctcccaggaccccgagagcttacaggatcgcggtgagggaaaggtggccacaactgtaatctccaaaatgttgtttgttgaacccatcctggaggtgtcaagtttacctacgaccaattccaccactaattccgccaccaagattactgctaacactactgatgagccaacaacccaacccactacagaacctacaacccagccaacaatccaacccacccagcccacgacacagctcccaaccgattcgccgacccagccaacaacaggctcattctgccccggccctgttactctgtgctcagacctagagtcccattctaccgaggccgttctgggtgatgcgttagtggatttttccctgaaactctatcatgccttttccgccatgaaaaaagtggaaacaaacatggcatttagccccttcagcattgcttccctgctcacacaggtgctgttgggagccggtgagaacacaaaaacaaacctggagtccattcttagctatcctaaggacttcacctgcgtgcatcaagccctgaaggggtttacaaccaagggcgtgacatcagtaagccagatcttccacagccctgacctcgccataagagatactttcgtaaatgcctctcgcacgctgtactcttcctcccctcgcgtgctttctaacaactccgatgcaaatttggagctcatcaacacctgggtagctaagaataccaacaacaagatttctaggctgctggattccctgcctagcgacaccagactggtgctgctgaacgcgatctaccttagtgcaaagtggaaaactaccttcgatcctaaaaagacgagaatggagccctttcactttaagaattccgttatcaaggttccaatgatgaacagcaagaaatacccggtggcacacttcatcgaccagacactgaaagccaaggtgggccagctgcagctgagtcataacctgtctctggtgatcctcgtgcctcagaatctcaagcaccggttagaagatatggagcaggcgctgtcaccttccgttttcaaggccattatggaaaaactggagatgagtaaattccaacccactctgctcacactgccccgcatcaaggttaccacaagtcaggacatgttatccatcatggagaaactcgagttctttgacttcagttacgacctgaacctgtgcggcctgacagaagatccagatctgcaagtgtcagccatgcagcatcagaccgtgcttgagctcacagaaactggagtagaagcagccgccgcctctgctatttccgtggcacgtactctcttggtttttgaagtgcagcagccttttctgttcgtgctgtgggatcagcagcacaagtttccagtgttcatgggccgtgtgtatgacccccgcgcc

SEQ ID NO: 19160 - DNA, 1500 bp, synthetic construct
  misc_feature 1..1500: note = source = /note="Description of Artificial Sequence: Synthetic coding sequence"
  source 1..1500: mol_type = other DNA
atggcttccaggctcactctgctgaccctcttgttgctgctgttagctggtgaccgggcctctagcaatcccaacgctacaagctcgtcgtctcaggatcccgagagtctgcaagataggggagagggaaaggtcgccacgactgttatatctaagatgctgttcgtggagccgatactggaagtctctagcctgccaaccacgaatagcactactaatagcgccactaagattaccgccaatacaaccgatgaacccacaacacagccaaccacagagcctacaacccaaccaactattcagccaacacagcccactacccagctgccgacagattcaccgacgcagcctacgactggatcattctgtccagggcctgtaactttgtgctcagatctggagtcccatagtactgaggccgtactgggagatgcactagtggatttcagcctgaagctctatcacgcttttagcgcgatgaaaaaagtagagaccaacatggcattctctcccttttctattgcaagtctcctgactcaggttctgctcggcgcgggggagaacactaagactaatctagagtctatcctctcttaccccaaggactttacttgtgtacaccaggctttaaaaggcttcacgactaagggggtcacctccgtgtcccagatctttcacagccccgacctggccattagagacacgtttgtaaacgcgtccagaactttgtactccagtagcccccgggtccttagcaacaactccgacgctaatctcgagctcattaatacctgggtcgccaagaataccaataacaagatttctaggcttctcgacagcctccccagcgatacaaggctggtgttactcaatgccatctatctgagcgctaagtggaaaacgaccttcgaccccaaaaaaacacgaatggaaccgttccattttaagaactccgtaataaaggtcccaatgatgaacagcaaaaagtatccagtggcccactttattgaccagacactcaaggcaaaagttggacagctgcagctttcacataatctgagcctggtgatcctcgtcccccagaacctcaagcaccggcttgaggacatggaacaggcgctgagtccaagtgtgtttaaggccattatggaaaaactggaaatgagtaaatttcagccgaccctgctgacactgcctaggataaaagttaccacctcacaagacatgctttctataatggaaaagctggagtttttcgactttagttacgacctgaacctttgtggcctgaccgaagatcccgacctgcaggtgtctgccatgcagcatcaaaccgtactggagctgaccgagacaggggtcgaagccgccgcagcaagcgccatcagcgtcgcacgaactctgctcgtgttcgaggtgcagcagcctttcctgttcgtgctatgggaccaacaacataagttccccgtgtttatgggacgggtctacgatcctagggcc

SEQ ID NO: 19161 - DNA, 1500 bp, synthetic construct
  misc_feature 1..1500: note = source = /note="Description of Artificial Sequence: Synthetic coding sequence"
  source 1..1500: mol_type = other DNA
atggctagtagattgacactgctgacacttctcctgttgctgctagccggtgaccgagcgtctagtaaccctaacgccacgagtagttccagccaggacccagaaagtcttcaagataggggcgaaggaaaagttgcgactacagtgatctcaaagatgctgttcgtggagccaatactggaagttagttctcttcccactaccaactctacaaccaacagcgctaccaagatcacagccaacactacagacgagccaaccacacagcccactacagagccaaccacccagcctacgatccagcctacacagcctacaacacagttgcccactgattccccaactcaacccaccacgggttcgttctgtccgggccccgtcaccttgtgctctgacctggagtctcatagcacagaggccgtgctaggcgatgccttagtagatttctcccttaaactataccatgccttctcagctatgaaaaaggtagaaacaaacatggcctttagtccgtttagtattgccagcctcctgacacaagtgctccttggagccggcgaaaacacaaagactaatctcgaatccattctgtcctacccgaaggatttcacttgcgtacaccaggccctgaagggtttcaccactaagggggtgacgtcggtctctcagatcttccacagccccgatctggcaatccgcgatacatttgtgaatgcctctcgcacactttattcttcctctccccgcgttctgtcaaacaacagcgacgctaatcttgaactgatcaatacttgggtcgctaaaaatactaataataagatctctaggctgttagattccttgccctccgatacacgcctggtgctactgaacgcaatttatctgtccgccaagtggaagactacctttgaccccaaaaaaacgcggatggagccattccattttaagaactccgtgataaaagtgcctatgatgaactcaaagaaataccctgtggcacacttcatcgaccagacactcaaggccaaggtggggcaactgcagctgtcccataacctgtccctggtaatactagttcctcagaatctgaagcaccggttagaggacatggagcaagccctgtcaccttccgtctttaaggctattatggaaaagctcgagatgagtaagtttcagcccacccttctgactctgccacgaattaaggttactacgtctcaagatatgctgtctatcatggaaaagcttgagtttttcgacttcagctatgatttgaatctgtgtgggctcaccgaggaccccgatttgcaggttagcgcaatgcaacaccaaaccgtgctggagctgaccgaaacaggagtggaggccgcggcagctagtgccatctctgtcgctcgcacactgctggtattcgaggtccagcaaccatttctattcgttctgtgggatcagcagcataaattcccggtctttatgggcagagtttatgaccctcgggcc

SEQ ID NO: 19162 - DNA, 1500 bp, synthetic construct
  misc_feature 1..1500: note = source = /note="Description of Artificial Sequence: Synthetic coding sequence"
  source 1..1500: mol_type = other DNA
atggcctccagacttactttactcactcttctcttgttgctgctggctggggatagggcttcttcgaatccaaacgcgaccagttcttcatcacaggacccggagtccctgcaggaccgaggtgaaggaaaggtggctaccactgtcatctccaaaatgctatttgttgaaccaatcttagaggtctcctccttgccaacgacaaacagcaccaccaatagtgctaccaagattaccgccaatacaacggacgagccgaccacacagcctaccactgaacctactactcagcctaccatccaaccaacacaacccaccacccagctgcccaccgattctcccacacagcctactactggaagcttctgtcctggccccgtgaccctctgtagtgacctcgaatcgcattcaactgaggccgtactgggcgacgcactggtggattttagcctgaaattgtatcacgcttttagcgccatgaagaaggtcgagaccaacatggcattctctcccttctctatcgcatccctgctgacccaggtcctattgggagccggtgaaaacaccaaaaccaatctggagtccatcctgtcctaccccaaggattttacctgcgtacatcaggcacttaaagggttcactacgaaaggggtgacctctgttagtcagatcttccattctcctgaccttgccatccgagacacctttgtgaacgccagccggacactctacagctcctctccacgggtgctgagcaacaattcggatgcgaacctggagttgatcaacacatgggttgccaagaacactaacaacaagatttccagactcttagacagtctgccttccgatacacggttggtcctgctaaacgccatatatctttccgccaagtggaaaacaacctttgatccaaagaaaaccagaatggaaccgttccactttaagaatagcgtcataaaagtccctatgatgaactctaagaaatatcctgtggcccacttcatcgatcaaactctgaaggccaaagtagggcagctgcagctttcgcacaacctcagcctggtgattctggtaccccagaacctgaaacaccgactggaggacatggaacaggctttaagtccctcagtcttcaaagcaatcatggaaaaattggaaatgagtaagttccaacctactttgttgacgctccctaggatcaaggtcaccacaagtcaggatatgctgagcatcatggaaaagcttgagttcttcgacttttcctacgacctgaatctctgcggcttgactgaggacccggacttgcaagtgagcgccatgcaacatcaaactgtgctggaattaacagagacaggagtagaagccgccgctgcatcagccattagcgtcgcccggaccctgctggtgttcgaagtgcaacagccgtttttgttcgtcctgtgggatcagcaacacaagtttcccgtgtttatgggcagagtctatgacccaagagcg

SEQ ID NO: 19163 - DNA, 1500 bp, synthetic construct
  misc_feature 1..1500: note = source = /note="Description of Artificial Sequence: Synthetic coding sequence"
  source 1..1500: mol_type = other DNA
atggcgtcgcgactaacccttttaacattgctgctgcttctgctggctggagatcgggccagttctaacccaaacgctacctcaagttcttcacaagatcctgaaagcctgcaagaccggggcgagggaaaggttgcgaccactgtgatcagcaagatgttgtttgtggagccaattctggaggtgtccagcctgccaacaacaaattccaccacaaatagtgctacaaagattaccgccaatacaacagatgaaccaacgacacaacctactactgagcctaccacacagccaacaattcaaccgacgcagccaactactcagctaccaactgattcaccaacacagcctacaactgggtccttctgcccgggccccgtaacactctgctcggacctggagtcacattctacggaagcagtcctaggcgacgccctggtcgattttagcctgaaactctatcatgcattttcagctatgaaaaaagtggaaactaacatggccttctccccattctccatagcttctctattgacccaggtactcctgggcgccggtgaaaatacaaaaaccaacttggaatccatcttgtcctaccccaaggacttcacctgcgtgcaccaggcacttaagggcttcacgaccaagggggtgacatctgtgtcccaaatttttcactcaccggatctggcaatccgcgacaccttcgttaacgccagccggactttgtatagctccagccctagggttttgtcaaacaactctgatgccaacctggagcttattaatacatgggtggcaaaaaacacaaataataaaatcagcaggttactggatagccttcctagcgacacacggttagtactgttaaatgccatttatctgtccgctaaatggaagaccacgttcgatcccaagaagacccggatggaaccattccacttcaagaattcagtgattaaggtgcccatgatgaattctaaaaagtatcccgtcgctcacttcatcgatcagacgttaaaggcgaaagtaggccagctgcagctgtcccacaacttatccctcgtcatcctcgtgccgcaaaatcttaaacatcgcctggaagatatggagcaggccctttctccatctgtgtttaaggcaatcatggagaagctagaaatgagtaagttccagcccacccttcttactttaccacgcattaaggtgaccacctcccaggacatgctgtctatcatggagaagcttgagttttttgacttctcctacgatctgaatctttgcggtttgacagaagaccccgacctccaggtgtccgcaatgcagcaccagactgttctggaactgaccgagaccggcgtcgaggcggccgcggccagcgcaatctcggtcgcccggacgttgctggttttcgaagtgcagcagccctttctgtttgtgctatgggatcagcagcacaagttcccggtgtttatggggagggtctacgatccaagagcg

SEQ ID NO: 19164 - DNA, 1500 bp, synthetic construct
  misc_feature 1..1500: note = source = /note="Description of Artificial Sequence: Synthetic coding sequence"
  source 1..1500: mol_type = other DNA
atggcttctaggttgacgctacttacactgctcctgttgctgctggcaggagaccgggcaagtagcaacccaaatgccactagctctagctcacaggatcctgaatctctccaggataggggcgaaggaaaagtggcaacaaccgtgatctctaaaatgttgttcgtggaaccaatcttggaggtctcgtctctaccaactacaaactccactactaactccgctacgaaaattaccgccaatactaccgatgaacccacgactcaaccgaccaccgagccaacaacccagccaacaatccagcccacccagcccactacacagcttcccaccgatagtcccacgcagccaaccaccggctccttttgcccaggccccgtgaccttgtgcagcgatttagagagtcacagcacagaagccgtgctgggcgacgcccttgtcgacttctcgctgaaactgtatcacgcgttttcggctatgaaaaaggttgagactaatatggcatttagtcccttcagtattgcatcactcctgacccaggtgctgttaggagcaggagagaatacgaagaccaatctggagagcatactgtcgtaccccaaggacttcacctgtgttcatcaggctctgaaagggtttactacgaaaggcgtgacatctgttagtcagatctttcatagcccagacctggccatcagagacacatttgtgaacgccagccggactctctatagtagctcaccccgagtgctgagcaacaacagtgatgcaaacctggaactcattaacacgtgggtcgctaagaacaccaataataagatcagtcgcctgctcgacagcctcccttccgatacaaggcttgtgctgctgaatgcaatctacttgtctgctaagtggaaaacaacttttgatccaaagaagacacgtatggagccatttcactttaaaaactcagtgataaaggttccaatgatgaacagcaaaaagtaccccgtggcccattttattgaccaaacacttaaagctaaagtgggacagctgcaattgagccataacctcagcctggtgattcttgtgccacagaatctgaaacacagactggaagacatggagcaagctttaagtccatctgtgtttaaggccattatggagaaactggaaatgtccaaattccaacctaccctcctgacactgccgagaattaaggtcaccacttcccaggatatgctgtctatcatggagaagttggagtttttcgacttcagctacgatcttaacttgtgcggtctgacggaagacccagacttacaggtgtctgctatgcagcaccaaaccgtgctcgagctgaccgagaccggtgtggaagctgcagctgcttcagcgatttccgtcgcacgtactttgctagtttttgaagttcaacagcctttcctctttgtcctgtgggatcaacagcacaaatttccagtgttcatgggcagggtctatgacccgagggcc

SEQ ID NO: 19165 - DNA, 1500 bp, synthetic construct
  misc_feature 1..1500: note = source = /note="Description of Artificial Sequence: Synthetic coding sequence"
  source 1..1500: mol_type = other DNA
atggcaagccgacttacgctactgacactgttgctgctactccttgccggggaccgtgcctcctctaatccaaacgccacatcctcatctagtcaggaccctgagtccctgcaggatcgaggagaggggaaggtcgctactactgtgatcagcaagatgctcttcgtggagcctatcctggaggtctcctcccttcccactaccaattccacaaccaatagcgcgactaagattacggccaataccactgacgagccgaccacccagcctacgaccgagccaactacccagcccacaattcagccaactcagccaactacccaactgcccaccgattcccccacgcagcccacaaccggctctttttgtcccgggcctgtgactctgtgttccgatttggagagccactcaaccgaggccgtcctcggcgatgcactggtcgatttctccctgaagttgtaccacgcattttcggctatgaagaaagtggagacaaacatggcctttagcccattcagcatcgcctcactgctgacccaggtcctgctgggcgctggtgagaacacaaagactaatctcgagagtatcctcagctatccaaaggacttcacctgtgtgcaccaggccctcaaaggatttacaaccaagggagtgacatccgtgagccagatctttcactcccctgacctggcaattcgtgatacattcgtaaacgcctcgaggacactctattcctcctctccccgagttctgagcaataactctgatgcgaatctcgagcttataaacacttgggtggccaagaatacaaataacaagatctcccggttgctggactctctgccttctgatacacgcctggtgttgctgaacgcgatctacctatcggctaagtggaaaacaacatttgacccaaagaaaaccaggatggagccgtttcatttcaagaacagtgttatcaaggtcccaatgatgaatagcaagaaatatcccgtggcgcattttatcgatcagaccctgaaggccaaagtcggacagttacaactatcgcataatctcagccttgtgattttagtgccccagaatcttaaacaccgcctggaggacatggagcaagccctgtctcctagcgtatttaaagccatcatggagaagctggagatgagcaaattccagcccactctgctgaccctaccaagaatcaaggtgacgacaagtcaggatatgttgagcatcatggaaaagcttgagttctttgactttagctatgacctgaacctctgtggcttaaccgaggatccagatctccaagtgagcgccatgcagcatcagaccgtcctggaattgaccgaaaccggtgtagaggccgcagctgcatccgccatttcagtggcccggacactcctcgtattcgaagtacagcagccatttttatttgtcctgtgggaccagcagcacaaattcccggtattcatgggccgcgtatacgatccacgggcc

SEQ ID NO: 19166 - DNA, 1500 bp, synthetic construct
  misc_feature 1..1500: note = source = /note="Description of Artificial Sequence: Synthetic coding sequence"
  source 1..1500: mol_type = other DNA
atggcttcccggctgacattgctgactctgctgctcctgctgctggccggagaccgggcgagttctaacccaaacgccacttcatcctccagccaggatcccgaaagtctgcaggatcggggagagggaaaggtagctaccacagtgattagcaaaatgttgttcgttgagccaatcctggaggtgtcctccctccctaccacaaactctactaccaattccgccacaaagattaccgcaaatacaactgacgagcctactacacagccaaccaccgagcccactacccaacctacaatccagcccacccagccgactacccagctgccaaccgacagccctactcagcccacaacggggagcttttgtccaggtcctgtaacactgtgctctgacctggagagtcacagcacagaagccgtgctgggcgatgccctcgtggacttttccctcaagctgtaccatgccttctctgccatgaaaaaggtcgaaacaaatatggctttttcccccttttccatcgcttcattgttgacacaggtgctcctgggagctggagagaacaccaaaacaaatctggagagtatcctgtcctatccgaaagactttacgtgtgtgcaccaggcactcaaggggttcacaaccaagggagtgactagcgtctcacagatctttcactccccggatctggcgataagggatacttttgtcaatgccagcagaaccctgtactcttcatctcctcgggtgctctccaacaatagcgacgccaatctcgagttgatcaacacctgggttgccaaaaacaccaataataaaatctccagactcctggattctctccctagcgacaccaggttggttctcctcaatgccatctatctgtccgcaaaatggaagacaacctttgaccccaaaaagacgcggatggagccctttcacttcaaaaattctgtaataaaggtgcctatgatgaactcaaagaagtatcctgtggcacactttatagaccagaccctgaaggctaaggtgggtcagctgcagttgagtcacaatctctctctcgtgatacttgtgccacaaaatctgaaacatcgcctggaggacatggagcaggctctctcaccatcagtgttcaaggcaatcatggagaagctggaaatgtcaaaattccagcctacccttctgaccttgccgcggatcaaggtgaccacatcccaggacatgctttctatcatggaaaagcttgaatttttcgatttttcctatgatctgaacctgtgtggactcacggaggacccagatctgcaggtgagcgccatgcagcatcagactgtgctggagctgactgaaacgggggtggaagccgccgctgcgagcgctatatcagtggccaggacacttctcgtgttcgaagttcagcaaccgttcctgttcgtcctgtgggatcagcagcataaattcccagtctttatgggaagggtgtacgaccctcgagct

SEQ ID NO: 19167 - DNA, 1500 bp, synthetic construct
  misc_feature 1..1500: note = source = /note="Description of Artificial Sequence: Synthetic coding sequence"
  source 1..1500: mol_type = other DNA
atggctagccgtcttacacttctcacacttctgcttcttctacttgcaggcgaccgagcctcatcgaatcctaacgccacatctagctctagccaggatcctgagtctcttcaggatcgaggggaaggaaaggttgctacaaccgtcattagcaagatgttgtttgtggaaccgatattagaggtgagctcacttccaacaacaaattcgacaaccaattccgcaactaaaattacagcaaataccacagatgagcctacgacccagccgacaaccgaacctacaacgcagccaactatccagccaacgcagcccacgacacagcttccaacagatagcccgacacaaccgaccaccggatccttttgtccgggccctgtcacattatgcagcgacctggaatcacactccaccgaggcggttctgggtgacgcattagtcgatttctcattgaaactttaccacgctttttcagcaatgaaaaaagtcgagacgaatatggctttttcccctttctccattgcctctcttctcacgcaggttttacttggcgctggcgagaatacgaagactaacctggaatctatcctttcatatccgaaggacttcacatgtgttcatcaggcattaaagggcttcacgacgaagggagttacttccgtcagtcagatctttcattcacctgatctcgcaatcagagatacatttgtaaatgcttcgcgcactctgtattcttcttctccgcgtgtgttaagtaataattcagatgcaaatctggaacttattaacacttgggttgcgaaaaacactaacaataaaattagtcgactcctagatagccttccgtcagatacaagattggtactgcttaatgctatttatctttcagcgaagtggaagaccacgtttgatcctaaaaaaacccgtatggaaccgtttcattttaagaacagtgtgatcaaggtgccgatgatgaattctaagaaataccctgtggcccattttattgaccaaacactgaaggcaaaagtcggtcagttgcagctctctcataacctttccttggtgattcttgtaccgcaaaatcttaagcatcgattggaagatatggagcaagcattgtctccctctgtatttaaagctataatggaaaaattggagatgtcaaaattccaacctacacttctgacactccctcgcattaaagttacaacatctcaggatatgttaagcatcatggaaaaactggagttcttcgatttttcgtatgacctgaatctttgtggcctcacagaagatccggatctccaagtctccgcaatgcagcaccagacggtcttggagcttacagaaaccggcgtggaagcagccgcagctagcgctattagcgtggctcggacattgctcgtctttgaagtacagcaaccatttcttttcgtcttgtgggatcagcaacacaaatttccggtctttatgggccgagtttatgatcctagagcg

SEQ ID NO: 19168 - DNA, 1500 bp, synthetic construct
  misc_feature 1..1500: note = source = /note="Description of Artificial Sequence: Synthetic coding sequence"
  source 1..1500: mol_type = other DNA
atggcctcccgactcaccctgctgacgttgctgctcttgctgctggcgggggatcgcgcgagttctaacccaaacgccacctcgtcctcgtcacaggatccggaatctctacaagaccgcggggaaggtaaggtggcgactaccgtgatctcaaagatgttattcgtggaacccattctcgaggtttcctcacttcctacaaccaatagcacaacaaactccgctactaaaataaccgctaataccaccgatgagcccacgactcagcccacgaccgaaccaacaacacagccgactattcagcccacccagcccaccacccaactaccaaccgattcaccaacacagcctacaactggtagtttttgcccaggccccgttaccttgtgttctgatcttgagtcccactccactgaagccgtgttaggagatgccctggtcgatttctctctcaaactgtatcacgcattctccgccatgaaaaaggtggaaaccaacatggcgtttagccccttctcaatcgcgtctctgctcacccaggtgctgctgggcgccggggaaaacaccaaaacgaacttggagtccatcctttcttacccgaaggacttcacgtgtgtacatcaagccctaaaggggtttacgacaaagggggttacaagtgtctcccagatttttcacagtcccgacctggccataagagatactttcgtaaatgcctccaggacactgtatagtagctcacctagagtcctttcaaacaacagcgacgcaaacttggaactcatcaacacctgggtggccaagaacacaaacaacaagatttctcgcttgcttgattcactgccctcggacactagactagtgctcttgaatgcaatctacttatccgccaagtggaagacaacattcgaccctaaaaaaacgagaatggagccattccattttaaaaatagcgtgattaaggtacctatgatgaactctaaaaagtatcccgttgcacatttcatcgaccaaaccctcaaggccaaagtgggccagctccagctttctcacaatctgtcactcgtaatcttggtgccgcagaatctgaagcaccggctggaggacatggaacaggcactgtctccaagcgtgttcaaagccatcatggagaaactcgagatgtccaagttccagccgaccctgctcaccttaccccgcataaaggtcacgaccagtcaggacatgctgtcgattatggagaagttagagttcttcgacttttcttacgacttaaatctctgcgggcttactgaggatcccgacttgcaggtctctgccatgcagcaccagaccgtgctcgagctcactgagacaggtgttgaagcagcagctgccagtgctatctctgttgctcgaaccctcctcgtgttcgaagtgcagcagccgtttctgttcgtcctgtgggatcagcagcataagttcccagtcttcatgggtagggtgtacgacccccgggcg

SEQ ID NO: 19169 - DNA, 1500 bp, synthetic construct
  misc_feature 1..1500: note = source = /note="Description of Artificial Sequence: Synthetic coding sequence"
  source 1..1500: mol_type = other DNA
atggctagccgtcttactctgcttactctgctgcttttattgctggcgggagatagggcctcatcaaatcccaatgcaacgtcctcttcatcccaggacccagagagtctacaggaccgcggcgagggcaaggttgctactacggtgatctctaagatgctgttcgtggaaccaatcctcgaggtctcgagcttgcccaccactaatagcactacaaattctgccacgaagataactgctaacactacagacgaacctacaacacagccaactactgaaccaactacccagccaactattcagccgactcagccgacgactcagctacccaccgacagcccgactcagcccaccactggaagcttctgtcccggacctgtgacactgtgttccgacttggagagccattcaaccgaagccgtcctgggggatgcgctggtcgatttctctctgaaattgtatcatgcatttagtgctatgaagaaagtcgagaccaatatggcctttagcccgttcagcattgccagtctgttaacccaggtactgctcggggccggtgaaaatactaaaaccaatctggaatcaattctgagctaccccaaggatttcacctgtgttcaccaagccctaaagggatttaccactaaaggagtaacttcagtaagtcagatcttccattctccagatttagccatcagggacacattcgtcaacgcctcgcgtaccctgtatagttcatcgcctagagttctctctaataatagtgatgcaaatttggagctgatcaatacctgggtggcaaagaatacaaataataagatatctagattgcttgattctctcccttctgacacgcggctggttctgcttaatgctatctatctctctgccaagtggaagaccacttttgacccaaaaaagactaggatggaaccatttcacttcaagaactctgtaatcaaagtgcctatgatgaactccaagaaatatcctgtcgctcacttcattgaccaaaccctgaaagccaaggtgggccagctacaattgtcccacaatctgagtctagtaatcctcgtcccacagaatctcaaacatagactggaggacatggaacaggccctgtccccctctgtgttcaaggccatcatggaaaagctggagatgtccaagttccagccaacactcttgactctcccgaggattaaagtgacaacatcgcaggacatgctgtctattatggaaaaacttgaattcttcgacttttcctatgacctcaacctttgcgggctgaccgaagatcctgacctgcaggtgtccgctatgcagcaccagaccgtgttggagctgacagagactggggtcgaggcggcagcagccagtgcaatcagtgttgccaggaccctattggtgtttgaggtccaacaacccttcctttttgtcctgtgggatcagcagcataagtttccagttttcatgggaagggtgtacgatccacgcgcc

SEQ ID NO: 19170 - DNA, 1500 bp, synthetic construct
  misc_feature 1..1500: note = source = /note="Description of Artificial Sequence: Synthetic coding sequence"
  source 1..1500: mol_type = other DNA
atggcctcaaggctaacactcctcacactgcttctattgctcctagccggggatagggctagttctaatcccaacgctacatcctcttcaagtcaggatcctgagtctttacaggatagaggggaaggaaaagtcgccactactgtgatatccaagatgctctttgtggagcctatcctcgaagtgtcatctctgcccactacaaattcaacaactaactccgcaacaaaaataacagcgaatacaactgatgaacctacaactcagcccacaacagaacctactacacagcctactatccagcccacacagccaactacacagttgcccactgactctcctacacaacccacaacagggtctttttgtcctggacccgtcacactgtgctccgacctggaatcacattctactgaagctgtcctcggagatgcactcgtggacttttcactaaaactgtatcacgcgttttcggccatgaaaaaagtagagacaaatatggctttctcccccttttccatagcctctctcctcacacaggtgctcctaggagcaggggagaatactaaaactaatctagaatctatcttgtcctatcctaaagattttacgtgtgttcaccaggccctgaaagggttcacaactaaaggggtaacatcagtttcccagatctttcattcccctgatcttgccatcagggatactttcgtgaacgcttcaagaactctgtacagttcttctcccagggtgttgtcaaacaactctgatgccaaccttgaattaattaacacatgggtcgccaaaaatacaaacaataaaatatctagactcctagattctttaccatcggatactcgcctagtgctactcaatgccatctatctgtcagccaagtggaaaacaacttttgatcctaaaaagacgcggatggagcccttccacttcaagaactccgtaatcaaagtgcctatgatgaatagtaaaaaatatccagtggcccattttattgatcagacactgaaggccaaagtggggcagcttcagctttctcacaacttatctttagtgatccttgtgccccagaaccttaaacatcggctggaggatatggaacaggctctctcccccagtgtctttaaagctattatggaaaagcttgaaatgtcgaaatttcagcctactctactgacactgcctaggattaaagtcacaacatcacaggatatgctctcaataatggagaaactcgagttttttgatttctcttatgatctcaacctctgtgggttaactgaagatcctgacttacaggttagtgcgatgcagcaccagactgtcctcgaattaactgaaactggggtagaagctgccgcagcttccgccatctccgtggctcggacactgcttgtatttgaagtccagcagccttttctattcgttttatgggatcagcagcataaattccccgtgtttatggggagggtgtacgatccacgggca

SEQ ID NO: 19171 - DNA, 1500 bp, synthetic construct
  misc_feature 1..1500: note = source = /note="Description of Artificial Sequence: Synthetic coding sequence"
  source 1..1500: mol_type = other DNA
atggcaagcagactgactctcctcacattgttactgttgttgctcgcgggcgatagggcctccagcaaccccaacgcgacaagtagttcctcgcaggacccagagtctcttcaggatagaggcgaaggaaaagtggctaccaccgtgatcagcaaaatgctctttgtagagcctatcctggaggtctcgtctctgcctaccaccaactcgaccacaaattcagccacaaaaatcaccgccaacaccaccgatgaaccaaccacccaacctactacagaaccaaccacacagccaacaatccagcccacacaacctacaactcaactgcctaccgatagcccaacgcaaccgaccacaggcagtttctgtcccggccccgtgaccctgtgcagtgatctggagagccacagtaccgaagctgtcctcggagacgccctcgttgacttttcactgaagctgtaccacgcatttagcgctatgaaaaaagtcgaaacaaatatggccttttctccttttagtattgcatcactgttgactcaggtccttcttggagcaggggaaaacaccaaaacaaacctggagtcaatactcagctacccaaaggattttacctgcgtccaccaagctctcaaagggttcaccacaaagggggtcacttccgtctctcagatcttccactctccagatctggctattcgggatacatttgtgaacgcttcacggactctgtatagcagctcccccagggtcctgagtaacaattccgacgcaaacctggaactgattaatacttgggtggcaaagaacactaacaacaagatctctagacttcttgactctctcccaagcgacacccgtctggtgctgctcaatgccatctatctgagtgctaaatggaaaaccaccttcgatccgaaaaaaacccgtatggagccttttcattttaaaaacagtgtgataaaagtccctatgatgaacagtaaaaagtatccagtggctcatttcatcgaccagaccctcaaagccaaagtggggcagctgcaactgtcccataatctcagcctcgtcatcttggtcccccagaacctcaaacatcgcttggaagatatggaacaagcgcttagcccatctgtatttaaggctatcatggaaaagctcgaaatgagtaagttccaacccacattactcacacttccacgcatcaaagtgaccacatcacaagatatgctgtccatcatggagaaactagagttctttgattttagctatgaccttaatctgtgcggccttacagaggaccccgatctgcaagtgtcggctatgcagcatcagactgtgctggagctgactgagacaggcgtggaagcagctgcagcgtcagctatcagcgtggctcgaacccttctggtgtttgaggttcaacagccttttctgtttgtgctgtgggaccagcaacacaagtttccagtgttcatgggcagggtttatgaccccagggcc

SEQ ID NO: 19172 - DNA, 1500 bp, synthetic construct
  misc_feature 1..1500: note = source = /note="Description of Artificial Sequence: Synthetic coding sequence"
  source 1..1500: mol_type = other DNA
atggcatcccgactcacactgctgacactgctgctgcttctgctggcaggagatcgggccagctccaaccctaatgcaactagttctagttcacaggatccagagtctctgcaggaccgaggcgagggcaaagtggccacaactgtcatctcaaagatgctgttcgtagagccaatcttggaagtgagctctctgccaacaacaaacagtaccacaaattcagcaactaaaatcacagccaacactacagacgagccaaccacgcagccaaccactgagcctaccacccagcctactatccagcccacacagcctaccacacaactgcccaccgacagtcccacacagccaaccacaggcagcttctgccctggccccgtgacactgtgtagtgacctggagagccattctactgaggctgtcctcggggacgccctcgtcgattttagccttaaactttaccacgccttttccgcaatgaagaaagtggagaccaatatggccttcagccccttctctatcgccagcttgttgactcaggtcctgctgggtgctggtgagaatacaaagactaatctggaatccattttgtcataccctaaagactttacctgcgtccaccaggccctcaaggggttcaccactaaaggcgtgaccagtgtcagccaaatttttcacagcccagacctggctatccgggacacgtttgttaacgcctcacgcaccctttacagttcttctcccagagttctgagtaacaattctgacgcaaatctggagctgattaacacatgggtggcgaagaatacaaacaataagatctctaggttgttggattccctgccaagtgacacgcggctcgtgctgctcaacgccatatatttgagtgcgaagtggaagaccacattcgacccgaagaagacaaggatggagcccttccattttaaaaacagcgttattaaggtgccaatgatgaacagcaaaaagtatccagtggcccatttcatcgatcagaccctgaaggctaaagtgggtcagctccagctcagccataatttgtctcttgtgatcttggtcccacagaacttgaagcaccggctcgaggacatggaacaagctctcagtcctagtgtgttcaaggcaataatggaaaagctggaaatgagtaagttccagccgacactcctgacattgcctcggattaaagtaaccaccagccaggacatgctgtctattatggagaaactggagttcttcgacttttcttacgacctgaacctgtgcggcctgaccgaggaccctgatctgcaggtttccgctatgcaacaccaaaccgtgctcgaactgaccgaaaccggcgtggaggccgcggccgcatctgccatctctgttgccaggacactgctggtgttcgaggttcagcaacccttcttgtttgtgctttgggatcagcagcacaaatttcccgtgttcatggggcgggtatacgacccaagggct

SEQ ID NO: 19173 - DNA, 1500 bp, synthetic construct
  misc_feature 1..1500: note = source = /note="Description of Artificial Sequence: Synthetic coding sequence"
  source 1..1500: mol_type = other DNA
atggcttctcgcttaaccctacttacgttgcttctgttgttactagctggagaccgagccagttctaatccgaacgctacctcctcctcctctcaggacccggaatctctgcaggacaggggtgaaggaaaagtggccaccactgtcatatctaaaatgttgttcgtcgagcctattttggaagtctccagccttcccactacgaatagtacaactaactctgcgaccaaaatcacggctaatactactgatgaacccacgacccagcccaccacagagcctactacccagcccacaatccagccaacccaaccaacaacccaacttcctacagacagtccaacccagccaaccacaggctctttttgtccagggcccgtcacactgtgctctgacctcgagagccactccacagaggcggtactcggagacgccttggtcgacttctccctgaagctgtaccatgccttttcagccatgaagaaggtggaaactaatatggcattcagtcctttctcaattgcatcactgctgacacaggtgctcctcggggccggtgaaaacacaaagaccaatcttgaatcaatcctgtcctatcctaaggactttacttgcgttcaccaggctttgaaaggctttactactaagggcgtgacgtcagtgtcccagatctttcacagcccagatctggctattagggatacttttgtcaacgcatcacggactttatactcttcatctcccagggttttgtcaaataacagtgatgccaatctggagcttatcaacacttgggtggccaaaaacacgaacaataaaatctctagattactcgattcactgccctcggacacaagattagtgttgctgaacgcaatctacctgtccgccaaatggaaaactacattcgatcctaaaaagactcgcatggagccctttcactttaaaaattcagtgataaaagtcccaatgatgaactcaaaaaagtacccagtggcacactttattgaccaaacccttaaagccaaagtcggccagctgcagctatcccataatttgtcactcgtcattttagtgcctcagaatctcaagcatcggcttgaagatatggagcaggcccttagtccctccgtgtttaaagccatcatggaaaagttggaaatgagcaagttccagcccactctcctgactctgccacggatcaaggtgacaaccagtcaggatatgttgagtatcatggaaaaactggagttcttcgacttcagctatgacctcaacctttgtgggcttaccgaggaccctgaccttcaagtgagtgccatgcagcaccagactgtcctcgaactgactgaaacaggtgtcgaagccgcggcagcttctgccatctccgtcgctcgaacacttctggttttcgaggtccagcagccttttctgtttgtgttgtgggatcaacagcacaaattccccgttttcatgggacgtgtatatgaccctagggct

SEQ ID NO: 19174 - DNA, 1500 bp, synthetic construct
  misc_feature 1..1500: note = source = /note="Description of Artificial Sequence: Synthetic coding sequence"
  source 1..1500: mol_type = other DNA
atggctagtaggctgactcttttgactctgcttcttcttctcttggcaggtgatagggctagttctaatccaaatgctactagctcaagcagccaagatcccgagtcattacaggataggggagagggaaaggttgcaactactgttattagtaagatgctgtttgtggagccaattctggaggtgtcttcgctaccaacaacgaactctacaactaacagtgctactaaaatcaccgcaaatactacggacgagccgactacacaacctactacagagcccacaacccagccaaccatacagccaactcagcctactactcaactgccgacagattctcctactcaacctaccactggctctttctgccctgggccggttactctgtgttccgatctcgagtcgcattcaactgaggctgttcttggggatgccttggtagatttttcacttaaactttatcatgcatttagtgcaatgaaaaaggtggaaactaacatggctttctctcccttctccattgcatcactccttactcaggtgcttcttggcgctggtgaaaacacaaagaccaacttggagtctatcctctcgtaccctaaagattttacatgcgttcatcaagcacttaagggattcacaacaaagggggttacgtccgtttcccaaatatttcactctccagaccttgctataagggacacttttgtcaacgcaagccgaacactatactcttcctcgcctagagtcttgagtaacaacagtgatgctaatttggagttaattaacacttgggtcgcaaagaacacgaataacaaaatttcaaggttactcgactcactcccctctgatacccgtctagttttacttaatgcaatttacctttcggctaaatggaaaaccacctttgatcctaagaagactagaatggaacctttccactttaaaaattcagtcatcaaagtgcctatgatgaactcgaaaaagtaccctgtggcacactttattgatcagacacttaaggccaaggttggccaattacaactcagccacaacttgtcattggttatactcgtgcctcagaatctcaagcacaggcttgaagatatggaacaagcactttcaccttcagtgttcaaggcaataatggagaaattggagatgagtaagttccagcccacattgctaacactaccgcgcattaaggttactacatcgcaagacatgttgagtattatggaaaaattagaattcttcgatttttcatacgatttgaacctttgcggattgactgaagatcctgacctgcaagttagtgccatgcaacatcaaactgtgcttgaattgaccgaaactggtgttgaagcggctgctgcgtctgctataagcgtcgcacgaacacttctagtattcgaagttcaacaaccttttctcttcgttttgtgggatcaacaacataagttccctgtttttatgggaagagtttatgacccccgagcg

SEQ ID NO: 19175 - DNA, 1500 bp, synthetic construct
  misc_feature 1..1500: note = source = /note="Description of Artificial Sequence: Synthetic coding sequence"
  source 1..1500: mol_type = other DNA
atggcttcccgcctgactctgctgacactactcctattactactggcgggtgacagggcaagctccaatccaaacgccacctctagttctagtcaggaccctgagtcacttcaggatcgaggggagggtaaggtggctaccacagttatctctaaaatgctgtttgtggaacctatactggaggtatcctccctacccactacaaactccactaccaattccgccactaagataactgccaacactaccgacgaaccgacaacacagcctactactgagcccactacccagccaacaattcagcctacacagcctaccactcaactccctacagacagtcccacacaacccacgactgggtcattctgtcccgggccagtcaccctctgttcagatctggagtcacatagtactgaagccgtgctcggggacgccctggtggatttcagcctgaagctctatcacgcattctctgccatgaagaaagttgaaaccaacatggccttctcgccattctccatcgcttcgctgctcactcaggtactgcttggtgctggagagaatactaaaactaatttagaaagtattctgagctatcctaaggacttcacctgtgtgcaccaggccctgaagggattcaccaccaagggggtcaccagcgtgagtcagatatttcacagccccgatttagccatcagagatacattcgttaacgcatctcgtaccctctattctagctctcctcgcgttctgtccaataattccgatgctaatcttgagctgataaacacctgggttgccaagaataccaataataagatctcgaggctcctagactccctgccctcggacacccggctggtccttcttaacgccatttatctctctgcgaaatggaaaacaactttcgaccccaaaaagacacgaatggagccctttcattttaagaattcggtgatcaaagtgccaatgatgaatagcaaaaagtatcccgttgctcacttcatagaccagaccctgaaggcaaaggttggacagctgcaacttagccataatctgagtctggtgatccttgttccccagaatctgaaacaccgcttagaagatatggaacaggctcttagtccatctgtattcaaggcgatcatggaaaaactggagatgtctaaatttcagcccaccttgctgaccttaccgaggatcaaagtgactacttctcaggatatgctgtccataatggaaaagctggagtttttcgacttctcatatgatctgaatttgtgcgggctgacagaagaccctgatctgcaggttagtgctatgcagcatcagaccgtattggagcttaccgaaacaggagtcgaggccgctgccgcgtccgctatttctgttgcaaggacactgttggtctttgaagtccagcagccttttctgtttgtcctctgggaccagcagcacaagtttccagtattcatggggcgcgtgtatgatccccgcgct

SEQ ID NO: 19176 - DNA, 1500 bp, synthetic construct
  misc_feature 1..1500: note = source = /note="Description of Artificial Sequence: Synthetic coding sequence"
  source 1..1500: mol_type = other DNA
atggctagccgactgaccctcctgaccctgctcctgttgttattagccggagatagagccagttccaatccaaatgctacaagcagttctagtcaagatcctgagtccctccaggatagaggggagggaaaagtcgctaccacagtcatcagcaagatgctgtttgtcgaaccgattctcgaagtgtccagcctgcccactacaaatagcactacgaattccgccactaagatcacagccaatactaccgacgaacctacaacccaaccaacgacggaaccaactacacagcccaccatacagccaactcagcctacaacgcagctgcctactgactcaccaacgcagcccactactggctctttctgcccggggccagtcactctctgtagcgaccttgaaagtcacagcaccgaggctgtgctcggagatgcacttgttgacttctccctgaagttataccatgctttctccgctatgaagaaagtagagactaatatggccttttcgcccttctctatcgcttcactgctgactcaagtgctcttaggggctggtgaaaacaccaagacgaatctggagtctattctctcgtaccctaaggactttacctgtgtgcatcaagctctgaaggggttcactaccaagggagtgaccagtgtgtcccaaatttttcattcgccagacttggctatcagggatacctttgttaatgctagccgcactctatatagtagctctcctagggtgctctctaataactccgacgcgaacctggagttaatcaacacatgggttgctaaaaacactaacaataagatatctagattactcgattctttgccatcagataccaggcttgtgttgctcaacgcgatctatctgagtgctaagtggaagaccacatttgaccctaagaaaaccaggatggaaccttttcatttcaaaaacagcgtgatcaaagtgccaatgatgaactctaagaaatatcccgtagcgcacttcattgatcaaacccttaaagctaaagtggggcagctccagctgtctcacaacctgtcgctagtcatcttggtcccacaaaaccttaagcacagactagaggatatggaacaagccctttctccttcagtgtttaaagcgatcatggaaaaattagaaatgagtaagttccagccaacgttactgacactgccccggattaaagtgacaacatcacaggacatgttgtcaattatggagaagctggagttcttcgatttctcatatgacctcaatctctgcggtctgacagaggaccccgacttacaagtttccgccatgcagcatcagactgtgctggagttgaccgaaactggagtggaggccgcagccgctagtgcgatctcagtcgcaaggacgctgctggttttcgaggtgcaacagcccttcttgtttgttttgtgggaccaacaacacaagttccccgtttttatgggcagagtgtatgatccacgggcc

SEQ ID NO: 19177 - DNA, 1500 bp, synthetic construct
  misc_feature 1..1500: note = source = /note="Description of Artificial Sequence: Synthetic coding sequence"
  source 1..1500: mol_type = other DNA
atggcctctcggctgacactgctcaccttacttctgttgctgctggcaggggatcgagcctccagcaatcctaacgccaccagttctagctctcaagatcccgaaagcctacaggatagaggcgaagggaaagtagcaacgactgtaatttcaaagatgttgtttgttgaacctatcctggaggtgtcatccctgccgaccaccaacagtactaccaatagcgctaccaagattacggcgaatacaaccgacgagcccactacccaaccaactaccgaaccaaccacacagccaaccatacagcctacacaaccgaccacacagctgcctacagacagccccacccagcctacgactggcagtttttgccctgggcccgtgactctgtgtagcgatctggaatcacattctacagaggcagttttgggcgacgcactggtggacttcagcctgaaattataccacgcattttcagctatgaaaaaggttgagaccaatatggctttttcaccattctccatagcttcactgcttacccaggtgttactgggggcaggcgaaaacaccaagacaaatctggagtctatcttgagctatccaaaagattttacctgtgtgcaccaggcactcaaggggtttactacaaagggcgttactagcgtctcacagattttccactcaccagatcttgccatacgggacaccttcgtgaacgctagccgcaccctttattcctctagtccaagagtgttgtccaacaattcagatgccaacttggaattaataaacacgtgggtagcgaagaacacaaacaacaaaatctcgaggctgctcgattcacttccgtctgacactcgtctcgtgttgcttaacgctatttatttgagcgccaagtggaaaacgacctttgatcccaaaaaaacgcggatggaaccatttcacttcaaaaactccgttataaaggttcccatgatgaactcgaagaagtacccagtggcccatttcatcgatcagaccctcaaagccaaagtgggccagctccagctgagccacaacctcagtctcgtcatcctggtgccccagaaccttaaacacagactcgaggatatggaacaggctttatcaccatccgtcttcaaagccatcatggagaaactggaaatgtcaaaatttcagcccactctcctgacccttcctcgcatcaaggtgacaaccagtcaggacatgcttagcataatggaaaagctggaattttttgactttagttacgatttgaatttgtgcgggctgacagaagaccctgatctacaggtctctgcgatgcagcatcagaccgtcctcgagctgactgagaccggtgtggaagctgctgccgcctccgctatctccgttgcgcgcactctcctcgtgttcgaggtgcagcagcccttcctctttgtcctgtgggaccagcagcacaagttcccagtctttatgggacgcgtgtatgatccccgggct

SEQ ID NO: 19178 - DNA, 1500 bp, synthetic construct
  misc_feature 1..1500: note = source = /note="Description of Artificial Sequence: Synthetic coding sequence"
  source 1..1500: mol_type = other DNA
atggccagccggcttaccctcctgaccctgctgctcctcctgctggccggtgaccgggccagcagtaaccctaatgccaccagttcgagctcgcaggatccggagtctcttcaagaccgtggagagggaaaagtcgcgaccactgtgatttccaagatgctgttcgtggaacccattctcgaggtttcatccttgcctacaaccaattcaacaaccaatagcgcaaccaagatcactgcaaatactacagacgaaccaacaacacagcccactacagagcctaccacacagcccacaatccagccaacgcagcctaccacacagcttccaaccgactctcccacacaacctacgaccgggagcttttgcccgggacccgtcactctatgcagtgatctggaatcccactcaactgaagccgtacttggagatgcccttgtggatttctcactaaagctctatcacgccttttccgccatgaagaaggtggagacaaatatggctttttcccccttttcaattgcttctctgctcacgcaggtgctcctcggcgccggagagaacactaagaccaatcttgaatctattctttcatatccgaaagacttcacatgcgtccaccaagccttaaaggggtttacaaccaaaggggtgacttcagtgtcacagatttttcacagtccggacctcgcgatcagggacaccttcgtaaatgcgtctcgcaccctgtactcttcatccccaagggtgctgtccaataacagcgacgccaatttagaactaatcaacacttgggtagcgaagaacaccaacaacaagatctcccgtttgctggattccttgcccagcgatacccgactggttctccttaatgctatatacctttccgccaagtggaagacaaccttcgatcccaaaaagacaaggatggaacctttccactttaagaactctgtgatcaaggtaccgatgatgaactctaagaagtatcccgtggcccattttatcgaccagacattgaaggccaaggtcggccagctccaactatcacacaatctctcgctggtgatactcgttccccagaatctgaaacaccgcctggaagatatggagcaggccctgagcccttctgtgttcaaggctattatggagaaactggaaatgagcaaatttcaacccaccttgttgacccttcctcggatcaaggtgactacctctcaggacatgctgtcaattatggagaagctggagttttttgacttctcctatgacctgaacctgtgcggccttaccgaggacccagacctgcaggtgagcgccatgcaacaccagacagttcttgaactgaccgaaactggtgtggaggctgccgccgccagcgcaatttctgtggccaggacactgctggtttttgaggtacagcagccgtttctgttcgttctgtgggaccagcagcataagtttccagtgtttatggggagggtttatgacccccgcgcc

SEQ ID NO: 19179 - DNA, 1500 bp, synthetic construct
  misc_feature 1..1500: note = source = /note="Description of Artificial Sequence: Synthetic coding sequence"
  source 1..1500: mol_type = other DNA
atggcctcacgcctgactctgttgactctgttgcttctgctgttggccggtgatagagccagttccaaccctaacgcaacctcttcatcttctcaggacccagaatcactccaggatcgcggtgagggtaaagtggctactaccgtcatttctaagatgcttttcgttgagcctattcttgaagtgtcctctctgcctaccactaatagcacaaccaactctgccaccaagattacagccaatactacagacgagcccaccacacagccaactactgaacctaccacccagcctactatccagcctacccaacctactactcagctgcccactgattcccctacacagcctacaaccggatccttttgtcccggtcctgttactctgtgctcagaccttgagtcccacagcaccgaagcagtccttggcgacgctttggtggatttctcacttaagctctatcacgccttctccgccatgaagaaggtcgaaacaaacatggcattttccccattctccatcgccagcctgctgactcaggtgctccttggagcaggagaaaataccaagaccaacctggaatctatactgtcctaccccaaggacttcacctgcgtgcatcaggccctcaagggttttacaaccaaaggcgtcacatccgtgtcacagattttccatagtcccgatctggctattcgcgatactttcgtcaacgctagcagaacactttattcttctagccccagagtgttgagtaacaacagcgatgccaacctggaactcataaacacctgggtggccaagaataccaacaacaagatcagcagactgctggatagtctcccctcagacacaaggctggtactgctgaacgcaatttacttgtccgccaaatggaagactacatttgacccaaagaagacaagaatggaaccattccacttcaagaattccgtcatcaaggtgcccatgatgaacagcaagaagtaccccgtagcacatttcatcgatcaaaccctgaaagctaaggtgggacagctgcagctgtcccacaatctctcattggtgattctggtacctcagaatctgaagcaccgtctggaggatatggaacaagcccttagtccctcagtgttcaaggccatcatggagaagctggagatgtcaaagtttcagcccaccttgctcaccctccccaggatcaaggtcaccacctcacaagacatgctgtccattatggagaagttggagttctttgacttttcctacgatcttaacctgtgtggccttaccgaggaccctgatcttcaggtcagtgccatgcaacaccagaccgtgctggaactgactgagactggcgtcgaggcagctgctgcctctgctatttcagtggctagaacccttcttgtgtttgaggttcagcagcccttcctgttcgttctgtgggaccagcaacataagtttccagttttcatgggtagggtgtatgatccaagggcc

SEQ ID NO: 19180 - DNA, 1500 bp, synthetic construct
  misc_feature 1..1500: note = source = /note="Description of Artificial Sequence: Synthetic coding sequence"
  source 1..1500: mol_type = other DNA
atggcatcccggctgacgctgctaaccctgctcttattgttgctggccggtgatagggccagctctaaccctaacgcgacctccagcagctcccaggatccggaatcactgcaagatcggggagaaggaaaggtggcaaccactgtgatctctaagatgctatttgtcgaacctatcctggaggtttctagcctcccaactaccaactccaccaccaactccgctacaaagatcactgccaacaccaccgacgaacctaccacacagccaacaacagagccgaccacacagcctaccatccagcctactcagcccactacccagttgcccaccgactcacccactcagccgactactggcagcttctgtccgggccccgtcacgctttgcagtgacctcgagtcacactctaccgaggccgtgcttggtgacgcattggtcgacttctccctgaaactgtaccacgctttctccgctatgaagaaagtggaaactaacatggctttttctcccttctctatcgcttctttgctgacgcaggtgctcctcggcgcgggagaaaatacaaagaccaacctggagtcgattcttagttacccaaaggacttcacctgcgtccaccaggccttgaagggatttaccaccaaaggggtgacttctgttagtcagattttccactctcccgacttggcaataagagacacatttgtaaacgcttcacgcaccctttattcatcatcccctagggtcttgtctaacaattctgacgcaaatttggaattgattaacacctgggtggctaagaataccaataacaagatatctcgcttgctggatagcctaccatccgacacccgtttggtacttttgaatgccatctatctatccgctaaatggaagacaacttttgacccgaaaaaaacccggatggagccctttcacttcaagaattccgttattaaagttcctatgatgaattctaagaagtaccccgtcgctcatttcatcgaccagaccctgaaggctaaggtgggacagttacagctcagtcacaacctcagcctcgtgatcttggttccccagaacctaaagcaccggctcgaggacatggaacaggctctgtccccgagcgttttcaaggctatcatggagaaactcgagatgtccaagtttcagcctactcttctcactttacctcgtatcaaagtaaccacgagccaggatatgctgagcatcatggaaaagttggagttctttgatttcagctacgacttaaatctttgcgggttgactgaagatcctgacctgcaggtgtcggccatgcagcaccagaccgtcttggagcttactgagaccggagtggaagcagctgccgcatcagccatcagtgtggcgaggaccctactggtgttcgaagtgcagcagccgtttctgtttgtactgtgggatcagcaacataaatttccagtgttcatgggcagagtgtatgacccccgggcc

SEQ ID NO: 19181 - DNA, 1500 bp, synthetic construct
  misc_feature 1..1500: note = source = /note="Description of Artificial Sequence: Synthetic coding sequence"
  source 1..1500: mol_type = other DNA
atggcctctagactgacattgctaaccctgctcctcttactgctggctggagaccgcgccagttccaatccaaacgcaacaagcagttcctcccaggatcccgaatctctgcaagatagaggtgaggggaaggttgccacaactgttatctccaaaatgctgttcgtggaaccaatcctcgaagtgagctctctaccaactacaaacagcaccaccaactctgctaccaaaataactgcaaacacaaccgacgagcctacaacccagcccacaacagaaccaacaacacaacctactatacagccaacccaacctaccacccagcttcccactgattcacccactcaaccaacaactggatccttttgtccaggccctgttaccctttgttccgatctggagtcccactccaccgaagctgtcttgggcgatgccctggtggactttagtctgaaactttaccatgcatttagtgccatgaagaaggtggagacaaatatggctttctccccatttagcatcgcttctttactgacccaagttctcctgggggcaggggaaaataccaagaccaacctagagtctattttgtcttatccgaaggactttacctgtgtacatcaggctctgaaaggctttacaaccaagggcgttacctccgtttcccagatcttccactctcccgacttggctattcgggacacatttgtcaatgcctccagaacactatattcttctagcccccgtgtgctgtccaataacagtgatgcaaacctggaacttattaacacctgggttgccaagaataccaacaataagataagtaggctcctggactcccttccaagcgacacacggctagtcctactgaacgctatttacctgtccgcaaaatggaagaccacatttgatccaaagaagaccaggatggagcctttccattttaaaaactctgtgatcaaggtgcccatgatgaactctaagaagtatcccgtggctcactttattgatcagaccctgaaggctaaagtgggtcagctacagctgtctcataacctgagtctggtcattctagtcccacagaatctaaagcatcggttggaggacatggagcaagctctgtcaccatccgtgttcaaagccattatggaaaaattagagatgtccaagtttcagccaactctgctcactctgcctagaataaaggtcacaacaagccaggacatgctgagcatcatggaaaagctggagttctttgatttctcctatgatctgaacttatgcggtctgaccgaggatccagaccttcaagtttccgccatgcaacaccagacagttctagaactgactgagacaggtgtagaggccgctgcagcctcagccataagcgtggcccgcactctcctagtgtttgaagtgcaacagcctttcctctttgtgctttgggaccaacagcataagtttcccgtgttcatgggcagggtctacgatccaagggct

SEQ ID NO: 19182 - DNA, 1500 bp, synthetic construct
  misc_feature 1..1500: note = source = /note="Description of Artificial Sequence: Synthetic coding sequence"
  source 1..1500: mol_type = other DNA
atggcatctcgtctgactttgcttacgttgctgctcttacttctcgcaggagatcgtgcttcatcgaatcccaatgcaacgtctagcagctctcaggatccggaaagtctgcaagaccgtggtgagggaaaggttgcaaccactgttatttcgaagatgctgtttgttgaaccaatcttggaagtttcgtccttaccaactacaaactccactactaattcagctaccaaaataactgccaatacaacagacgaaccaacaacgcaacctacgacagaaccgactactcaaccaactattcaaccaacgcaaccaacgactcaattaccaaccgattccccaacgcaacctacaacgggatcattttgtccaggcccagttacgctgtgttccgacttggaatctcattcgacagaggccgttttgggtgatgcattagttgatttctccctaaaactatatcacgccttctcagcgatgaaaaaggttgaaaccaacatggcattcagtcctttctcaatagctagtctgttgactcaggtccttttaggagcaggtgagaacactaaaactaatcttgaatcaatcctgtcatacccaaaggattttacctgcgtgcaccaggcgctgaaaggatttactacaaagggagttacgtcagtctcacaaatttttcatagcccagatcttgccatacgggatacttttgtgaatgcatctcgtaccttgtacagttcttccccaagggttttgagtaataattcagacgctaatcttgaattaattaatacatgggtggctaaaaacacaaacaacaagatctcgcgattgctggactcattgccatccgataccagactggtccttctgaatgcaatatatctctcggcaaagtggaaaactaccttcgatccaaaaaaaacacgaatggaaccattccactttaaaaacagcgtcataaaagttccgatgatgaattcgaagaagtatccagtagcacacttcattgatcaaacactgaaagcaaaagtaggtcaattgcaactcagccataatttgtctctggtgattctggtcccacaaaatctgaaacacagattggaagatatggaacaggccttgtcaccgtccgtattcaaggccatcatggagaagctggaaatgtccaaatttcaaccgactctcctgacattgccacgtataaaggttacgactagccaagatatgctatcgataatggaaaagttagaattctttgattttagttacgatctaaacctgtgcggacttactgaagacccggatctgcaggtgtccgccatgcagcatcaaaccgttttagaattgactgaaacaggggtcgaggccgcagctgcatcagcgatttcagtcgcccgcactctcctagtatttgaggtgcagcagccattcctttttgttctgtgggatcaacagcacaaattcccggtgttcatgggccgtgtgtatgatccacgtgct

SEQ ID NO: 19183 - DNA, 1500 bp, synthetic construct
  misc_feature 1..1500: note = source = /note="Description of Artificial Sequence: Synthetic coding sequence"
  source 1..1500: mol_type = other DNA
atggcttcaagattaactttattaactcttttattattacttttagcaggtgatagagcatcaagtaatccaaatgcaactagttcatcatcacaagatccagaatctttacaggatcgaggagaaggaaaggttgccacaaccgtaattagtaagatgttatttgtagagccaatcttagaagtatcttcactcccaacaactaattcaacaactaattcagctacaaaaattactgcaaatactacagatgaaccaacaacacaaccaactactgaaccaacaactcaaccaactatacaaccaactcaaccaacaacacaattacctactgatagtccaacacaaccaacgactggttcattttgtccaggtcctgtcactttatgtagtgatttagaatcacattcaacagaggctgttttaggagatgcattagttgatttttcattaaaattatatcacgcattcagtgctatgaagaaagtagaaactaatatggctttctctccattttcaattgcatcattattaactcaagtacttttaggagcaggtgaaaatactaagactaatttagaaagtattctttcatatccaaaggattttacatgtgtacatcaggctttaaaaggtttcacaacaaaaggagtaacatcagtcagtcagatttttcattctcctgatttagctattagagatacatttgttaatgcaagtagaactctttattcttcttcaccaagagttctttcaaataattcagatgctaatttggaattgattaatacttgggttgctaaaaatactaacaataagatttcaagattacttgattcattaccatctgatactcgtcttgtcttgttaaacgctatatatttaagtgcaaaatggaaaactacatttgacccaaaaaaaacaagaatggaaccttttcattttaaaaattcagtaattaaagttcctatgatgaactcaaaaaaatatccagttgcacattttattgaccaaacacttaaggccaaggttggacaattacaattatcacataatttatcacttgttattttagttccacaaaatttaaaacatagacttgaagatatggagcaagctctttcaccttctgtttttaaggctataatggaaaaattggaaatgagtaaattccaaccaacacttttaacattacctaggataaaggtaacaacttcacaagatatgttatcaattatggaaaaacttgaattctttgacttttcatatgatttgaacctttgcggattaactgaggacccagatttacaggtgtctgcaatgcaacaccaaacagttcttgaattaacagaaactggagttgaagcagccgcagcatctgcaatttcagttgcaagaactttacttgtttttgaagtacaacaaccatttttatttgtattatgggaccaacaacataagttcccagtatttatgggtagagtctatgatccaagagct

SEQ ID NO: 19184 - DNA, 1500 bp, synthetic construct
  misc_feature 1..1500: note = source = /note="Description of Artificial Sequence: Synthetic coding sequence"
  source 1..1500: mol_type = other DNA
atggcgtcccgtctgaccctgctgacccttctcctcctgctgctcgcgggcgaccgtgcttcctctaaccctaacgcgaccagctcctcctctcaggatccagagtccctgcaagaccgcggtgagggaaaggtagcgactacggttatctctaagatgctattcgtggagccgatcctggaggtttcttcgttgcccactaccaactccacgacgaactctgcgacaaaaataacggccaatactacggacgagcccacaacccagcccacaactgagcccaccacgcagcccacaatccagccgacccaacccacaacgcagctccccacggactcccctactcaacccactacaggatccttctgcccgggcccggttaccctctgttccgacttggaatcccactccaccgaggctgtcctcggcgacgccttggtggatttttccctcaagctctatcatgctttcagcgctatgaagaaggtcgaaactaacatggcattctcgccgttctctatcgcgagtctcctgacccaggtcttgctgggtgccggtgagaacactaagaccaacctcgagagcatcctctcttaccccaaggactttacatgtgtccaccaggcactgaaaggcttcactaccaagggtgttacctccgtgtcgcaaattttccactccccggacctcgcaatccgggatacttttgtaaacgccagtcggacgctgtactcctcctccccccgtgtcctcagcaataactctgacgccaatctcgagctcattaacacctgggtcgctaagaacaccaacaataagatttcccgcttgctcgactccctgccctccgatactcgcttggtcctcctgaacgcaatctacctgtccgcgaagtggaagacaaccttcgatcccaaaaaaacccgtatggaaccctttcacttcaagaattccgtaatcaaggtccctatgatgaacagcaagaagtatcccgtagcccactttatcgaccagacgctcaaagcgaaggtgggccagctgcaattgtcgcataacttgtcgctcgtcatcttggtcccccaaaatctcaagcaccgtctcgaagacatggaacaggccctctcccccagtgtgtttaaggcgatcatggagaagctggagatgagcaagtttcagccgacattgcttacccttccacgcattaaggtgacaacttcccaagacatgctgtcaatcatggagaaactcgagttctttgacttcagttacgacttgaatctgtgcggtctgactgaggatcccgacctgcaggtcagtgcaatgcagcaccaaacggttctggaactcaccgagacgggagtggaagccgcagccgcgtccgccatctcagtcgcccgtactctgctcgtcttcgaagttcagcaacctttcctgtttgttctctgggaccaacagcacaagtttccggtcttcatggggcgtgtgtacgatccgcgagcc

SEQ ID NO: 19185 - DNA, 1500 bp, synthetic construct
  misc_feature 1..1500: note = source = /note="Description of Artificial Sequence: Synthetic coding sequence"
  source 1..1500: mol_type = other DNA
atggctagtcggctgacactattgacccttttactgttgctgttggccggcgacagggcgtctagtaatcctaatgcaaccagttcatcaagccaagaccctgagtccctgcaggacaggggagagggcaaagtggctacgactgtgattagcaagatgctgtttgtggagcccatcctagaagtcagctccctcccgaccaccaattctacaactaactctgctacgaagatcaccgcaaacaccaccgatgaaccaaccacccaaccgacaacagagccaacaacacaaccaacaattcagccaacccagcccacaacacagctccctacagacagccccactcagccaaccaccgggtccttttgcccaggcccagtgacactttgctctgacctggaatctcactcaaccgaggccgtactcggtgatgcacttgtcgacttttctctcaagctgtaccacgctttttcggctatgaagaaagttgaaaccaatatggcatttagccctttcagcatagcttctctgctgacgcaggtactgcttggtgccggagagaatactaaaaccaatctcgaatctatcctctcatatcctaaggactttacctgtgtccatcaagccttgaaaggatttactactaaaggggtgaccagcgtgtctcaaatctttcactccccggacctggccatcagagatacatttgtcaatgcctcccggaccctgtactcatcaagccctcgagtactgagcaataacagcgacgccaacctggagctgataaatacctgggtcgctaagaacaccaataataagatatcccgactgctggactcattgccatccgacaccaggcttgtattgctcaatgccatctatctgtccgccaagtggaaaaccacctttgaccccaagaaaacccgcatggagcccttccacttcaaaaatagtgtaattaaggtgcccatgatgaattctaagaagtatccagtggctcacttcatagatcagactttgaaagccaaagttggtcagttgcagctaagtcacaatctctccctcgttatcctggtgcctcaaaacctgaaacacaggttggaagacatggagcaagcgctgtctccgtctgtgttcaaagccatcatggaaaagctcgaaatgagcaaatttcagccgacccttttgaccctgcccaggattaaggtaaccaccagtcaggatatgctgtctattatggagaaactggagtttttcgatttcagttatgatctgaacctgtgcgggctcacagaggaccccgaccttcaggtgagcgccatgcagcaccagacggtcctcgaactgactgagaccggggtggaagcggccgcggcatcagccatatccgttgctcgaacactcctggtgtttgaagtccaacaaccctttttgttcgtgctatgggatcaacagcacaagttcccagtcttcatgggccgtgtctacgatccccgagct

SEQ ID NO: 19186 - DNA, 1500 bp, synthetic construct
  misc_feature 1..1500: note = source = /note="Description of Artificial Sequence: Synthetic coding sequence"
  source 1..1500: mol_type = other DNA
atggccagcaggctgactttgctgactctgctgctcctattgcttgccggcgatcgtgcaagttcaaatcccaatgctacctcatcttcctcccaggaccctgagtcgttgcaggacagaggggaaggcaaggtcgccacaaccgttatttcaaagatgctcttcgtggagcccatcttggaagtgtcctcattgccaaccacaaacagtaccaccaattcagctactaagatcactgcaaataccaccgatgagccgacaacacagccaaccaccgaacccaccacacaacctactattcagcctacccaacccaccacgcagctgcccacagatagtccaactcagcctaccactgggtccttctgcccaggccctgtcacactctgctccgatctggaatcccactctaccgaggccgtgctgggagatgctctggttgacttctccttgaagctctatcacgctttttcagccatgaagaaggtggaaaccaacatggctttctctcctttcagcatcgctagtctgctgacacaggtgctattgggagcaggagagaataccaagacaaacctggaaagcatcttgtcttatccaaaagatttcacgtgcgtccatcaggccctgaaaggttttacaactaagggtgtgacatcagtaagccaaatcttccactcccctgatctggccatccgcgataccttcgtcaatgcctcacgcactctatattctagctctccaagggttctgtccaataattctgacgccaacctggagctgattaacacctgggtggccaaaaatactaataataagatctcccgccttctggatagtctgccctcagatacaaggctggtgctccttaacgctatttatctgagcgctaagtggaagacaactttcgaccctaagaagacccggatggagccatttcatttcaagaatagcgtgatcaaggtgcccatgatgaactcaaaaaaatatccagtcgctcacttcatcgatcagacgctgaaggctaaagttggacagctgcagttatctcacaaccttagcttagttatcctggtaccacagaacttgaaacatcgtctcgaagacatggaacaggccctctctccgtccgtgtttaaagccattatggagaaactggagatgtctaagttccaaccaaccctattaaccttgcctcggatcaaggtcacgacctcgcaggacatgctgtcaattatggagaagctggaatttttcgatttttcatatgacctgaacctgtgcggactaacagaggatccggatctgcaagtgagcgccatgcagcaccagactgtattggaactcacagagaccggcgtggaagccgcagctgcatcagcgatcagcgtcgcccgaacgctactcgtgtttgaggtccagcagcccttcctgtttgtcctgtgggaccaacagcataaatttcctgtgttcatgggtcgggtgtatgacccccgcgct

SEQ ID NO: 19187 - DNA, 1500 bp, synthetic construct
  misc_feature 1..1500: note = source = /note="Description of Artificial Sequence: Synthetic coding sequence"
  source 1..1500: mol_type = other DNA
atggccagccgcctgaccttgctgacattgctcttactcctgctggccggagaccgagcaagctcgaacccaaatgccacttcttcttcctcccaagacccagagagtttacaggatagaggggaaggcaaggttgcaacaacagtgataagtaaaatgctgttcgtagagcctatccttgaagtatcaagcctgcccactacgaattctaccaccaatagtgccaccaagattactgccaacaccaccgatgaacctacaactcaacctaccacggagccaaccacccaacctacaatacagccaacccagcccacgacgcagcttccgacagatagtccaacccagccaaccaccggttccttttgtcccgggcctgtgacattgtgtagcgacctagagagccactctacggaagctgtgctgggagatgccctagtcgatttctccctgaaactgtaccacgcatttagtgccatgaagaaggtagagactaacatggccttttctccatttagtatcgcttccctcttgacgcaagtcctgctcggagccggcgaaaacactaaaacaaacctggaaagcatcttgagttatcccaaggatttcacatgtgtacaccaggcactcaagggcttcactaccaaaggagtgacttccgtgtctcaaattttccattcaccagatctagctatcagggacactttcgtcaatgcctcccgaactctgtactcctctagtcctagggtgctctcaaataactcagatgctaacctcgaacttattaacacttgggtggctaaaaatactaacaataaaatctctcgactgctggattctttgcccagcgacaccaggctagtgctgctgaacgctatctacctgagcgcaaagtggaagactactttcgacccgaagaaaacgaggatggagccattccacttcaagaatagcgtcattaaagtacccatgatgaactctaagaagtaccccgtggcccacttcattgatcagaccttgaaggccaaagtgggtcagctgcagctatctcacaacctctcgctggttatcctagtgccccagaatctcaagcaccgactcgaagacatggaacaagctctgagtccctccgtgtttaaggccatcatggagaagctggagatgagtaagtttcagcccacgctgcttaccctgcctcgcatcaaggtcaccacttctcaggacatgctgtctatcatggaaaagttggaattctttgacttcagctacgatctaaacctctgcggactcacggaagacccagacctccaggtgtcagccatgcagcaccagaccgttctggaactgactgaaactggagtcgaagcggctgccgcctccgccattagcgtagcaagaacactcctggtttttgaagtgcagcaaccctttctgttcgtgctgtgggatcaacaacacaagtttcctgtgtttatgggtagggtgtacgacccaagggcc

SEQ ID NO: 19188 - DNA, 1500 bp, synthetic construct
  misc_feature 1..1500: note = source = /note="Description of Artificial Sequence: Synthetic coding sequence"
  source 1..1500: mol_type = other DNA
atggcgtcccgtctgactcttctcaccttgcttctgctgctgctggcaggtgaccgggcgagtagcaacccgaacgccacgagtagtagttctcaggatccggaaagcctccaggaccgcggcgagggtaaagtcgccactaccgttatttccaagatgctgtttgtggagccgatcctggaagtgtctagtctcccaactaccaatagcaccacgaacagcgccacgaagatcacggccaataccactgacgaaccgacgacacagcctaccacggaaccgactacccaaccgactatccagcccacgcaacctactactcaactgccgaccgatagccctacgcagcccaccacgggtagcttctgtccagggcctgttactttgtgttccgacctggaaagccacagtacagaagcggtgctaggtgatgcgttagtggattttagcctgaagttgtaccacgcattcagcgccatgaaaaaagtggaaaccaacatggcattctcccctttcagcatagctagcttgctcactcaggtgctgctgggagcgggagaaaacactaagacgaatctggagagcatcttgtcttatcctaaggattttacctgcgtccatcaggccctcaagggttttacaaccaagggtgtcaccagcgttagccagatcttccattccccagatcttgcgattcgcgacacgtttgttaacgcctcacgcactctctattcctcctctcctcgcgtgctgagcaataattctgacgcaaatctggagctgattaatacctgggttgctaagaacaccaacaataagatttctaggctgctggactccttgccgtccgacacgcgcctcgtactgctgaacgcgatctatctgagcgctaagtggaagacaaccttcgacccgaaaaaaacgcgcatggaaccattccacttcaaaaacagcgtgattaaggtgcctatgatgaattccaagaaatacccagtggcgcactttattgaccagactctgaaggcaaaagtgggccaactgcaactctcgcacaatctgagtctggtcatcctggtgccacagaatctgaagcaccgcttggaggatatggagcaggctctgagtccgagcgtattcaaggccatcatggagaagttggaaatgagcaagttccaacctactctgttgaccctgccaagaatcaaagtcacgacttcccaagacatgcttagcatcatggaaaagcttgagttttttgacttcagctacgatctgaacctctgtggtctgacagaggatcccgatcttcaagtttccgccatgcaacatcagacggtcctcgagctcacggagacgggtgttgaggcggcagcggcctcagcgatcagcgtggcacgtactctgctcgtctttgaggtccaacagccatttctgttcgttttgtgggatcagcagcacaagttcccggtttttatgggtcgggtgtacgatcctcgggcg

SEQ ID NO: 19189 - DNA, 1500 bp, synthetic construct
  misc_feature 1..1500: note = source = /note="Description of Artificial Sequence: Synthetic coding sequence"
  source 1..1500: mol_type = other DNA
atggcatcgcgcctgaccctgctcactctgctccttctgctcctggcaggagacagagcgtcctcgaatccaaacgcgaccagctcttcctcccaagacccggaatcgctgcaagatcgcggagagggaaaggtggctacgactgtgatctccaagatgctgttcgtggagcctatcctggaagtgtcgagcctccctaccactaactcgaccaccaactccgctaccaagattacggccaacaccactgacgagcctacgactcaaccaaccactgaaccaactacccagccgacgatccagcccacccaacccaccacccagctgccgaccgacagcccgactcagccgactactggatccttctgcccgggcccagtgaccctctgctccgatttggaatcacactcaaccgaagccgtattgggcgatgcactcgtggatttttccctgaaactgtaccacgccttcagtgcgatgaagaaagtggagactaacatggctttcagcccattctcgatcgcctccctcctgacccaggtgttgctgggtgctggggagaatactaagactaacctggaaagcatcctctcgtacccgaaggacttcacctgtgtgcaccaggccctgaagggctttactactaaaggagtgacctcagtctcacagatttttcattcacctgacctggccatccgggacacctttgtcaatgcgtcaagaactctgtacagcagctctccgagagtcctctcgaacaactcggacgctaatcttgaactgatcaacacttgggtggcgaagaacaccaataataaaatttcccgactcctggattcactcccgagcgataccaggctcgtgctcctgaacgcaatctatctgtcagcgaagtggaaaactaccttcgacccgaagaaaacgcgcatggagcctttccattttaagaattcggtcatcaaggtgccgatgatgaactcgaagaagtacccggtggcgcattttatcgaccaaacgcttaaggccaaagtgggacaactgcagctttcccacaacttgtcactcgtcatcttggtgccgcagaacctgaagcatcggctcgaagatatggagcaggccctgtctccctcggtgttcaaggcaattatggaaaaacttgagatgtccaaattccaacccacgctccttaccctgccacgcatcaaggtcactacttcccaggatatgctgtccatcatggagaagctggaattcttcgatttctcgtacgacctgaatttgtgcggactgaccgaggacccagacctccaggtgagcgccatgcagcaccagactgttctcgagcttaccgaaaccggtgtcgaagccgccgcagctagcgccatctcggtcgccaggactctgttggtgttcgaagtgcaacaaccgttcctgttcgttctgtgggatcagcagcacaagttcccagtctttatggggcgggtctacgaccctcgggcg

SEQ ID NO: 19190 - DNA, 1500 bp, synthetic construct
  misc_feature 1..1500: note = source = /note="Description of Artificial Sequence: Synthetic coding sequence"
  source 1..1500: mol_type = other DNA
atggcgtcgcgtttaacgttattaacgttattactattattattagcgggtgatcgtgcgtcgtcgaatccgaatgcgacgtcgtcgtcgtcgcaagatccggaatcgctacaagatcgaggtgaaggtaaagtagcgacgacggtaatatcgaaaatgctatttgttgaaccgatactagaagtttcgtcgctaccgacgacgaattcgacgacgaattcggcgacgaaaataacggcgaatacgacggatgaaccgacgacgcaaccgacgacggaaccgacgacgcaaccgacgatacaaccgacgcaaccgacgacgcaactaccgacggattcgccgacgcaaccgacgacgggttcgttttgtccgggtccggtaacgctatgttcggatttagaatcgcattcgacggaagcggtactaggtgatgcgttagttgatttttcgctaaaactatatcatgcgttttcggcgatgaaaaaagttgaaacgaatatggcgttttcgccgttttcgatagcgtcgctattaacgcaagttctattaggtgcgggtgaaaatacgaaaacgaatttagaatcgatattatcgtatccgaaagattttacgtgtgtacatcaagcgctaaaaggttttacgacgaaaggtgttacgtcggtatcgcaaatatttcattcgccggatctagcgatacgagatacgtttgtaaatgcgtcgcgaacgttatattcgtcgtcgccgcgtgttctatcgaataattcggatgcgaatttagaactaataaatacgtgggttgcgaaaaatacgaataataaaatatcgcgtttattagattcgctaccgtcggatacgcgtctagttctattaaatgcgatatatttatcggcgaaatggaaaacgacgtttgatccgaaaaaaacgcgtatggaaccgtttcattttaaaaattcggtaataaaagttccgatgatgaattcgaaaaaatatccggtagcgcattttatagatcaaacgctaaaagcgaaagtaggtcaattacaattatcgcataatttatcgttagttatactagtaccgcaaaatttaaaacatcgtttagaagatatggaacaagcgttatcgccgtcggtttttaaagcgataatggaaaaattagaaatgtcgaaatttcaaccgacgctactaacgctaccgcgaataaaagtaacgacgtcgcaagatatgttatcgataatggaaaaattagaattttttgatttttcgtatgatttaaatttatgtggtctaacggaagatccggatttacaagtatcggcgatgcaacatcaaacggtattagaattaacggaaacgggtgttgaagcggcggcggcgtcggcgatatcggttgcgcgtacgctattagtttttgaagtacaacaaccgtttttatttgtactatgggatcaacaacataaatttccggtttttatgggtcgagtatatgatccgcgagcg

SEQ ID NO: 19191 - DNA, 1500 bp, synthetic construct
  misc_feature 1..1500: note = source = /note="Description of Artificial Sequence: Synthetic coding sequence"
  source 1..1500: mol_type = other DNA
atggcttccagattaacactgctcactctgctattgctgctcttggcaggcgatagagccagctccaatccaaatgcaacttcctctagttctcaggacccagagtctcttcaggatcggggggagggcaaagtggctactacagtgataagcaaaatgttgttcgtggagccaatcttggaagtgagttccttgcccactactaatagcacaacaaactctgctacaaagatcaccgcaaacaccactgacgagcctaccacacaacctaccaccgagcctactacacagcctaccatacagcccacccaacccaccacccagctccctacggattcgccaacccagcctaccacaggaagcttttgtcccggccctgtcacactctgttctgacttggagagtcatagtacggaagcagtgcttggcgatgctctcgtagatttttcacttaagctttatcacgccttctccgccatgaagaaagtcgaaaccaatatggctttcagtcccttttccattgcttctctgctgacgcaagttttgctgggggctggagaaaatactaaaactaatctggagagtattctcagctaccccaaagatttcacatgtgttcatcaggccttgaaaggatttaccacaaagggggttacaagtgtcagtcaaatatttcattcccccgacctcgcaataagggacacatttgtcaatgcaagccgcacactgtactcctcatcaccacgtgtgctctctaacaatagcgatgctaacctcgagctgataaatacatgggtggccaaaaatacaaacaacaagatttccaggctcctagattctttgccaagtgacacgcggctggttctcctgaacgccatttacttgagcgcgaaatggaaaacgacattcgatccaaagaagacgcgaatggagccttttcactttaaaaatagcgtgattaaagtgcctatgatgaactctaagaagtacccagtcgctcatttcattgaccaaacccttaaggccaaagttgggcagctgcagcttagccacaacttatccctggtgatcctagtgcctcagaacctgaagcaccggctggaagacatggaacaggccctgtccccttccgtttttaaggcaatcatggaaaaactagagatgagtaagtttcaacccaccctgctaacacttcctcggatcaaagtgactaccagtcaggacatgctgagtatcatggaaaaattagagtttttcgatttctcatacgatctgaatctctgtgggttgaccgaggatccagatctccaggtgtccgccatgcagcaccagactgttctcgagctgaccgaaacgggagtggaggccgcagccgcctctgcgatctccgttgctcgcactctactggttttcgaggtgcagcagcccttcctcttcgtgctctgggaccagcagcacaagtttcctgtgttcatgggccgcgtgtacgaccccagagcc

SEQ ID NO: 19192 - DNA, 1500 bp, synthetic construct
  misc_feature 1..1500: note = source = /note="Description of Artificial Sequence: Synthetic coding sequence"
  source 1..1500: mol_type = other DNA
atggccagccgattgactcttttgacgttactgctgctgctcttagcaggcgaccgggcgagcagcaatccgaatgccacaagttcatccagccaggatccagaaagcttgcaagacaggggggagggtaaagttgctactacagtgatctctaaaatgctgttcgtagaacccatccttgaggttagttctctgccgaccaccaattccaccacaaatagcgccaccaagataaccgccaatacaacagacgaacctaccacccagcccacaacggagcccaccactcaacctaccattcaacccacccagccaaccacacaactgcccactgactcccccacccagcctaccaccgggagcttttgcccaggccccgtgacactttgttctgatctggaatcccacagtacagaggcggttctgggggacgccctggtcgacttctctctgaaactctaccacgcctttagtgcaatgaaaaaggtagagacgaacatggcattttctccgtttagcatcgctagcttgctgacccaggtgctgctcggagcgggcgagaacacaaagacaaatctcgagagtatcttgtcctatccaaaagactttacatgcgtgcaccaggcactgaagggattcactacaaaaggcgtgacatctgtatctcaaatttttcacagcccagatctggcaatccgggatacatttgtgaatgcttcacggacactatatagtagctctccccgggtgctttccaacaattcagacgctaatcttgagctcatcaatacttgggtggccaaaaacaccaacaacaaaatcagtcgcctcttggacagtctgccatccgatacccggctggtactgctcaatgccatctacctctcagcgaaatggaagacaaccttcgacccgaagaagaccagaatggagcctttccacttcaaaaactctgtgattaaggtccccatgatgaattcaaaaaagtatccagtggcacactttatagaccagacccttaaagccaaggttgggcaactgcagctgtctcataacctctccctggtgattttggtgccgcagaacctgaagcaccggctggaagatatggagcaggctctgtctccttccgtgtttaaagctattatggagaaactggagatgagcaagtttcagcctactctactgacactcccgagaatcaaagtgaccacaagtcaggacatgttgtcaatcatggaaaaactggaattcttcgactttagctatgacctgaacctgtgcggccttaccgaagaccctgaccttcaggttagcgccatgcagcatcaaactgtcctggaactgactgagactggagttgaggcagcagctgcctctgctattagtgtggcaagaacactccttgtgttcgaggtccaacagcctttcctgttcgtgctttgggaccaacagcataagttcccggttttcatgggaagggtgtatgatccacgggcc

SEQ ID NO: 19193 - DNA, 1500 bp, synthetic construct
  misc_feature 1..1500: note = source = /note="Description of Artificial Sequence: Synthetic coding sequence"
  source 1..1500: mol_type = other DNA
atggcaagtcgcttgacactgttaacactgttgcttctcctactggccggcgaccgcgcctcgtcgaatccaaacgccacgagctcttcttcccaggaccccgagtctctgcaagaccggggagaggggaaggtcgccaccaccgtgatcagcaaaatgctcttcgtggagccaattttggaggtgtccagcctgccgaccaccaactcaactacgaattccgctacgaagatcacagccaacaccaccgacgaacccaccacccagcccacgacagagccgactacccagccaacaatccagcccacacagccgacgactcagttaccgacagattcccccacgcagcctaccaccggcagtttttgcccaggacctgtgacgctgtgctctgacctggaaagccatagcacagaagctgtgctgggagatgccctcgtggatttctctttgaagctgtatcatgccttttccgccatgaaaaaagttgagaccaacatggctttctccccttttagtatcgcgagcctgctgactcaggtgctgctgggagcgggagagaataccaagacaaatctggaatccatcctatcctatccgaaagacttcacatgtgtccatcaagctctgaaaggctttacgactaagggagtcacgtccgtcagtcagatttttcacagccccgacctcgccattcgcgatacctttgtcaacgcttcgcgcacattatactcatccagtccccgggtactgagtaataactctgacgccaatcttgaactcataaatacttgggtggccaagaataccaacaacaaaatcagccgtcttttggactccctgccgtcggatactagactcgtgctcctgaacgccatttacctgagtgctaaatggaagacgacctttgaccccaagaagacacgcatggaaccattccacttcaagaactctgtgataaaggtgcccatgatgaactccaagaagtatccggttgctcactttatcgatcaaaccctgaaggcgaaagtgggacaattgcagctgagtcacaacctgtcgcttgtgattctggtgccccagaatctgaagcatcgcctggaggacatggaacaagccttgtccccctccgtgtttaaggccattatggagaagctggaaatgagtaaatttcagccgactcttcttactttacccaggattaaagtcaccacctcacaggatatgctgtccattatggaaaagctggaattttttgacttcagttacgaccttaacctttgcggcttgaccgaggatccggatctgcaagtaagcgccatgcagcaccaaacggtgctggagctgacggagactggagtggaagcagctgccgccagtgctattagcgttgcgagaacactgctggtgtttgaggtgcagcagccgtttctgttcgtgctgtgggatcagcagcacaagtttcccgtttttatgggacgtgtctatgatccaagggcc

SEQ ID NO: 19194 - DNA, 1500 bp, synthetic construct
  misc_feature 1..1500: note = source = /note="Description of Artificial Sequence: Synthetic coding sequence"
  source 1..1500: mol_type = other DNA
atggctagccgtctgactctcctcacattactcctattactcctggctggagaccgggcatctagcaaccccaacgctacgagtagctcgtcccaggatccagaatcactacaggaccgaggagagggcaaggtggccactaccgtgattagcaaaatgctcttcgtggagcccatcttggaggtgtcgtccctacctactacaaattcgaccacaaattctgcgactaagatcacggccaataccacggatgagccgacgacacaacccacgactgaacctaccacgcaacctaccattcagcccacacagcccacgacccagcttcctaccgacagccctactcagcccaccactgggtccttctgtccaggtccagtcaccttgtgttccgatctggaaagtcactccacagaggcagtcctgggggatgcactcgtggacttttcactgaaactgtatcacgccttttcagcgatgaagaaagttgaaactaatatggcgttttcacccttttcaatcgcttccctgctcacccaagtgcttttgggcgcgggggaaaacacaaagaccaacctcgaaagcattctgtcttatcccaaggattttacttgtgtccaccaggccttaaagggatttacgactaagggagttacctccgtatcccagatcttccattcaccagacctggcaatccgcgataccttcgtgaacgcgtcccgcacactgtactcatccagcccacgcgtcctgagcaataatagcgatgcgaatctggagctgattaatacctgggtggcaaaaaataccaataacaaaatttccagacttctagattcactgccaagtgatacacgcctggtgcttcttaacgctatttatttaagcgcaaaatggaaaactacatttgacccgaaaaaaactagaatggaacctttccacttcaagaacagcgtgatcaaagtccctatgatgaactccaaaaaataccccgtggcacacttcatagaccagacgctgaaggcgaaggtcgggcaactccaactcagccacaatctctctttagtcatcctcgtgccacagaatctgaagcacagattggaggatatggagcaggcgttgtctccgtctgtgtttaaggcaataatggaaaagctggagatgagtaagtttcagccgacactactaaccctcccgaggatcaaagttacgacaagtcaggatatgctgagcatcatggaaaagctcgaattcttcgatttttcctacgacctaaacttatgcgggttgacggaagatcctgacctacaagtctcagcaatgcagcatcagacggttcttgagctgactgaaactggagtcgaggccgcagccgcatcagcaatctctgtggcgcgcacccttctggtctttgaagtccagcaacctttcttgtttgtgctctgggatcaacaacacaaattcccagtcttcatgggccgggtctacgatccaagagcc

SEQ ID NO: 19195 - DNA, 1500 bp, synthetic construct
  misc_feature 1..1500: note = source = /note="Description of Artificial Sequence: Synthetic coding sequence"
  source 1..1500: mol_type = other DNA
atggcttccaggctcacattacttaccctcctactcttgctgctagcgggcgaccgagcctcgtccaatcctaatgccacttcttccagcagccaggatcccgaaagcctccaagatcggggggaaggaaaggtggcaaccacagtgattagcaaaatgctttttgtcgagcctattctagaggtgagctccctgcccaccacaaattcgactaccaacagcgctaccaagatcactgccaatactacagatgaacctactacccagccgactactgagcccaccactcagccaaccatccagcctacacaaccgaccacacaactgccgacggattcaccgacacaaccgacaacgggttccttttgccctggccccgtgaccctgtgctctgacctggaaagtcattctacagaagccgtactgggagacgctctggtcgacttctctctgaagctgtatcatgcattctccgccatgaaaaaggtggagactaacatggctttttccccattttccatcgcctctttgctgactcaagtcctgctgggagccggtgagaacacgaaaactaatctggagtctatcctaagctaccccaaagacttcacgtgcgtccatcaggctctgaaaggattcacaacgaagggcgtgacttctgtgtcacagatatttcattctccagacctggcgatccgggatacctttgtaaatgcgtcccgaacactctactcctcgtcaccccgggtgctttctaacaacagcgatgcgaacctagagctgataaatacgtgggtcgctaagaatacaaataataaaatctcccggctgttagattcacttccatccgatacgcgacttgtcctgttgaacgccatctatctttccgcaaagtggaaaacaaccttcgaccccaagaaaacccgcatggaaccatttcatttcaaaaacagtgttatcaaagtgcccatgatgaattctaaaaaatatccggtggctcatttcatcgatcagacactcaaggccaaagttggtcaattacaactgtcacacaacctgagtctggtgattcttgtgccgcagaacctgaaacaccgcctggaagatatggaacaggccctgtcgcctagtgtctttaaagctattatggaaaaactggaaatgtccaaatttcagcctactctcctgacactcccgcgaataaaggtaaccacaagccaggacatgctgagcataatggaaaaactagaattctttgacttctcctatgatctcaacctctgtggcctgacagaagatcctgaccttcaggtttccgccatgcagcaccagacggttctcgagctgacagaaacaggggtcgaagccgccgcagcatctgccatcagcgtggcaagaacgttgctggtttttgaggtgcagcagcctttcctgtttgtactgtgggatcagcagcacaaatttccggtctttatggggcgggtgtatgatccacgcgct

SEQ ID NO: 19196 - DNA, 1500 bp, synthetic construct
  misc_feature 1..1500: note = source = /note="Description of Artificial Sequence: Synthetic coding sequence"
  source 1..1500: mol_type = other DNA
atggcgtcccggttaaccttgctaactctgctgctgctgcttcttgcaggagatagggccagctctaatccaaatgcgactagctcgtccagccaggacccagaatcgttgcaggaccgaggggaggggaaggtggcaaccaccgtcataagcaagatgctctttgtggaacctattctggaggtatcttcacttcctacaactaacagtactactaactccgcaactaagatcaccgcaaacacaaccgacgaaccgactacccagcccactaccgagcctacgactcagcctacaatccagcccactcagccaaccacccagcttcccaccgactccccaactcaacctacaaccggctctttttgcccgggccctgtgactctgtgttcagatctggagagccactccacagaggctgttctcggtgatgctcttgtggacttcagccttaagctttaccacgcattcagcgccatgaagaaggttgagacaaacatggcctttagtcccttcagcatcgccagcctgttgactcaggttttactgggggccggtgagaatactaagacgaacttagagtccatcctgtcatatccaaaagactttacttgtgtgcaccaggccctgaagggttttactactaaaggggtgacatccgtaagccagatctttcacagccctgacttggccatcagagacacgtttgtgaacgcttcacggaccctgtacagctcaagcccacgtgtgcttagcaacaatagtgatgcaaatctggagctgattaacacctgggtggctaagaacactaacaataaaatctcacgacttctggactccctgcctagcgacaccaggcttgtcctgctgaacgccatctatttatccgcgaaatggaagactacatttgatccaaagaaaacacggatggagcctttccattttaagaattctgtcatcaaggttcctatgatgaactcaaagaagtatccggtcgcgcacttcattgatcagactctgaaggcgaaggtcggccagctgcaattgtcacacaacttatctcttgtgattctcgttccccaaaatcttaagcatagactggaagatatggaacaggccttgtcaccttcagtgttcaaggccatcatggagaagttagaaatgtccaaattccagcctacactcctgaccctcccaagaatcaaagtgacaacatcacaggatatgttatcgattatggagaaactggagtttttcgacttcagttatgatctgaatttgtgcggcctaaccgaggatcccgacttacaggttagtgccatgcaacaccagacagtcctagagctgacggagacaggggtggaggccgccgcggcgtccgccatatcagtcgctcggaccctgctggtgttcgaagtgcagcagcctttcctgtttgtcctgtgggaccagcagcacaagtttcccgttttcatgggacgggtgtacgacccgcgtgcc

SEQ ID NO: 19197 - DNA, 1500 bp, synthetic construct
  misc_feature 1..1500: note = source = /note="Description of Artificial Sequence: Synthetic coding sequence"
  source 1..1500: mol_type = other DNA
atggcctcgaggctgaccttgttaacactcctgctgcttctattggcaggggatagagcaagttccaaccccaatgccactagttcctcttcgcaggatcccgagtcactgcaggaccgtggagagggcaaagttgcaacaacagtcatctctaagatgttgtttgtggagccaatactggaggtgtcatcgttgcctaccaccaattctaccacaaattccgctactaagatcacagcgaataccaccgacgaacctactacccaacccacaacagagcctacaacccagccgaccatacagccaacacagcccaccactcagctgcccaccgattcgcctactcaaccaactacaggaagtttttgtcccgggccagtaaccctctgttcagatttggagagccactcaaccgaagccgtgctcggcgatgccctggtggacttctcccttaagctctaccatgccttcagcgccatgaagaaggtggagactaatatggcattcagcccgttctccattgcttctctcttgacccaggttctgttgggagccggcgagaatactaagacaaacttggagtctatactatcataccctaaggactttacatgtgtgcatcaggctctgaaagggttcactactaaaggggtaacctctgtgagccagatctttcatagtcctgatttagccatcagggacaccttcgtaaatgcgtcacgcacattgtacagctcctctccgcgcgtgctgagtaataatagtgacgccaacctggagctgattaatacttgggtggccaagaacacaaacaataagatctctcggcttctggattccctgccttccgatacgcggctggttttgctgaatgccatttatctttcagctaagtggaagactactttcgatcccaaaaaaacacgtatggaacccttccattttaagaactctgtaattaaagtgccaatgatgaattcgaagaaatatccagtcgcgcatttcatcgaccagacgctgaaggccaaggtgggacagcttcagctttcacacaacctctcgttggtgatcctggttccacagaaccttaaacataggctggaggacatggaacaggccctgagcccatccgtgtttaaggcgattatggagaagttggaaatgtccaagtttcagcctacgttgctgacacttccacgcattaaggtaaccaccagccaggatatgctgagcattatggaaaagcttgaatttttcgattttagctatgatctgaatctgtgtgggctgacagaagaccctgatttgcaagtttcggcgatgcagcatcagacggtactggagctcacggagactggggtggaagctgctgcagctagtgctatctctgtggcacgtactctcctggtgtttgaagtgcagcaacccttcctgtttgtgctgtgggatcagcagcataaattccctgtgtttatgggccgcgtttatgatccacgcgcc

SEQ ID NO: 19198 - DNA, 1500 bp, synthetic construct
  misc_feature 1..1500: note = source = /note="Description of Artificial Sequence: Synthetic coding sequence"
  source 1..1500: mol_type = other DNA
atggcaagcagactgactttactaacactgctcctccttttactggcaggagatcgtgcaagttccaaccctaatgcgacatccagctcgtctcaggacccagagtccctccaggacaggggggaaggaaaggttgcgaccacagtgatcagcaagatgcttttcgtcgaaccaatcttggaggtgtcttcacttccgaccactaactctaccactaatagcgctaccaaaattaccgccaacactacggacgaacctacaacacagccaaccacagaacccaccacccagccaacaatccagccaacgcagcccacgactcagctgcccacagacagccccacgcaacccacaaccgggtctttctgcccagggccagtgactttatgcagcgacctcgagtcccattctacggaggctgtgctcggggatgcactagtcgacttcagcctgaagctgtatcatgccttttccgcgatgaaaaaggtggaaacaaacatggccttttcgccgtttagtattgcctcgctattgactcaagtgctcttgggggcgggtgaaaacaccaagaccaatcttgagtccattctgtcgtatccaaaggacttcacctgtgtgcatcaggccttaaaaggttttacgacaaaaggtgtgacgagcgtgagtcagattttccattcgcctgacttggccattagggacacctttgtgaatgcgtcccgcactctgtatagttcctccccccgagtactgtctaataatagtgacgcaaatctggagctcatcaatacatgggtggctaagaacactaataataagataagtcggctgctagattcccttccctccgataccagactcgtgctcctcaatgcaatctacttgagtgctaaatggaaaactacattcgacccaaagaagacacggatggagccatttcacttcaaaaacagcgtgatcaaagttccgatgatgaatagtaagaagtacccagtggcacacttcatcgatcagaccctgaaggcgaaggtcggacaactgcagctttctcacaaccttagcctcgttatcttggtgcctcagaacctcaagcacaggctggaggatatggagcaagccttgagtccgagcgtgtttaaggcgataatggagaaactggagatgtctaagtttcagccaacactgttgaccctgccaagaatcaaagtcaccacttcacaggatatgctgtcgatcatggagaaattagaattttttgacttctcatatgacctgaatctctgtggactcacagaggaccctgacctacaagtgagtgctatgcagcaccagacagtcctcgagcttacagagacgggggttgaggcagcagctgctagcgccatctccgtagcacgtactctcctggtgtttgaggtgcaacaaccattcctgttcgttttgtgggatcagcagcataaattccccgtattcatgggacgtgtgtacgaccctagagcc

SEQ ID NO: 19199 - DNA, 1500 bp, synthetic construct
  misc_feature 1..1500: note = source = /note="Description of Artificial Sequence: Synthetic coding sequence"
  source 1..1500: mol_type = other DNA
atggcctcccgcctgacgctgttgaccttgctcctactgctacttgccggcgatagagcttcatctaatcccaatgcgacttcatcttcttctcaggaccctgagtctctgcaggacaggggcgagggtaaagtcgctacgacagtaatctccaagatgttgtttgtcgaaccaatcctggaggtgtcatctcttccaacaaccaatagcaccactaatagcgccaccaaaattacagctaacacaactgatgaacctacaacccagccgacgactgaacctacaacgcagcctacaatccagcccacgcagccgacgacccagctaccaacagactccccaacgcagcctacaacaggctccttctgtcctggtcccgtgacgctgtgcagcgacttggagtctcatagcacagaggcagtcctaggggacgcattggtggatttttcattgaagctgtatcacgcattcagcgccatgaagaaagttgagacaaatatggcgttctctcccttcagcattgcatcactgctgacacaggtcctgcttggtgcgggtgaaaatactaagacaaacctggagagcatcctaagctatcccaaagatttcacatgcgtgcaccaggctctgaagggatttacgaccaaaggcgtgacatctgtttcccagatttttcactcacctgacctggccatcagagatacgtttgttaacgcatcacgcacactctactcctctagtccacgggtgctgagcaacaactccgatgccaatctggaacttattaatacctgggtcgcgaagaacactaataacaagatatcacgattgctagattcactacctagtgacacccggctggtgctcttaaatgccatttatctgtcagcaaagtggaagacgacatttgaccccaagaaaacaaggatggagccttttcacttcaaaaattcagtcatcaaggttccaatgatgaactctaaaaaatacccagtcgcccacttcatcgaccagactctcaaagccaaggtggggcaactccaactttcccacaatctatcactggttatcctggtaccacagaatctgaagcaccggctggaggacatggaacaagctctttcacccagtgtgtttaaagctattatggaaaagctggagatgtccaagttccagcctaccctcctgacactcccacgtattaaggtaactacttcccaggatatgctgtccattatggaaaaacttgaatttttcgacttttcatatgatctgaacttatgtgggctaactgaggaccccgacttgcaggtttcagcaatgcagcaccagaccgtgctggaactgacagagaccggcgtcgaagcagccgcggctagcgcgataagcgtggctcgcaccctgttggtatttgaagttcaacagccttttcttttcgtactctgggaccagcagcataaattccctgtgtttatggggagggtttatgaccctagggcg

SEQ ID NO: 19200 - DNA, 1500 bp, synthetic construct
  misc_feature 1..1500: note = source = /note="Description of Artificial Sequence: Synthetic coding sequence"
  source 1..1500: mol_type = other DNA
atggcctcccggctgacccttctgaccctgctgctgcttctcctcgcgggcgaccgggcctcttccaaccctaacgcgaccagctcctcttcccaagatcccgaaagtttgcaggatcgcggtgaaggcaaggtagccacgactgtgattagcaaaatgctgtttgtcgagcccattctggaggtgtctagcctgccaacgacaaacagtaccaccaattctgctactaagattaccgcaaacaccactgatgaacctacaacgcagcccactacggagcccacgacacagcctaccatccagcccactcaacctaccacccagttgccaaccgactcccctacacagccaacaaccggtagcttttgtccaggcccggtcactctgtgtagtgatctggaaagccactccactgaagctgttcttggtgacgctctggtggatttcagtttgaagctgtatcacgccttcagtgccatgaaaaaagtggagaccaacatggccttctcccctttttccattgcaagcttgctcacccaagtgctgttgggcgccggcgaaaatacaaagactaacctggagagtatcctgagttaccctaaggactttacatgcgtgcatcaggcactgaagggttttacaacgaagggcgtgacctccgtgtcccagatcttccacagccccgatctcgcaatccgcgacacgttcgtgaatgccagccgaaccctgtactccagctccccacgcgtcctgtccaacaactctgacgccaatctggagctcatcaatacgtgggtcgctaagaacaccaataacaagatctcccgcctgctggacagtttgccatccgatacaagactggtgctgctgaacgccatttacctgtctgccaaatggaaaaccaccttcgaccccaagaaaacgcggatggagccattccacttcaagaacagcgttattaaagtcccaatgatgaattccaagaagtatcccgttgcccacttcatcgatcaaaccctgaaggctaaggtcggccagttgcagctgtcccataatctcagcctggtcattctggtgccccagaacctcaagcataggctggaggatatggaacaagctctctccccgtccgttttcaaagctattatggaaaagcttgaaatgagcaaatttcagcctaccctgctgacccttccccgcatcaaggtgaccacaagccaggacatgctcagtattatggagaagctcgagtttttcgacttctcttacgatctgaacctgtgcggcctgaccgaagatcctgatctgcaggtctccgcaatgcagcaccagaccgtgctggagctgactgagactggcgtggaggcagccgccgcaagtgccatatccgtggctagaactcttctggtgttcgaagtgcagcagccgttcttgtttgtgctgtgggatcagcagcacaagttccccgtgttcatggggagggtgtatgatccccgggcc

SEQ ID NO: 19201 - DNA, 1500 bp, synthetic construct
  misc_feature 1..1500: note = source = /note="Description of Artificial Sequence: Synthetic coding sequence"
  source 1..1500: mol_type = other DNA
atggcctctaggctcaccctccttactttgctgcttctgctgcttgccggggacagagctagtagtaatccgaacgcaacctcgtcctccagccaagacccagaatccctgcaggacaggggcgagggcaaggtagcgacgactgtcatcagcaagatgctgtttgttgagcctatcctcgaggtgtcctctctgccgactactaatagcacaacaaactctgcgacaaagattaccgctaatacaaccgacgaaccaactacccagcctacaaccgaacccaccacacagccaactatccaaccaacccagccgactactcaactgccaacagacagtccaacccagcctaccacgggcagcttctgccccggacctgttacgctgtgttcagacctcgaatcacattccacagaagctgttttgggcgacgcgttggtcgactttagtttaaagttgtaccatgccttttctgcaatgaaaaaagtggagacgaacatggcattttcccctttcagcattgcatcactgctgacacaagtactactgggtgctggggagaacactaaaactaatctggaatcaatcctgtcttatccaaaagatttcacttgtgtgcatcaggccctgaaaggctttacaaccaaaggagtgacgtcagtcagccaaatcttccactcccctgaccttgctatccgcgatacctttgtaaacgcctctcgaaccctttattcatcaagtcctagagttttaagcaataactccgatgctaacttggagctcataaatacatgggttgctaaaaatactaacaacaaaatctcacggctactggatagtcttccatccgacactagattagttctgctcaacgccatttatttgtcggcgaagtggaagacaacgttcgaccctaaaaagacgaggatggagccattccactttaagaattcagtgattaaggtccccatgatgaacagcaagaaatatccagtggctcacttcatagatcagacattgaaagccaaggtgggccaattacagctgtcccacaacctctccctcgtcattctggtgccccagaacctgaaacaccgactagaagatatggagcaagccctgtctccgtccgtgttcaaggcgattatggagaagctcgaaatgtcaaagtttcagccgactttgctaaccctgccccgcatcaaagtgactacttcacaggacatgctgtcgattatggagaaactcgaatttttcgactttagttacgatctgaacctatgtggccttactgaagacccagatttgcaggtgtccgccatgcaacaccagacggtgttggagttgactgagacgggcgtggaggctgcggcagccagcgcaatcagcgtggcccgtacactgctcgtgttcgaggtacagcagccgttcctgtttgtgttgtgggatcagcaacacaaatttccagtctttatgggtagagtttatgaccccagagct

SEQ ID NO: 19202 - DNA, 1500 bp, synthetic construct
  misc_feature 1..1500: note = source = /note="Description of Artificial Sequence: Synthetic coding sequence"
  source 1..1500: mol_type = other DNA
atggcatcccgactgaccctcctcacactgctactcctgttgcttgcaggcgaccgggcatcctctaatccgaatgccacatccagctccagtcaggatcctgaatctttacaggatcggggagaggggaaggtagcgactacagtgatatccaagatgctcttcgtcgaacccattcttgaggtttcgtcattgcctaccacgaattctaccacgaattcggccacgaaaattaccgctaacacaacggatgagccgaccacccagcctactaccgaacccactacccagcctaccattcagcctacgcagcctactacgcagttacctaccgacagcccaactcaacccacaactggctcattctgtcccggacccgtcacgctgtgctctgatcttgaatcgcactccacggaagcagtcctaggggacgcgcttgtcgatttctccctcaagttgtaccacgcgttctcagcaatgaagaaagtggagaccaacatggcgttttcgccgttttccattgctagcctacttactcaggtcttactcggtgctggggaaaacactaagactaacttagaatccatcctgagctatcccaaagacttcacttgcgtgcatcaggcgctgaagggttttaccactaaaggagtaaccagtgtttctcagatcttccattcgcctgatctagccatacgagatacattcgttaatgcttcacgcacgttgtacagttcttcgccacgcgtcttgtccaacaactccgacgcaaacctggagttaatcaatacttgggttgcgaaaaacacaaataacaaaatatcccgcttactcgattctctgccaagcgacacccgcctagtcctcttgaatgctatttacctgagcgctaaatggaagacaacatttgaccctaagaaaacacgaatggaacctttccacttcaagaactccgtgatcaaagtgcctatgatgaattcaaagaagtatccggttgctcacttcattgatcagactttgaaggctaaggtagggcagttgcagctttcgcataatctctcattggtgatcttggttccccaaaatctgaaacacaggctggaagatatggaacaagcactttctccctctgtgttcaaagcaattatggaaaagctggagatgtcaaagtttcaaccgacattgcttaccctgccacgaataaaagtcacaaccagtcaggatatgctctctatcatggagaagttggaatttttcgatttttcttatgacctcaatctctgcggcctaaccgaagatcctgatctccaagtgagcgccatgcagcatcagaccgtcttggagctcacagaaacaggcgtggaggccgccgccgcctccgctatctcggttgctcgcactctgcttgtattcgaagtacagcagcccttcttatttgtgctctgggaccagcagcataagttcccagttttcatggggcgtgtgtacgatccacgagct

SEQ ID NO: 19203 - DNA, 1500 bp, synthetic construct
  misc_feature 1..1500: note = source = /note="Description of Artificial Sequence: Synthetic coding sequence"
  source 1..1500: mol_type = other DNA
atggcttcgagattgaccctgttaactctcctgctactactgttagcaggtgatcgtgctagttcaaacccaaatgcaacatcatcaagctcacaggacccagagtcccttcaggataggggtgagggaaaggttgccaccactgttatctccaagatgctgttcgtcgagccgatactggaggtctcctcactgccgacaacaaatagcacaactaattctgccaccaaaatcacggcaaacaccaccgacgagcccacaacacagccaaccaccgaaccaacgacccagccaaccatccagcccactcagcctaccactcagctacccaccgattcccctacccaacccacaacagggtccttctgcccaggaccagtgactctctgcagcgatcttgaatcccactcaacagaggcggtgttgggagacgcattggtggatttcagcctgaaactttatcatgctttctctgccatgaagaaagttgagacgaacatggcgtttagccccttcagcatcgcatctcttcttacacaggttctacttggagcaggcgagaacacaaagacaaacctcgaatccatcctcagctatcccaaggatttcacttgcgtgcatcaagcactgaagggcttcactaccaaaggggttactagcgtcagtcaaatcttccactcaccagacctcgcaatcagagacacatttgtgaatgcttcaagaacactgtactcgtcttctcctcgcgtgctgtccaataattctgacgccaacctagagctgattaatacatgggtggccaagaatacaaataacaagatcagtcgtctgttagacagtttaccctctgatacacgtctggtgctgctgaatgcgatttacctctccgctaagtggaagacaaccttcgacccgaagaagacacgcatggaaccttttcacttcaaaaacagcgtgatcaaagtaccgatgatgaactccaaaaagtatccggtggcacacttcatcgaccagactctcaaggcaaaagtgggacagctacagctttcccacaacctgtctctggttatcctggtccctcaaaacttgaagcaccggctggaagatatggaacaggctctgagcccctccgtctttaaggccatcatggagaaattagagatgtctaagttccagcccaccttactgacactcccccgtatcaaagtgactaccagccaggatatgctatctataatggagaagctggaattctttgacttctcctacgatctgaacctgtgcggattgacagaagatcctgacctgcaggtgtctgctatgcagcaccaaaccgtgctggaactgacagagaccggcgtggaggcggccgcggcatccgcaatatccgtggcccgtacgttactagtgtttgaagtccaacaaccatttctcttcgtgctgtgggatcaacagcacaagtttcccgtgttcatgggcagagtgtatgaccctagggcc

SEQ ID NO: 19204 - DNA, 1500 bp, synthetic construct; identical to SEQ ID NO: 19192
  misc_feature 1..1500: note = source = /note="Description of Artificial Sequence: Synthetic coding sequence"
  source 1..1500: mol_type = other DNA

SEQ ID NO: 19205 - DNA, 1500 bp, synthetic construct
  misc_feature 1..1500: note = source = /note="Description of Artificial Sequence: Synthetic coding sequence"
  source 1..1500: mol_type = other DNA
atggcgagtaggctgacgcttctgactttgctcctgctgttgctggctggtgacagggcttccagtaatcccaacgctacgtcgagctccagtcaggaccctgaaagcttacaagatcggggtgaagggaaggttgccaccacagttatcagcaagatgctttttgtcgaacccatcctggaggtaagctccctcccaaccaccaacagcaccaccaactcagctaccaagatcactgccaacacaaccgacgaacccacaactcagccaaccactgaacctacaacacagcctactatccaaccaacccagcctacaacccagctgcccacagacagtccaactcagcctaccaccggatctttttgcccaggccctgtcaccctttgttcggatttggagagccacagcactgaggctgtgctgggcgatgctcttgtggacttctccctgaagttgtatcatgccttttcagcgatgaagaaagtagaaacaaacatggcattttcgcctttcagcatagcctctctgcttacccaggtcctgcttggcgctggagagaatactaagacaaacctggaatctatactctcctacccaaaagacttcacttgtgtgcaccaggcacttaaaggctttaccactaaaggggttaccagcgttagtcaaatctttcacagtcccgacctggccattcgcgatacattcgttaacgcctcccggacactttactccagcagtccgagggtactcagcaacaacagtgatgccaacctggaactgatcaacacttgggtggcaaaaaacaccaacaacaagatttctagactgctggactccctgcctagcgacactcggctcgtcctactcaatgccatctatctttccgctaagtggaagaccacttttgacccgaagaagacccgcatggaaccattccacttcaagaattcagtgatcaaggttcctatgatgaattcaaagaaataccccgtagctcacttcattgatcagactctgaaggctaaggtcggtcaactgcaattgagccacaatctgtctctggtgatacttgttccccagaatctgaaacaccggttggaggatatggaacaagccctctcacccagtgttttcaaggcgattatggaaaaactcgaaatgagcaagtttcaaccaacgctcctcacacttccacgcattaaagttaccactagccaggatatgctgagcatcatggaaaaattggagttttttgacttctcctacgacctcaacttgtgcgggctcacggaggatccagacctccaggttagcgccatgcagcatcaaaccgtcctcgaactcactgagacgggagtagaggctgccgcagcttctgctatttcagttgctaggacactcctagtgttcgaggtgcaacagccattcctgtttgtgctttgggaccagcagcacaaattcccagtgttcatgggacgggtctacgacccaagagcc

SEQ ID NO: 19206 - DNA, 1500 bp, synthetic construct
  misc_feature 1..1500: note = source = /note="Description of Artificial Sequence: Synthetic coding sequence"
  source 1..1500: mol_type = other DNA
atggcttctcgcctgaccctgctgacattgctgctcctactactcgcgggcgacagagcaagttcaaatccgaacgcgacctcatcttctagtcaagaccctgaatcactacaggatcgcggggaaggaaaggtcgcaacaacagtgatttctaaaatgctgttcgtcgagcccattttggaagtgtcatccctgcccactaccaactccaccaccaactcagctacaaagataaccgctaataccactgacgaacctacaacacaacccactactgagcctactacgcagcctaccatacagcccacgcagccaactactcagctcccgaccgatagccccacacagcctacgactggctccttttgcccgggccccgtgactctgtgttctgacctggaatcccacagcacggaagccgtgctgggcgatgcactcgtcgacttcagccttaagctctaccacgctttcagcgcaatgaaaaaagtggagacaaacatggccttctccccttttagtatcgcaagtttattgacccaggtgcttctgggggccggagagaatacaaaaacaaacctcgagtcgatattgtcctatccaaaggacttcacttgcgtgcatcaggccctgaaaggctttactactaagggtgtgacatcagtgtcccaaatctttcatagccctgatttagcaataagagacaccttcgtgaatgcctcccggacactgtacagctcaagtcctagagtgttgagcaataatagcgatgctaatttggaactgatcaatacctgggtggcaaagaacacaaacaacaaaatcagccgacttctcgactctctgccttccgacacccggttggtccttctgaacgcaatctacctgtctgccaagtggaagacaacattcgaccctaaaaagactcgcatggagcctttccatttcaaaaactccgtcataaaagttcctatgatgaatagtaagaaataccctgtcgcccactttattgatcaaactctgaaggccaaggtcggacaactgcagctatcccacaatctgtctctggttattcttgtgcctcagaatcttaagcatagacttgaggacatggagcaggcactgtccccaagtgtcttcaaagccataatggagaaacttgagatgtcaaaattccagcccacactgctgacacttcccagaatcaaggtgaccacatctcaggatatgctgagcatcatggaaaagctcgagttcttcgacttttcctacgatctcaacctttgcggcttgaccgaggatccagatttgcaggtcagtgccatgcagcatcagaccgttctggagttgacagaaaccggggtggaggcagccgcagcttctgctattagcgtagcccgcactctcctcgtcttcgaggtgcaacagcccttcctgtttgtgctgtgggatcagcaacacaagtttcctgtgttcatgggccgtgtatatgacccgcgtgcc

SEQ ID NO: 19207 - DNA, 1500 bp, synthetic construct
  misc_feature 1..1500: note = source = /note="Description of Artificial Sequence: Synthetic coding sequence"
  source 1..1500: mol_type = other DNA
atggcctctagacttaccctgctgactctgctcttgctcctcctggctggagatagggcgtccagtaaccccaacgcgacaagttcttctagtcaggacccagagtccctgcaagaccgcggtgaaggaaaggttgccactaccgtcattagcaaaatgctctttgtcgagccaatcctggaggtatcatctcttcctaccactaactctaccacaaattccgccactaagatcaccgccaacaccactgatgaaccaacaacccaacccaccacagagccgactactcaaccaactatccagcctacccagcccactacacagctgcccacagattcaccaactcagccaacaacaggaagcttctgccctggcccagtcaccctttgcagcgacctggagagtcactccaccgaggcggtcctcggagatgcattggttgacttctctttgaagctgtatcatgcattttcagcaatgaagaaagttgaaacgaacatggcctttagtcccttctcaatcgctagcctgctgactcaggtgttgctcggagcaggtgaaaacaccaagaccaacttggaatcaattttgtcttatccaaaggatttcacctgcgtgcaccaggctctcaaaggcttcaccaccaagggagtgactagcgtaagtcagattttccattctccagacctggcaatcagagacacattcgtaaatgcatcccgcacactgtatagttcctctccacgcgttctgagcaacaactctgacgctaaccttgagctgatcaacacatgggtcgccaagaacactaataataagatcagtcgcttgttggattcacttccctccgacacacgcctcgtgttgcttaacgcaatttacctgagtgccaagtggaagaccaccttcgatccgaaaaaaacgcgcatggaacctttccatttcaaaaacagtgttattaaggttcctatgatgaattccaagaagtatccggtggcccacttcatcgaccagacactcaaggctaaggtgggccagctgcagctgagccataacctgtcactcgtgatcctcgtgccacagaacctcaaacataggttggaagatatggagcaggccttgtccccgagcgtttttaaggcgataatggagaagctcgagatgagcaagttccaaccaaccctgctcacccttcctcgcatcaaggtaacgacttcccaggacatgctgtccattatggaaaagcttgagttcttcgatttctcctacgacctgaacctgtgcggtctcaccgaggacccagatctgcaggtaagtgccatgcagcatcagacagttctggagttgacggagacgggcgttgaagctgccgctgctagtgcaatcagtgtcgccaggactctcctggtttttgaagtccaacagccatttttgtttgtgctctgggaccagcaacacaaatttccagttttcatgggacgcgtctacgaccctagggcc

SEQ ID NO: 19208 - DNA, 1500 bp, synthetic construct
  misc_feature 1..1500: note = source = /note="Description of Artificial Sequence: Synthetic coding sequence"
  source 1..1500: mol_type = other DNA
atggcctcccggctgacactcctcacgcttctgctgctattactggccggagacagggccagttctaacccaaacgccacaagctcaagctcgcaagatcccgagtccctgcaggaccgaggtgaggggaaggtggccaccacagttataagcaagatgctctttgttgagcccatattagaagttagttcactgccaaccactaactctaccaccaactccgcgactaagattacagccaacactactgacgagccaacaacacagccaacgacggaacctaccactcaaccaacaattcagccgacacagccaactacccagctacctacagacagccccactcaaccgactaccggatctttctgccccggacctgtcaccctttgctcagacctggagtctcattctacagaggctgtcctcggagatgccttggtagactttagcctcaagttgtatcacgcctttagtgccatgaagaaagtagagacgaacatggccttcagtcctttctcgatcgctagtctgttaacacaggtactgctcggggcaggagaaaacaccaaaacaaatctagagtcaattctctcatatccaaaggacttcacttgtgtgcaccaggcactgaaggggtttacgaccaaaggggttaccagcgttagccagatattccattcgcccgacctggccatccgggacacgtttgtcaatgcaagtcgtaccttgtactcgtctagtccgcgggtcctttcgaacaattccgacgccaatcttgagctgatcaacacatgggtggcaaagaacacgaacaacaaaatcagcagactgttggactccctcccctcggacacacgtctggtgctgctgaatgccatttacctttcggcaaagtggaagacaacctttgatccaaagaaaacacggatggaaccgtttcatttcaaaaattctgtgattaaagtccccatgatgaacagcaagaagtacccagtggcacatttcattgaccagacactgaaggcaaaggttggacagctgcagctttcgcacaatctctctctcgtcattctagtgcctcagaatctgaaacataggcttgaggacatggaacaagcactgagcccttctgtctttaaagctatcatggagaagttggagatgtccaaatttcagcctaccttactgacgttgccgagaattaaggtgacaacttcacaagacatgctttctatcatggagaaacttgaatttttcgatttttcctatgacctgaacctctgcggtctgaccgaggaccctgatctgcaggtgtctgcaatgcagcaccaaacagtactcgagctgactgagaccggcgtggaagcggccgcggcatccgcgattagcgtggcacgcacgttactcgtgtttgaggtgcagcaaccctttctgtttgtgctctgggatcagcaacataaatttcccgtttttatgggcagagtgtatgatccccgggct

SEQ ID NO: 19209 - DNA, 1500 bp, synthetic construct
  misc_feature 1..1500: note = source = /note="Description of Artificial Sequence: Synthetic coding sequence"
  source 1..1500: mol_type = other DNA
atggcttctagactaacactgctaacacttctcctcctacttctggctggggatagggcttcttctaacccaaatgccacttcttcttcgtcacaagatcccgaatctcttcaagatagaggagaagggaaggttgctacaacagttatttccaaaatgcttttcgtggagccaattctcgaagtgtcgtctctgcccacaacaaattcaactacaaattcagcaacaaagatcactgccaatactactgatgaaccaactacacagcctacaactgagccaactactcagcccactattcagcctacacagccaactacacagctgcccactgattcacctacacagccaacaacaggatctttctgtcccgggccagtaacactttgcagtgaccttgaatctcactccacagaagcagtgcttggagatgcactcgtcgatttctcactgaagctgtaccatgcattcagtgcaatgaaaaaagttgaaacaaacatggctttttcccccttttcgatcgcctccctactaactcaggtcttacttggggcaggggaaaatacaaaaacaaatttggaatccattctcagttatcctaaagatttcacatgtgtgcaccaggcattgaaaggatttactactaaaggagtcacttctgtctcccagatatttcatagtcctgatttggctatccgcgatacattcgtgaatgcttctcgaacactctattcgtccagtcctcgggtgttaagtaacaatagtgatgcgaaccttgaactgatcaatacttgggtcgctaaaaacactaataacaagatctcccgcctcctcgattctttaccttctgatacacgcttagtgctactgaacgctatatatctctcagcaaaatggaaaacaacttttgatcccaagaaaacaaggatggagcctttccactttaagaattctgtaattaaagtgcctatgatgaactctaagaaatacccggtggcccatttcatagatcagacgctcaaagcaaaagtcgggcagctgcagctctcccacaatctgtctcttgtgatactcgtccctcagaacttaaagcaccgcttagaagatatggaacaggccctgagtccatccgtgtttaaagcaataatggaaaaattagaaatgagtaaattccagcctacactgcttacactaccaaggataaaagtgactacttctcaggatatgctgagtataatggaaaaacttgaattcttcgatttctcctatgatctaaatttatgtggacttacagaagatccagatctccaggtctcagccatgcagcaccaaacggtgctggagcttacagaaacaggggttgaggcagcagccgccagtgcaatctccgtagctcggactctcctggtgtttgaggttcagcagccttttctttttgtactatgggatcagcagcataaattccctgtgttcatgggacgcgtgtatgatcccagggca

SEQ ID NO: 19210 - DNA, 1500 bp, synthetic construct
  misc_feature 1..1500: note = source = /note="Description of Artificial Sequence: Synthetic coding sequence"
  source 1..1500: mol_type = other DNA
atggccagccggctcacactcctgacactcctgctcctactgctggccggcgaccgggcttcaagtaaccctaatgcaaccagcagtagctctcaggacccagaaagcctgcaggatcggggcgagggaaaggtggcaactaccgtaatctctaaaatgctgtttgtcgaacctattctggaagtgtcatcgctcccaaccacaaacagcactaccaacagcgcaactaagattaccgcaaataccaccgacgagcccaccacacaacccactaccgagcctacaactcagcccaccatccaacccacacaacccaccacacagctccctacagactcaccaacccagcccaccacaggaagtttttgccctgggccagtgaccctctgtagcgacctggagtcacattctacggaagctgttctaggggacgccctggtggatttcagccttaagctgtatcacgcattctctgccatgaaaaaagtagaaaccaacatggctttttcaccgttttccatcgcatccctactcactcaggttctgctgggggcaggcgaaaacacaaagacaaacctggagagcattctgtcctatcctaaagactttacatgtgtgcaccaagccttgaaaggtttcactactaaaggggtcacatcggtctcacaaatattccacagccccgacctggccataagagacacattcgttaacgcctcgcgaaccttgtacagctcctcgccacgggtgctatcaaacaactctgacgctaatttggagctcatcaatacttgggttgctaagaatacaaacaacaaaatcagtcgcctgcttgactcacttccatcggacactaggctggtccttctgaatgcaatctatttgtccgcgaaatggaagaccacctttgacccaaagaaaactagaatggaaccgtttcactttaaaaactctgtaatcaaagttccaatgatgaactccaaaaagtaccccgtggcccacttcattgatcaaacactgaaagccaaggttggccaactgcaactctcccacaacctgagtctcgtgatactggtgccccagaacctgaaacatagacttgaagacatggagcaggccttgtcgcccagtgtgttcaaagccataatggagaaattagagatgtcgaagttccaacctacgctcctcaccctaccgcggattaaggtgaccacatcacaggatatgttatccatcatggagaaattggaattcttcgattttagttacgatctgaacctttgcgggctgacggaggacccagatctgcaagtcagcgccatgcaacatcagacggtgctggagctcaccgagactggcgtggaggcagcagccgcatctgccatttcagtcgctcgcaccctgctggtattcgaggtccagcagcctttcttgtttgtcctttgggatcaacaacacaagtttccagtgtttatgggtagagtttacgacccccgcgca

SEQ ID NO: 19211 - DNA, 1356 bp, synthetic construct
  misc_feature 1..1356: note = source = /note="Description of Artificial Sequence: Synthetic coding sequence"
  source 1..1356: mol_type = other DNA
atgtttgacatcgaatattttcggaaagatccccggcctttcttcaagttcgccaaagaaatctatccaggacagttccaaccttccctgtgtcacaaattcattgcactgagcgataaggagggcaagctcctgaggaactacactcagaatattgatacactggaacaggtggctggcattcagcggattattcagtgccatgggtcatttgccaccgctagctgcctgatctgtaagtacaaggtcgactgtgaggccgtgagaggagacatatttaaccaggtcgtcccacgatgtccaaggtgtcccgccgacgagccactagccatcatgaagccagaaatcgtgttttttggggaaaatctgcccgagcagttccacagagcaatgaaatatgacaaggatgaggttgatttactgattgtcattggttcttcgttgaaggtgcgacccgtagccctgatcccctcttctatcccgcacgaggtgccccaaatactgattaacagagaacccctcccacacctgcattttgacgtggagctactgggagactgcgatgtcattattaacgagctttgtcatagactgggaggggagtacgctaagttgtgttgcaaccccgtgaagttatcagaaataaccgagaaacctcctcggactcagaaggagcttgcttacctctctgagcttcctccaactccgttgcacgtttccgaggatagcagttcccctgagcggaccagccctcccgacagctcagtgatcgttactcttctcgaccaggctgcaaagtccaacgatgatctggatgtgagtgagtctaaaggctgcatggaagaaaagccacaagaagtgcaaaccagcagaaacgttgagtctatcgcggagcaaatggagaatcctgatttgaagaatgttgggtcttccaccggtgagaagaatgagcgtacttccgtagcaggcacggtaaggaagtgctggcccaaccgcgtcgctaaagagcagatctcgagacgcttggatggaaaccaatacctgtttttgcctcccaacaggtatatttttcatggggctgaagtgtactctgattccgaagatgacgtactgtctagtagtagttgtggttcaaattccgatagcggaacttgtcagagcccaagtctggaggaacctatggaggatgaatccgagatcgaagaattttacaacgggttggaggacgaaccggacgttccggagcgcgccgggggtgccgggttcgggaccgacggcgacgatcaggaggccattaacgaggccatatctgtgaaacaggaagttaccgacatgaactacccttccaataaatcc

SEQ ID NO: 19212 - DNA, 1356 bp, synthetic construct
  misc_feature 1..1356: note = source = /note="Description of Artificial Sequence: Synthetic coding sequence"
  source 1..1356: mol_type = other DNA
atgtttgacatagaatacttccgtaaggacccgaggccctttttcaaatttgcaaaggagatttaccctggacagttccagccttcactgtgtcacaagtttatcgctctttccgataaagaagggaaacttctgcgcaattacactcagaatattgacaccctggaacaggtggcaggtattcaaagaatcattcaatgccatggttctttcgcgaccgcatcttgtctgatctgcaagtacaaggtggactgcgaggccgtgagaggtgatatctttaaccaggttgtccctagatgtcctagatgccctgcggacgagcctctggcaatcatgaagcccgaaattgtgtttttcggagaaaacctgccagagcagtttcaccgagctatgaaatacgataaagacgaagttgatttgctcattgtcattgggtcgtccctgaaggtccgtccggtggccctcattccctcaagcatcccgcatgaagttccacaaattctgatcaacagggaacctcttccacaccttcactttgatgtggagctgcttggagattgtgacgtcataatcaacgaactgtgtcatcggcttggaggtgagtacgccaagctgtgctgtaacccagtcaagttgtcagaaattactgaaaaacctcctaggactcagaaagaactggcctacctcagtgagcttccccctactccacttcatgtgagtgaagatagctcttcgcccgaaagaacctcccctcccgactcgtcagtcatcgtgaccttgcttgatcaggcggcaaagagcaacgatgacctcgatgtgtcagaatccaagggctgtatggaggaaaagccccaagaggtccaaacctcccgaaacgtcgagtccatagctgagcaaatggaaaaccctgatctgaaaaacgtgggttcatcaacgggagagaagaacgagcgtaccagcgtcgcaggcaccgtgcggaagtgttggccaaacagggtggcaaaggaacagatttcccgacggcttgatggaaatcaatacttgtttttgccgcccaatcggtacatatttcatggtgccgaagtgtattccgattccgaggacgatgtcctttcttcatcgtcttgtgggagcaattccgattcgggaacttgccaatcaccttcccttgaagagcctatggaggatgaatcagagatcgaagagttctacaacgggcttgaagatgaaccagatgtgcctgaacgggcaggtggtgcaggctttggtactgacggcgatgatcaggaagcgatcaatgaagcaatttccgtcaagcaagaggtcacggacatgaactacccgtccaacaaatcc

SEQ ID NO: 19213 - DNA, 1356 bp, synthetic construct
  misc_feature 1..1356: note = source = /note="Description of Artificial Sequence: Synthetic coding sequence"
  source 1..1356: mol_type = other DNA
atgtttgacatagagtattttcggaaagacccgcgcccattctttaaattcgcaaaagagatttatcctggacagttccagcccagtctgtgccacaagttcattgccctttccgataaagaaggtaagctactgcgcaactacacacagaacatagacaccctggagcaggtggccggcatccagagaattattcagtgtcacggctcttttgcaacagcctcgtgccttatctgcaagtataaggtagattgcgaggccgtaaggggcgatatcttcaaccaggtggtccctcggtgccccaggtgtcccgctgacgagcccctggcaatcatgaagcctgagatagtctttttcggcgagaacttacccgagcaatttcaccgcgcgatgaagtatgacaaggatgaggtcgatctactcatagtaattggctctagccttaaggtgcgccctgtggcgctgatcccaagttctattccccatgaggtgccccaaatccttatcaatagagaaccattaccgcacctccactttgacgtggagctcctgggagactgtgatgttataataaatgagttatgccataggctcgggggtgagtacgctaagctatgctgtaatcccgtgaagctctccgagattactgagaagccccctcggacccagaaggagctcgcgtacctcagcgagcttcccccgacacccctacacgtgagcgaggatagttcctctccagaacggacctctccccctgacagctctgtgattgttacactcttggaccaggccgcgaagagcaacgatgatcttgatgtctccgagtccaaagggtgtatggaggaaaagccacaggaagtgcaaacctcacgcaatgtagaatccatcgcagaacagatggagaatccagacctaaaaaatgttggctcgagtaccggagagaaaaacgagaggacttccgtggctggcactgtcagaaaatgttggccaaatagggttgccaaggagcagatttctcgtcgtctggacgggaaccagtacttgtttctccccccgaatcgttatatattccacggggccgaagtctatagtgacagtgaggatgatgtgctgtcaagcagttcatgcggctctaattccgactccgggacctgccagagtccgtcacttgaggaaccgatggaagacgagtctgaaatcgaggagttctacaatggattggaagacgagccagatgtcccagaacgtgccggcggggctggcttcggcacagacggtgacgatcaggaagcaattaacgaggcaatttcggtgaagcaggaagtaactgacatgaactatccatcgaataagtca

SEQ ID NO: 19214 - DNA, 1356 bp, synthetic construct
  misc_feature 1..1356: note = source = /note="Description of Artificial Sequence: Synthetic coding sequence"
  source 1..1356: mol_type = other DNA
atgttcgatattgagtacttcagaaaggaccccaggcctttctttaagttcgcgaaggaaatctatccgggacagttccagccgtccctgtgccataagtttattgccttgagcgacaaggaggggaaacttctgaggaattacacccaaaacatcgacactctggaacaggtggcaggaatccaacgcatcatacagtgccacggatcgttcgcgactgcgagctgcttgatctgcaagtacaaagtggactgcgaggctgtcaggggggatatcttcaatcaggtcgtgccacggtgtccccggtgtccggcggacgagcccctcgctatcatgaaaccggagatagtgtttttcggagaaaacctcccagaacaattccacagagcaatgaaatacgataaagacgaagttgacctgctgatcgtgatcgggtcatcattgaaagtccgcccggtcgccttgatcccctcgtcgattcctcatgaagtgcctcaaatccttatcaatcgcgagccgctgccgcacctgcatttcgatgtcgagctgttgggcgattgcgatgtgatcatcaatgagctgtgtcacagactcggtggtgagtacgcaaaattgtgctgcaacccggtgaagctgagcgaaattaccgagaagcctcctcgcacccagaaggaactcgcatacctgagtgaactgccgccaaccccactccacgtgtcggaggattcctcttccccagaaagaacctcacctccagacagctcagtcattgtgaccctgctggaccaggccgccaagtcgaacgacgacctggatgtgtccgaaagtaagggatgtatggaggaaaagccgcaagaggtacagacgtcgagaaatgttgaaagcatcgccgaacaaatggaaaatccggacctgaagaacgttggaagcagcactggggagaaaaacgagcggacctccgtcgccggtactgtccgcaaatgctggcctaaccgcgtggcaaaggagcaaatctcgcggcgtctggacggaaaccagtacctgttcctgcctccgaaccgctacatcttccatggcgctgaggtgtactccgactcagaggacgatgtactgtcctcctcttcgtgcggatccaattcagactcgggaacttgccagagcccgtcgctcgaagaacccatggaggatgaatccgaaatcgaagagttttacaacggactcgaagatgaacctgatgtgccagagcgggccggaggggcgggctttggtaccgatggagatgaccaggaagcgatcaacgaggcgatctcggtcaagcaggaggtgactgacatgaactacccaagcaacaagtcc

SEQ ID NO: 19215 - DNA, 1356 bp, synthetic construct
  misc_feature 1..1356: note = source = /note="Description of Artificial Sequence: Synthetic coding sequence"
  source 1..1356: mol_type = other DNA
atgttcgacatcgaatacttcaggaaggatccaagaccgtttttcaagttcgccaaggagatctacccaggacaatttcagccgtcattgtgccataagttcatcgccctttccgacaaggagggcaaattgctgcgcaactacacccaaaacatcgataccctggagcaagtcgccgggatccaacgaatcatccaatgccacggatcgtttgctaccgccagctgcctgatttgcaaatacaaagtggattgcgaagccgtgagaggcgacatcttcaaccaggtggtcccacgctgtcctcgctgcccggcggacgagcccctggctatcatgaagccagaaatcgtgttcttcggtgaaaaccttcctgaacagttccatagggcgatgaaatacgacaaggacgaggtcgacctgctcatcgtgattgggtcatcgctcaaagtgcgtccggtcgcactgatcccgtcatcgatcccgcatgaagtgccacagatcctgatcaaccgcgagcctctgccacatctgcattttgatgtggaactgctcggagactgcgatgtgattatcaatgaactttgccataggctgggaggtgagtacgcaaagctctgctgcaaccctgtgaagttgtcggaaattactgaaaagccgccgcgcacccagaaggaactggcgtacctgtcagaattgccgccaacgccgctgcacgtgtcggaagattcctcctccccggaaagaacgtctccgcctgatagctcggtcatcgtgactctccttgatcaggccgcgaagtcgaacgatgatctggatgtgtcggagtcgaagggatgcatggaggaaaagccgcaggaagtgcagaccagccggaatgtggagtcgatcgctgagcagatggagaacccggatctgaagaacgtgggatcctcgaccggggaaaagaatgaaagaacttcggtggcaggcaccgtgcgcaagtgctggccgaatcgcgtcgccaaagaacagatctccagacggctggatggcaaccagtacttgttcctgccgcctaatcgctacatcttccacggtgccgaggtgtactccgactcagaagatgacgtgctgtcctcatcaagctgtggctcgaacagcgattccgggacctgccagtccccatcgctggaggaaccaatggaagatgaaagtgaaatcgaggagttctacaacggcctcgaagatgaaccagacgtgccggagcgggccggaggagctggattcggaaccgacggagacgatcaggaagcgatcaacgaagccataagcgtgaagcaggaagtgactgacatgaactacccgtcgaacaagtcg

SEQ ID NO: 19216 - DNA, 1356 bp, synthetic construct
  misc_feature 1..1356: note = source = /note="Description of Artificial Sequence: Synthetic coding sequence"
  source 1..1356: mol_type = other DNA
atgtttgacatcgagtattttaggaaagatccgcgcccatttttcaagtttgcgaaagagatttatcccggtcagttccaaccgagtctgtgccacaagtttatagctcttagtgacaaggagggaaaactgttacgcaactatacccagaacattgacacccttgaacaagtagcaggtattcaacggatcatacagtgccatggctctttcgccaccgccagctgcctgatctgcaagtataaagtcgattgtgaggccgtgcgaggcgatatcttcaaccaggttgtgcctcgctgtccccgctgccctgctgatgaaccacttgccatcatgaaaccagaaatcgtttttttcggagaaaacttgcctgaacagttccatcgggcgatgaagtatgacaaggacgaagtggacttattaattgttatcgggtcttccttgaaagtgcggccggtcgctcttattccgagtagtatcccgcacgaggtacctcagatactcataaaccgtgaacccctcccacacttgcattttgacgtagagctactcggagattgtgatgttattattaacgaattgtgccaccggctgggcggagagtacgcaaaattgtgctgtaacccagtgaagctcagtgaaatcactgagaagccacctcgcacgcagaaggaattagcttacttgagtgagctgcccccgacacctctgcatgtgtcggaagactcgtcaagtcccgagcggacgtccccgccggactcgtctgtgatcgtcacacttcttgatcaagccgctaaatcgaacgatgatctagacgtttccgaaagtaagggttgcatggaggaaaagccacaagaggtgcagacatcaaggaacgttgagtcaatagccgaacaaatggaaaacccagacctgaagaacgttggaagctccaccggcgagaaaaacgagagaacgtctgttgcaggcacagttcgaaaatgctggcctaaccgtgttgcaaaggagcagatatcccgccggctagacggaaatcaatacctctttttaccacccaaccgctacatcttccacggcgctgaggtttactccgactcagaagatgatgtcctctcctcatcatcctgcgggtccaactccgatagcggcacttgccaatcaccaagcctggaagagcctatggaagacgagagcgagatagaggaattctataatgggctggaagacgaacctgatgtgcccgaaagggccgggggcgctggctttggcacggatggtgacgatcaagaggcaatcaatgaagcaatcagtgtgaagcaagaggtcacagatatgaactacccctccaataagtcc

SEQ ID NO: 19217 - DNA, 1356 bp, synthetic construct
  misc_feature 1..1356: note = source = /note="Description of Artificial Sequence: Synthetic coding sequence"
  source 1..1356: mol_type = other DNA
atgtttgacattgaatatttccggaaagatcctcggcctttctttaaattcgccaaggagatttacccaggccagtttcagccctcactttgccacaagtttattgcactgtccgataaggaaggaaaattactgcgcaattatacccagaacatagatacgctggagcaggtggcagggattcagcggattatccagtgtcacggttcctttgctaccgccagttgccttatttgtaaatacaaagtcgattgcgaagctgtgagaggcgacatatttaatcaggtggtcccacgctgcccacgttgccccgccgacgagccactggctatcatgaaaccagaaattgtgtttttcggcgagaacctgcctgaacagtttcaccgggccatgaaatatgataaggatgaggtggatctgctgatcgtcataggatcatccctgaaggtccgaccggttgcgctcattccttcctccatccctcacgaagtgccgcagatacttattaaccgcgaacccttgccccacttgcatttcgatgtcgagttactcggggactgtgatgtgataatcaatgagctgtgtcacagactcggaggagagtatgctaaattatgttgtaatcctgttaaactgagcgagatcactgaaaaacctcctcgaacccagaaggaactggcctatctgagcgagctccctcctacccctctgcacgtgtcagaagactcaagttcacccgagcggactagccccccggactctagcgtaattgtgactctgctcgatcaagctgctaaatccaacgacgacttggacgtgtccgagagcaagggctgcatggaggaaaaaccccaggaagtccagacaagcagaaatgtcgagtcgattgccgagcagatggaaaatccagatctgaagaacgtggggagctctacaggagaaaagaatgaaagaacttctgtggcagggacggtgcggaagtgctggcctaaccgggtggctaaagagcagatctctcggcggttagatggaaatcagtatctcttcctcccccccaataggtacattttccacggggccgaagtctattccgattctgaagacgatgtccttagctcaagctcatgtggctccaactctgactcggggacttgtcaatctccttctctggaggagccgatggaggacgaatcagagattgaggaattctataacgggttagaggacgagccagacgtgcccgaaagggccgggggggctgggttcggaacagacggagatgaccaggaagctattaatgaagctatatctgttaagcaggaagttaccgatatgaattaccctagcaataagagc

SEQ ID NO: 19218 - DNA, 1356 bp, synthetic construct
  misc_feature 1..1356: note = source = /note="Description of Artificial Sequence: Synthetic coding sequence"
  source 1..1356: mol_type = other DNA
atgttcgatatcgaatatttccgcaaagaccctcgccccttctttaaatttgccaaagaaatctacccagggcagtttcagccttctctctgccacaaatttattgctctcagtgataaggaaggaaaattactgcggaattacactcagaatatagatacacttgagcaggtggctggaatccagaggatcatccagtgccatggatcctttgctacagcctcatgtctgatatgtaaatataaagtggattgtgaagcagttcgtggagatatctttaaccaggtggtgccccgctgccctcggtgcccagctgatgagccactggcaataatgaaacctgaaattgttttttttggagaaaatctccctgagcagtttcatcgggccatgaaatatgataaagatgaagtggatctgctgatagtcatagggagttccctcaaagttaggcctgtggcccttattccgtcttccatccctcacgaggtgccccagattttaatcaatagagagcctcttcctcatcttcacttcgatgtcgaacttttgggagattgcgacgtgatcatcaatgaactgtgtcacagactagggggggagtatgctaaactgtgttgtaaccctgtgaagctatcggaaatcacagaaaaaccaccccgaactcagaaagaacttgcatatctgtccgaactgccccctacgcccctgcatgtgtccgaggattcaagttcgcctgagagaacttccccccctgattcatctgtgatcgtgacacttttagatcaggctgctaagtcgaatgatgatcttgatgtgtctgaatctaaagggtgcatggaggaaaaaccccaagaagtacagacatcccggaatgtggagtccatagcagagcagatggagaatcccgatctgaaaaacgtggggagttcaactggggaaaaaaatgaacgcacttctgttgctggaactgtcaggaaatgttggccaaatcgggttgcaaaagaacagatctctaggcgactcgatggaaatcagtacctcttcctgcctcccaacaggtatatcttccacggagctgaggtctactctgattctgaagatgatgtcctgtcctcctctagttgcggaagtaattctgattccggaacgtgtcagagtcctagtctcgaagaaccaatggaagatgaatccgaaattgaggaattctacaacgggctcgaagatgagcccgatgtgccagaaagagccgggggagccgggtttggaacagatggggacgaccaggaagctatcaatgaagctatatcagtcaagcaggaagttacagatatgaattatccttctaacaaatcc

SEQ ID NO: 19219 - DNA, 1356 bp, synthetic construct
  misc_feature 1..1356: note = source = /note="Description of Artificial Sequence: Synthetic coding sequence"
  source 1..1356: mol_type = other DNA
atgtttgacattgagtattttaggaaagacccgcgaccgttcttcaaatttgcgaaagaaatttatccgggtcaattccagccgtcactatgccataaatttatagcgctgtcagacaaagagggtaagttattaagaaattatacacaaaatattgatactcttgagcaagttgctggaatccaacgcattattcaatgtcatggtagctttgccacagcttcatgtctgatttgtaagtataaagtggattgcgaagccgtacgcggcgacatttttaatcaagtggttccacgctgccctcgatgtcctgcagatgaacccttagccattatgaagccggaaatagtcttcttcggcgaaaatttaccggagcaatttcatcgcgccatgaaatatgataaggacgaagtggacctgcttatagtcataggatcctctttaaaagtccgcccggtagccttaataccgtcaagcattcctcatgaagtaccccagatcctcataaatcgtgaacctctgccgcaccttcattttgacgtggaattgttaggcgattgtgatgtcatcatcaacgaattgtgtcacagactagggggcgaatatgcaaaactctgctgcaaccctgtcaaactgtccgaaataacggaaaagcctccgcgcacacagaaggaattagcgtatttgagcgaactgccaccaaccccgcttcacgtctctgaagatagctcgtctccagaacggacaagtccgccggacagctctgtgattgtcacgttgttggatcaggcagctaaatccaacgatgatttagacgtcagcgaatctaaaggctgcatggaagagaaaccgcaagaagtgcagacaagtcgaaacgttgagagcattgcagagcaaatggagaatccggaccttaaaaacgtaggatcttctactggcgagaaaaatgagcggacctcagttgcggggacagtgcgcaaatgttggcctaaccgagtggctaaagaacagatttcccgcagattggacggaaatcagtatctctttctgccaccaaataggtatatatttcatggagccgaggtgtactctgattctgaggacgacgtgttatcaagttcttcatgtggatcaaacagtgattcaggtacgtgccaatcaccgtctttggaggagcccatggaagatgagagcgaaatcgaagaattctataatggcttggaagatgaaccagatgtgccggagagagcgggtggcgctggctttggaacagatggagacgaccaagaggcaattaatgaagctatcagcgtgaagcaagaagtcacggacatgaattatccttccaataaatcc

SEQ ID NO: 19220 - DNA, 1356 bp, synthetic construct
  misc_feature 1..1356: note = source = /note="Description of Artificial Sequence: Synthetic coding sequence"
  source 1..1356: mol_type = other DNA
atgtttgacattgagtacttccggaaggaccccagacctttcttcaagttcgctaaagaaatttaccccgggcaattccagccatcactatgccacaaatttatcgccctttcagacaaagaggggaaactcctgcgaaattatacccagaacatcgacacattggaacaggtcgccggcatccaacgcattatacaatgtcatggcagcttcgctactgcctcttgcctgatctgcaagtataaggtggactgcgaagcagtgcgcggcgacattttcaatcaagtcgttcctcgctgtcccaggtgccccgcagatgaacccctcgccattatgaagcccgaaattgtgttctttggcgagaatctacccgagcagttccatagggcaatgaagtacgataaggatgaggtggatttactgatcgttataggatcatccctgaaggtgagaccggtagcactgattccttcctctatcccgcacgaggtgccccagatcctgataaacagggagccactaccgcacctgcattttgacgtggaattgctgggcgactgtgatgtgataataaacgaactgtgtcaccgcctggggggcgaatacgctaaactgtgctgcaacccagtgaagcttagcgagataactgagaagccacctcggactcagaaggaattggcctatcttagtgagcttcctcccacaccactgcatgtctccgaagatagcagcagccctgaacggacctccccacctgattcaagtgttattgttacactgctggatcaagcagctaaaagcaacgacgatttagacgtatccgagtcaaaaggctgtatggaggaaaagccacaagaagttcaaacatctagaaatgtggagagcatagcagagcagatggaaaatccggatctgaaaaacgtcggcagcagtacaggggaaaaaaatgagagaacatctgttgctggcactgtccggaaatgctggcctaaccgggtagccaaggaacagatcagtaggagactggatggtaaccagtacctgtttctgccaccgaataggtacatcttccatggagcagaggtgtacagcgacagcgaggacgacgtgctctccagctcctcttgtggatctaacagcgatagcgggacatgccagtcaccaagtttggaggaacccatggaggacgagagtgaaattgaggagttctacaatgggctcgaggatgaacccgatgttcctgagagagcaggtggtgcaggatttggcacagacggagatgaccaggaggcaatcaacgaagctataagcgtgaaacaggaggtgaccgacatgaactatccctctaacaaaagc

SEQ ID NO: 19221 - DNA, 1356 bp, synthetic construct
  misc_feature 1..1356: note = source = /note="Description of Artificial Sequence: Synthetic coding sequence"
  source 1..1356: mol_type = other DNA
atgtttgatatcgagtacttcaggaaggacccacggccattctttaagttcgcaaaggagatttacccaggacaatttcaaccctcgctctgccataagttcatcgctctgtcagacaaagaaggaaaactgttgcgcaactacacccaaaacatcgacaccctggaacaagtggcagggatccagagaatcatccagtgccacgggagcttcgcaactgcatcatgcctcatctgcaagtacaaggtggactgcgaagcagttcgcggagatatcttcaaccaggtggtgcctagatgccctcgctgccctgccgacgagccgctggccatcatgaagccggagatcgtgttcttcggagagaacctcccggaacagttccatcgcgcaatgaaatacgacaaagatgaagtggacctgctgatcgtcatcggatcatcccttaaagtgcggccggtcgcgctgatcccgtcatccatccctcacgaagtgccgcagattctcatcaatcgagaacccctgccgcacctccactttgacgtagagctgctgggcgactgcgacgtcatcatcaacgagttgtgccatcggttgggcggagagtacgccaagctgtgctgtaaccctgtcaagctgtcagagatcaccgaaaagccaccgcggacgcaaaaggagctggcatacctctcggaactgccaccgactcccttgcacgtgagcgaggattcgtcgagcccggagcggacctcccctccggactccagcgtgatcgtcactctgctggaccaggccgccaagtcgaatgatgacctcgacgtgtcggaatcgaaaggttgcatggaggagaagccacaggaggtccagaccagccgcaacgtggaatccattgctgaacagatggaaaatccagacctcaagaacgtaggatcaagcaccggcgaaaagaatgagcggacttccgtggcggggactgtccggaagtgctggccaaacagagtcgcaaaggaacaaatctcccgccggttggacggcaaccaatacctcttcctccctcccaatcggtacatctttcacggcgccgaagtgtatagcgactcagaagatgatgtgctgtcctccagctcatgcggatcgaactccgattcggggacttgccagtcccctagcctggaagagccaatggaggacgaatcagaaatcgaggagttctacaatgggctcgaggatgagcccgatgtcccagaacgcgcgggaggagccggcttcggaaccgacggagacgaccaggaggcgatcaacgaagccatctcagtgaagcaagaggtcacggatatgaattacccatcgaacaagtcg

SEQ ID NO: 19222 - DNA, 1356 bp, synthetic construct
  misc_feature 1..1356: note = source = /note="Description of Artificial Sequence: Synthetic coding sequence"
  source 1..1356: mol_type = other DNA
atgttcgacattgaatactttagaaaggaccccagaccctttttcaagtttgcaaaagagatttaccctgggcagttccagcctagcctttgtcacaaattcatcgccctttcggataaggaaggaaagctccttcggaactacacccagaacattgataccctggaacaagtggcagggattcagcgtataatccaatgccacggatcctttgcaaccgcgagctgtctcatctgcaagtacaaggtcgattgcgaagcagtgcgaggtgatatcttcaatcaggtggtgccccggtgtcctcggtgtccagcagatgaacctctggcaatcatgaaacctgaaatagtgttctttggtgaaaatctccctgaacaatttcatagggcgatgaagtacgataaggatgaagtggatttgttgatcgtcattggttcgtctctgaaagttcgacctgtggcacttataccaagctctatcccacatgaagtgcctcagatccttatcaacagagaacccctgccccatctgcattttgatgtggaactgttgggcgactgtgacgtgatcatcaacgagctgtgtcaccggctgggaggtgaatacgccaaactttgttgtaatcccgtgaagttgtccgaaattaccgagaaaccccctcggacccagaaggaactcgcatatctctcagagcttccaccaaccccacttcatgtctccgaggattcgtcaagcccagagcgtaccagccctccggactcgtcagtcatcgtgactctccttgatcaagcagcgaagtccaacgatgatctcgacgtgtcggaaagcaagggatgcatggaggagaagcctcaagaagtccaaacctcgagaaatgtggaatcgattgctgaacagatggaaaacccagacctcaagaatgtcgggtcgtcaactggagaaaagaacgaacgcacttcggtcgcagggactgtccggaagtgctggccaaacagggtggcaaaggagcaaatttccagacggctggacggcaaccagtacctgtttctgccgccgaaccgatacatttttcatggagcggaggtttactccgattcggaagatgacgtgctctccagctccagctgtggatctaactcggactcaggcacctgtcaatcaccgtcccttgaggaacctatggaagatgaatccgaaatcgaggaattctataacggtctggaagatgaaccggatgtcccagaaagggcaggcggcgcaggatttgggactgatggtgatgatcaagaagcgatcaacgaagctatttcggtgaaacaggaagtgactgatatgaattacccaagcaataagtcg

SEQ ID NO: 19223 - DNA, 1356 bp, synthetic construct
  misc_feature 1..1356: note = source = /note="Description of Artificial Sequence: Synthetic coding sequence"
  source 1..1356: mol_type = other DNA
atgttcgacattgagtactttagaaaggacccgcgaccttttttcaagttcgccaaagaaatctacccaggacaatttcaaccgtcgctgtgccataagtttattgctctctccgacaaagaagggaagctcctgagaaactacacgcaaaacattgacaccctggaacaagtcgcaggaatccagaggattatccaatgtcatggctcgttcgcaactgccagctgtctcatctgtaaatacaaggtcgactgtgaggctgtgcggggtgacattttcaaccaagtcgtgccgagatgcccacggtgtcccgcggatgagccacttgcgataatgaagcctgaaatcgtgttttttggggaaaacctgcctgagcaatttcatagggcaatgaaatacgataaggacgaagtggaccttcttattgtcatcggatcgtccctgaaggtccgaccagtcgcacttataccgtcatccatcccccacgaagtgccacaaatcctcattaacagagaacctttgcctcatttgcattttgacgtggagctcctgggggattgtgatgtgatcataaacgaactttgtcatcgcctgggaggagagtacgcgaaactgtgctgcaatcctgtgaaactgtcagagattaccgagaaaccccctaggacccagaaagaattggcatacctgagcgaacttcctccaactcccctccacgtcagcgaagatagctcctccccggaaaggacttccccacctgattccagcgtcattgtgaccctgctcgatcaagcagcaaagtccaacgatgatcttgacgtctccgaatcgaaaggatgcatggaggagaagccacaagaagtgcaaacctcccgtaacgtggaatcaatcgcggagcaaatggaaaacccagatcttaagaatgtgggatccagcactggagaaaagaatgagcgcacgtcggtcgcaggaaccgtgagaaagtgttggcccaaccgggtcgcaaaggaacaaatatcgagacgactggatggtaaccaatacctgttcctcccaccgaaccggtatatctttcacggggcagaagtgtactcagattccgaagatgacgtgttgagcagcagctcctgcggatcgaactcggactccgggacctgccaatcgccatcccttgaagaacctatggaagatgagtcagagattgaagaattctacaatggtctggaagatgaacctgatgtgccggaacgggcaggtggtgctggctttggcactgacggcgatgaccaggaagctatcaacgaggccatatcggtgaagcaagaggtcaccgacatgaattacccaagcaataagtcc

SEQ ID NO: 19224 - DNA, 1356 bp, synthetic construct
  misc_feature 1..1356: note = source = /note="Description of Artificial Sequence: Synthetic coding sequence"
  source 1..1356: mol_type = other DNA
atgtttgatattgaatactttcgcaaggatccaagaccattctttaagtttgcaaaagagatctacccaggtcagttccagccttcactttgtcataagtttattgcgctgtccgataaagaaggaaagttgctgcgaaattacacccaaaacatagataccctcgaacaggtggctggtatccagcgcataattcaatgtcacggctccttcgcaactgcctcctgtcttatttgcaagtacaaagtggattgtgaggccgtgcgaggcgacatctttaaccaggttgtgccccgctgtcctaggtgccctgcagatgaaccactggccattatgaaacctgaaattgtgttttttggagaaaacctccctgagcaatttcatcgcgccatgaagtatgacaaggacgaagtcgaccttctgatcgtgattggatcctcactgaaggtgcggccagtggcactcatcccctcttcgattccccatgaagtgcctcagatcctcatcaaccgtgaacctctgcctcatcttcactttgacgttgaactgctgggggattgcgatgtgattatcaatgagctctgtcaccgactcggaggcgaatacgcaaagctgtgctgcaatccagtgaagctgtccgagatcactgaaaagccgccccgcactcaaaaggaacttgcgtacctttcggagttgcctcctactccactccatgtgtcggaggattcctcgagccccgaacggacttcaccacccgacagctctgtgatcgttaccctgctggatcaagcagcaaagtcgaacgatgacctcgacgtgtcggaatcaaagggctgtatggaggaaaaacctcaggaagtccagacctcccgaaatgtcgagtccatcgccgaacagatggaaaatcctgaccttaagaatgtgggatcctcgaccggtgagaagaacgagaggacctcggtggcaggaacggttagaaagtgttggccgaaccgggtcgcaaaggagcaaatctcccggaggcttgatggaaaccagtacctgtttcttccaccaaatcgatacattttccacggggcagaagtctactccgatagcgaggatgatgtcctgtcctcgtcatcttgtgggtccaactccgattcgggcacgtgtcagtcgccctccctggaggagcctatggaagatgagagcgagattgaagagttctataatgggctggaagatgagccagatgtgccggaacgggccggtggagcagggtttggaaccgatggagacgatcaggaggcaatcaatgaggcaataagcgtgaaacaagaggtgactgacatgaattacccttccaacaagagc

SEQ ID NO: 19225 - DNA, 1356 bp, synthetic construct
  misc_feature 1..1356: note = source = /note="Description of Artificial Sequence: Synthetic coding sequence"
  source 1..1356: mol_type = other DNA
atgtttgacatcgagtacttcagaaaggatccaagaccttttttcaagtttgctaaggagatataccctggtcaattccagccttccctgtgtcacaaattcatcgctctgtcagacaaggaaggaaagctgttgcgcaattacacccaaaacattgacactctggaacaggttgcaggtatccaacggataatacaatgccacggttcgttcgcgacggcctcctgcctcatctgcaaatacaaggtggattgcgaagcagtccggggagacatctttaaccaagtggtacctagatgtcctaggtgcccagcagacgaacctcttgcgattatgaaaccagaaatcgtgtttttcggagaaaacctgcctgagcaatttcatagagccatgaagtacgataaggatgaggtcgatctcttgattgtcattgggtcgtccctcaaagtaagacctgtggcacttattccatcatcaattccacatgaggtcccacagattctgatcaaccgtgagcctcttccacatttgcacttcgatgtggaactcctgggagattgtgacgtgattatcaacgaactttgtcataggttgggcggagagtacgccaaactttgttgtaatccggtgaagctctccgagatcacggaaaaaccaccacggacccagaaagagcttgcatatctctctgaactccctccaactccactgcatgtctcggaagattcctcgagtcctgaacgtaccagccctcctgatagctcagtcatagtcactctcctggaccaagccgcgaagtctaatgatgatctcgatgtgtccgagtcgaaagggtgtatggaggaaaagcctcaagaggtgcagacctctcgcaacgtcgaatctatagcagaacaaatggagaacccagaccttaagaacgtgggatcgtcgactggcgaaaagaacgagagaacctcagtcgcaggcactgtccgaaaatgttggcctaatagggtcgcaaaggaacaaattagccggcggcttgatggaaatcagtacctgtttcttccgccgaacaggtacatctttcatggagctgaagtgtacagcgacagcgaagatgacgtgctttcctcatccagctgtggtagcaattccgactcgggaacctgtcagtctccttcccttgaggagcctatggaagatgaaagcgaaattgaggagttttacaacggtctggaggacgaaccggacgtgcccgaacgtgccggcggagcaggtttcggaaccgatggggatgatcaagaggcaattaacgaggccattagtgtgaagcaggaagtgactgatatgaactatccttcaaataagtca

SEQ ID NO: 19226 - DNA, 1356 bp, synthetic construct
  misc_feature 1..1356: note = source = /note="Description of Artificial Sequence: Synthetic coding sequence"
  source 1..1356: mol_type = other DNA
atgttcgacatagagtactttagaaaggatccgcgccctttctttaagttcgcaaaagagatttacccgggacaatttcagccgagcctctgccacaagttcatcgcgctgtcggacaaggagggaaaactgctcaggaattacacgcagaatattgacaccctggagcaggtggccggcatccagagaatcatccaatgtcatgggtctttcgctactgcgtcctgcctcatttgtaagtacaaggtggattgcgaagccgtcagaggggatatcttcaaccaggtggtgccacgctgtccgcgttgccccgccgacgaaccgcttgccatcatgaaaccggagatcgtgttcttcggggagaacctgcctgaacagtttcatagagcaatgaaatacgataaggacgaagtggacctcctcatcgtgatcggatcatccctgaaggtccgcccagtggcgctgattcccagcagtatccctcatgaagtgcctcagatcctcatcaacagagaaccactcccgcacctccacttcgacgtcgagctgctcggagattgcgatgtcatcattaacgagctgtgccaccggctcggaggagagtacgcgaaactgtgttgcaaccccgtcaaactttccgagatcaccgagaagcctccccgcacccagaaagaactcgcctacctctcagagctgccgccgaccccacttcatgtgtccgaggatagtagctcgccggagagaacttccccaccggacagctccgtcatcgtgaccctgctggatcaggctgcaaaatcgaacgatgaccttgacgtgtcagaatcgaagggatgcatggaagaaaagcctcaggaagtccaaactagccgcaacgtggagagcatcgccgagcagatggaaaacccggacctgaaaaacgtggggagctccactggggaaaagaacgaaaggacctcggtggcgggaactgtccggaagtgttggccaaaccgggtagcgaaggaacaaatctcccgccgccttgacgggaaccaatacctcttcctgccaccgaaccggtacatcttccacggcgccgaggtgtactccgattcagaagatgatgtgctttcctcctcctcgtgcggctctaactcggactcgggtacctgtcagtcaccgtcccttgaagaaccgatggaagatgaatccgaaatcgaggagttttacaatggcctggaggatgaacctgacgtcccggagcgcgcgggaggcgcaggcttcggaactgacggggacgaccaagaggccatcaatgaagccatttcggtcaagcaggaagtgacggatatgaactacccgtcaaacaaaagc

SEQ ID NO: 19227 - DNA, 1356 bp, synthetic construct
  misc_feature 1..1356: note = source = /note="Description of Artificial Sequence: Synthetic coding sequence"
  source 1..1356: mol_type = other DNA
atgtttgatattgaatactttcggaaggacccccggccttttttcaagttcgccaaagagatctaccctggccaattccaaccatccctctgccataagttcatcgctctcagcgacaaagaggggaaacttctgcgaaattacacccagaatatcgatacgcttgagcaggtggcaggcatccagaggatcattcagtgtcatgggtctttcgcaaccgcaagttgtctgatatgcaaatataaagtcgattgcgaagcagtcagaggagatatcttcaaccaggtagtaccgcggtgcccccgctgcccagccgacgagccactcgcaattatgaaacccgagattgttttctttggcgaaaacctgcccgagcagttccatagggccatgaagtacgataaggacgaggtcgacctgctgattgtgataggatcttccctgaaagtgcggccagttgcactgataccctcatccattcctcatgaggtgccacaaattctcatcaacagggagccattgccacaccttcacttcgatgtcgagcttctgggcgattgcgatgtgattattaatgagctctgtcaccgactggggggggagtatgccaagctttgttgtaaccctgtgaaactctctgaaatcacagaaaagccccctagaacccagaaagaactggcgtacctcagcgagctgcctcctaccccactgcatgtgagtgaggacagtagttctcccgagaggacgagcccaccagactcaagcgtgatcgtgacactgctggaccaggcagccaagagtaatgacgatctggacgtgagtgaatctaaaggctgtatggaggaaaagccgcaagaggtgcagacatcaaggaatgtggagtccattgccgagcaaatggagaacccggacctgaagaatgtcggaagctctacaggcgaaaagaacgaacggactagcgttgctgggacagtacgcaagtgctggcccaatcgcgtggccaaggaacagatcagtcgacgcttggatggaaaccagtacctgttccttcctccaaaccggtatattttccatggggcagaagtatactcagacagcgaggacgacgtcctctcttctagtagctgcgggtcaaatagcgatagcgggacttgtcagtctccttcactggaggaaccaatggaagatgagtccgagatcgaagagttctacaacggattggaagatgagccagatgtgcccgaaagagcaggcggggctggattcgggaccgacggagatgatcaagaagcaattaatgaggcgatcagcgttaaacaagaagtgactgacatgaattatccttcaaacaaatca

SEQ ID NO: 19228 - DNA, 1356 bp, synthetic construct
  misc_feature 1..1356: note = source = /note="Description of Artificial Sequence: Synthetic coding sequence"
  source 1..1356: mol_type = other DNA
atgtttgatatagaatacttccggaaagatcctcgtccgtttttcaagttcgccaaggaaatctacccaggccagttccaaccctccttgtgtcataagtttatcgcgctctcggataaggagggaaaacttctgcggaactacacccagaatattgataccctggaacaggtggctgggatacagaggataattcagtgccacggttcgtttgcaacggcttcctgtctgatttgcaagtataaagtggattgcgaagcggtgagaggtgacattttcaatcaggttgtgccgcgctgcccacgatgtccagcagacgagcctctcgccatcatgaagcctgagattgtgttttttggagagaatttgccagaacagtttcaccgggcaatgaaatacgataaggatgaggtggatctgctgattgtgatcggctcatcacttaaagtccgtcctgtcgcactcatcccctcatccattccccatgaggtgccccagattcttatcaacagagaacctcttccacaccttcattttgacgtggaactgcttggcgactgcgatgtgattatcaacgaactgtgccatcgtctgggtggagaatacgccaaactttgctgtaacccagtgaaactttcggaaatcactgaaaagcctccgcgtacgcagaaagagttggcctatctttccgagcttcctcccaccccactccacgtctctgaagattcgtcgtcacctgaacgtacttcgccacctgactcatccgtcatagtgaccttgctggatcaggcagctaagtcaaacgatgatctggacgtttccgaatcaaaggggtgtatggaagaaaagccacaggaagttcaaaccagtagaaacgtggaatcgatcgcagaacaaatggaaaatccggatctgaaaaatgtgggatcatccaccggagagaagaatgaaagaacttcggtggcaggcactgtgcgaaagtgttggccaaatagggtggccaaggagcagatctcaagacgactcgatggaaaccaatacctctttcttcctccaaacagatacatctttcatggagcggaagtgtactcggactcagaggatgacgtgctgtcgtcgtcctcctgtggatctaactctgatagcgggacttgtcaatcgccttccctggaagaaccgatggaggatgaatccgaaatcgaggagttttacaacggcctggaagatgagcctgatgtgcctgaacgggcggggggagcgggttttggtacggatggggatgatcaagaggcgattaatgaagcaatctccgtgaagcaagaggtcaccgatatgaactacccttccaataagagc

SEQ ID NO: 19229 - DNA, 1356 bp, synthetic construct
  misc_feature 1..1356: note = source = /note="Description of Artificial Sequence: Synthetic coding sequence"
  source 1..1356: mol_type = other DNA
atgttcgatattgagtacttcaggaaagatccaaggccattcttcaagtttgccaaagagatctatccaggtcagttccaaccaagtctctgtcacaagtttatcgccctgagtgataaggagggaaagctgctgcgcaattacacgcagaatatcgacactttggagcaggtggcaggaatacaaaggattatccagtgtcatggctcttttgcgacggctagttgtcttatctgcaaatacaaggtggactgcgaggcagtgcgcggcgatatctttaaccaggttgtacctaggtgtccgagatgcccagctgacgaacctttggccattatgaagccggaaattgtatttttcggagagaacctgcccgagcagttccaccgcgcgatgaaatacgacaaggacgaagtcgatttgttgattgtcattggctcctcattgaaggttagaccggtagctcttattcccagcagtatcccccatgaagtacctcagatccttatcaatagagagcctttgcctcatctgcacttcgatgtagagctgctgggcgattgcgacgtgatcatcaacgagctgtgtcaccgcctgggtggtgagtacgctaaactgtgttgcaacccagtaaagctcagcgagattacggagaaacctcctcgcacccagaaggagcttgcctacctttcagaactccctcccacccccctgcacgtgtctgaggactcatctagtccggagcgcacaagcccacctgactcatccgtaatcgttactctgctggatcaggctgctaagtctaatgacgatctcgacgtctccgaaagtaagggctgtatggaggaaaagccccaggaagtgcagacctcaaggaacgtagagagcatcgctgagcagatggaaaaccccgatcttaagaacgtgggttctagcacaggtgaaaaaaacgagcgcacaagcgtggcaggaactgtcagaaaatgctggcccaacagagtggctaaagagcaaatctctaggaggctggatggaaaccaatacctcttcctgccgcctaatcgctatattttccatggtgctgaagtatactcagactctgaggacgacgttctgtcatcatcatcttgcggttccaacagcgatagcggcacttgccaaagtccgtctcttgaagaaccgatggaagacgagtcagagatcgaagagttttacaacggccttgaggacgagcctgatgttccagagcgcgcgggtggagctggatttggcacggacggcgatgaccaggaggccataaacgaagcaatcagcgtcaagcaggaggtcactgacatgaactacccgagcaacaagtct

SEQ ID NO: 19230 - DNA, 1356 bp, synthetic construct
  misc_feature 1..1356: note = source = /note="Description of Artificial Sequence: Synthetic coding sequence"
  source 1..1356: mol_type = other DNA
atgttcgatattgagtacttccgcaaggacccgcgtcctttctttaagttcgcgaaggagatttacccgggccagtttcaaccatccctctgccataagtttatcgccctgagtgacaaggagggtaagctccttcggaactacacccagaacatcgataccctcgagcaggtcgccggtatacagaggatcatccaatgtcatggctcgttcgctactgcgtcatgccttatctgcaagtacaaggtggattgcgaggcagtgaggggagacatctttaaccaggtggttccgaggtgccccaggtgcccggccgacgagcccctggccataatgaaaccggaaatcgtgttcttcggagagaatttgccagagcagttccatcgtgcaatgaagtatgacaaagatgaggtcgacctgctcatcgtgattggatcctcacttaaggtccgcccggtggccctgatccccagctccatccctcatgaagtgccgcagatcttgatcaatcgggagccactgccacacctgcacttcgacgtggaactcctgggggactgtgatgtgatcatcaacgagttgtgccaccgccttggtggagagtacgccaagttgtgctgtaacccggtcaagttgtcggagattaccgaaaagcccccgcgcacccagaaggaactcgcttacctgtctgaactcccgcctactccactgcacgtgagcgaggactcgtcgtcgccggagagaacttccccgccggactcatcggtgatcgtcactctgttggaccaggccgcaaaatcgaacgacgatctggacgtgtcggaatccaaaggctgcatggaagagaagcctcaagaggttcagaccagcagaaacgtggagagcattgccgaacaaatggaaaacccagacctgaagaacgttggtagctccacgggggagaaaaatgagaggacctcagtcgccggaactgtccggaagtgctggccaaatcgggtggcaaaagaacaaatttcccggcggctggacggaaatcagtacctgttcctgccacctaaccggtacatcttccacggagcagaggtgtactccgattcggaggacgacgtgctgtcatcctccagctgcggatcgaactcggacagcggaacctgccagtcccctagcctggaggaaccaatggaggatgaatcggaaatcgaggagttttacaacgggctggaagatgaaccggacgtcccggagcgggcgggtggagccggcttcgggaccgatggagacgaccaggaggcgattaacgaggcgatctcggtgaaacaggaagtgaccgatatgaactatccgtccaataagagc

SEQ ID NO: 19231 - DNA, 1356 bp, synthetic construct
  misc_feature 1..1356: note = source = /note="Description of Artificial Sequence: Synthetic coding sequence"
  source 1..1356: mol_type = other DNA
atgtttgatatcgagtactttaggaaagacccccgacctttctttaagtttgctaaggagatttaccctggacagttccagccttcgctttgtcacaagtttatcgcactgtcggacaaagagggtaaacttctgagaaactacactcagaatatagacaccctggaacaagtggcaggaattcaacgaatcattcagtgccacgggtcctttgcaactgcatcgtgtctgatatgtaagtacaaggttgattgcgaggcagttaggggagatatcttcaaccaagttgtgccgagatgtcccaggtgtcctgccgatgaacctcttgcaatcatgaaaccagaaattgttttctttggtgagaacctgcccgaacagttccatagggcaatgaaatatgataaggacgaagtggatctcttgatcgtaattggaagctcgcttaaagtcaggcctgtcgctctgattccctcgtcgattcctcacgaggtcccccaaatcctcatcaatagagagccgcttccccacctgcactttgacgtggaacttctgggggattgcgacgtgatcatcaatgaattgtgtcatcgtctcggaggagagtacgcaaagctgtgttgtaacccagtgaagctcagcgaaatcaccgagaagccgccccgaacccagaaggaactggcatatctctcggaacttccccctaccccattgcacgtgtctgaggactcctcaagccccgagcgcactagcccccctgattcctccgtcattgtgactcttcttgatcaggccgccaaatcaaacgacgacctggacgtgtcagagtccaagggctgtatggaagagaagccccaagaagttcaaaccagcaggaatgtcgagtcgattgcagaacaaatggaaaacccagaccttaagaacgtgggaagcagcaccggcgaaaagaacgagcgtacttcagtggcaggaactgtgcgcaagtgttggccgaaccgtgtggcaaaagaacagatttcgcgcagactggacggtaatcagtacctctttctgccccctaatagatacatttttcatggagcggaggtctacagcgattcggaggacgatgtgctctcgagctcgtcgtgtggcagcaattccgattccggtacttgtcagagcccttcgcttgaagagccaatggaagatgagtccgaaattgaagaattctacaatggcctcgaagatgaaccagatgtgcctgaacgcgccggaggtgcaggttttgggacggatggggatgatcaggaagccataaatgaagcaatatccgtgaagcaggaggtgactgatatgaactacccgtctaacaaatct

SEQ ID NO: 19232 - DNA, 1356 bp, synthetic construct
  misc_feature 1..1356: note = source = /note="Description of Artificial Sequence: Synthetic coding sequence"
  source 1..1356: mol_type = other DNA
atgtttgacatagagtattttaggaaggacccccggccgttttttaagtttgcaaaggaaatttacccaggccaatttcagccctccctttgccataagttcattgcgctgtccgataaggaagggaaattgctgcgcaattacactcaaaatatcgataccctggagcaggtagcgggcatccagaggatcatacagtgccatggctctttcgccactgcgagttgcctgatttgcaaatataaagttgattgtgaagcagtccggggtgatattttcaatcaggtggtgccccgatgcccccgatgtccagccgacgagccgctcgccatcatgaaaccagagatcgtcttcttcggagaaaatctgccagaacaattccatcgagccatgaagtacgataaagacgaagtggacttgctgatcgtgatcgggtcatccctgaaggtgcgccccgtagctttgattccctccagcatcccccacgaggtcccccagatcctgatcaaccgggagcccctgcctcatctgcattttgacgtggagctgctaggggattgtgacgtgatcattaatgaactctgccacaggcttggcggcgaatatgcgaaactgtgttgcaaccccgtaaaactttctgagataacggagaagccaccgcgtacgcagaaagaacttgcctacctctctgaactgcctcccactcccctgcatgttagtgaagattccagcagtcccgaaaggacaagtcctccggattcatcggtgattgtcactttgttggatcaggcagcaaaaagtaatgatgatcttgatgtttccgaatctaagggctgcatggaggaaaaaccccaggaagtgcaaacaagtcggaatgtggaaagtatagctgagcagatggagaatcctgatctgaagaacgtaggaagttcgactggagaaaaaaacgaaagaacgagtgtggccggaactgtcagaaaatgctggcccaatcgggtcgcaaaggagcagatttctaggcgcctggacgggaatcagtatctgtttctgccaccaaaccggtatatttttcacggagcagaagtgtactctgactccgaagacgacgtgctgagttctagcagttgcgggtctaactcagatagtgggacttgccagagtccctctctggaggagcccatggaagacgaatccgaaatcgaggaattctataatgggctcgaggacgagccggatgtgcccgaacgcgccggaggggccggcttcggaaccgatggggacgaccaagaagctatcaatgaggctatttctgtgaagcaagaagttactgacatgaactatcctagcaacaagagt

SEQ ID NO: 19233 - DNA, 1356 bp, synthetic construct
  misc_feature 1..1356: note = source = /note="Description of Artificial Sequence: Synthetic coding sequence"
  source 1..1356: mol_type = other DNA
atgttcgatattgaatatttcagaaaagacccaagaccattttttaaattcgctaaagaaatttatcctggacaattccaaccatctttatgtcataaatttatagctttatcagataaagagggtaaacttttaagaaattatactcaaaatattgacactttggagcaagttgctggaatacaaagaataattcaatgtcatggatcattcgctactgcatcatgtttgatatgtaaatataaagtagattgtgaagcagtaagaggagatatttttaatcaagttgttccaagatgtccaagatgtccagcagatgagcctcttgcaattatgaagccagaaattgtattttttggtgaaaatcttccagaacaatttcatagagctatgaaatatgataaagatgaagttgatttacttatagttattggatcaagtcttaaagtaagaccagttgcacttatcccatcttcaattccacatgaagttccacaaatacttataaatagagaaccattaccacatcttcattttgatgttgaattattaggtgattgtgatgttattattaatgaattatgtcatagattaggaggagaatatgctaaactatgttgtaatccagttaaactttccgaaataactgagaagccaccaagaactcaaaaagaacttgcttatctttctgaattgccacctactccattacatgtatcagaagattcttcatctccagaacgtacttcaccaccagatagtagtgtaattgttacattacttgaccaagcagctaagtctaatgatgatttagatgtatcagaatcaaagggatgtatggaggaaaaacctcaagaagttcaaactagtagaaatgttgaatcaattgctgaacaaatggaaaatccagatttaaaaaatgttggatcttccacaggtgaaaaaaatgagaggacatctgttgctggtacagttagaaaatgttggccaaacagagttgctaaggaacaaatttctagacgtcttgatggaaatcaatatttattcttaccacctaacagatatattttccatggagcagaagtttatagtgatagtgaagatgatgttttaagttctagttcatgcgggtcaaactctgatagcgggacttgtcaatctcctagtttagaagaacctatggaagatgaatcagaaattgaagaattctacaatggattagaggatgaaccagatgttcctgaaagagcaggaggtgctggattcggaacagatggagatgatcaagaagcaattaacgaagcaatttcagttaaacaagaagttactgatatgaattatccatctaataaaagt

SEQ ID NO: 19234 - DNA, 1356 bp, synthetic construct
  misc_feature 1..1356: note = source = /note="Description of Artificial Sequence: Synthetic coding sequence"
  source 1..1356: mol_type = other DNA
atgtttgatatcgagtacttcagaaaggaccctcgtcctttctttaagtttgctaaggagatatatcctgggcagttccagccaagcctatgccacaaatttattgcattgtcagataaggagggcaagctgttaaggaactatactcagaacattgacactcttgaacaggtagctggcattcagaggattattcagtgtcatggttctttcgccactgcgagctgccttatttgcaagtacaaagttgactgtgaagccgtgcgcggtgacattttcaaccaggtagttcccagatgccctcgttgtccagctgacgaacctctggccatcatgaagcctgaaattgtgttcttcggagaaaatctgcctgaacagtttcatagggccatgaaatacgataaagatgaggtcgaccttcttatcgttatcggatcatcacttaaggttagaccggtggccctcattcctagctccatcccccacgaagttcctcagattcttatcaaccgggagccgctaccccatttgcattttgacgttgagctcttaggtgactgtgatgtgatcattaacgagttgtgccataggctcggaggagaatacgcgaagctttgctgcaacccggtgaagttatctgaaatcactgaaaagcctccaaggactcagaaggaacttgcctacttgtctgaactcccacccacacctcttcatgtaagcgaggacagctcttctcccgagagaacgtctcctccagattctagtgttattgtaactctgctcgatcaggctgctaagtcaaatgatgatttggatgtgtcggaaagtaaaggatgcatggaggagaagccacaggaagtgcagacgtctcgaaatgttgaatcaatagctgaacagatggagaatcctgatcttaagaacgttggctccagtacaggtgagaaaaacgagagaacaagcgttgctggtaccgtaaggaagtgttggcctaacagagtcgctaaagagcaaataagcagaagactagacggtaatcagtatctgtttctccctcccaacagatacatttttcacggcgctgaagtgtactcagattccgaagacgatgtgcttagtagtagcagctgcggaagcaatagcgactcgggtacatgtcagtctccctccctggaggaaccgatggaggacgagtctgagatcgaggaattttataatggtctcgaagacgaacctgatgtgcccgaaagggcaggaggtgccggttttggaactgatggagatgaccaagaggcgataaatgaggcgataagcgttaagcaagaagtcaccgacatgaactatccatcaaataagtca

SEQ ID NO: 19235 - DNA, 1356 bp, synthetic construct
  misc_feature 1..1356: note = source = /note="Description of Artificial Sequence: Synthetic coding sequence"
  source 1..1356: mol_type = other DNA
atgttcgacattgaatacttcaggaaggatccccgaccgttcttcaagttcgccaaagagatttaccccgggcaattccagccttctttatgccacaaatttatcgccctgtcagacaaagaaggcaagctacttagaaattatactcagaacattgacactctggaacaggtggcggggattcaacgaattatacaatgtcatggctcgtttgcgacggcctcctgtcttatctgcaagtacaaagtggactgcgaggccgtgcggggtgacatttttaatcaggttgtgcctagatgtccccggtgccccgcagacgagcctctcgcaataatgaagccagaaatcgtgttctttggcgaaaatcttcctgaacagtttcacagagccatgaagtacgacaaggacgaagtggatctccttatcgtgatcggcagtagcctgaaggttcggccggtggcactgattccaagcagcattccacacgaagtgccccagatcctgataaatcgggagcctctcccgcatctacactttgatgtcgagctgctcggcgactgcgatgtgatcatcaacgagctctgccaccggctggggggggaatatgcgaagctctgttgtaatcccgtcaaactgagcgagataactgagaagcccccccgaacccagaaggaacttgcatatctcagtgagctaccacctacaccgctgcacgtgtcagaggactcctcatcccccgaacgtaccagccctccagatagcagcgtgatcgtaaccctcctggatcaggcggccaagagcaatgacgacttggatgtgtcagagtcgaaagggtgtatggaggagaagccacaggaagtccagacttccagaaacgtcgagtcaatcgctgaacaaatggaaaatcccgatcttaaaaatgtcggcagctctactggcgagaagaatgagagaaccagtgtggccggcaccgtacggaagtgctggccgaacagagtggctaaggaacagattagtcgacgcctcgacggaaaccagtacttgttcctgccgcccaatcggtatatattccatggggctgaggtgtattccgactctgaggacgatgtgctgtcctcgtcatcttgcggctctaactctgactcggggacatgtcaatctccttcactcgaagaacctatggaagacgagtctgagatcgaggagttctataacggactggaggacgaaccggacgtgcccgaaagagctggcggcgccggcttcggcacagacggagacgatcaggaagccatcaatgaagccatcagcgtgaagcaggaggtgaccgacatgaattatccctcaaacaaaagt

SEQ ID NO: 19236 - DNA, 1356 bp, synthetic construct
  misc_feature 1..1356: note = source = /note="Description of Artificial Sequence: Synthetic coding sequence"
  source 1..1356: mol_type = other DNA
atgttcgacatcgaatacttccgaaaggacccccgtccgttttttaagttcgcgaaggaaatatatcccgggcagttccagccctcgttgtgtcacaagtttatagctctgtccgacaaagaggggaagcttttgcgaaactatactcagaatattgataccctggagcaggtagcaggcatccagcgcattatccaatgccacggctcttttgccaccgccagttgccttatttgcaagtacaaagttgattgtgaggccgtgcggggggacatatttaaccaggtagtcccacggtgtccacggtgccctgccgatgagccccttgcaatcatgaagccagaaatcgtttttttcggcgagaatctgccggaacagttccatcgtgcaatgaagtacgacaaggacgaggtggacctgctgatcgtcattgggtcttcactcaaggtgcggccggtcgccctgatccccagtagtatcccgcacgaggtgccccagatactcatcaatcgggagccactgcctcaccttcatttcgacgtcgagttgttgggagactgcgacgttatcattaacgaactgtgccatcggcttggcggcgagtatgctaagttgtgttgtaaccctgtcaaacttagcgagataaccgagaagccaccccggactcagaaagaactggcctatctctcggagctgccgcccaccccactccatgtgtctgaagatagcagctctccggagcggacctccccacctgattcctctgtgatcgtaactctgctggaccaggctgcgaagtcaaatgatgatcttgacgtgtcggaaagtaaaggatgcatggaagagaaaccgcaggaagtccagacctcacggaacgtcgagtccattgccgaacagatggaaaaccccgatctcaagaatgtggggagctcaacgggagagaagaacgagagaacatccgtcgctggaaccgtgcggaagtgttggcctaatcgggtggccaaggaacagatatctaggaggcttgacggcaaccaatacctgttcctgccacccaatcgatatatcttccacggcgccgaggtgtatagcgatagcgaggacgatgtgctctcttccagctcctgcggcagcaattctgactctggtacatgccagagtccatctctggaggagcccatggaagacgagtcagaaatcgaggagttctacaacggtttggaggacgagcctgatgtgcctgaacgggccggcggcgcagggttcggaaccgacggggatgaccaggaagctatcaacgaggctatttccgtaaaacaagaggtgaccgatatgaactacccctccaacaagtcc

SEQ ID NO: 19237 - DNA, 1356 bp, synthetic construct
  misc_feature 1..1356: note = source = /note="Description of Artificial Sequence: Synthetic coding sequence"
  source 1..1356: mol_type = other DNA
atgttcgacatcgaatacttcaggaaggatcccagacccttcttcaaatttgcaaaggagatctaccccggacagttccaacctagcctgtgccataagtttatcgcgctgtccgataaggagggcaagctgctccgcaattacactcaaaacattgataccttggagcaagtcgcagggatccagagaatcatccaatgtcatgggtcgttcgctactgcttcatgtctgatctgtaagtataaggtggattgcgaggccgtccggggcgacatcttcaaccaagtggtcccgagatgtccgcggtgtcctgccgacgaaccactcgctatcatgaagccggagatcgtgttctttggcgaaaacttgccggagcagttccaccgcgccatgaagtatgacaaagacgaggtcgatctgctcattgtcatcggatcctcccttaaggtccggccggtggccctgatcccgtcatcgattccacacgaggtgccacaaatcctgatcaatcgggaaccgctcccgcatctccattttgacgtggaactcctgggcgactgtgacgtgatcatcaacgaactttgccatcgcctggggggagagtacgctaagctgtgctgcaacccggtgaaattgagcgaaataactgagaagccaccgagaactcagaaagagctggcgtacctttccgaactcccgccgacccccctgcatgtttcggaagattccagctcccctgagcgcactagcccaccagattcctcagtgatcgttactctgctggatcaggcggcgaagtcaaacgacgacctcgatgtgtcagaatccaaggggtgtatggaggagaagccgcaagaagtccagaccagccggaacgtcgagtctatcgctgagcagatggaaaacccggacctgaaaaacgtgggttcaagcactggagagaaaaacgagcgcacgagcgtggctggcaccgtcagaaagtgctggccaaatcgggtggcgaaagaacagatctccagaaggttggacggaaatcagtatctctttctgccgcctaacagatacatctttcacggtgccgaagtctactcggactctgaagatgacgtgctgtcatcatcatcctgcggttcaaactctgattccgggacttgccagtcaccctccctggaagaacctatggaggacgagtcagaaatcgaagagttctacaatggactcgaggacgagccggacgtgcctgagcgggccggaggagccggatttggcacggatggtgacgatcaggaggcgatcaacgaagcgatctcagtgaagcaagaggtcaccgacatgaattacccatcgaataagtcc

SEQ ID NO: 19238 - DNA, 1356 bp, synthetic construct
  misc_feature 1..1356: note = source = /note="Description of Artificial Sequence: Synthetic coding sequence"
  source 1..1356: mol_type = other DNA
atgtttgacatcgaatactttcgcaaagaccctaggccctttttcaagtttgccaaggaaatctaccctggacagttccaaccatcgttgtgtcataagttcatcgctctttcagacaaggaagggaaactgcttcggaattacacgcagaacatcgacacgctggagcaggtcgccggaatccagcggattatccaatgccatgggagctttgcaaccgcatcctgtctgatatgtaagtacaaggtggattgtgaagccgtccggggagacattttcaaccaggtcgtgcctcggtgtcctagatgccctgcagacgaacctcttgcaattatgaaaccagagatcgttttctttggagagaacctgcctgaacagttccatcgggcaatgaagtacgataaggacgaggtggatctgctgattgtgatcggctcctcgcttaaggttcgcccagtggccctgatcccctccagcatcccacacgaagtcccccaaattctcattaacagggaaccacttccacatttgcattttgatgtcgagctcctgggagattgtgatgtcattatcaatgaactttgccacagattgggtggggagtacgcaaaactctgctgtaaccctgtgaagctgagcgaaattactgagaagcccccgagaacccagaaggagctcgcctacctttctgagcttccgcccacgcctctgcatgtgagcgaagattcctcctcccctgagcgaacctcacctccggactcatccgtgattgtgactcttcttgatcaggcagcaaagtccaacgatgaccttgatgtctccgagtcaaagggatgtatggaagaaaagcctcaagaagtgcaaacctctcgcaatgtcgaatccattgcagagcaaatggaaaacccggatcttaagaatgtaggaagctcgactggtgagaagaacgaacggacttccgtggcaggaaccgtgagaaagtgttggccgaacagggtggcgaaggagcaaatcagcaggaggctggatggaaaccaatacctgtttctcccgccgaatcgatacatctttcatggcgccgaggtgtattcggacagcgaggatgatgtcctttcctcgtcatcgtgtgggtctaattcggactcgggaacttgtcagtcccctagcctcgaggagcctatggaggatgaatcagaaatcgaagagttttacaacggactggaagatgaaccagatgtgcctgaacgtgctgggggagcaggctttggaaccgacggagacgatcaagaagcgattaacgaggcaatttcggtgaaacaggaagtcaccgatatgaactacccttccaacaaaagc

SEQ ID NO: 19239 - DNA, 1356 bp, synthetic construct
  misc_feature 1..1356: note = source = /note="Description of Artificial Sequence: Synthetic coding sequence"
  source 1..1356: mol_type = other DNA
atgttcgatattgagtactttcgcaaggacccccggccttttttcaaatttgccaaggagatttaccctggtcagtttcaaccttcgctgtgccacaagtttatcgctttgtcagataaggagggaaagctcctccgtaactatacgcagaatatcgatacgctggaacaggtggccggaatacaaagaatcatccagtgtcacggatcgtttgcaactgcatcctgtttgatttgcaaatacaaggtggactgtgaggcagtccgcggagatatctttaaccaagtggtccctcgctgcccgcgctgcccagcagatgaacctcttgccatcatgaagcctgaaattgtgttttttggagaaaatcttccagagcagttccatcgggccatgaagtacgataaggatgaagtggatctgttgattgtgattggatcctcgttgaaagtcaggcccgtggccctgattccatcgtcgattccacatgaagtccctcaaatactgattaacagagaaccgctgcctcaccttcactttgacgtcgaactgttgggagactgcgatgtgattatcaacgagctctgtcatcggctcggaggagaatacgcaaagttgtgttgtaaccccgtgaaactcagcgagattactgaaaaaccaccaagaacccaaaaggaacttgcatacctgtccgagctgccgcccacccctctccatgtgtcggaagatagctcctccccggaacgaactagcccccctgattccagcgtgatcgtgactcttcttgatcaagctgcaaagtcaaacgacgacctggatgtgagcgaatcaaaaggatgcatggaggaaaagcctcaagaggtgcaaaccagcagaaacgtggagtcgattgcagagcaaatggaaaaccctgatctgaaaaatgtgggttcatcaaccggcgaaaagaacgaacggacttccgtggctggtactgtccgaaagtgttggcctaaccgtgtcgccaaggagcagatttcgcggagactggatggcaaccagtacctgttccttccaccaaaccgctacattttccacggagccgaagtgtactcggattccgaagatgatgtgctgtcgtcctcttcgtgcgggagcaattcggactcggggacttgccagtccccaagcctcgaggaacctatggaggatgaatccgaaatcgaggagttttacaacggtcttgaggatgagcctgatgtgcccgagagagcgggtggtgcgggtttcggaaccgatggcgacgaccaagaagcaattaacgaagcaatatctgtgaaacaagaggtgacggacatgaactacccatccaacaagtca

SEQ ID NO: 19240 - DNA, 1356 bp, synthetic construct
  misc_feature 1..1356: note = source = /note="Description of Artificial Sequence: Synthetic coding sequence"
  source 1..1356: mol_type = other DNA
atgttcgatatcgagtattttcggaaggatcccaggccattctttaagttcgccaaggaaatctaccctggtcagtttcaaccatcgctgtgccataagtttattgcactgagcgataaggaagggaagttgctgaggaactatacgcagaatattgatactttggagcaggtagccggcatccagcgcataattcagtgccacggctccttcgctaccgcatcttgtctcatatgcaaatataaagtggactgcgaggccgtaaggggcgacatttttaaccaggttgtgccccgatgcccccgatgtccggctgacgagcctctggcaatcatgaagcccgaaatcgtgtttttcggagaaaatttgcctgagcagtttcatcgcgcgatgaagtatgataaagatgaggtcgatcttctgatagtcattgggtcttcccttaaagtacgccctgtggcgctgatcccgtcttcaatcccccacgaagtgccacagatcctgattaatagagagccattgccacatcttcatttcgacgttgagctgctgggggattgcgacgtaatcattaacgagctctgtcaccggttaggaggagaatatgcaaaactctgttgcaatccagttaagctgagcgaaataacagagaaacctccaaggacacagaaggagttagcttatctatctgaactgcccccaaccccgttgcatgtgtctgaagacagctcatctccagaacgtacctcaccgcccgacagctccgtgatcgtcactcttctggatcaagctgccaagtccaacgacgacctggacgtctctgaaagtaagggctgcatggaggagaaaccacaggaggtccagactagccggaatgtcgagtcgattgccgagcaaatggagaatcctgacctgaaaaatgtgggaagcagtacaggggagaaaaacgaaagaacttctgtggctggcacagttcgcaaatgctggcctaatagggtggccaaagaacaaattagtcgaagattggatggtaatcagtacctcttcctgccgcccaaccggtatatcttccatggcgcagaggtgtattcagattcagaggacgatgttctcagctcatctagttgcggctcaaacagtgactccggcacatgtcagtccccctctcttgaagagcctatggaagacgagtctgaaatcgaagagttctacaacgggcttgaagacgaaccagatgtacccgagcgggctgggggcgcaggtttcggtacagacggggatgatcaagaggccattaatgaagccatttccgtcaagcaggaggttacagatatgaattatcctagtaacaagagc

SEQ ID NO: 19241 - DNA, 1356 bp, synthetic construct
  misc_feature 1..1356: note = source = /note="Description of Artificial Sequence: Synthetic coding sequence"
  source 1..1356: mol_type = other DNA
atgttcgatattgaatacttcagaaaggatccgcgtcccttctttaagttcgcaaaggaaatatacccagggcagttccaacccagcctgtgtcacaaatttatcgcgttgagcgataaggaaggaaagttgctgaggaattacacccagaacatcgatacactagagcaggtcgctgggatccagcggattattcagtgccatggcagcttcgcaactgcgtcttgtctcatctgcaagtacaaagttgactgcgaggccgtccggggggatatttttaaccaggtagttccgcgatgtcccaggtgccctgcagacgagccactggccatcatgaagcctgagatcgtattctttggcgagaatctgcctgagcaatttcatagagctatgaaatatgacaaagacgaagtagacctgctgatcgtgatcgggtcttccctgaaggtgcgcccggtggcattgattcctagctcgatcccccatgaggtgccacagatcctgattaacagggaacctctcccccacttgcattttgatgtagagttgctgggcgattgtgatgtcattattaatgagctctgtcacagactgggcggcgaatatgcgaagctgtgttgcaaccccgttaagctgtccgagataacagagaaaccaccgcgaactcagaaagaattggcctacctgtctgagctgccacccacaccattgcacgtcagcgaggacagcagcagtcccgaacgcacatctcctccagatagttcagttatcgtcacgctgctcgaccaggctgcaaaaagcaacgatgacctcgatgtcagtgaaagcaagggatgtatggaggagaaaccacaggaagtacaaacatcgcgaaatgttgagagcatcgctgaacaaatggagaacccagatctgaaaaacgtgggttcatcaacaggcgaaaaaaatgagagaacttcggtggcgggcacagtgcggaagtgttggcccaatcgcgtggcgaaagaacaaatcagccgccggttggacggaaaccagtacttatttctcccgcccaacaggtatattttccatggggccgaagtctactctgactctgaggatgacgtcttgagttcttcctcctgtggttctaattcggactctgggacatgtcagagcccgtctcttgaagagccaatggaagatgagtctgagatcgaagaattctataatggactggaggatgagccagatgttccagagcgcgctggcggcgcgggattcggcacggacggcgatgatcaggaggcgattaacgaggcaatttctgttaaacaggaggttacagacatgaactacccctctaataagagc

SEQ ID NO: 19242 - DNA, 1356 bp, synthetic construct
  misc_feature 1..1356: note = source = /note="Description of Artificial Sequence: Synthetic coding sequence"
  source 1..1356: mol_type = other DNA
atgtttgatattgaatacttcaggaaggacccaaggcctttctttaagtttgctaaagaaatctatcctgggcaatttcagccatccctgtgtcataaattcattgcacttagtgataaagaaggcaaactgctcaggaactacacacagaacatcgatacccttgagcaggtggccggtatacaaagaatcattcaatgccatggtagctttgctactgccagttgcctgatctgcaagtataaggtcgattgcgaagctgtgcgtggagacatcttcaaccaggtggttcccaggtgtcctaggtgtcctgctgatgaaccactggccataatgaaaccagaaattgtgttcttcggcgaaaacctgccagagcagtttcaccgagcaatgaagtatgataaggatgaggtggacctgctcattgttatcgggagttcattaaaagtgcgacccgtagcactcatccccagctcgatcccccatgaagtgccccaaatattgattaacagggagcctctcccacacttgcattttgacgttgaattgcttggcgattgcgatgtgataattaacgagttgtgccaccggctggggggcgagtatgccaaactttgctgcaacccagtaaaactcagcgaaatcacagaaaagcctcccaggactcagaaagagctggcttacctgagcgagctcccaccaactccactccacgttagcgaagacagttcaagtcctgaaaggacgagtccccccgattcttctgtgattgttactctgctagatcaggctgccaagagcaatgacgatcttgatgtgtccgagtccaaaggatgtatggaggagaaaccacaagaggtgcagacttctcgcaatgtcgagtctatcgcagagcagatggaaaaccctgatcttaagaatgtcgggtcttccaccggggaaaaaaatgagaggacgagcgttgcgggaaccgtacgcaaatgctggccgaacagagtcgccaaagaacaaatttctaggagactggatggcaaccagtatcttttccttccgcctaacaggtatatcttccacggagcagaggtgtattccgactcggaggacgacgtcctgagctctagctcttgtggaagcaacagcgacagcggaacatgtcaatccccatcccttgaagagcccatggaagatgagagtgagatcgaggagttttataatgggcttgaagatgaaccagatgtacctgagcgcgccggaggggcaggattcggaaccgacggtgacgatcaagaggcaatcaacgaagctattagtgtgaaacaggaagtgaccgatatgaactatccaagtaacaaaagc

SEQ ID NO: 19243 - DNA, 1356 bp, synthetic construct
  misc_feature 1..1356: note = source = /note="Description of Artificial Sequence: Synthetic coding sequence"
  source 1..1356: mol_type = other DNA
atgttcgacatcgagtactttcgaaaggatcctcgccctttttttaaattcgcaaaagagatttatccaggccagttccagccaagcctgtgccacaaatttattgctctgtccgacaaggagggcaagctgctgcgcaattacacgcagaatattgatacgttggaacaggtggctggtatccaacgcattatacagtgtcacggatcctttgctaccgcgtcctgtttgatctgtaagtacaaggttgattgcgaagccgtccgcggagacatcttcaatcaggtcgttccgcgctgtccacgctgccctgcggatgagccgttagcaatcatgaagccagaaatcgtgttcttcggagaaaatctgccagagcagtttcaccgcgcgatgaagtacgacaaggatgaggtggatttgctgatcgtgattggtagctcattaaaggttcgcccagttgcactgatccctagcagcattcctcacgaagtgccgcaaatcctgataaaccgcgagccgctgccgcatctgcactttgatgttgaacttttgggcgactgcgatgtcattattaacgagctgtgtcatcgtctgggtggagaatacgctaagttatgttgtaatcccgtaaaactgagtgaaatcaccgaaaagcccccgcgcacccagaaggaactggcctacctgagcgagctgccacctacccctctgcacgtgagcgaggattcctcatcaccggagcgcacttcaccgcctgattcttccgtgatcgtcacactgttggatcaggccgccaaatcaaacgacgacctggatgtcagcgaatctaagggttgtatggaggaaaagccacaggaagttcaaacctctcgcaatgtcgagagcattgcggagcagatggagaacccggacctaaagaacgtcgggtctagcaccggtgagaagaacgagcgcacgtccgtcgctggaaccgtgcgcaagtgctggccaaaccgggttgcaaaagagcagatctctcgccgcctcgatgggaatcaatatctcttcctgccgccgaaccgttacatttttcacggtgcggaggtgtacagcgatagcgaggacgacgtgcttagctcttcgagttgtggttccaacagcgactcaggcacgtgtcagagccctagcctggaggagccaatggaggacgagagcgagatcgaggaattctacaacggtttggaggatgagccggacgttccagaacgcgcgggtggtgctggctttggtaccgacggggacgatcaggaggccattaacgaagctatcagcgtaaagcaagaggtgaccgatatgaattacccgagcaataaaagc

SEQ ID NO: 19244 - DNA, 1356 bp, synthetic construct
  misc_feature 1..1356: note = source = /note="Description of Artificial Sequence: Synthetic coding sequence"
  source 1..1356: mol_type = other DNA
atgtttgatatcgagtactttcgcaaggaccctcgcccgttctttaagttcgcaaaagagatttaccctggccagttccagccctcgctctgtcataagtttatagctctgtcggataaggaagggaagctgctgaggaattacacccagaatatcgatacccttgagcaagtggcgggaatacaacggatcatccagtgccatggcagcttcgcaaccgcatcatgcctgatctgtaagtacaaggtcgattgcgaagcagtcagaggagacatattcaatcaagtggtcccaagatgtccgaggtgcccggcagatgaacccctcgcaattatgaaacctgaaattgtcttttttggagagaatcttccagaacagttccacagggccatgaagtacgataaagatgaggtggatttgctgattgtgattggctcatccctgaaggtcaggccagtcgccctcatcccgtcgtcaattcctcatgaagtgccccagattctgatcaatagagagcctctgcctcatttgcatttcgatgtggaactgctgggagattgtgatgtgattatcaacgaactgtgtcacaggctcggaggtgagtacgcgaagctgtgttgtaaccctgtgaaactttcggagataactgaaaagcctccccgcactcaaaaggaacttgcataccttagcgaactgccaccgactccacttcatgtctcagaggactcatcttcgcctgaaaggacctctcccccagattcctcggtgattgtcactctgcttgaccaggcagctaagtccaacgatgatttggatgtctccgaatccaaggggtgtatggaagagaagccacaagaggtgcaaacctcgcgcaacgtggaaagcattgcagaacaaatggaaaacccggatctcaagaatgtgggaagctcgacgggtgagaagaacgaaagaacctcagtggccggtaccgtgagaaagtgttggccaaacagggtggcaaaagaacaaatttcgcggagacttgatggtaaccaatacctcttcctgcctcctaaccggtacatctttcatggtgccgaagtttattctgattcagaggacgacgtgctgagctcgtcgtcatgtggatccaattcagacagcggaacttgtcaaagcccttccctggaagaacccatggaggacgagagcgaaattgaggagttctacaacgggctcgaagatgaaccagatgtccctgagagagcaggtggagctggattcggtaccgacggggacgaccaggaagcaattaacgaagcaatatccgtgaaacaagaagtgacggacatgaactacccatccaacaagtcg

SEQ ID NO: 19245 - DNA, 1356 bp, synthetic construct
  misc_feature 1..1356: note = source = /note="Description of Artificial Sequence: Synthetic coding sequence"
  source 1..1356: mol_type = other DNA
atgtttgatatagaatatttccggaaggatccccgtccattctttaaatttgctaaagaaatctaccccggccaatttcagcctagcctttgccacaaattcatagccttgtccgacaaagaaggcaaactgctacgcaactacacccagaatattgacacattggagcaagtcgcaggcatccagcgcatcattcagtgtcacggatctttcgccaccgcgtcctgtctgatctgcaaatataaggtcgactgcgaggcagtccggggggatatattcaatcaggtcgtgcctcgatgcccaaggtgccccgctgacgagcccttggctattatgaagccagaaattgtctttttcggtgaaaatctgccagagcagttccatcgggctatgaaatatgacaaggacgaagttgacctgctgattgtgatcggatcctctctaaaagtccgtcctgtggcgttgataccctcctctattccccacgaggtgccacagatcttaataaatagagagcccttgccacatctccatttcgacgtggaactccttggtgattgtgacgtaattatcaatgaactttgtcaccggctgggtggggagtacgccaaattgtgctgcaatccggtgaaattgtccgagatcactgagaaacctcctagaacacagaaagaactggcgtatttgagcgaactgcctcccaccccgctgcatgtgagtgaggatagctcttcccctgagcgtacctctccccctgactcttctgtgattgtcactctcttggaccaggctgctaagagtaatgacgatctggacgtctcagagtccaaggggtgtatggaggagaagccacaggaagtgcagacttcaaggaatgtggagtctatcgcggagcagatggagaatcctgatttgaagaatgttggcagttccaccggagaaaagaacgagagaactagcgtggcaggtacagtccgtaaatgctggccgaatcgggttgccaaggagcaaataagtcggagactggatggaaatcagtatttgtttctccccccaaacagatatatttttcatggagcggaggtctacagtgattccgaggatgatgtactcagtagttccagctgcggatccaacagtgatagcggcacgtgccaatcccccagtctggaagagcctatggaggatgaatcggagatcgaagaattctacaatggactcgaggacgaacccgatgtgcccgaaagggccggcggagccggtttcggcacagatggggatgaccaggaggctatcaacgaagctatctctgtcaagcaggaggtcactgacatgaactatcctagtaataagagt

SEQ ID NO: 19246 - DNA, 1356 bp, synthetic construct
  misc_feature 1..1356: note = source = /note="Description of Artificial Sequence: Synthetic coding sequence"
  source 1..1356: mol_type = other DNA
atgtttgatattgaatacttccgaaaagatcccagaccctttttcaaattcgccaaggaaatctatcccgggcagtttcagccaagtctctgtcataaattcattgccctatccgataaagaaggaaagctcctgaggaattacacacagaacatagatactctagaacaggtggcgggaatccagagaatcatccagtgccatggatctttcgccacagcttcttgtctgatttgcaaatataaagttgattgcgaagcagtgaggggggatatttttaatcaggtggtgccaagatgccccaggtgccccgctgacgaacctctggctataatgaaacctgagatcgtcttcttcggggaaaatctcccagaacagttccacagagctatgaagtatgataaagatgaagtagacctcctaatcgttatcgggtccagtctgaaagtacgccccgtggctcttatcccaagttcgatccctcatgaagtacctcagattctcatcaacagggaaccacttccacatctgcatttcgacgtcgaactacttggggattgcgacgtcataattaacgaactgtgccataggcttggaggggaatatgccaaactatgttgtaaccccgtgaaactctcagagatcactgaaaaaccccctagaacacagaaagaactagcttatctgtctgagcttccccccacacccctacacgtgtctgaagactcaagttcccctgaacggacatctccaccagattcctctgtgattgtgactctactagatcaggccgccaagtccaatgatgatctcgatgtgagtgaatccaaaggatgtatggaagaaaaacctcaggaagtgcagacatctcgcaacgtggagagtatagcagaacagatggaaaaccctgatcttaaaaacgtagggtcctccacaggggagaaaaatgaaaggacttccgttgcaggaactgtcaggaaatgctggcccaatcgggtagcaaaagagcagatcagtaggaggctcgatggaaaccaatatctcttcctccctcctaatcggtatatcttccacggagctgaagtctacagtgattcagaagatgacgtgctctcatcttcttcatgcgggagtaacagtgactccgggacatgtcagtccccttctctggaagaacctatggaagatgaatctgaaatagaagaattctataatggactggaagacgagccagatgtccctgaacgcgcagggggagccggattcggaacagatggggatgatcaggaagccataaacgaagcaataagtgtaaaacaggaagtcactgatatgaactatccttcgaataaatca

SEQ ID NO: 19247 - DNA, 1356 bp, synthetic construct
  misc_feature 1..1356: note = source = /note="Description of Artificial Sequence: Synthetic coding sequence"
  source 1..1356: mol_type = other DNA
atgttcgatatcgagtacttcagaaaggatccaagacccttcttcaagtttgctaaagagatttacccaggccaattccagcctagtctttgccacaaatttatagctttaagcgataaggagggcaagcttttgcggaattacacccagaatattgacacattggagcaggtagccggaatccagcggataatccaatgccatgggtccttcgccacagctagttgtctgatctgtaaatacaaagtggattgcgaagcggtgcggggtgacatctttaatcaggtcgtgcctcgatgtcccaggtgtccggccgacgaacccttggctatcatgaaacccgaaatcgtgttctttggcgagaacttaccagaacagttccacagagccatgaaatatgataaggacgaggtggacctgctgatagtcattggatcttctctaaaggtacgacctgtggctctcattcctagttctatcccccacgaggtgcctcaaattctcataaatagggagcctctgcctcacctgcactttgacgtggagttactaggtgattgtgacgtcatcattaacgaactgtgccataggttgggcggcgagtacgcgaagctgtgctgtaaccccgttaagctgtctgagattacggagaagcctcctagaacgcagaaggagctcgcctacctctctgagctccctcctacacccctacatgtgtctgaggattctagcagccccgagcggacgtctcctcccgattcgtctgtgatcgtaactctgttggaccaggctgctaagtccaatgacgatctggacgtcagcgagtccaagggctgcatggaagagaaaccccaggaggtgcaaacctctagaaacgtggaatcgatcgctgaacagatggaaaatccagatttgaaaaatgtgggcagtagcactggagagaagaacgaaagaacttccgtggccggcacagtacgaaaatgctggccgaatcgcgtcgcaaaagagcagatatctcgccgccttgacggaaaccagtacctcttcctgccaccaaatcggtacatcttccacggcgctgaagtgtactccgattccgaggatgatgttctttcctcatcttcatgcggatcaaactccgattctggtacctgccagagcccgtctctggaggaacctatggaggacgaatccgagatcgaagagttttataacggtcttgaggacgaacctgatgtacctgaacgcgcggggggcgcaggcttcggaaccgacggagatgatcaagaggctattaatgaagccatttcagttaagcaggaggtgaccgatatgaattatcctagtaataaatct

SEQ ID NO: 19248 - DNA, 1356 bp, synthetic construct
  misc_feature 1..1356: note = source = /note="Description of Artificial Sequence: Synthetic coding sequence"
  source 1..1356: mol_type = other DNA
atgttcgatatagaatactttaggaaagaccccagaccttttttcaaatttgccaaagagatctaccccggacaatttcaaccttccctgtgtcacaaattcattgctctgagcgacaaggaaggaaagctgcttaggaactacacccagaatattgataccctggaacaagtcgcaggaatccagcgaatcatccaatgtcatggatcatttgcaaccgcctcgtgtttgatttgtaaatacaaggtggactgcgaagcagtgcggggtgatatctttaatcaagtggttccgcggtgtcctaggtgccctgccgatgagccactggcgattatgaagccagaaattgtgttttttggcgaaaacctccccgagcagtttcacagggccatgaagtacgataaggatgaagttgatctccttattgtgatcggatcgtcactgaaggtgcgacccgtcgctctgataccttcctccattccacacgaagtgccccagattctcataaacagagaacctctgccacatttgcatttcgacgtggaactgttgggcgattgtgatgtgatcattaacgaactttgtcatcggcttggtggagaatacgccaaattgtgctgcaaccctgtgaagctgtcagaaatcaccgaaaagcctcctagaactcagaaagagctcgcgtacctctcggaacttcctcctactcctcttcatgtctcagaggactcgtcaagcccggaaaggaccagccctcctgattcgtccgtgatcgtgaccctgctggaccaggccgcaaagtccaatgacgatctggacgtgagtgagtccaagggatgcatggaagaaaaaccgcaagaagtgcagacttcgaggaacgtggaatcgattgcagaacaaatggaaaatcctgatctgaaaaatgtcggctcgtctaccggtgagaagaatgaacgcacttccgtggccgggaccgtccgcaagtgttggcctaatagagtggctaaggaacagatttcacgccggcttgatggtaatcagtacttgtttcttcctcctaaccggtacatattccatggagcagaagtgtacagcgatagcgaagatgatgtgctgtcctcaagctcctgtggttcaaattcagattcgggtacctgtcaatccccttcactggaagaaccaatggaagatgagtccgaaatagaggagttttacaacggcctggaggacgaacctgatgtgccagaacgagcaggcggagcaggttttggaactgatggagacgatcaagaagcaattaacgaagcaatcagcgtgaaacaagaggtgactgatatgaattatccttctaacaagtcc

SEQ ID NO: 19249 - DNA, 1356 bp, synthetic construct
  misc_feature 1..1356: note = source = /note="Description of Artificial Sequence: Synthetic coding sequence"
  source 1..1356: mol_type = other DNA
atgttcgacattgagtacttccggaaagatccaaggccgttcttcaagtttgccaaagaaatctaccccggacagttccaaccgtcgctgtgccacaaattcatcgccctgtcggacaaggaaggcaagctcctgaggaactatactcagaatatcgacaccctcgagcaggtggcaggaatccagcgcattatccaatgccacggaagttttgctactgccagctgcctcatttgcaagtacaaggtggattgcgaagcggtccgcggagatatcttcaatcaagtggtgccgcgctgcccaagatgtccggccgacgaacccctggccatcatgaagccggagattgtgtttttcggggaaaaccttcctgagcaattccatagagccatgaagtacgacaaagacgaggtcgatctcctcatcgtcatcggttcctccctcaaggtgcgccccgtggccctgatccctagcagcatcccacacgaagtcccgcagatcctgatcaatcgggagccactgcctcacctgcacttcgacgtggaacttctcggcgactgcgacgtgataatcaacgagctgtgccaccggttgggaggggaatacgcgaaactttgttgtaacccggtcaaactgtcggaaatcaccgaaaagccgccacgcactcagaaggaattggcctacctcagcgaattgccaccgactcctcttcacgtgtccgaggactcgtcgtcgccggaacgcaccagcccaccagattcatcagtgatcgtgactctgctggaccaggcagccaagtccaatgacgatttggacgtgtcggagagcaaaggttgtatggaggagaagccgcaggaggtgcagacctcccgcaacgtcgagagcatcgcggaacaaatggaaaacccggacttgaagaatgtgggaagctcgactggcgaaaagaatgagcgcacctcggtcgcgggaactgtgcgcaagtgctggccaaaccgcgtggccaaggagcagatctcgaggcgcctggatggcaaccagtacctcttcctgcccccgaaccgctacatcttccatggagcagaagtgtactcagacagcgaggacgatgtgctgtcatcttcatcctgcggttccaattcggacagcggtacctgccagtccccttcgctggaggaacctatggaagatgagtctgagatcgaagagttctacaacgggctggaggacgaaccagatgtgccagagcgggcgggcggcgctggattcggcactgacggcgatgatcaggaggcgatcaatgaggctatctcggtgaaacaagaagtgactgacatgaactacccttcgaacaagagc

SEQ ID NO: 19250 - DNA, 1356 bp, synthetic construct
  misc_feature 1..1356: note = source = /note="Description of Artificial Sequence: Synthetic coding sequence"
  source 1..1356: mol_type = other DNA
atgttcgacatcgaatactttcgcaaagatccgcggcctttctttaagttcgccaaggaaatctacccaggccaattccagccgagcctgtgccataagttcattgcgctgagtgataaagaaggaaagctgttgaggaattacactcagaacattgacacgctcgagcaggtggcagggatccaaagaatcatccagtgtcatggctcattcgccaccgcgtcatgcctcatctgcaaatacaaagtggactgtgaagccgtccggggagatatcttcaatcaggtggtcccacgctgcccgcggtgcccagcggacgagccactggctatcatgaagccggaaatcgtgttcttcggagagaatctcccagagcagttccacagagccatgaaatacgacaaggatgaggtcgatctgctcattgtcattggatcctccctgaaggtgcgcccggttgcgctcatccccagctcaatcccacacgaggtgccgcagatcctcatcaacagagaaccgttgccacatcttcacttcgatgtcgagctgcttggcgattgtgacgtgatcatcaacgagctgtgccaccggctcggaggagagtacgcaaagctgtgctgtaacccagtgaaactgtcagaaatcaccgagaaaccaccgcgcacccagaaagaactggcgtacctgtctgaactgccgcctactccactccatgtttcggaggactcgtcgagccctgagagaacttcacccccggactcctccgtcatcgtgaccttgctcgatcaagctgccaagtcgaatgacgacctggatgtgagcgagtcgaagggatgcatggaagagaagcctcaggaagtccagacttcgcgcaatgtcgagtcgatcgctgaacaaatggagaacccagatctcaagaacgtggggtccagcactggagaaaagaatgagagaacctcggtggcgggaaccgtgcggaagtgttggccgaatcgggtcgcaaaggaacaaatctcacgtcgcctggatggaaaccaatacctgtttctgccgcctaaccgatacattttccacggagcggaagtgtactcggattccgaggacgatgtgctctcctccagcagctgcggaagcaactccgattcgggaacctgccagtcaccgtccctggaggaaccaatggaagatgaatcggagatcgaagagttttacaatggactggaggatgaaccagatgtcccggagcgagctggaggagctggattcggaactgacggcgacgaccaagaagcaatcaacgaagccatttccgtcaaacaggaagtgaccgacatgaactacccatcaaacaaatcc

SEQ ID NO: 19251 - DNA, 1356 bp, synthetic construct
  misc_feature 1..1356: note = source = /note="Description of Artificial Sequence: Synthetic coding sequence"
  source 1..1356: mol_type = other DNA
atgtttgacattgaatacttccgtaaggacccccgccctttctttaaatttgccaaagagatataccctgggcaattccaaccatccctctgccataagtttatcgcgctcagcgataaagagggtaagcttctccgaaactacacccagaacatcgacacgcttgagcaggtggccgggattcaacgaattattcagtgccatggttcatttgctacagcctcatgtttaatttgcaagtataaggtcgattgcgaagcagtgcgtggggatatcttcaatcaggtggtaccccgctgcccaagatgtcccgccgacgaaccactcgccatcatgaaacccgaaatcgtgttttttggtgagaacctgcccgaacagttccatcgcgcaatgaagtacgacaaggacgaggtggatctgctgatcgtgattggatcatccctaaaggtgaggccggtagccctcataccatcctctatcccccacgaggtgccgcagattctgataaatcgcgagccgctgccccatctccactttgacgtggaattgttgggagattgtgatgtgattatcaatgagctgtgccacaggctggggggagagtacgctaagctgtgttgcaatcccgtcaaacttagcgagatcacagaaaagcctcctcgtacccagaaagagctggcgtatctcagcgaactgcctcccacacctctgcatgtatctgaggactctagcagtcccgaacgtacctcgcctccagattctagcgttatcgttaccttactcgaccaagccgccaaatccaatgatgatcttgacgtgagcgagtcaaaaggctgcatggaggagaagccacaggaagtgcaaacttcaaggaatgtggagtctatcgctgagcagatggaaaatcccgatctgaaaaacgttggaagtagcacaggagagaaaaatgaacgaactagcgttgccgggacggtgcggaagtgctggcccaatcgggtggcgaaggagcagatctcgcggcggctcgatgggaatcaataccttttcctaccaccaaaccggtacatctttcacggggcggaagtctatagcgattctgaggatgatgtgctgagttcgtcgagttgtgggtcaaattcagactccgggacctgtcagagcccctccttggaagaaccaatggaagacgagtccgaaattgaggagttttataacggcctcgaggatgaacctgacgttcctgagagggcgggtggcgcagggttcggtaccgacggagatgaccaggaggcgattaacgaggcaatcagtgtaaagcaagaggtgactgatatgaactatccttccaacaagagc

SEQ ID NO: 19252 - DNA, 1356 bp, synthetic construct
  misc_feature 1..1356: note = source = /note="Description of Artificial Sequence: Synthetic coding sequence"
  source 1..1356: mol_type = other DNA
atgtttgacatcgaatactttagaaaggaccctcgcccatttttcaagtttgcaaaagagatctaccccggacagtttcaacccagcctttgccataagtttattgcactgtcggataaggagggcaaactcctccggaattacactcagaacatagacaccctcgaacaagtggccggaatacaaagaattatccaatgccatggttcatttgcaaccgcaagctgcctgatctgtaaatacaaggtggactgtgaagctgtcagaggcgacattttcaatcaggtggtcccgcgctgtcctaggtgccctgccgacgaacctcttgccatcatgaagcccgaaattgttttctttggagagaacctgcctgaacaatttcatagagcaatgaagtacgataaagacgaggtggaccttctgatcgtgattggttcctcattgaaagtccgaccagtggccctgattccttcgtcaattccacatgaggtgccccaaattctcattaacagagagccacttccacatcttcactttgacgtcgagctgttgggagactgcgacgtgattatcaatgagctctgtcacagacttggtggcgagtacgcaaagctgtgttgtaaccccgtgaagctctcggaaatcaccgaaaagccgccacggactcagaaagaacttgcctacctttccgaactcccacctactccccttcatgtgtcagaggattcctcaagccctgagagaacctccccaccagatagctccgtgatagtgactctgctcgatcaggcagcaaagtccaatgatgacctggacgtgagcgaaagcaagggatgcatggaggaaaagcctcaggaagtgcagactagcagaaacgtggaatccattgcagagcagatggaaaatccagatcttaagaacgtgggttcatccactggagaaaagaatgagagaaccagcgtggccggaactgtgcgaaagtgttggcctaatcgcgtggcaaaggaacagatctcgaggagactggatgggaaccaataccttttccttcctcctaaccggtacattttccacggagcagaagtgtactcggattccgaggatgatgtgctgtccagctcttcatgtgggtctaatagcgatagcggtacctgtcaatctccttcgctcgaagagcccatggaagatgaatcggagatcgaagagttctacaacggtctggaggacgaacctgatgtgccagagagagccggaggggcaggatttggcactgatggggatgaccaagaggcgattaatgaagcaattagcgtcaagcaagaggtcaccgatatgaattacccctcgaacaaaagc

SEQ ID NO: 19253 - DNA, 1356 bp, synthetic construct
  misc_feature 1..1356: note = source = /note="Description of Artificial Sequence: Synthetic coding sequence"
  source 1..1356: mol_type = other DNA
atgttcgatatcgagtactttcgaaaggaccctcgcccctttttcaaattcgcaaaggaaatctacccgggacagtttcagccgagcctctgccacaaattcatcgccctgtccgacaaggagggcaagttgctccgtaactacacccaaaacatcgacacgctggaacaagtcgcgggaattcaacggatcatccagtgccatggctcattcgccacggcctcatgcctcatttgtaagtacaaggtggactgcgaagcagtgaggggcgatatctttaatcaagtagtgcctcgctgcccacgctgtccggctgatgagccgctggccattatgaaaccggaaatcgtgttctttggggaaaacctgccagagcaattccaccgcgcgatgaagtatgacaaggacgaagtcgaccttctgatcgtgatcggcagttcattgaaggtgcgcccagtggcgcttatcccctcatcgatcccgcatgaagtgccacagatccttatcaaccgggagccgctcccccatctccactttgatgtggaactgctcggcgattgcgatgtgatcatcaatgaactctgccaccgcctgggtggtgaatacgcgaagctgtgttgcaacccagtgaagctgtcagagatcactgaaaagccgccacggactcagaaggaactcgcctacctgtcagaactgccgccgacccctttgcatgtgtcggaggattcgtcgagcccagaaagaaccagcccaccggactcaagcgtgattgtgactctgctcgatcaggctgcgaagagcaacgacgacttggacgtgtccgaatcaaaaggatgcatggaggaaaagccgcaggaagttcaaactagccgcaacgtcgaatcgatcgctgaacagatggagaacccagacctcaaaaacgtgggttcgtcgaccggcgagaagaatgaacgcacctcggttgcaggcactgtgcgcaagtgttggccaaaccgggtggcgaaggaacaaatcagccgccggcttgacggtaaccaatacctcttcctgcctcctaaccggtacatcttccacggggccgaagtgtactccgactcagaggatgatgtgctgagctcatcgtcgtgcggctccaacagcgatagcggaacctgtcagtccccctccctggaagagccgatggaggacgagtcagaaatcgaagagttttacaacggtctggaggacgagccggatgtccccgagcgagctggtggagctgggttcggaaccgatggcgacgaccaggaagctatcaatgaggcaatctcagtcaaacaggaggtgaccgacatgaactacccttcgaataagtcc

SEQ ID NO: 19254 - DNA, 1356 bp, synthetic construct
  misc_feature 1..1356: note = source = /note="Description of Artificial Sequence: Synthetic coding sequence"
  source 1..1356: mol_type = other DNA
atgtttgatatagagtacttcagaaaagatccccggccattctttaagtttgcaaaagagatttatcccggacagtttcagcctagcctctgtcataaattcatcgcattatccgacaaagaagggaaattactgcgtaattacacccagaatattgacacccttgaacaagtggccggtatccaaagaatcatccagtgccatggtagcttcgccactgcaagctgcctgatctgcaagtataaggtggactgcgaggccgtgcggggggatattttcaaccaggtggtccctcggtgcccaagatgtccagctgacgaacccctggcaataatgaaacctgagatcgtgttcttcggagagaatttgcctgagcagttccaccgcgccatgaagtacgacaaggatgaggtggacctgcttattgttattggaagtagtctgaaggtaagacctgttgctctgatcccttcctctattccacacgaagttccacagatcctaataaatcgagaaccacttcctcatctgcacttcgatgtggagttactgggcgactgtgacgtgataattaatgagctgtgtcacagactgggaggagagtatgccaaactgtgttgcaatccagttaagctgtcggagattactgaaaagcctcctcgaacccagaaggagctcgcgtacctctccgagctcccccccactccgctccatgttagcgaggactccagcagcccagagcggacatcaccaccagacagctcggtgatagttacattgttagaccaggcggccaaatctaatgatgatttggatgttagcgagagcaaaggctgcatggaggaaaagccccaggaagtacagactagccgcaatgttgagtctatcgctgaacagatggaaaacccagatctgaagaatgtgggtagtagtaccggagagaagaatgaacgcaccagtgttgccggaactgtccgcaaatgttggcctaatcgcgtggcgaaggagcagattagtcgccggctcgatggcaatcaatatctgttcctacctcccaaccggtatatcttccatggtgccgaagtctatagcgactctgaagacgacgtcctgtcgagtagctcttgcggtagtaatagcgacagcggaacatgtcagtccccctcactggaagaacctatggaggatgagtccgaaattgaagaattctataacgggcttgaggatgaacctgatgttccggagcgggccggtggtgcagggtttggtacagacggagacgaccaggaggcgattaatgaggctatctcagtgaaacaggaggtgactgacatgaattatccttcaaacaaatct

SEQ ID NO: 19255 - DNA, 1356 bp, synthetic construct
  misc_feature 1..1356: note = source = /note="Description of Artificial Sequence: Synthetic coding sequence"
  source 1..1356: mol_type = other DNA
atgttcgacattgaatactttaggaaggacccgcggcctttcttcaagttcgcgaaagagatttacccgggacagttccaaccatccctctgccacaagttcattgctctctctgataaagagggcaagctgctgaggaattacacccagaatatagatactctcgaacaagtggccggaattcagcgcatcatccaatgccatggatcgtttgcgactgcgtcgtgcctgatctgcaagtacaaggtggattgcgaggcggtcagaggagacatcttcaatcaagtggtgccccgctgcccaaggtgtcccgctgatgaaccactggcaattatgaaaccggaaattgtgttcttcggagagaatcttccagagcagttccatcgcgccatgaagtacgacaaggacgaggtggacctgctgatcgtgatcgggtcgagcctcaaggtgcgccccgtggcccttatcccttcttcaatcccgcacgaagtaccgcaaatcctcatcaatcgggagcctctcccacacctccacttcgacgtggaactcttgggagactgtgatgtgatcatcaacgaactgtgccaccggctcggaggagagtacgcgaagctgtgttgcaacccggtgaaactgtcagaaattaccgaaaaaccgccacgcactcagaaagagcttgcttacttgtcagaactgccgccgaccccgctgcatgtgtccgaggacagttcatcacccgagaggacctcgcctccagactcgtccgtgattgtgactctccttgatcaggccgctaaatcgaatgacgatctcgatgtgtccgaaagcaaggggtgtatggaagaaaagccccaggaagtgcagacttcgcgcaacgtggaatcgatcgcagaacaaatggaaaaccccgacctcaaaaacgtcggttcgagcactggcgagaagaatgagagaaccagtgtcgccggaaccgtgcggaaatgttggccgaacagggtggccaaggaacaaatctcccgcaggttggacggaaaccaatacctgttcctgccgcctaatagatacatcttccatggcgcagaggtgtattccgactcggaagatgatgtcctgtcatcgtcatcctgcggcagcaattcggattcaggaacgtgccagtccccgtccctcgaagagcccatggaggatgagtcagagatcgaagagttctacaacggtttggaggacgaaccagatgttccggagagagcgggaggcgccggattcggaactgacggagatgatcaggaggccatcaacgaggcgatctcagtcaagcaggaggtcaccgacatgaactacccgtcaaataagtcg

SEQ ID NO: 19256 - DNA, 1356 bp, synthetic construct
  misc_feature 1..1356: note = source = /note="Description of Artificial Sequence: Synthetic coding sequence"
  source 1..1356: mol_type = other DNA
atgtttgacattgaatattttaggaaggatcctcgaccattttttaaattcgcgaaggaaatctacccaggccagttccagccatcgctgtgtcataagttcatcgccctcagcgataaggaaggaaagctgctgcgcaactacacccagaacatagacactcttgaacaggtcgccggcatacaacgtattatccagtgccacggatctttcgccaccgcctcgtgccttatttgcaaatacaaggtggattgtgaggcagtgcggggggatatctttaatcaagtcgttcctaggtgtccacggtgtcccgcagacgagcctctggcgatcatgaagcccgagatcgtttttttcggagagaacctgccggagcagtttcatcgggcaatgaagtatgataaggatgaagtggatctcctcattgttatcggaagctcccttaaggtccgccccgtggcactgatcccctcaagtatcccacatgaggtgccacaaattttgatcaatcgggaacccctgcctcacctgcacttcgacgtcgagctgctcggggattgtgatgtcatcatcaacgaactttgccaccgtctgggaggcgagtacgcgaagctgtgttgtaatccggtcaagctcagcgagataaccgagaaacctccccgtacgcagaaggagctcgcttatctcagtgagttacctcccacacctttacacgtgtcagaggatagctccagtcccgagaggactagtccgccagactctagtgtgatagttactcttctcgaccaggccgctaagagcaacgatgatcttgacgtctctgagagcaaggggtgtatggaggagaaacctcaggaggtgcagactagcagaaacgtcgaaagcattgctgaacagatggagaatcccgatctcaagaatgtcggaagtagtaccggcgagaagaatgaaagaacaagcgttgccgggactgtgcgcaaatgctggccaaaccgggtggccaaggagcagatttctcgccggcttgacggcaaccagtacctttttctgccccccaaccgttacatcttccatggcgccgaggtgtattctgattctgaggacgatgtgttgagctcgagctcctgcgggagcaattctgacagtggtacttgccaatccccttcactggaagaacccatggaggatgaatcagagatagaagagttttacaatggtctcgaagacgagcccgacgtacccgagagggcaggtggggcagggttcgggactgacggtgatgatcaagaggctatcaatgaggccattagtgtgaaacaagaagtaaccgatatgaactatccgtctaacaaaagc

SEQ ID NO: 19257 - DNA, 1356 bp, synthetic construct
  misc_feature 1..1356: note = source = /note="Description of Artificial Sequence: Synthetic coding sequence"
  source 1..1356: mol_type = other DNA
atgtttgatattgagtactttcgcaaagatccgaggcctttcttcaagttcgccaaagagatttatcctgggcagtttcagccgtcactgtgtcacaagtttatagctctctctgataaggaaggtaaactgctgaggaattatacacagaacatcgacactctggaacaagtggccggtattcagcggattatccagtgccacgggtcttttgccaccgctagctgcctgatttgtaaatacaaggtggattgcgaggccgtcagaggggacatattcaaccaagtggttccccgatgtcccagatgccccgctgacgagccccttgcgatcatgaagcccgaaatcgtgttttttggggagaacctccctgagcagttccatagggccatgaagtacgataaagatgaggtcgacctcttaatcgtcatcggttcttctctcaaggtccggcccgtcgcgttgatcccttcatccattccccacgaagtgccacagattcttattaaccgggaaccactgccccatctccactttgacgtcgagcttcttggagattgtgacgttattataaatgagctgtgtcacagactcggaggtgagtacgccaagctttgttgtaacccggtaaaattgagcgagatcactgagaaacccccacgcacccagaaagaacttgcgtatttgtcagagttgcctccaactccactccacgtgagtgaggactcatcatctccagaaagaacatctcctcctgacagttcagtcattgtcacactgctggatcaggctgccaaaagcaatgacgatctggacgtgagtgagtcgaagggttgtatggaagagaaaccacaagaagtgcagacaagcagaaatgtcgagtccattgccgagcagatggaaaaccctgatctcaagaatgtgggtagctctaccggggaaaaaaacgaacggactagcgttgccggaacagtgcgtaaatgttggcctaatcgggtggccaaggaacagatttctaggcggctggatggcaaccagtacctgtttttacccccaaacaggtatatttttcatggcgccgaggtgtactccgattcggaggatgacgtactaagttccagctcgtgcggcagtaattccgacagtggcacatgccagtcccctagcttggaggagcccatggaggacgagtccgaaatagaggaattttacaatggactcgaggacgagcctgatgttcctgagagggcagggggagcaggcttcggtacagacggcgatgaccaggaggccatcaatgaggcaatcagtgtgaagcaggaagtcacggacatgaactacccgtcaaataaatcc

SEQ ID NO: 19258 - DNA, 1356 bp, synthetic construct
  misc_feature 1..1356: note = source = /note="Description of Artificial Sequence: Synthetic coding sequence"
  source 1..1356: mol_type = other DNA
atgtttgacatagagtactttcggaaggaccccagacctttctttaaattcgccaaggagatctatcccggccagttccagccatctttatgtcacaaattcatcgctctttcagacaaggaggggaagctgttgcgcaattacactcaaaatatcgataccctggaacaggtggccggcatccagaggatcatccagtgtcatgggtcctttgccaccgcctcttgccttatctgcaaatacaaggtggactgtgaggccgtgagaggggacattttcaaccaagtggttccaaggtgccccaggtgccccgccgatgagcctctggcgatcatgaagcccgaaatcgtttttttcggagagaacttacccgagcagtttcaccgagcgatgaaatatgacaaggatgaggtggacttgctcattgtgatcggatccagcttgaaggtgcggcctgttgccctgattccgagcagcattccccacgaagtcccccagattctgatcaatcgagagcctctgccccacctgcacttcgatgtcgagctgctcggcgactgtgatgtgatcatcaacgaactgtgccaccggttgggcggcgagtacgccaaactctgttgtaaccctgtgaagcttagcgagatcactgaaaaacctccaaggacccaaaaagagctggcctacctgagcgaactgccacctacgcctcttcacgtgtcagaggacagctcaagccctgaaaggacatccccccccgattcttccgtgatagtgacgctgctggaccaagccgctaagagtaatgacgatcttgacgtttctgaatccaaggggtgtatggaagagaaaccccaggaggtacagacaagccgcaacgtggagtccattgccgagcagatggaaaacccagatttgaagaacgtgggaagctccactggggagaaaaacgaacggacaagcgtggcggggaccgtcaggaagtgttggcctaatcgtgttgctaaagagcagatttcaaggagactggatggcaaccaatatttattcctacctccaaaccggtacatttttcacggcgccgaggtctactcagattccgaagatgatgtgctgagctcttcgtcttgtggctctaattctgactcagggacatgtcagagcccatctctggaagagcctatggaggacgaatctgaaatcgaggaattttacaacggtctggaggacgaacctgacgtcccggaaagggcagggggagctgggtttggaaccgacggcgatgatcaggaagccatcaacgaggctattagtgttaagcaggaagtgaccgacatgaattacccctccaacaagtca

SEQ ID NO: 19259 - DNA, 1356 bp, synthetic construct
  misc_feature 1..1356: note = source = /note="Description of Artificial Sequence: Synthetic coding sequence"
  source 1..1356: mol_type = other DNA
atgttcgacattgaatacttcaggaaggacccgcgcccgtttttcaaattcgcgaaggagatctacccagggcagttccagccgtcgctgtgccacaagttcatcgcactgagcgataaggagggtaagctcttgaggaactacacccaaaatatcgataccttggaacaggtggccgggatccaacgcatcatccagtgtcatggctccttcgctaccgcgtcgtgcctgatctgcaagtacaaggtggattgcgaggctgtacggggagatatttttaatcaagtcgtgcctcggtgccccaggtgccccgcggacgagccgcttgccatcatgaagccggagatcgtctttttcggtgaaaacctccccgaacaatttcaccgcgcaatgaaatatgataaagatgaagtcgatctgctgatcgtgattgggtcctcactgaaggtccggcctgtggccctcataccaagctcgatcccgcacgaagtcccacagatcctgatcaaccgcgaacccctgccgcatctccacttcgacgtggagctgctcggagattgcgacgtgatcatcaacgagctgtgccatagactgggaggagaatacgctaagctctgttgtaacccggtgaagctgtcagaaattaccgagaagcccccacgcactcagaaggagctggcctacctgtccgaacttcctccgaccccgttgcacgtgagcgaggacagctcatccccagaaagaacttcaccgccggattcgagtgtgatcgtgacgctgttggaccaggcagcgaaatccaacgacgacctcgacgtgtcggagtcgaaaggatgcatggaagagaaaccacaggaagtgcagacttcgcggaacgttgagagcatcgctgagcagatggagaacccggacctgaagaacgtgggatcctcgactggtgagaagaacgagcgcacctcggtcgcaggaactgtgcgaaagtgctggcctaatcgggttgccaaagaacagatctcacggagactcgatggaaatcaatacctgttcctccctcctaatcgctacatctttcatggagcagaagtgtactcggacagcgaggacgacgtcctctcctcctccagctgcgggtcaaactccgactctggcacctgtcaatcgccttcccttgaagaaccgatggaggacgagtctgaaattgaagaattctacaacggacttgaggatgaaccagacgtgccagaaagagccggcggcgccggcttcggcactgatggagacgaccaagaagcgatcaatgaagccatcagcgtgaaacaggaagtcacggatatgaattacccgtcaaacaagagc

SEQ ID NO: 19260 - DNA, 1356 bp, synthetic construct
  misc_feature 1..1356: note = source = /note="Description of Artificial Sequence: Synthetic coding sequence"
  source 1..1356: mol_type = other DNA
atgtttgatattgagtactttagaaaggatcctcggccgtttttcaaatttgctaaagagatctatccagggcaattccaaccgtcgctctgtcataagttcattgcactctcagacaaggaaggtaagctgctgcgcaattacacccagaatattgatactttggaacaggtggcaggaattcagaggattattcaatgtcacggatcgttcgcaaccgcctcgtgcctgatctgtaaatacaaggttgattgtgaagccgtgcggggtgatatctttaaccaagtggtgcctcgctgtccacgctgccctgcagatgaaccccttgctattatgaagccggagatcgtgttcttcggggaaaacctgccagaacaattccatcgcgccatgaagtacgacaaggatgaagttgatctgctcattgtgattggctcaagtcttaaggtgaggcctgtggcacttatcccttcgtcgatcccccacgaggtgcctcagattcttatcaatagagagccccttcctcatctgcattttgatgtggaactgctgggtgactgtgatgtcataatcaacgaactgtgccatcgccttggcggagaatacgccaaactgtgctgcaatccggtgaagctgtctgaaattactgaaaagcctccaagaacccagaaggaacttgcgtacctttccgagcttccccccactcctctgcatgtctcggaggacagctcctcccctgaaaggacctcaccaccagattctagcgtaattgtgacccttctcgatcaggccgcaaagtccaacgacgatctggatgtgtccgaatcgaagggatgtatggaagaaaagcctcaagaagtgcaaacctcgcgtaacgtggaaagcatcgcggaacagatggaaaacccagacctgaaaaacgttggttcctccaccggcgagaagaacgaacggacctcagtcgcgggtactgtgcgtaaatgctggccaaaccgggtggcaaaggaacaaataagccgcaggctcgacggaaaccaatatctgtttctgccgcccaaccggtacatcttccacggtgcagaagtgtactcggattccgaagatgacgtcctgagctcgtccagctgtggatcaaacagtgattcgggaacctgtcagagcccaagcctcgaggagcctatggaggacgagagcgaaattgaagagttttacaatggacttgaggatgagccagatgtccctgaaagagctggaggggccggatttggaacggacggagatgatcaagaggctatcaatgaagcaatttccgtgaaacaggaagtgaccgacatgaattacccaagcaacaaatcc

SEQ ID NO: 19261 - DNA, 1356 bp, synthetic construct
  misc_feature 1..1356: note = source = /note="Description of Artificial Sequence: Synthetic coding sequence"
  source 1..1356: mol_type = other DNA
atgttcgacattgagtatttccggaaggacccaagaccatttttcaagtttgcaaaagaaatctacccggggcagttccagccgtctctgtgccataagttcatagcactgtccgacaaggagggcaaactgctgagaaattacacccaaaacattgatacgctggaacaggtggcgggcatccagaggatcatccagtgccacggctccttcgcgaccgcatcgtgtcttatttgcaagtacaaggtggactgcgaggctgtgcggggagacatctttaatcaagtggtgccgcggtgcccgcgctgtccggcagacgagccgctggcgatcatgaagcctgagatcgtgttcttcggcgaaaacctcccagagcaattccaccgggccatgaagtacgataaggatgaggtggatctgctgatcgtcatcggatcgtcattgaaggtccgcccagtggcactgatcccatcgtccatcccgcacgaggtgccgcaaatcttgatcaatcgcgaaccactgccgcatctgcatttcgatgttgaactgctgggagattgtgatgtgatcatcaacgagctctgccaccggctcggcggagagtatgccaagctctgctgcaacccggtcaaattgagcgaaatcaccgagaaacccccgcgaacccagaaagaacttgcgtacctctccgaactccctccaaccccgctgcatgtgtcggaagattcatcatcgccagagaggacttcgcctccggactcgtccgttatcgttactctccttgaccaagcggcaaagtcaaacgatgacctggacgtgtcggaaagcaagggatgtatggaagaaaaaccgcaagaggtgcagacttcacggaacgtcgaatcaatcgctgaacaaatggaaaaccctgatctgaaaaatgtgggaagcagcaccggcgagaaaaacgagagaacttccgtggctggtactgtgcggaagtgctggcctaacagggtcgctaaggaacagatctcccgccggctcgacggcaatcagtacctgttcctgccgcctaatagatacatcttccacggagctgaagtgtactcagattccgaggacgacgtcctgagctcgtccagctgtgggtcgaattcggactcgggaacctgccagtccccaagcctcgaagaaccaatggaagatgagtccgaaatcgaagagttctacaacggcttggaagatgaaccggacgtgccggaacgcgcgggcggagcgggattcgggaccgacggagatgatcaagaggccataaatgaggccattagcgtgaagcaggaagtgaccgatatgaattacccttccaacaaatcc

SEQ ID NO: 19262 - DNA, 1356 bp, synthetic construct
  misc_feature 1..1356: note = source = /note="Description of Artificial Sequence: Synthetic coding sequence"
  source 1..1356: mol_type = other DNA
atgttcgacatcgaatacttccgcaaggatcccaggccctttttcaagtttgctaaggagatctatccaggccagttccagccctctttgtgtcacaagttcatcgctctgtcagataaggaaggtaagcttcttcgtaactatacccaaaacatcgatacccttgagcaagtggccggaattcagaggatcatccagtgtcatggatcctttgccacagcttcatgcctcatttgtaaatataaagtggattgtgaggctgtacgcggagatattttcaaccaggtcgtccctcgttgcccaaggtgtcctgcagatgagcctttggccatcatgaagcctgaaattgttttcttcggtgaaaaccttcccgaacagttccatcgcgcaatgaagtacgataaagatgaggtggacttgctcattgtaattggttcttctcttaaggtgcgtcctgtggctctgatcccttctagtataccacacgaagttccacagatcttgattaatagagaacccctgccccacctgcactttgacgtcgaactgttgggtgactgtgacgtcatcatcaacgagctgtgccacagattgggtggtgaatatgctaagctgtgctgtaatccagtgaagctcagcgagatcactgagaagcctcctaggacacagaaggaacttgcatacctcagcgagctcccaccaacccccctccatgtgtcagaggacagttcttcccctgaaagaacttcaccccccgattcctcagtgatcgtcactctgctggaccaagccgctaagtcaaatgatgacctggatgtatctgagagtaagggatgtatggaggagaagcctcaggaggtacagaccagcaggaacgtggaatctatcgccgagcaaatggagaaccccgacttgaagaacgtgggttcttccacaggcgagaagaatgaaagaacttctgttgccggcaccgtcagaaagtgttggcccaacagggttgccaaggagcagatttccaggcgcctggatggtaaccagtacctgttcttgccacctaacaggtacatttttcacggtgcagaggtctactccgactccgaggacgacgtattgtccagcagtagctgcggcagtaatagcgattctggaacttgccagtccccctccctggaggagcccatggaagacgagagtgaaatcgaggaattttacaacggacttgaagacgaaccagatgtccccgagcgcgctggcggtgctggcttcggcactgacggtgacgatcaggaggcaatcaatgaggcaatcagtgttaaacaggaagtcacagatatgaactatccttccaacaagagt

SEQ ID NO: 19263 - DNA, 1356 bp, synthetic construct
  misc_feature 1..1356: note = source = /note="Description of Artificial Sequence: Synthetic coding sequence"
  source 1..1356: mol_type = other DNA
atgttcgatatcgagtacttccggaaggaccccagaccgtttttcaaattcgccaaggaaatctacccggggcagttccaacctagcctgtgccacaagttcatcgcactttcggataaggaaggaaaactgttgagaaactacactcagaatattgacacccttgaacaggtcgccgggatccaacggattatccaatgccatgggtcatttgccacggcctcgtgtctcatctgtaagtacaaggtcgactgtgaagccgtccgtggagacattttcaaccaagtggtccccagatgcccacgctgcccggccgacgaaccgctggcgatcatgaaaccagagatcgtgttctttggagagaatctgcccgagcagttccatagggcgatgaagtatgataaggatgaagttgatctgctcatcgtcatcggtagcagcctcaaggtgcggcccgtggccctgatcccgtcctctatcccgcacgaggtaccacaaattcttatcaaccgcgagcccctcccgcacctgcatttcgatgtcgagctgctgggggactgcgatgtgattatcaatgagctgtgccacaggctgggcggtgaatacgcgaagctgtgctgcaatccggttaagttgtcagagatcacggaaaagccgccgcgcacccaaaaagagctggcgtacctctccgaactgccgccgactccccttcacgtgtctgaagattcgtcctccccggagcggacctccccgccggactcgtccgtcattgtcacgctccttgatcaggccgccaaatccaatgacgacttggacgtctcggaaagcaaaggctgtatggaagaaaaaccgcaggaggtgcagacttcccgcaacgtggaatctatcgctgagcagatggaaaacccggacctcaagaatgtcggctcgtcgaccggagagaagaacgaacgcacctccgttgcgggcactgtgaggaagtgctggccaaaccgcgtggccaaggagcagatatcaaggcgcctcgatggaaaccagtacctgttcctgccgcccaatcgctacatttttcatggtgcggaggtgtacagcgattccgaggatgacgtcctctcttcgagctcgtgcggatcaaactcagattccggaacctgtcagtcaccatcactcgaagagccaatggaggatgaatcagaaatcgaagagttctacaacggactcgaagatgaaccggacgtgccagagcgagccggaggggccggctttggcactgacggggacgaccaagaagctatcaacgaggcgatctcagtgaagcaggaggtgacggacatgaactacccatcgaacaagtca

SEQ ID NO: 19264 - DNA, 1356 bp, synthetic construct
  misc_feature 1..1356: note = source = /note="Description of Artificial Sequence: Synthetic coding sequence"
  source 1..1356: mol_type = other DNA
atgttcgacatagagtacttccgaaaggatccacggcccttttttaagtttgccaaagaaatctaccctgggcagttccaaccctccctttgccataagtttatagccctctcagacaaggaagggaagttgctgcgtaactatacccagaacattgacacgctggaacaggtggccggcatccagagaattatccagtgtcatgggtcattcgcaaccgcatcttgtctgatctgtaaatataaggttgactgcgaagcagttcggggtgacatctttaatcaagtagtccctagatgtccacgttgccccgctgacgaacctctcgcaatcatgaaacccgagatagtgtttttcggggaaaacctgcctgaacagttccatcgggccatgaagtacgataaagacgaagtcgatcttctcattgttatcggatcatcactaaaggtaaggcctgtcgctttgatccccagtagcattcctcacgaggttccacaaatcctgattaaccgtgaacccctcccccatctccattttgacgtcgagctcctgggggactgcgacgtgatcattaacgaactctgccatcgcctggggggggagtatgccaaattatgttgtaaccccgtcaaattgagtgagattaccgagaagccccctcgaacgcagaaggaattggcatacctgtccgagctgccacccacgccacttcatgttagcgaggattcatcttcacccgagcgaactagtccgccggatagtagtgtcatcgtaacgctgttagatcaggccgccaagagcaacgacgatctcgatgtttcagagagcaaaggttgtatggaagagaagccacaagaggtgcaaacgagcaggaatgtggaaagtatcgcagaacaaatggagaacccagacctgaagaatgtcggctcttcaacaggagaaaaaaacgagcgaacctctgttgctggtactgttaggaaatgttggcccaaccgcgtggccaaagagcagatctctcggcggctggacggaaatcagtacctgttcctccctcctaaccgctatatcttccacggggctgaggtatattctgattcagaagatgacgtcctgtcttcttctagctgcggctccaattcagatagcggcacttgtcagagtccttctttggaggaaccaatggaagatgagagtgaaatcgaagagttttataatgggctggaggacgagcctgatgtcccagaacgcgcagggggtgcaggttttggcacggatggggatgaccaggaagccatcaacgaggcaattagtgtaaagcaagaggtgacagacatgaactacccaagcaataaaagc

SEQ ID NO: 19265 - DNA, 1356 bp, synthetic construct
  misc_feature 1..1356: note = source = /note="Description of Artificial Sequence: Synthetic coding sequence"
  source 1..1356: mol_type = other DNA
atgtttgacatagaatattttagaaaggatcctcgaccattctttaaatttgcaaaagaaatctacccaggtcagtttcagccctcactctgtcacaaattcatcgctctatccgacaaagaaggcaaactgctcagaaactacactcagaacattgacacgctcgaacaggtcgctgggatccaaaggattatacagtgccacgggtcattcgccacagcgtcatgtctgatctgtaaatacaaggtggactgtgaagctgtgagaggtgatatcttcaatcaagtcgtaccccggtgtccgcgctgccccgcagatgagcccttggcaataatgaagcccgagatcgtgttcttcggggaaaatttaccagaacagttccatcgggctatgaagtatgataaagacgaagttgatcttctcatcgtaattgggagttctctcaaggtgcgccccgttgctcttatcccttcttctatccctcacgaagtgccccagatactgataaacagggagccgcttccacatctgcatttcgacgtggaactgttgggcgattgtgacgtgatcataaatgagctttgccaccggcttggcggagagtatgcgaagctctgctgcaatcccgttaagttgtcagagattaccgagaagccgccgcgaacccagaaggagcttgcttatctgtcggagctgcctccaacacctttgcacgtcagtgaggattcctctagccccgaacgaacatcgccaccggattcgagtgtgattgtcactctcctggatcaggcagctaaaagtaatgacgatctcgacgtttcggagtcgaaggggtgcatggaagagaaacctcaggaggtgcagacatctcggaacgtggagtctatcgcagaacaaatggaaaatcctgacttaaaaaatgtaggttcatccaccggggaaaagaacgagcgaacgagtgtcgctgggaccgtgagaaaatgttggcctaacagggtggctaaagagcaaattagccgcaggcttgatgggaaccagtacctgtttctcccaccgaacaggtacatttttcacggcgccgaggtctatagtgatagcgaagacgatgtgttgtcatcgagttcctgtgggtccaatagcgattctggcacatgtcagtctcccagcttggaggaaccaatggaggatgagtcagagattgaggagttctacaatgggttagaggatgaacctgatgtccctgaaagggccggcggtgccggctttggtactgacggtgacgatcaggaggccatcaatgaggctatatcagtgaaacaggaagtgacagacatgaattatccaagcaacaagtct

SEQ ID NO: 19266 - DNA, 1356 bp, synthetic construct
  misc_feature 1..1356: note = source = /note="Description of Artificial Sequence: Synthetic coding sequence"
  source 1..1356: mol_type = other DNA
atgtttgatattgagtactttaggaaagacccacggcctttctttaagttcgctaaggagatttatcccgggcagttccagccctccctttgccacaagttcatcgcgctctctgacaaggaaggcaagctgctccgcaactatacccagaatattgacactctggagcaggttgctgggatccagcggattatccaatgccatgggtcctttgcaactgcgtcttgcctgatctgtaaatacaaagtagactgcgaggccgtgcggggcgacatctttaatcaggttgtgcctcggtgcccgagatgtcctgccgacgagccgcttgctattatgaaaccggagatcgtgtttttcggcgaaaacctgccagagcagtttcacagggccatgaagtatgacaaggacgaagtggacctcctgattgtcattggatctagcctgaaggtcaggcctgtagccctgattccaagttcaattcctcacgaggtgccccagatcttgatcaatcgagagccccttcctcacctccatttcgacgtcgaacttctgggtgattgcgacgtgatcataaacgagctttgtcatcggctcggaggggagtacgccaagttgtgttgcaatcccgtgaagttgagcgagattacggaaaagcctccgagaacacagaaggaactggcttacctctcagaactgccaccaacccccctccacgtgagcgaggacagttcctcacccgagaggacgagccccccagattcctctgtaatagtgactctgctggatcaggctgctaagagtaacgacgatttggacgtaagcgagtctaaaggctgcatggaagaaaagccacaagaggtgcaaacctctaggaatgtagagtctatcgcagagcagatggaaaatcccgatttgaagaacgtagggtcctccaccggagaaaagaatgagcgaacgtcagtggcgggcactgtccgcaagtgttggcccaacagagtggcaaaagaacagatctctcggagactggacgggaatcagtacctgttcctcccacctaaccgctatatcttccatggcgcagaggtgtactcagattcagaggatgatgtattgagctctagttcctgcgggtctaatagtgatagtggcacctgccagagcccaagtcttgaggagccgatggaggacgaaagcgagatcgaagagttttataatggtttggaggacgagcccgatgtgcctgaaagggcagggggagcggggttcgggaccgatggagatgaccaggaggccatcaacgaagctatatctgtcaaacaggaagtgaccgacatgaactatccttcaaataagagc

SEQ ID NO: 19267 - DNA, 1356 bp, synthetic construct
  misc_feature 1..1356: note = source = /note="Description of Artificial Sequence: Synthetic coding sequence"
  source 1..1356: mol_type = other DNA
atgttcgacattgaatatttcagaaaagaccccagaccatttttcaaattcgccaaggagatttatccggggcagttccagccttcattatgccacaagtttatcgccctgagcgataaggagggcaaactgttgcggaactacactcagaatattgataccctggagcaagttgccgggatccagcgaattatccagtgtcatggatctttcgccacagcatcctgcctgatatgtaaatacaaagtagattgcgaggcagtccgcggtgacatttttaaccaggtggtgcctcgctgtccacgttgtccagccgatgagcccctcgcgatcatgaaaccagagattgtcttctttggcgaaaacctccctgagcagttccacagagcaatgaaatatgataaggatgaagtggacttgcttattgtgattggtagcagcctcaaggtcagacctgtggccctgattccaagctccattccccacgaggttcctcagattctgattaatcgggagccgctccctcaccttcatttcgatgtggagctcctgggcgactgtgatgtgatcattaatgaactgtgccatagattgggcggggaatacgctaagctgtgctgtaatccggtcaaactgtccgagattaccgagaaacctccccggactcagaaagagttagcctacctgtcagaattgcccccaacccctctacacgtctccgaggacagtagtagccctgagcggacttccccacccgacagctctgtgatcgtgactctcctcgatcaggcggctaagagcaatgatgatctagatgtttccgaatccaagggctgtatggaggagaagccccaggaagtgcagacgtctcggaacgtcgaatcaattgccgagcagatggaaaatccagacttgaaaaatgtgggatcctctaccggcgagaaaaacgagagaactagtgttgcaggcaccgtccggaagtgctggccaaaccgggtggccaaagaacagattagtaggcgattggatgggaatcagtacctttttctgcccccaaataggtacatcttccatggggcagaggtctattctgacagcgaggatgatgtcctaagctcaagcagttgtgggtccaactcggactcagggacatgccaatcaccgtcccttgaggaacccatggaggacgagagcgagattgaagaattctacaatgggctggaggatgagcccgatgttcctgaacgcgccggaggtgccgggttcggaacagacggagatgatcaggaggccatcaacgaggcaatatctgttaagcaggaagtgaccgatatgaattacccctccaacaagtcc

SEQ ID NO: 19268 - DNA, 1356 bp, synthetic construct
  misc_feature 1..1356: note = source = /note="Description of Artificial Sequence: Synthetic coding sequence"
  source 1..1356: mol_type = other DNA
atgttcgacatcgagtattttaggaaagatccaaggcctttcttcaaattcgctaaggagatataccctggtcaattccaaccatccctgtgtcataagttcattgctttatctgacaaggagggcaagctgctacggaactatacacaaaatattgatacacttgaacaggtggcagggatccaacgaatcatacagtgtcatggatcctttgccactgcctcatgcctgatctgcaaatacaaggtggactgcgaagctgttcggggcgacatcttcaaccaggtagtgcctagatgcccccgctgccctgccgatgaacccttggctattatgaaaccagaaatcgtgttttttggcgagaacctgcccgaacaattccacagagctatgaagtacgataaggacgaggtcgacctgctcattgtcatagggtcaagccttaaggtgcgccctgtggccctcattcccagctctattcctcatgaagtgccacagatcctaatcaacagggaacctcttccacacctccacttcgacgtggagttgctgggggactgcgacgtcattatcaatgagctttgccatcgactgggcggggagtatgcaaaactgtgttgcaacccagtcaagctgtcagaaatcaccgaaaagcccccgagaacacagaaggagctggcctatctgagtgagttgcctcccacacctttgcacgtgagcgaagactcttctagtcccgagcgaacaagtccaccggactccagcgtaatcgtgacattactagaccaagcagctaaaagtaacgatgacttggacgtgtcagaatctaaaggatgcatggaggagaagccacaggaggtgcagacaagcagaaatgtggaaagtatcgcagagcagatggagaaccccgatctgaagaacgtcggctcgtccaccggagagaaaaatgaaaggaccagcgttgctgggacggtccgaaagtgctggccgaaccgcgtggctaaagagcagatctctcggcgccttgacggcaatcagtacctcttcctaccacctaacagatacattttccacggcgctgaagtttattctgatagcgaagatgacgtgttatcttcatcaagctgtggttcaaactctgacagtgggacttgtcaaagccctagcctcgaggagccaatggaggacgaaagcgaaatcgaggaattttacaacggcctggaggacgaacccgatgtgcctgaaagggccgggggtgcaggattcgggacagatggtgatgaccaggaggccatcaacgaggcgatctccgtcaaacaggaggtgacagacatgaactatccaagcaacaaaagt

SEQ ID NO: 19269 - DNA, 1356 bp, synthetic construct
  misc_feature 1..1356: note = source = /note="Description of Artificial Sequence: Synthetic coding sequence"
  source 1..1356: mol_type = other DNA
atgtttgatattgagtatttcagaaaagaccccaggccattctttaagtttgcaaaggaaatctaccctggacagttccagcccagcctttgccataagttcattgcactgagcgataaggaaggtaagctcctgaggaattacactcagaacattgacactctcgaacaggttgcagggattcaaagaataatccaatgtcacgggtcttttgcgaccgcctcctgccttatttgtaaatacaaagtggattgcgaagcggttcgaggagacattttcaatcaagtggtgccaaggtgtcctagatgccctgctgatgagcccctggcaatcatgaagcctgagatagtcttttttggtgagaacctgcctgagcaatttcatcgggcaatgaaatacgataaggatgaggtcgatctgcttatcgtcattggctccagcctgaaggtgcggcctgtggctcttataccgagctccatcccccatgaagtgcctcagatactcattaaccgagaacctctcccccatcttcattttgatgtggagttgcttggcgattgtgatgtgattatcaacgaactgtgtcaccggctgggtggcgagtacgctaaactttgctgtaatcctgtgaaactttccgagataacggaaaagcccccaaggactcaaaaggagctggcatacctgtcggagctgcctcctacccctctgcacgtgtcagaggactcgtcatcacctgagcgcacttcacctcctgattcgtccgtgatcgtgactctgctcgatcaagcggcaaagtctaacgatgacctggacgtgtcggaaagcaagggctgtatggaagaaaaaccccaagaagtgcaaacctcccgaaatgttgaatccatagcagaacaaatggaaaaccctgaccttaagaacgttggaagcagcaccggagagaagaatgaacggacttccgtggcaggtactgtgagaaaatgttggcccaaccgggtggcaaaggaacaaatctcccgtcgcctggacggaaaccaatacctgttcctcccaccaaacagatacattttccatggtgccgaggtgtatagcgactctgaagatgacgtgctgtcaagcagctcctgcggatccaactcggactcaggaacctgtcaatcgccttcacttgaagaacctatggaagatgaatcagagatcgaggagttttacaacggtttggaagatgaaccagatgtccctgagcgggcaggaggagcaggttttggcaccgatggagatgatcaagaggcaatcaacgaagccatttcagtgaagcaggaagttactgacatgaactatccttcgaacaagtcg

SEQ ID NO: 19270 - DNA, 1356 bp, synthetic construct
  misc_feature 1..1356: note = source = /note="Description of Artificial Sequence: Synthetic coding sequence"
  source 1..1356: mol_type = other DNA
atgtttgacattgagtacttccggaaggacccaagaccatttttcaaatttgcaaaggaaatttacccgggacagtttcagccaagcctgtgccacaagtttatagcccttagcgacaaagagggcaaacttctgaggaattacactcaaaacatcgacaccctggagcaggtggcaggcatacaacggataatccagtgtcatgggtcatttgctaccgccagttgcctgatctgcaaatataaggtagactgcgaagctgtccgtggtgacattttcaatcaggtggttcctagatgtccgcgctgtccagcagacgaacccctggcaattatgaagcccgaaattgtcttttttggcgagaatctccctgaacagttccaccgtgccatgaagtatgacaaggatgaagtcgatctgctcatcgtcatcggctcttccctgaaggttaggcccgtggcattaattcctagctccatcccacacgaggttcctcaaatcctgatcaaccgcgaaccactgcctcacttgcacttcgatgttgagctgctgggagattgcgatgtcatcattaacgagctgtgtcatcgcctgggtggagagtacgcaaaactctgttgcaatccggtgaagctcagtgagatcacggaaaagcctccgcgaacccagaaggaactggcttacttaagcgagctgccacctacaccgctccacgtgtctgaggattctagttcccccgaacggacttcaccccccgattcttcagtcattgtcacgctgctagatcaggccgctaagtccaacgacgacttagatgtaagcgagtccaagggatgcatggaagaaaagccccaagaggtacagaccagtaggaacgtggagagtattgccgaacagatggaaaatccggatctcaaaaacgttggtagttccactggcgaaaagaacgagcgcaccagtgttgccggtaccgtgaggaaatgctggccaaatcgggtggccaaagaacagatttcacgccgactcgatggaaaccagtatttgtttctgccacctaatcgctacatcttccatggtgccgaagtttacagcgatagcgaagacgacgtcttaagcagctcatcctgcggtagtaattcggattcaggtacatgccagagcccttcattagaagaacctatggaagacgagtctgagatagaggaattctataacggactggaggatgagcctgatgttccagagagggctgggggtgcaggctttgggacggacggggatgatcaagaagcaattaatgaggccatttcggtgaaacaggaagttactgacatgaattacccttccaacaagtca

SEQ ID NO: 19271 - DNA, 1356 bp, synthetic construct
  misc_feature 1..1356: note = source = /note="Description of Artificial Sequence: Synthetic coding sequence"
  source 1..1356: mol_type = other DNA
atgttcgatatcgagtacttcagaaaggaccctcgccctttctttaagttcgctaaagagatctaccctggtcagtttcagcctagtctctgccataagtttattgctttgagcgataaggaaggaaaattacttcgaaattatacccagaatatagacactctcgagcaggtcgccggcatacagaggataatccagtgccatggatctttcgccacagcaagttgccttatttgtaagtacaaagtggattgcgaggctgtaaggggcgatattttcaaccaagtggtccctcggtgtccgcgctgccctgcagatgaacctctggccattatgaagccagagattgtctttttcggagaaaatttgcccgagcagtttcacagggccatgaagtacgacaaagacgaggtcgacttactgatagtgatcggttcatctttgaaggtaagaccagttgcgctaattccctcttccataccgcacgaagtgccccaaatcctcatcaaccgggaaccgttaccccaccttcattttgatgttgagctgctgggcgattgtgatgttattatcaacgaattgtgccatcgactgggaggggagtatgccaagctctgttgcaatccagtcaaactttccgagataaccgaaaaacctcctagaacacagaaggaactcgcgtacctgtcagagttgcctccaacacctttgcacgtcagcgaggatagctcttctcccgaaaggacctcgcctcccgatagttccgtcattgtgacccttcttgatcaggccgcaaaatcaaacgatgacctcgatgtctctgagtccaaggggtgtatggaggagaagcctcaggaggtgcagaccagcagaaatgtcgaatccattgcggagcagatggagaatccagacttgaagaatgtgggatcctccactggagagaaaaacgagcgaaccagcgtggcgggaaccgtgcgtaagtgttggcctaatcgggtcgccaaggaacagatctcacggcggttggatggtaaccagtacctcttcctccctcccaacaggtatatctttcatggtgccgaggtgtactcggatagcgaagatgatgttcttagctcttcatcttgtggttccaatagcgacagtggcacgtgccagtcacccagcttagaagagccgatggaagacgagtccgagatcgaagagttttataatggactggaggacgaaccagacgtacctgaaagagccggaggtgccgggtttggcacggacggcgacgatcaagaagcaattaacgaagccatctcagtgaaacaggaggtcaccgatatgaattacccatcaaacaagtct

SEQ ID NO: 19272 - DNA, 1356 bp, synthetic construct
  misc_feature 1..1356: note = source = /note="Description of Artificial Sequence: Synthetic coding sequence"
  source 1..1356: mol_type = other DNA
atgttcgatatcgaatactttagaaaggatcccagacctttttttaagttcgccaaggagatttatccgggacagttccagccatccctgtgccacaagtttatcgcactgtctgacaaggagggcaaactgctccgaaattatacccagaacatcgatactcttgaacaggttgcgggcattcaacgaattattcaatgtcatgggtcattcgcaacagcctcatgtttaatctgcaagtacaaggttgattgtgaagccgtgagaggcgacattttcaatcaggtcgtgcctaggtgtcctaggtgccctgctgacgagcctctagctatcatgaagcccgaaatcgtgttcttcggagaaaatctgcctgaacagtttcaccgagctatgaagtacgataaggatgaagtggatctgctgatcgtcattggatcttcgttgaaagtgagaccggtcgcactcattccctcaagtataccccacgaagttcctcagatcctaatcaacagagaacctctcccccaccttcactttgatgtcgagctgctgggggattgtgacgtgatcattaatgaactctgccatcgactcgggggcgaatatgctaagttgtgttgtaacccagtcaagctaagtgagatcacagagaaaccaccaagaactcaaaaggagctcgcctaccttagcgaactgccacctacacccttgcatgtctcagaagattcctcttcccctgagcgaacttctccaccagactccagtgtgatagtcacattgctggaccaggccgctaagtctaatgatgatctggacgtctctgaatccaaaggttgtatggaagagaaacctcaggaagtgcagacctctcgaaatgtcgaatccatcgcggaacaaatggaaaaccccgacttgaagaacgtcggatcctccactggcgagaaaaatgagaggacaagtgtggcgggtactgtccgaaaatgctggccaaaccgtgtcgctaaggagcaaatctcccgcaggctggatggcaatcagtacttatttcttccgccaaacaggtacatatttcacggggctgaagtctactccgacagcgaggacgacgtgctgagcagctctagttgtggatcaaactcagattctggcacatgccagtcgccatcactcgaggagcctatggaggacgagtccgaaattgaagagttctacaacggtctggaagatgagcctgacgtgccggagcgtgccggcggcgctggattcggcaccgacggggacgatcaggaggctattaatgaagccatttccgtcaagcaggaggtgaccgatatgaactatccttccaataagtct

SEQ ID NO: 19273 - DNA, 1356 bp, synthetic construct
  misc_feature 1..1356: note = source = /note="Description of Artificial Sequence: Synthetic coding sequence"
  source 1..1356: mol_type = other DNA
atgttcgatatagaatactttcgaaaggaccctcgccccttcttcaaattcgcgaaagagatttacccaggccaatttcaaccttccctctgtcataagtttattgccctgtcggataaagagggtaaattgcttcgcaattacacccagaacatcgacactcttgaacaagttgcaggtattcaacgcatcatacaatgtcatggatcatttgcaaccgcatcctgtctgatctgcaagtacaaggtcgactgtgaagccgtcagaggggatatcttcaaccaagtggtcccacggtgtcctcggtgccctgccgatgagcccctggctataatgaaacctgaaattgtcttttttggcgagaaccttcctgaacagtttcatcgtgcaatgaaatacgacaaggatgaagtggatcttttgatcgtcattggttccagcctgaaggtccgccccgtggcattgatcccctcctcgataccgcatgaggtgccgcagattctcatcaaccgagagccattgcctcacctgcatttcgatgtggaactgctcggcgactgtgatgtgataatcaacgaactttgtcacagactcggcggggaatatgcaaagctgtgctgtaacccagtcaagctcagcgaaattaccgagaaacctcccagaacccagaaggagttggcatacctgtccgaactgcctcccaccccgctgcatgtgagcgaggattcatcttcgcctgaaaggacttccccaccagatagctcagttatcgttactctgctcgatcaagcagctaaaagcaacgacgacctcgacgtgtcggaatccaagggatgcatggaagaaaagccacaagaagtgcaaacctccagaaacgtggaatcgatagcagagcaaatggagaaccctgacctcaagaacgtcggttcctcgaccggagagaagaacgagcgtacttccgtggctggaacggttcgaaagtgctggcctaatagagtcgccaaagaacagatctcccgcagactcgatggcaatcagtacttgtttcttcctcctaatcgttacatttttcacggtgcagaagtttactccgactcagaagatgacgtcctgtccagctcaagctgtggatccaattcagactccggtacttgtcaaagccctagccttgaagaacctatggaggacgagtcagagatcgaagagttctacaatggcctggaagatgaacctgatgttccagagcgagctggaggagcaggttttggaaccgacggggacgaccaggaggcaattaacgaggcaatcagtgtgaagcaggaagtgactgatatgaactatccatcaaataagtcg

SEQ ID NO: 19274 - DNA, 1356 bp, synthetic construct
  misc_feature 1..1356: note = source = /note="Description of Artificial Sequence: Synthetic coding sequence"
  source 1..1356: mol_type = other DNA
atgttcgatattgagtactttagaaaggatccccgtccattcttcaaattcgcgaaggagatttacccaggacagttccaaccgtcattgtgccataagtttattgcactatcggataaggagggtaaattgctacgtaattatactcaaaacatcgatactctagagcaggtcgccggtatccaaagaataattcagtgtcatggatcttttgcaacagcttcatgcttgatttgtaaatacaaggtggactgtgaagcggtacgtggggacatctttaaccaagtcgtacctaggtgccctcgctgtccagcagatgaaccacttgctattatgaagcctgagatcgtcttctttggtgaaaaccttccagaacaatttcatagagccatgaagtatgataaagacgaagtggatttgctaattgtcatcggttcctcgctaaaggtccgtccagtagctctcattccgtcctctattcctcatgaggtaccacagatcctaatcaacagagagccactgccacatcttcattttgatgtggagttgttaggagattgcgacgtcattattaatgagttgtgtcaccgacttgggggtgagtatgccaagctctgttgcaatccggttaagttgagtgagatcactgaaaagccacccagaactcaaaaggaactcgcatatctctccgaactcccaccaaccccactacacgtttctgaagattcttcaagtcccgagcgaacttcgccacctgatagttctgtaattgttactctacttgatcaagcagcaaagtcgaatgatgatctcgatgtctcggaatctaagggttgtatggaagaaaagccacaggaagttcaaacaagcagaaatgtagaatctattgccgaacaaatggaaaacccggacctcaaaaatgttggatctagtactggtgaaaagaacgaacgtacatcagtggcaggaactgttcgaaagtgttggccaaaccgcgttgctaaggaacaaatctcacgacggttagatggaaatcaataccttttcttgccaccaaacagatatattttccacggagccgaagtttattcagactcagaagacgatgttctatcgagttcttcttgtggttctaattcggactctggtacgtgccaatctccgtctttggaggaaccaatggaagatgaatcagagattgaagagttttacaatggacttgaggacgaaccggatgtgccagagcgtgctgggggagcaggattcggaactgatggtgatgatcaagaggccattaatgaggcgattagtgtgaaacaagaggtgactgatatgaattacccatccaacaagtct

SEQ ID NO: 19275 - DNA, 1356 bp, synthetic construct
  misc_feature 1..1356: note = source = /note="Description of Artificial Sequence: Synthetic coding sequence"
  source 1..1356: mol_type = other DNA
atgttcgacatcgaatacttcaggaaggaccctagaccatttttcaaatttgcgaaggaaatctaccccggacagttccagccgtccctgtgccataagtttatcgcgctgtccgacaaggagggcaagctgcttcgcaactacactcaaaacatagataccctggaacaggttgctggtatacagaggattattcagtgccacggttcgtttgcaaccgcctcttgtcttatatgcaagtataaggtggattgtgaggcagttcggggtgacattttcaatcaggtggtgccaagatgtcctcgctgtccagcggatgagccacttgcaatcatgaaacctgaaattgtgttctttggggaaaatcttccagagcaattccatcgggcgatgaagtacgataaagatgaagtcgatcttctgatcgtcattggatcctccctgaaggtccggcctgtggccctcatcccctcctcgattcctcacgaagtgccacagatactgattaacagggaacctctcccgcacctccactttgatgtggagcttcttggtgattgcgatgtgattatcaacgaactttgtcataggttggggggcgaatacgccaagttgtgttgcaaccctgtcaagctgtcagagattaccgagaagcctccacgtactcagaaagaactggcatacctttcagaactccctccaacgccactgcatgtgagcgaagattcgtcctcgcccgagcggactagcccccctgacagcagcgtcatcgtgactctgcttgaccaggcagccaagagcaacgatgatctggatgtgtccgagtccaagggatgcatggaggaaaaaccacaggaagtgcagactagtcgcaatgtggaaagcattgcggagcaaatggaaaatcctgatctgaagaacgtcgggagctccactggcgagaagaatgaacgtacctccgtggccggtactgtgcggaagtgttggccaaatagggtggccaaagaacagataagccggcgattggatggaaatcaatacctctttctcccgcctaaccgttacatttttcacggcgctgaggtgtacagcgacagcgaagatgatgtgctttcgtcaagcagctgtggttcgaattccgatagcggaacctgtcagtcgccgtccctggaagagccaatggaagatgaatcggaaattgaagagttctataacggacttgaggatgagcctgacgttccagaacgtgccggaggcgcaggatttggtactgacggtgatgatcaagaagcaattaacgaagcaattagcgtcaaacaagaagtgaccgatatgaattacccatccaacaagagc

SEQ ID NO: 19276 - DNA, 1356 bp, synthetic construct
  misc_feature 1..1356: note = source = /note="Description of Artificial Sequence: Synthetic coding sequence"
  source 1..1356: mol_type = other DNA
atgtttgacattgagtacttccggaaagacccgcgtcctttcttcaaatttgccaaagagatctacccagggcaatttcaaccgtcgctctgtcacaagttcatcgccttgtcggacaaagaaggaaaacttctccggaattacacgcagaacatcgacactcttgaacaggtcgcgggaattcagcggattatccaatgccatggttccttcgccaccgcctcgtgcctcatctgtaagtacaaagtcgactgcgaggccgtgcggggagacatcttcaatcaggtcgtgccgcgctgcccccgttgtcccgcagacgaaccactggctatcatgaaaccagagattgtgttctttggcgaaaatctgcctgaacagtttcaccgggctatgaagtacgataaagatgaggtggacctgctcatcgtgattggctcctcactcaaggtgcgcccggtcgccctgataccgagttccatcccgcatgaggtgccacaaatcctcatcaatcgagaaccactgccgcacctgcatttcgatgtggaactgcttggcgactgcgatgtcatcatcaacgaactctgtcaccgcctcggaggagaatacgcgaaactctgctgcaatcccgtgaagttgtcagagatcactgagaagccaccgcggactcaaaaggaactcgcctacctgtccgaactgccgccgactccgctgcatgtgtcggaggactcatcaagcccagagcgcacgtcaccacccgattcgtcggtgatcgtgactctgctcgaccaggcggcgaagtccaatgatgatttggacgtatcggagtccaaaggatgcatggaggagaagccgcaggaggtgcaaacgagcagaaacgttgagagcattgcggaacagatggaaaacccagatctcaagaacgtgggaagctccacgggagaaaagaacgaacgcacctcagtggcagggaccgtgagaaagtgctggccaaatcgcgtcgcgaaggagcagatcagccgccggctcgacggaaaccagtacctgtttttgccgccaaatcgctacatatttcacggggcagaagtgtacagcgactcggaggacgatgtgctgtcctccagctcatgcgggtccaactcagattctggtacctgtcagtcgccctcactggaagaaccgatggaggacgaatctgaaattgaggagttctataacggactcgaggacgagcctgacgtccctgagagagcgggaggggccggattcggcacggacggagacgatcaagaggccatcaacgaagccatctcggtgaagcaggaagtcaccgacatgaactatccctcaaacaagagc

SEQ ID NO: 19277 - DNA, 1356 bp, synthetic construct
  misc_feature 1..1356: note = source = /note="Description of Artificial Sequence: Synthetic coding sequence"
  source 1..1356: mol_type = other DNA
atgtttgacattgaatattttaggaaggatccacgccctttcttcaagttcgcgaaggagatctatccgggtcagttccagcccagtctgtgtcacaaatttatcgcactgagcgataaagagggcaagctactgcgaaattacacgcaaaacatcgacacactggagcaagtcgccggcatccagagaatcatacagtgtcacggatccttcgccaccgcctcctgtctaatttgcaagtataaggtggactgcgaagccgtccgtggcgacatttttaatcaggtagtacccaggtgcccacgatgcccagccgacgaaccattggccattatgaagcctgagatcgttttcttcggtgagaatcttccggagcagtttcatcgagcgatgaagtacgataaggatgaggttgacttgttaattgtgattggctccagcctgaaggtgcggccagttgccttgattccctcgtcaataccccacgaggtgccacagatcttgattaatcgggagcctcttcctcatctgcacttcgatgtcgagctgctcggcgactgcgatgtgataattaacgagctctgccatcgcctgggcggcgagtacgccaagctgtgctgcaatccggtgaagttaagcgaaatcacggagaagccacccagaacgcaaaaggagctggcctacctttcagagttaccccccactccgctgcatgtgagtgaggactcctcctcgcccgagcgaactagcccgccagacagctccgttatcgtgaccttgttggaccaggcagccaaatctaatgatgatctggatgtgagtgaaagcaaggggtgcatggaggagaagccacaggaggtccagacctcgcgtaatgtcgagagcattgcggagcagatggaaaacccggatctcaagaatgtgggctcctccacgggtgagaaaaatgagcgaacctctgtggccggaactgttcgcaagtgctggccaaaccgcgtggcaaaggaacaaatcagtcgaagattggatgggaaccagtatttgttcctcccgcccaatcggtacattttccacggagccgaggtctactcggatagtgaggatgatgtcctgtcctcctctagctgcggcagcaacagcgactcgggaacgtgtcagtcgccgagcctggaagagccgatggaagatgagtcagaaattgaggaattctataatggcctagaggatgagccagacgtgccggagcgcgccggcggcgccggctttgggactgacggggacgatcaggaagccataaatgaggccatatcggtgaaacaggaggtaacggacatgaactatccgtccaacaagagc

SEQ ID NO: 19278 - DNA, 1356 bp, synthetic construct
  misc_feature 1..1356: note = source = /note="Description of Artificial Sequence: Synthetic coding sequence"
  source 1..1356: mol_type = other DNA
atgtttgacatcgaatactttagaaaagacccaaggccgttttttaagttcgccaaagaaatctacccagggcaattccagccatccctgtgccataagttcattgctctttccgacaaggaaggcaagctgctccgcaactatacgcaaaatattgacacactcgaacaagtcgccggcatacagcgcattattcaatgccacggctcttttgcgaccgcctcctgtctgatttgcaaatataaagttgactgcgaggcagtcagaggggatatattcaaccaggtggtcccgcgatgtccgcgatgcccagctgacgaaccactggctatcatgaagccagaaattgtgttcttcggagagaacttgcccgaacagtttcatagagcaatgaaatatgataaggatgaagtagacctgttaatcgtgataggctcttcacttaaagtgaggccagtggccttgattccaagcagcattcctcacgaagtccctcagattttgattaatagagaacctctgccacacctgcacttcgatgtcgaacttctgggtgactgcgacgtgatcatcaacgaattatgccataggcttggaggcgaatacgccaagctctgctgtaaccctgtcaaactctcagagatcaccgaaaaaccacccaggactcaaaaagagctggcttacctctctgaactcccacctaccccccttcacgtctcagaagactcgtcttctccagagagaacctctccccctgacagcagcgtgatcgtgactctgttggaccaggcagctaagtccaatgacgatctggatgttagcgaatccaaaggctgcatggaggagaagccacaggaagttcaaaccagccgcaacgtagagtccatagcggaacagatggaaaaccctgacctcaaaaacgtgggcagctctaccggtgaaaaaaatgaaaggacatcggtggctggaaccgtgaggaaatgttggccaaatagggttgccaaggagcagataagcagacgactcgatgggaaccaatacttatttctgcctccgaaccgttacatctttcacggcgctgaagtgtactcagactcagaggatgacgtcctgtcgagcagtagctgcggaagtaatagtgacagcgggacctgtcaaagcccaagcctggaggagccaatggaggatgagtctgagattgaagaattctacaacggactggaagacgagccggacgtgcctgaaagggcgggaggagctggattcggcacagacggcgacgatcaagaggccatcaacgaagcgataagcgttaagcaagaggtgaccgatatgaactatccaagcaacaagagc

SEQ ID NO: 19279 - DNA, 1356 bp, synthetic construct
  misc_feature 1..1356: note = source = /note="Description of Artificial Sequence: Synthetic coding sequence"
  source 1..1356: mol_type = other DNA
atgtttgatatcgaatatttcaggaaagatccaagaccatttttcaagtttgcaaaggagatttatcctgggcagtttcagccatccttgtgccacaagtttatcgccctgtctgataaagaagggaaactgttgcggaattacacgcagaacatagataccttggaacaggtcgctggcatccagcgcatcatccaatgccatggaagctttgcgaccgccagctgcctcatctgcaaatataaggttgactgtgaggcggtccgaggggacatctttaatcaggtagttccgcgctgtccaaggtgtcctgcagacgaacccctggcgatcatgaagccagagatagtgttcttcggtgaaaatctgcccgaacagttccacagggctatgaagtacgacaaggatgaagtggacctgctgatcgtcattgggagctccctgaaagtgcggcctgtagccctgattccatcctccattccccacgaggttcctcagatactcattaaccgcgagccgctcccccatctccacttcgacgtagagctcctgggcgactgtgacgtgatcatcaatgagctgtgccaccggctgggtggcgaatatgcgaagctgtgttgtaatcccgtgaagctgtccgagataaccgagaaaccaccccgaactcagaaagagctggcttacctgagcgagttgcctcccactcccttgcacgttagtgaggattcttcttcccctgaacggacatctcctcctgacagcagcgtcattgtaaccctcctcgaccaggctgccaaaagtaatgacgatcttgacgtgagcgaatcaaagggttgcatggaggagaagccacaggaggtccagacttcccggaacgtagaatctatcgcggaacaaatggagaatcccgacctcaaaaacgtcggaagcagcacaggtgaaaaaaatgaaaggacatccgtggccgggactgttaggaaatgttggcccaatagggtggctaaggaacaaatcagtcgacggctcgacgggaaccaatatctcttcctgcccccaaataggtacatttttcatggagctgaagtctacagtgatagtgaggacgatgtcttgtcctctagttcctgcgggtccaactctgatagtggaacctgtcagagtccaagcctggaagagcccatggaagacgagtcagaaatcgaggagttctataatggactggaggacgagccagatgttccagagagagccggcggggcaggcttcggaaccgacggagatgatcaggaggccattaacgaagcaatatccgtgaaacaagaggttaccgacatgaactatccttccaacaagagc

SEQ ID NO: 19280 - DNA, 1356 bp, synthetic construct
  misc_feature 1..1356: note = source = /note="Description of Artificial Sequence: Synthetic coding sequence"
  source 1..1356: mol_type = other DNA
atgttcgacatcgaatactttagaaaagatccgcgaccgttcttcaagttcgcaaaagaaatctacccgggtcagtttcaaccttcgctctgccataagttcatcgcactgtcagataaggaaggcaagctcctgcgcaactacacccagaacattgatacgctggaacaggtggcgggcatccagcggatcatccagtgccatggctcgttcgctaccgcgtcatgcttgatctgcaagtacaaagtggattgcgaggccgttcgcggagacatctttaatcaggtcgtgcccagatgtcctaggtgccctgcggacgaaccgctggcaattatgaagcccgagatcgtgttttttggcgagaacctgccggaacagtttcatcgggccatgaaatacgacaaggacgaagtggacctcctgatcgttattgggtcgtcgctgaaggtgcgccctgtcgcgctgatcccaagctcaatcccacacgaggtgccgcagatcctgatcaaccgcgaacctctgccacacctgcacttcgacgtggaattgctcggagactgtgatgtgatcatcaacgaattgtgccatagacttgggggcgagtatgccaaactgtgctgcaacccggtgaagctgtcggagattaccgagaaaccaccgagaacccaaaaagaactggcctacctgtcagagctccccccgacgccgctgcatgtctccgaggactcgagttcgcctgagaggacctccccgccggactcgtccgtgatcgtgaccctgctcgaccaagctgccaagagcaacgacgacctggacgtctcggagtccaagggatgcatggaagagaagccacaggaggttcagacttcgcggaatgtggaatcgatcgcggaacagatggaaaaccccgatctgaaaaatgtgggatcctccactggtgagaaaaacgaacgcactagcgtggcaggaactgtgagaaaatgctggcccaaccgcgtcgcgaaagagcagatctcccgacggttggacgggaaccagtacctgttcctgccgccaaaccggtacatcttccatggcgcagaagtgtactcagattccgaagatgacgtcctgagctcgtcgtcatgtggatccaattctgacagcggaacttgccaatcgccgtctctcgaggagccaatggaagatgaatcggagatcgaggagttttacaacggcttggaggacgaacctgatgtgcctgaacgcgcaggaggcgccggctttggcacggacggcgacgaccaggaagccatcaacgaggcgatctccgtgaagcaagaggtgactgatatgaactatccatcaaataagtcg

SEQ ID NO: 19281 - DNA, 1356 bp, synthetic construct
  misc_feature 1..1356: note = source = /note="Description of Artificial Sequence: Synthetic coding sequence"
  source 1..1356: mol_type = other DNA
atgtttgacatcgagtacttccgcaaggacccgcggccgttcttcaaattcgcaaaggaaatctaccccggccaattccagcccagcctttgtcataagttcatcgctctgtccgacaaagaaggcaagctcctgcgcaactacactcaaaacatagatactctggagcaggtggccggcattcagagaatcatccagtgccacgggagtttcgctactgcgtcatgcttgatctgcaaatacaaggtcgactgcgaagccgtgcggggagacatcttcaaccaagtggttccacggtgcccgaggtgccctgccgacgaaccgctcgcaattatgaagccggagatcgtcttctttggcgagaacctccctgaacagttccacagagccatgaagtacgataaagacgaagtggacttgctcattgtgatcggatcctctctgaaggtccggccagtggcccttataccgtcctccatcccacatgaggtgccgcagatcctgatcaaccgcgaaccgctgccgcatctgcattttgacgtcgagctgctcggggactgcgacgtcatcatcaacgaactctgccacagacttgggggagagtacgccaagctctgttgtaaccccgtgaaattgagcgagattactgaaaagccaccgcgcactcaaaaggaactcgcttacctgtcggagctcccgcctactccactgcatgtgtctgaagattcgtcctcgccagaacgcacctccccaccagactcaagcgtcatcgttactctgctggatcaggcagcaaagtccaacgacgacctggatgtctccgagtccaagggctgcatggaagagaagcctcaggaagtccagaccagcagaaatgtggagtccatcgctgaacagatggaaaacccggatctgaagaatgtgggctcaagcaccggggaaaagaacgaacgcacttcggtggcgggcaccgttcggaagtgctggcctaaccgggtggcgaaagagcaaatctccagacgcctggacggtaaccagtacctgttcctccccccgaatcgctacatctttcatggggcggaagtctactcggatagtgaagatgacgtgctctcctcgagctcttgcggatcgaactcggatagcggaacttgccaaagcccgagcctcgaagaacccatggaggacgagtccgaaatcgaagaattctataatggactcgaagacgaacctgacgtcccagagagagccggtggagcaggtttcggaaccgacggagacgatcaggaagcaattaacgaagcaatctcagtgaaacaagaggttactgacatgaactacccgtcgaataagtca

SEQ ID NO: 19282 - DNA, 1356 bp, synthetic construct
  misc_feature 1..1356: note = source = /note="Description of Artificial Sequence: Synthetic coding sequence"
  source 1..1356: mol_type = other DNA
atgtttgatatagaatattttcgtaaagatccgcgaccgttttttaaatttgcgaaagaaatatatccgggtcaatttcaaccgtcgttatgtcataaatttatagcgttatcggataaagaaggtaaattattacgtaattatacgcaaaatatagatacgctagaacaagtagcgggtatacaacgtataatacaatgtcatggttcgtttgcgacggcgtcgtgtctaatatgtaaatataaagtagattgtgaagcggttcgtggtgatatatttaatcaagttgttccgcgttgtccgcgatgtccggcggatgaaccgttagcgataatgaaaccggaaatagtattttttggtgaaaatctaccggaacaatttcatcgagcgatgaaatatgataaagatgaagtagatctattaatagttataggttcgtcgttaaaagttcgtccggttgcgctaataccgtcgtcgataccgcatgaagtaccgcaaatattaataaatcgagaaccgctaccgcatctacattttgatgtagaactattaggtgattgtgatgtaataataaatgaattatgtcatcgactaggtggtgaatatgcgaaactatgttgtaatccggttaaactatcggaaataacggaaaaaccgccgcgtacgcaaaaagaattagcgtatctatcggaactaccgccgacgccgctacatgtatcggaagattcgtcgtcgccggaacgaacgtcgccgccggattcgtcggttatagtaacgttattagatcaagcggcgaaatcgaatgatgatctagatgtttcggaatcgaaaggttgtatggaagaaaaaccgcaagaagttcaaacgtcgcgaaatgtagaatcgatagcggaacaaatggaaaatccggatctaaaaaatgtaggttcgtcgacgggtgaaaaaaatgaacgaacgtcggtagcgggtacggtacgaaaatgttggccgaatcgtgtagcgaaagaacaaatatcgcgtcgactagatggtaatcaatatctatttttaccgccgaatcgttatatatttcatggtgcggaagtttattcggattcggaagatgatgttttatcgtcgtcgtcgtgtggttcgaattcggattcgggtacgtgtcaatcgccgtcgctagaagaaccgatggaagatgaatcggaaatagaagaattttataatggtttagaagatgaaccggatgtaccggaacgtgcgggtggtgcgggttttggtacggatggtgatgatcaagaagcgataaatgaagcgatatcggttaaacaagaagtaacggatatgaattatccgtcgaataaatcg

SEQ ID NO: 19283 - DNA, 1356 bp, synthetic construct
  misc_feature 1..1356: note = source = /note="Description of Artificial Sequence: Synthetic coding sequence"
  source 1..1356: mol_type = other DNA
atgttcgacatcgagtacttccggaaggacccgcgccccttcttcaaattcgctaaagaaatctacccgggacagttccagccgtcactgtgccacaagttcatcgcactgtccgataaggaaggtaagctgctgcgcaactacactcaaaacatcgatacgttggaacaggtggccggaatccagcggattatccagtgtcatgggagctttgccactgcgagctgcctgatctgtaaatacaaggtcgattgcgaagcggtgcggggcgatatcttcaaccaagtggtgccacggtgcccgaggtgccccgccgacgagcccctcgccatcatgaagccagagatcgtgttcttcggggaaaacctgcctgaacaattccaccgcgccatgaagtacgataaggacgaagtcgacctgctcatcgtgatcggatcgagcttgaaagtccggccagttgcacttatcccgtccagcattccgcacgaagtgcctcagatcctgatcaaccgcgagccattgccacacctgcatttcgatgttgaactgcttggagactgcgacgtcattatcaatgagttgtgccacagactcggaggcgagtacgcaaagctgtgctgtaacccagtcaagctctcggaaatcactgaaaagccaccgcggacccagaaggagctcgcgtacctgtcggaactccctccgactccgctccatgtctccgaggactcgagctcccctgaacgcacttcgccgcctgactcgagcgttatcgtgactcttctggatcaggcggccaagtctaacgacgatctcgatgtgtccgagtcgaagggatgcatggaagagaaaccgcaggaggtccagacctccagaaacgtcgagagcattgccgaacaaatggaaaaccccgatctgaagaatgtcggatcctccactggggaaaagaacgagcggacctcggtggccggcactgtgcgcaaatgttggccgaatcgcgtcgcgaaagaacagatctcaaggcgcctggatggaaatcaatacctgtttctgccgcctaatcgttacatcttccacggcgcagaggtgtactccgattcggaggatgatgtgctctcaagctcttcgtgtggttcgaactcggactcgggtacctgccaaagcccgtctctcgaagagccgatggaggacgagtccgagatcgaggagttttacaacggtctggaagatgaaccagacgtgcccgagcgcgcggggggagcaggattcgggactgacggtgacgaccaggaagcgatcaacgaggcaatctcggtgaagcaggaagtgacggacatgaactacccctcgaataagtcg

SEQ ID NO: 19284 - DNA, 1356 bp, synthetic construct
  misc_feature 1..1356: note = source = /note="Description of Artificial Sequence: Synthetic coding sequence"
  source 1..1356: mol_type = other DNA
atgttcgacatcgaatatttccggaaggatcctaggccattctttaagtttgccaaagagatctatcctgggcaattccaaccttcactgtgccacaagtttatcgcgctcagcgacaaggaggggaagttactgagaaactacacacagaacatagatacattagagcaagtcgcgggtatacaacggattatccagtgccatgggtcctttgccaccgctagttgcctgatttgcaagtacaaagtggactgtgaagctgtcaggggcgatatttttaaccaggtggtgccccgatgcccaaggtgccccgctgatgagcccctcgcaattatgaaaccagagatcgtgtttttcggagaaaatctgccggaacaattccaccgcgccatgaagtacgataaagacgaggtggatttgctgattgtaatcgggagctccttgaaagtccggcccgtagccctcattccctctagcatacctcatgaagtcccacaaatcctgatcaatcgggagcccttgcctcacctccactttgacgttgagctgctgggggattgtgatgtgatcattaatgaattgtgccaccggctgggtggggagtatgccaaactctgctgtaatccagtgaaattatccgaaataaccgagaagcccccacgaacacaaaaagagctggcctatctgagcgagctcccccctacacctctgcacgtctcagaggactctagttctcctgagcgcacttccccacccgactcatcagtgatagttactctgttagaccaggcagctaaatcaaatgacgatctcgatgtgtcagaatcgaaggggtgtatggaagagaagccacaggaagtacaaacttcccgaaatgtggaaagcattgccgagcaaatggaaaatccagatttgaagaacgtaggctcttccaccggtgagaagaacgagcgcacatctgtcgccggaaccgttagaaagtgttggccgaatcgggtggcgaaggaacaaatatcgcgacgactggacggcaatcagtatcttttcctaccccccaatagatacatctttcatggcgccgaagtgtattcggactctgaggacgatgtattgtcttccagttcatgtggtagcaactcagattccgggacatgtcagtcccccagcctcgaagaacccatggaagacgaaagcgagatcgaggagttctataacggacttgaggacgagccagacgtgccagaaagagctggaggcgccggttttggaaccgacggggatgatcaggaggctataaatgaagcgatcagcgtgaaacaggaagtaacagatatgaattatccctcgaataaatca

SEQ ID NO: 19285 - DNA, 1356 bp, synthetic construct
  misc_feature 1..1356: note = source = /note="Description of Artificial Sequence: Synthetic coding sequence"
  source 1..1356: mol_type = other DNA
atgttcgacatagaatactttagaaaagaccccaggccctttttcaagtttgccaaggagatctacccaggccagttccagcccagcctgtgccacaaatttattgccctgagtgacaaggaaggaaagctgcttcgtaattatacccaaaacatagatacattagaacaggtagctggcattcagcggattattcagtgtcacggctcgtttgctacagcctcctgcctcatttgtaaatacaaggttgattgcgaggcagtgagaggagacatattcaaccaagtggtgcctagatgtccccgctgccccgccgacgagcctttggccattatgaagcctgaaatcgtcttctttggagaaaacctcccggaacagttccaccgcgccatgaagtatgacaaggatgaagttgaccttctgattgtgatcgggtcatccctaaaagtacgaccagtagcactgattccttcttccatccctcacgaggtgccccagatcctaattaaccgggagccactgccccacctccacttcgatgtggagctccttggggactgtgatgtgataattaatgaactgtgccacaggctggggggggagtatgccaagctgtgctgtaaccccgtgaaattatcagagattaccgagaagccgcctcggacacagaaggaacttgcttatctcagtgagttgccccctacaccgctgcatgtatctgaggatagctcctcccctgaacgaacttcaccccctgattcctccgtgatcgtcactttgctggatcaggccgccaaaagcaatgacgacctcgacgtctcagaaagcaaagggtgcatggaggaaaaaccgcaggaagtacaaacatcccgcaatgtggagtccatagcggagcaaatggaaaacccagaccttaagaacgttgggagcagtaccggggaaaaaaacgaacgcaccagcgtggcgggaaccgtgagaaagtgttggccgaatcgggtggctaaggagcagataagcaggcgattggatgggaatcagtacctgttcctgccacctaataggtacatttttcatggcgccgaagtatatagtgatagcgaagacgatgtgcttagtagcagctcctgtggcagcaattcggactctgggacctgtcagtctccaagcctcgaagagccaatggaggatgagtcagagatagaagaattttataacggcctcgaggacgaaccagacgtacccgagagagctggtggtgccggattcggaacggacggcgatgaccaggaagcaatcaacgaagcaatcagtgtaaagcaggaggttaccgatatgaattatccatctaacaaatct

SEQ ID NO: 19286 - DNA, 1356 bp, synthetic construct
  misc_feature 1..1356: note = source = /note="Description of Artificial Sequence: Synthetic coding sequence"
  source 1..1356: mol_type = other DNA
atgttcgatatcgagtacttcaggaaagatcccaggccattttttaaatttgcaaaggaaatctaccctgggcagtttcaacctagcctgtgccacaagtttatagcgctgagcgacaaggaaggcaagttgctcaggaattacacacagaacattgacaccctggagcaggtagccggcatccagcgcatcatacaatgccatggcagcttcgccacagctagctgcctcatctgcaagtacaaagtggattgcgaggctgtgcggggggacatctttaatcaggtggtaccgaggtgtcctagatgtccggccgacgagcctttggccatcatgaagcccgaaattgtttttttcggagaaaatctgcccgagcagttccatagggcaatgaaatatgacaaggacgaggtggacctgcttattgtgattggttctagcctcaaagtgagacctgtggcacttatcccatcgtctatcccccatgaagttccacagattctcattaatcgcgagccgttgccccacttgcacttcgacgttgagctcctcggagattgtgatgtgattattaatgaattatgccacagactcggaggggagtatgccaagctttgctgtaatcctgtgaagttgtctgagattactgaaaagcctcctaggacacagaaggagctcgcatatctttccgagctccctcccacaccgctgcacgtcagtgaggattcttccagcccagaacgcactagcccacccgattcctccgtcattgtcaccttgctggatcaggccgcaaaaagtaacgatgatctagatgtgagtgagagcaaagggtgtatggaggaaaagcctcaagaggttcagacctctcgtaatgtggagtccattgcagagcaaatggaaaaccccgatttgaagaatgtaggcagcagtactggagagaagaatgagcggacttcggtggccgggaccgtgcggaaatgctggccaaatcgtgtggcgaaggagcaaatctctcgacgcttagacggaaatcagtacctcttcttgcctcctaatcggtatattttccatggcgctgaggtctatagcgattctgaggacgatgttctttcatccagttcatgtggcagcaactcagacagcggcacgtgtcagtctccatccctcgaagagcctatggaggacgagtcggagattgaggagttctacaatgggctggaggatgagcctgacgtccctgaacgcgctggtggagcggggtttggtactgacggtgatgaccaggaagctattaacgaagccatctcagtaaagcaggaggtcaccgatatgaactaccccagcaacaagagc

SEQ ID NO: 19287 - DNA, 1356 bp, synthetic construct
  misc_feature 1..1356: note = source = /note="Description of Artificial Sequence: Synthetic coding sequence"
  source 1..1356: mol_type = other DNA
atgttcgatatcgagtatttccggaaagatcccaggccttttttcaaatttgctaaggaaatttacccaggacagttccagccatccctgtgccacaaattcattgccctttctgacaaagaaggtaaacttctgcggaattacacgcagaatatcgatacgctggaacaggtcgctggaatccagcggataattcagtgtcacgggagtttcgcgacggcaagctgtctgatctgcaagtacaaggtggactgtgaggccgtaagaggagatattttcaatcaagttgtaccacgctgcccacgatgccccgcagacgagccgctggccatcatgaaaccggagatcgttttctttggcgagaatcttcctgagcaattccaccgcgccatgaagtatgataaggacgaagtggatctgttgattgtgattggcagctccttgaaggttcgacctgtagcgctgattccttcatcaataccgcacgaggtaccgcagattctaatcaaccgcgagccgctgccacacctccactttgatgtggaacttctgggagattgcgacgtgataattaacgagctttgtcaccgtctcggaggagaatatgccaagctttgctgcaaccctgtcaaattaagcgagatcactgaaaagcctccacggacccagaaagagttagcttacttaagcgagcttccacccaccccccttcatgtgtctgaagattcgtcctcccccgagaggaccagtcccccagactccagcgtcatcgttacactgcttgatcaggcagccaaatccaatgacgacctggatgttagcgaatcaaagggctgtatggaggaaaagccacaggaagttcagaccagccgtaacgtggagtccattgccgaacagatggagaacccagatcttaaaaatgtgggctcttccactggagaaaagaacgagagaacctccgtggctgggaccgtgcggaagtgttggcccaaccgcgttgctaaggagcagattagtagacgcctggacgggaaccagtacctttttctcccacccaacaggtatatctttcacggagctgaagtgtacagcgactcggaagacgacgtgctgtcctcttcaagctgtggcagcaattctgattctgggacatgtcagagcccaagcctggaggagcccatggaggacgagtccgaaattgaagagttctacaacggtttggaggacgagccagacgtccccgagagggctggtggcgcagggtttggtacggacggggacgatcaggaagccatcaatgaagccattagcgttaaacaggaagtgaccgatatgaactacccctctaacaagagt

SEQ ID NO: 19288 - DNA, 1356 bp, synthetic construct
  misc_feature 1..1356: note = source = /note="Description of Artificial Sequence: Synthetic coding sequence"
  source 1..1356: mol_type = other DNA
atgttcgatatcgagtattttcgcaaggacccccggcctttctttaagttcgccaaagaaatctatccaggccaatttcagccttcgctgtgtcacaagttcattgcgctgtcagataaggagggaaaactcctccgcaattatactcagaatattgacacccttgaacaggttgccggcattcaacgaatcatccagtgtcatgggtcctttgccaccgcttcatgtttgatctgcaagtataaggttgattgtgaagccgttcggggagacattttcaaccaggtcgtacccaggtgtcctaggtgccccgccgacgagccgctggctattatgaagcctgagatagtgttctttggggagaacctgcctgaacagttccaccgggccatgaagtatgacaaagatgaggtggatctattgatcgtcatcggctcttctctcaaggtgaggcctgtcgccctgattccctcaagcatcccccacgaggttccacagattctgataaacagagagcctttacctcacctacatttcgacgtggagctactgggcgactgcgacgtaatcatcaacgaattgtgtcaccgattaggtggagaatatgccaagctgtgctgcaatccagtgaagctgtccgagatcacagaaaagcccccaaggacacagaaggaactggcctatctgtcggaactgccacctacaccattgcacgtgagcgaggatagtagtagtcccgaaagaacctctcccccggacagctcagtcatcgtcacccttctcgaccaggcagctaaatccaatgatgacctggacgtgtccgagtccaaggggtgcatggaggagaagccccaggaggtccaaaccagtagaaatgtcgagtccattgccgaacaaatggagaacccggatctgaaaaatgtggggagtagcacgggtgaaaagaacgaacgaacttcagtggccgggactgtaaggaagtgctggcccaaccgagttgccaaagagcaaatttcccgaagactagatggtaaccagtacttatttctgccaccgaacaggtacattttccatggcgccgaagtttactccgacagcgaagatgacgttctgagctccagttcttgcggctcaaatagtgactctggcacttgtcaaagccctagcctggaagagcctatggaggatgaatccgaaatcgaggagttttacaatggtctggaagatgaacccgatgtgccggaaagagctggaggagccggcttcggaacagacggagatgatcaggaagctataaatgaggcaatatccgtcaagcaagaggtgaccgacatgaactatccatctaacaagagt

SEQ ID NO: 19289 - DNA, 1356 bp, synthetic construct
  misc_feature 1..1356: note = source = /note="Description of Artificial Sequence: Synthetic coding sequence"
  source 1..1356: mol_type = other DNA
atgtttgatatcgagtacttcaggaaggatccacggccgttcttcaaattcgccaaggagatctatcccggccagtttcagccgagcctgtgtcacaaattcatcgccctctcggacaaggagggcaagctgctgcgcaattacacccagaacatcgacactctggagcaggtggcgggcatccagcgcatcatccaatgtcacggatccttcgcgaccgcctcttgccttatctgcaagtacaaggtggattgcgaagccgtccgtggggatatctttaatcaagtagtgccgcggtgccctcggtgccccgcggatgaaccactggcgattatgaagccagagatcgtgttcttcggcgaaaacctcccggagcagttccacagagcaatgaagtacgataaggacgaggtggacctcctgatcgtgatcggatcctcactgaaagtgcgcccggtggctttgatcccaagctccatcccgcatgaagtgccgcagatcctcatcaaccgcgaacctctgcctcacctgcatttcgacgtggaacttcttggcgactgtgacgtgatcatcaatgagctgtgccaccggcttggaggagaatacgcaaagctgtgctgtaatccagtcaaactgtcggaaatcacggaaaaaccaccgagaacccagaaggagcttgcgtacctgtcagaacttcctccaaccccgctgcacgtgagcgaggactcatccagccctgagcgcacgagcccgccggattcgtcggttatagtcaccctcctggaccaagccgccaagtctaacgatgacctggatgtgagcgaatcaaagggatgcatggaagagaagcctcaggaggtgcagacttcgaggaacgtcgaatcaatcgcagaacaaatggagaacccggatctgaagaacgtgggatcgtccaccggagaaaagaatgagcggacctcggtggccggaactgtgcgcaagtgctggcctaaccgcgtggcaaaagagcaaatctcccgccgcttggacgggaaccagtacctgtttctgccccccaatcggtacattttccatggcgctgaagtctactccgattccgaggacgacgtgctcagttcgtcatcgtgcggctcgaattcggattccggaacctgccagagcccgtcactggaagagccgatggaggacgagtcggagatcgaagaattctataacggactggaggacgagcccgacgtacctgagcgggcgggtggcgctggattcggcaccgatggtgacgatcaagaagccatcaatgaagcgatttcggtgaaacaagaggtgactgacatgaactacccgtctaacaagtct

SEQ ID NO: 19290 - DNA, 1356 bp, synthetic construct
  misc_feature 1..1356: note = source = /note="Description of Artificial Sequence: Synthetic coding sequence"
  source 1..1356: mol_type = other DNA
atgttcgatattgagtattttagaaaggatcctaggcctttcttcaagttcgccaaggaaatctatccgggacaattccaacctagcctctgccataagttcatcgcattgtctgacaaggagggtaagctgcttcgcaactacacgcagaatattgacaccctggaacaggtggcgggtattcagcggatcattcagtgccacggttctttcgctactgcttcgtgcttgatttgcaagtataaagtcgattgtgaggctgtgcggggggacatttttaaccaggtggtgccgcggtgcccgcggtgccctgctgacgaacctctagctattatgaagccggagatcgtgttctttggagaaaatctccctgagcagttccatagggcaatgaagtacgataaggatgaggtggacctgcttatcgtaatcggaagctccctgaaagtccgccctgtggctctaatacctagcagcattcctcatgaagtcccacaaatcttgatcaaccgggagccgttaccacaccttcacttcgatgttgagcttctaggagattgcgatgtgataatcaacgagctgtgccaccgccttggaggagaatatgccaagttgtgctgtaacccagtgaagttatcagaaattaccgagaaacctccaagaactcagaaggagctagcgtacctgagcgagttgccacccaccccgctgcacgtctcggaagacagctcatctcccgagagaacatcgccgccagattcgtcggtgattgtaacactgctcgaccaggccgccaagagcaatgatgatctggatgtgagcgagagtaagggctgcatggaggagaagccccaagaagtccagacaagtcggaatgtcgagtccatcgctgagcagatggagaatccagatctgaagaatgtgggctcgtccacaggagagaaaaatgaaagaacctccgttgctgggacagtgagaaagtgctggccaaatcgagtagcaaaggagcagatttctagacgtctggacgggaaccagtatctcttcctgccacccaatcgatacatatttcacggtgctgaggtgtattctgacagcgaggatgatgtccttagctctagctcctgcggaagcaactcagactctgggacttgtcagtccccctcactagaagagcccatggaggacgaatcagagatcgaagaattctacaacgggctggaagacgaacccgacgtccctgaacgcgctgggggcgcaggtttcggaacggacggagatgaccaggaagctattaacgaagctatcagcgttaaacaagaggttactgatatgaactacccctcaaataagtcc

SEQ ID NO: 19291 - DNA, 1356 bp, synthetic construct
  misc_feature 1..1356: note = source = /note="Description of Artificial Sequence: Synthetic coding sequence"
  source 1..1356: mol_type = other DNA
atgttcgatatcgagtactttcgcaaggaccctaggccgttctttaagtttgccaaggaaatctacccaggtcaatttcagccatccttgtgccataagttcatcgccttgagcgataaggagggaaagttgctgagaaactatacacagaatatagatacactggaacaggtagcaggaatccagcggataatccaatgccacggctctttcgcgacggcttcgtgcttgatatgtaagtacaaagttgactgtgaggcagtgaggggcgacatttttaaccaggtggtgccccgatgccccaggtgtcccgcggatgagccacttgcgatcatgaagcctgaaattgtgttcttcggtgaaaatctgcccgaacagttccatagagcaatgaagtacgacaaagatgaggtcgatcttctgatcgttatcgggtcctctctgaaggtgcgcccagtagccctgataccttcgagtattccccacgaggtgccacagattctcattaaccgagagcctcttccgcacctgcattttgacgttgagctgctcggcgactgcgacgtcatcataaatgaactgtgtcataggctcggcggagaatatgccaagctatgctgcaatcccgtcaaactttcagaaatcaccgagaagccacctcgcacccagaaagaattggcttacctttccgagctacctccaacccctctgcatgtaagcgaagactcatcatctcccgagcgaacgagccctcctgactcatcagtgatcgtgacactgcttgatcaggctgctaaaagtaacgacgatttagacgtctctgagtcgaaaggatgtatggaagagaagcctcaagaggtacaaacatcccgcaatgttgagagtattgcagagcaaatggagaatcctgatttgaagaacgtagggtcttctaccggcgagaaaaatgagcgcacatcagtagctgggacagttcggaagtgctggccgaatagggtggccaaggagcagatcagccggaggctggacggcaatcagtacctgttcttgccccctaacagatacatttttcatggagcggaggtgtattcagattccgaagatgacgttctctccagcagcagttgtggcagtaatagcgactccggcacctgccagtcgcccagtctggaggagcccatggaggatgaaagcgaaatagaagagttttataacggtcttgaagatgagcccgatgtcccggagagggccgggggggctggattcggaaccgatggggacgatcaggaggcgattaacgaagccatttcagtaaaacaggaagtgactgacatgaactaccccagcaacaagtct

SEQ ID NO: 19292 - DNA, 1356 bp, synthetic construct
  misc_feature 1..1356: note = source = /note="Description of Artificial Sequence: Synthetic coding sequence"
  source 1..1356: mol_type = other DNA
atgttcgatatagagtactttcgcaaggatccaaggcctttcttcaaatttgccaaggaaatctaccccggacagttccagccgagtctctgccacaagttcatcgctctgagcgacaaggagggaaagttgctgcgtaactatacccagaacatcgatactctcgagcaggtcgcggggatccagcgcatcattcagtgccatgggtctttcgccaccgctagttgcctgatctgtaagtataaagtggactgcgaagccgtccgtggagacatctttaaccaggtcgtcccccggtgtccccgatgccccgctgatgagcctctcgcgatcatgaagcccgaaatcgtcttcttcggcgagaacttgcccgaacagttccatcgtgcaatgaagtacgacaaggacgaggtcgacttgcttatcgtcattggttcctctctcaaggtacggcccgtggccttgatccctagttcgatcccccatgaggtgccgcaaatactcatcaaccgtgagcctttgccgcatttgcacttcgacgtcgagctgctaggcgactgcgacgtgattattaacgagctctgtcatcgccttggaggtgagtatgctaagctgtgttgtaacccggtgaagctctcggagattacggagaagccccctcgtacccagaaggaactcgcctacctcagcgagctgccacccacaccgctgcacgtcagcgaggactccagctcgcccgagcgaacgtcgcctcctgatagttctgtcatcgttacgctgctcgatcaggccgctaagagtaacgatgaccttgacgtgagtgagtccaagggttgcatggaggagaagccccaggaggtccagaccagccgaaacgttgaatctatcgccgagcagatggagaaccccgatctcaagaacgtcggtagctctaccggcgagaagaatgaacgtactagtgtggcaggcaccgtccgcaagtgctggcccaaccgtgtggcgaaggagcaaatctcgcgacgtctggatggtaatcaatacctcttcctcccgcccaacaggtacatcttccatggtgcggaggtgtacagtgattcggaagacgatgtcttgtctagcagtagttgtggctcgaactccgatagcggcacgtgccaatctccgagtctggaggagcccatggaggatgagtccgagatcgaggaattctacaacggtttggaggatgaacccgacgtaccagaacgcgccggcggcgctggattcgggactgatggtgatgaccaagaggcgatcaacgaagccatctccgtgaagcaagaagtcacagacatgaattatccttctaacaagtcg

SEQ ID NO: 19293 - DNA, 1356 bp, synthetic construct
  misc_feature 1..1356: note = source = /note="Description of Artificial Sequence: Synthetic coding sequence"
  source 1..1356: mol_type = other DNA
atgttcgatattgaatactttagaaaggatccccgtccgttcttcaaattcgcaaaggaaatctatcccggccaattccaaccgtcgctttgtcacaaattcattgcccttagcgataaggaaggcaaacttctgagaaactacacccaaaacatagataccttggaacaagtcgcaggtattcagaggattattcaatgtcatggttccttcgccacggcatcatgcctgatctgcaaatacaaagtggattgtgaagcggtccgcggcgatatcttcaaccaagtggtcccacggtgtcctaggtgccctgcagatgaaccgctggcaattatgaagcctgaaattgtgttttttggtgaaaaccttccggaacagttccaccgggccatgaaatacgataaagacgaagtcgatctgcttatcgtaatcggtagttcgctgaaagtgaggcctgtggcactcattccatcctcgatcccccatgaggtccctcagattttgataaacagagaacctctgcctcatctgcattttgacgtggaacttctcggagactgtgatgtgatcattaacgagctctgtcacagacttggtggagagtacgccaaactttgttgtaatcctgtgaagctgtcggagatcactgaaaagcccccgcgcactcaaaaagaactcgcgtacctttccgaacttccccctactcctctgcatgtgtctgaagattcctcctcgccagaacggacttccccgccagattcctctgtcattgtcactcttttggatcaagccgcaaagtccaacgacgacctggacgtctcggagtccaaaggttgtatggaggagaaaccacaggaagtgcaaaccagccggaacgtggagtccatcgccgaacagatggagaaccctgatctgaaaaatgtgggttcgtcgacgggtgaaaagaacgagaggacttcagtggcaggcaccgtgcgaaagtgttggcctaatagagtcgctaaggagcagatatccagacgccttgacggaaatcaatacttgttcctgccacctaacagatacatctttcatggcgcagaagtgtactcagatagcgaggatgacgtgttgtcatcaagcagctgcggatcgaactcggatagcggcacttgccagtccccttctcttgaagaacctatggaggacgaatcagaaattgaagagttttacaacggactggaggacgagcccgatgtgccggaacgggccggaggggcaggattcgggactgatggagacgatcaggaagccattaatgaagcaatttcagtcaagcaggaggtgacggatatgaattacccttccaataagagc

SEQ ID NO: 19294 - DNA, 1356 bp, synthetic construct
  misc_feature 1..1356: note = source = /note="Description of Artificial Sequence: Synthetic coding sequence"
  source 1..1356: mol_type = other DNA
atgttcgacattgaatactttcgcaaggacccacggccttttttcaaatttgccaaggagatttatcctggacaatttcagccatccctgtgtcacaagtttattgccctgtcggataaggagggaaagttgcttaggaactatacacaaaacattgatactctggagcaggtcgcaggcatccagaggattatacaatgtcatggctccttcgctacagcaagttgcctgatttgcaagtataaggtggattgcgaagcggtgcggggagacatattcaaccaggtagtgccccgatgcccgaggtgcccggccgatgaaccgctggcaattatgaagccagaaatcgttttcttcggtgagaacttgcccgagcagtttcaccgagccatgaaatatgacaaagacgaggtggacttgctaatcgtcattggatccagcctgaaagtgcggccagtggcattgatcccatccagcatcccacatgaggtgcctcagattttaatcaatcgggagcccttgcctcacctccacttcgatgttgagcttctaggggactgtgatgtcatcatcaacgagctatgtcatcggctcgggggagagtacgccaagctgtgctgcaaccccgtaaaactgtcggagattactgagaaaccccctcgaacccagaaggaattagcctacctttcagaactgcccccaactccactccacgtctctgaggattccagcagccccgagaggacatccccaccagacagctcagtaattgtgaccctgctcgaccaagctgccaagagcaacgatgacttggatgtaagcgaaagtaaaggctgtatggaggaaaagccccaggaggtccaaacgtcacgaaatgtggaatcaatcgccgaacaaatggagaaccctgatctgaagaatgttggaagtagcaccggcgagaagaacgaacggacttcagtcgcaggaaccgttaggaaatgttggcctaatcgggtggcgaaagagcagatttcacggcgcctggatggaaaccaatatctgttcctgccgccaaacagatacattttccatggagccgaggtgtatagtgacagcgaggacgacgttctcagttccagcagctgcggatctaacagcgactctggcacttgccagtcaccaagcctggaagaacccatggaggacgagtcggaaatcgaggaattctataacgggctggaggacgaaccggatgtcccggaaagagcagggggcgccggctttggtaccgacggcgacgaccaggaagccattaacgaggcgatctccgtgaaacaggaggtcacagacatgaactatcccagcaataaatca

SEQ ID NO: 19295 - DNA, 1356 bp, synthetic construct
  misc_feature 1..1356: note = source = /note="Description of Artificial Sequence: Synthetic coding sequence"
  source 1..1356: mol_type = other DNA
atgtttgacattgaatactttagaaaagaccccagaccattcttcaagttcgcgaaggagatctatcccggccagtttcagccctccctctgccacaaattcattgctctcagcgacaaggaaggaaagttgctgaggaactatactcagaatatcgacactctggagcaagtggcaggaattcaacgcataattcagtgtcatggctccttcgccactgcgagctgccttatttgtaagtataaggtcgactgcgaggctgttcggggtgacatctttaatcaggtcgtcccacgctgccctagatgtccggcagacgagcctctggctataatgaagcccgagattgtcttcttcggtgagaatttaccggaacaatttcaccgcgccatgaaatatgacaaggatgaggtggacctgctgattgttattgggtcctctctcaaagttcgacctgtggccttgatcccttcaagcattccccatgaagtcccacagattctaattaatagagagcctctcccccatctgcacttcgacgtcgaactgctcggggactgcgacgtgatcattaacgagctgtgccatagattgggtggagagtacgccaagctgtgctgtaatcccgtgaagctgtcagagattactgaaaagccaccaagaacccagaaagagctggcctatctgtccgagttgcctcctactcctctgcacgtctcagaagattcttcatccccagagcgcaccagcccacctgactctagtgtgatcgtaacgttactcgaccaggccgccaaaagtaacgatgatctggacgtgtctgaaagcaagggatgtatggaagaaaaacctcaggaagtgcagacttctagaaacgtggagtctatcgccgaacagatggagaacccggatctgaagaatgtcggtagttccaccggggaaaagaacgagcgcacaagtgtggctggaaccgtcaggaagtgctggccaaatcgagtggcgaaggagcagatttcgcgccgcctggatggaaaccagtatctgtttctcccgcctaatagatacatatttcatggagcggaagtgtattctgattcagaggacgacgtcttgagttcttccagctgcgggagtaattccgacagcgggacctgccaatcaccttccctggaggagcctatggaggatgaatctgaaatcgaggaattttacaacggcctggaggatgaacctgacgttccagagagagccgggggcgctggcttcggaactgacggggacgaccaggaagccattaacgaggccatatccgttaaacaggaggtcaccgacatgaactacccatctaacaaatcc

SEQ ID NO: 19296 - DNA, 1356 bp, synthetic construct; identical to SEQ ID NO: 19257
  misc_feature 1..1356: note = source = /note="Description of Artificial Sequence: Synthetic coding sequence"
  source 1..1356: mol_type = other DNA

SEQ ID NO: 19297 - DNA, 1356 bp, synthetic construct
  misc_feature 1..1356: note = source = /note="Description of Artificial Sequence: Synthetic coding sequence"
  source 1..1356: mol_type = other DNA
atgttcgacatcgagtacttcagaaaggacccgcgtccattctttaagttcgcgaaggagatttaccctggccagttccagccttctctctgccataagttcatcgctctgtcagacaaggagggaaagctgctgcggaattacacccaaaacatcgacaccctggaacaagtcgccggaattcaacgcattatccagtgtcatggctcgttcgcaactgcatcttgcctcatctgcaaatacaaggtagattgtgaagcggtgagaggagacatctttaaccaagtggtccctaggtgcccccggtgtcctgcagacgaaccacttgccatcatgaaaccagaaattgtattcttcggagagaatctcccggagcagttccacagagctatgaaatacgataaggatgaagtggacctcctgatcgtgatcggatcctccctgaaggtgcgccccgttgccctgatcccatcatccatcccgcacgaagtgccgcaaatcctcatcaaccgtgagccgcttccacacctgcattttgacgttgaattgctgggagactgcgatgtcattatcaacgaactctgccaccggttggggggagaatacgcgaagctgtgctgcaacccggtcaaactgtccgaaattacggagaagccgccacgcacccagaaggaattggcgtacctgtctgaactcccaccgactccgcttcacgtgtcggaggactcatcgtcccctgagaggactagcccgccggactcctcagtaatcgtgaccttgctggatcaagccgctaagtcgaacgatgacctcgatgtcagtgagtccaagggttgcatggaggaaaagccacaggaggtgcagacctcgcggaacgtggagagcatcgcggagcagatggagaacccagacctgaaaaacgtgggttcctcaactggagagaagaacgaacgcacttcagtggccgggacggtgagaaaatgttggcctaatcgggtggctaaagaacaaatctcgcgacgcttggacggcaaccagtacctcttcctcccgccgaatcgctacatctttcatggcgccgaagtgtactccgattctgaagatgatgtgctgtcgtcatcctcatgcggatcaaacagtgactcaggaacctgccagtcgccctcgctcgaggaacctatggaggacgaaagcgaaatcgaggaattctacaatgggctcgaggatgaaccggatgtcccagaacgggccggcggtgcaggctttggaactgatggggacgaccaggaagccataaatgaggccatctcggtcaagcaggaggtgaccgacatgaattatccctccaacaaatcg

SEQ ID NO: 19298 - DNA, 1065 bp, synthetic construct
  misc_feature 1..1065: note = source = /note="Description of Artificial Sequence: Synthetic coding sequence"
  source 1..1065: mol_type = other DNA
atgagcgtgaactacgccgccggtctgagcccatatgctgataagggcaagtgcggactgccagagatctttgaccctcccgaagaactggagagaaaggtctgggagttagctagactagtctggcaaagttcctccgtggtctttcacaccggagccggcatctccaccgctagcggtattcccgactttagaggtccccacggggtatggacgatggaagaacgcggcctcgcccccaaattcgatacaactttcgagagcgcccgacccacgcagactcatatggctctggtgcaattggaacgcgtggggctcctcaggttcttggtgtctcagaacgtggatggtctgcacgtcagatccggcttcccccgagacaagctggcagagctccacgggaatatgtttgtcgaggagtgcgcaaagtgtaagacacagtacgtacgagataccgttgtgggtaccatggggctgaaggcaaccggtagactctgtacggtcgccaaagccagaggtttacgggcatgtcgaggcgagttgcgggatacaatccttgactgggaagattctctgcccgatagggatctggccctggcagatgaggcgagtcgaaatgcggatctctctattaccctcggcaccagcctacagatacggcccagcggcaacttacctctggctactaaacgccgtggcggaagattggtgatcgtcaacctgcagccaactaagcacgataggcacgctgaccttagaattcatggatatgttgatgaggttatgacaagactgatgaagcacctaggactcgaaattcccgcctgggatggacctagggtgttggaacgagccttgccaccccttccccgccctccaactcccaagctcgagcctaaggaagagtctcccactaggatcaatggatcaattcctgccggccccaaacaggagccctgtgcccagcataacgggtcggagccggctagcccaaaacgggagagacccactagccccgctccccatagaccacccaagcgggtgaaggcgaaggccgtgccatcg

SEQ ID NO: 19299 - DNA, 1065 bp, synthetic construct
  misc_feature 1..1065: note = source = /note="Description of Artificial Sequence: Synthetic coding sequence"
  source 1..1065: mol_type = other DNA
atgtcggtaaattatgcggcgggtttatcgccgtatgcggataaaggtaaatgtggtctaccggaaatatttgatccgccggaagaactagaacgtaaagtatgggaattagcgcgtttagtatggcaatcgtcgtcggttgtatttcatacgggtgcgggtatatcgacggcgtcgggtataccggattttcgtggtccgcatggtgtatggacgatggaagaacgaggtttagcgccgaaatttgatacgacgtttgaatcggcgcgtccgacgcaaacgcatatggcgttagtacaattagaacgtgtaggtttattacgttttttagtttcgcaaaatgtagatggtttacatgtacgttcgggttttccgcgtgataaactagcggaattacatggtaatatgtttgttgaagaatgtgcgaaatgtaaaacgcaatatgttcgtgatacggtagtaggtacgatgggtttaaaagcgacgggtcgactatgtacggttgcgaaagcgcgtggtttacgtgcgtgtcgtggtgaactacgagatacgatattagattgggaagattcgttaccggatcgagatctagcgttagcggatgaagcgtcgcgtaatgcggatctatcgataacgttaggtacgtcgttacaaatacgaccgtcgggtaatctaccgctagcgacgaaacgtcgaggtggtcgattagtaatagtaaatttacaaccgacgaaacatgatcgtcatgcggatctacgaatacatggttatgttgatgaagttatgacgcgattaatgaaacatttaggtttagaaataccggcgtgggatggtccgcgagtactagaacgtgcgctaccgccgctaccgcgtccgccgacgccgaaactagaaccgaaagaagaatcgccgacgcgaataaatggttcgataccggcgggtccgaaacaagaaccgtgtgcgcaacataatggttcggaaccggcgtcgccgaaacgtgaacgaccgacgtcgccggcgccgcatcgaccgccgaaacgtgttaaagcgaaagcggtaccgtcg

SEQ ID NO: 19300 - DNA, 1065 bp, synthetic construct
  misc_feature 1..1065: note = source = /note="Description of Artificial Sequence: Synthetic coding sequence"
  source 1..1065: mol_type = other DNA
atgtccgtcaactacgccgccggactttcaccgtacgcggataagggaaaatgtggcctcccagagatctttgacccaccagaggagctggaacggaaagtgtgggagctcgcgcgccttgtgtggcaatcctcctccgtcgtgtttcatacgggggcaggaatttcaaccgcctccggtatcccggacttccgcggaccgcatggagtctggaccatggaggaaaggggcctggcacccaagttcgacactacttttgaatccgctaggccaacccagactcacatggcgctcgtgcaactcgagcgcgtcggactgctccggttcctggtgtcacaaaatgtggatggactgcatgttcggtcgggattccccagagataagctggccgagcttcatggcaacatgtttgtggaagagtgtgcgaagtgcaagactcagtatgtgagagataccgtggtgggaaccatgggacttaaggcaaccggtaggctgtgcaccgtggccaaggcgcgcggtctgagagcatgtcgcggggagctgcgcgatactatcctcgattgggaggactcgctgccagatcgcgacctggcgcttgccgatgaggcctcgcggaacgctgacctgtccatcacgctgggtacttcactgcagatccggccttccgggaaccttccgctggccactaagcgtcggggaggacgcctggtgatcgtcaacctccagccgaccaagcatgaccgccacgctgacctccggatccacggatatgtcgacgaggtcatgactcggctgatgaagcacctcggactggagatcccagcgtgggacggacctcgcgtgctcgaaagagcgctgccgccattgccgcggcctccaaccccaaaactggaacctaaagaggagtcgccgacgagaatcaatggatcgattccggccggtccgaaacaggaaccgtgcgcacagcacaatggctcagaacctgcatcgccgaagcgcgaaagacccacttcgcccgctccgcaccggccgccgaaacgagtgaaagcgaaggccgtgccttcg

SEQ ID NO: 19301 - DNA, 1065 bp, synthetic construct
  misc_feature 1..1065: note = source = /note="Description of Artificial Sequence: Synthetic coding sequence"
  source 1..1065: mol_type = other DNA
atgtccgtgaactacgccgcaggactttctccttacgctgacaagggcaaatgcgggctacccgaaatcttcgaccccccagaagagctggaaagaaaggtttgggagctggcccgactcgtttggcagtcctccagcgtcgtgtttcatacaggcgctggaatctctacagcttctggcataccagatttcaggggaccccacggcgtgtggaccatggaagaacggggcctggctccaaaattcgatacaacctttgagagcgccagacccacccaaacccatatggctctggtgcagttagagcgggttggcctccttcgtttcctcgtttcccagaacgtggacgggctccacgtgcggtccggcttcccgagagacaaattggctgagcttcacgggaacatgttcgtggaagaatgtgccaagtgcaagactcagtacgttcgggacactgtggtggggacaatggggctgaaagcaaccgggaggctttgcaccgttgccaaagccaggggcctgagggcctgccgcggggagctgagggacaccattctagattgggaagatagtttacctgatcgcgacctggctcttgcagacgaggcaagcaggaatgccgatctgagcataacactaggcaccagcctgcagatacgcccctctggaaacctgccactagctaccaagcgcaggggcggccgtctggtgatcgttaacctacaacccacaaagcatgacagacacgccgacttgcgaatacacggttatgttgatgaagttatgacaagactcatgaagcatctaggactagaaatccccgcatgggatggacctcgcgtgctggagcgcgccttacctccactgccacgcccaccaactcctaaacttgaaccaaaagaagaaagtccaacaaggataaatggcagtatacctgctggacccaaacaggagccatgcgcccagcataatggctcagaacccgccagtccaaaaagggagcggcctacctctcctgcacctcaccggcccccaaaacgggtgaaagccaaggccgtgccttcc

SEQ ID NO: 19302 - DNA, 1065 bp, synthetic construct
  misc_feature 1..1065: note = source = /note="Description of Artificial Sequence: Synthetic coding sequence"
  source 1..1065: mol_type = other DNA
atgagcgtgaactatgctgccggcctgagcccctacgcggacaaaggcaaatgcggcctgcctgagatatttgacccgccggaagaactggagaggaaagtgtgggagttggctcgcctggtatggcagagtagcagcgttgtcttccacactggcgctgggattagcaccgcgagtggtattccagactttcgcgggcctcatggcgtatggaccatggaagagcgcggcttggcccccaagttcgataccacttttgagtctgcacggcctacacagacccacatggcgttggtccagctggagagggtgggcctcttacgatttctagtgagccagaatgttgacgggctacatgttcggagtggatttcctcgcgataaactggccgaattacacggtaacatgttcgttgaggagtgtgcaaagtgcaaaacacaatatgttcgggacactgttgtaggcactatgggtctgaaagcgaccggtcgcctctgcactgtggcgaaggctcgcgggctgcgtgcgtgtcgtggtgaactgcgtgataccatccttgactgggaggactccctgccggatcgcgacctggcattggccgacgaggccagccgcaatgcagacctgagcattaccctggggactagcctgcaaatccgaccttccggtaacctcccattggccacaaaacgccgcggcggccgcctggtcatcgtgaacctgcaaccgactaagcatgacagacacgctgacctgcggatacatgggtacgtggatgaggtgatgacgaggctgatgaaacacctgggtctggaaatccccgcgtgggacgggcctcgtgtcctggagcgcgctctgcctccgctcccgcgcccaccgactccaaagctggagccaaaagaggaaagccctacgcgcatcaatggttctatcccggcgggccctaagcaagagccatgcgcacagcacaatggctctgagccagcgagcccgaagagggaacgcccgactagcccggcaccacatcggccacctaaaagggtgaaggcgaaggctgtccctagc

SEQ ID NO: 19303 - DNA, 1065 bp, synthetic construct
  misc_feature 1..1065: note = source = /note="Description of Artificial Sequence: Synthetic coding sequence"
  source 1..1065: mol_type = other DNA
atgagcgtaaactacgccgccggccttagtccttacgccgacaagggcaaatgcggactacccgagatcttcgatcctccagaagagctggagagaaaagtttgggagctagcaagactggtatggcagagttcctccgtcgtcttccacacaggagccggcatctcaacagccagtggtatacccgacttcaggggcccacatggggtatggactatggaagaaagagggttagctcccaagttcgataccacattcgaaagcgcccgtccaactcagactcatatggccttggtgcagctggagcgagtagggctgctgagatttctggtttcccagaatgtcgatggtctgcacgtgcggtcaggtttccctcgagacaagctcgcagagctccacgggaatatgttcgtggaagaatgtgcgaaatgtaagacccagtacgtgcgggacactgtcgtgggaactatggggctcaaggcaactggccgattgtgcacagtggcaaaagcccgaggactacgggcttgtcgtggagagctcagggatacgatcctggactgggaggactctttgccggatagagacttagcgcttgccgatgaggcctctagaaatgccgacctttcaatcacactgggcacatctctgcagattcggcccagtggtaatctccccctcgccacgaagaggcgcgggggccgcttggtgatcgtcaacttgcagccaactaagcatgataggcacgcagatcttcggattcacggctacgtggacgaagttatgactaggttgatgaaacatctgggcctggaaattcccgcttgggacgggccaagagtgctcgagcgggctctaccacccctgccgaggcctcctacccccaaactcgagcctaaggaggagagccccacccggatcaacggcagcattcctgccggacctaaacaggagccgtgcgcccagcataacggatcggaacccgccagtcctaaaagggaaagacctacaagtcccgccccacacagaccacctaaacgtgtcaaggccaaggccgtgccctcg

SEQ ID NO: 19304 - DNA, 1065 bp, synthetic construct
  misc_feature 1..1065: note = source = /note="Description of Artificial Sequence: Synthetic coding sequence"
  source 1..1065: mol_type = other DNA
atgtcagtgaactacgctgccgggctgtctccgtacgcagacaaaggaaaatgcggccttccagagatcttcgatccaccggaagagctggaacgtaaggtttgggaactggcaagattggtgtggcaaagctcctccgtggtgttccacactggagcaggtatttccactgcttcgggaattcctgactttcgcgggcctcatggcgtgtggactatggaagagcgcggtttggcacccaagtttgatactacctttgagtcggcaagacctactcaaacccacatggcacttgtgcagttggaaagagtgggactgctgagatttctcgtctcccagaacgtggatggacttcatgtcagatcagggtttccacgggacaaacttgctgaactgcatggcaacatgttcgtcgaggaatgtgcaaagtgtaagacccaatatgtgcgtgatacggtcgtgggaacgatgggtctgaaggcaaccggcagactgtgtaccgtggcaaaggcgaggggactcagagcatgccggggtgaactccgtgataccattctcgattgggaggatagcctgccggaccgcgatctggcgctggcggatgaggcatcacggaacgcagacctgagcattactctcggaacgagcctccagatccgtccgtccggaaatctcccactggctaccaagcggcgtggcggtcgcttggtgatcgtcaaccttcaacccaccaagcatgatcggcatgcagacctgcgcatccacggatatgtggacgaggtcatgaccagacttatgaagcatcttggtcttgaaataccggcatgggacggaccaagagttctggagagggccttgccaccacttcctcggcctccgaccccaaaacttgaaccgaaggaagagtcacccactcggataaacgggagcatcccggcgggacccaaacaagaaccttgtgcacagcacaatggttccgaacctgcctcgcccaaacgagaaagacccacttcaccagcaccccatcgcccccctaaaagagtcaaggccaaggctgtgcctagc

SEQ ID NO: 19305 - DNA, 1065 bp, synthetic construct
  misc_feature 1..1065: note = source = /note="Description of Artificial Sequence: Synthetic coding sequence"
  source 1..1065: mol_type = other DNA
atgtctgtgaattatgccgccggcctctctccctatgccgacaagggcaagtgtggcttgcctgagatattcgacccacccgaagaactcgagcgcaaggtctgggagctggccagattggtctggcagagcagctctgtggtgttccacacgggggctggaatttccactgcaagcggcatccccgacttccgagggccccacggcgtgtggacaatggaagaaaggggcctcgcccccaaattcgataccaccttcgaatcagcccgacctacgcagacccatatggcgctcgttcaactcgagcgcgtgggcttgttgcggttcctggtgtctcagaacgtagacggcctgcacgtgcggtctggattccctagagataaactcgccgagcttcatgggaacatgttcgtagaggaatgtgccaagtgtaagacccagtacgtcagagacactgttgtgggaaccatgggattgaaggccacaggccgcctgtgcaccgtggctaaggcacgcggtctgagggcgtgcaggggcgagctgcgagacaccatcctcgactgggaggatagcctgccagacagagacctggcgttggcggacgaggctagcaggaacgccgatctctccatcactctcggtacctctctgcaaatcagaccttctggaaacctgcccctggcaaccaaacgacggggcggtcgcctcgtgatagtgaaccttcagcctactaaacatgaccggcacgcagacctcagaattcatggctacgtggacgaagtaatgactcggttgatgaagcacctgggcctggagatcccggcctgggacgggccacgggttctggagcgggccttgccgcctctgcctcggccccctactcctaagctggagcccaaagaagaatccccaaccaggatcaatggctcaattccagccggccccaagcaggagccttgcgcccagcataacgggtcagagccggcaagcccaaagagggagcggcccactagccctgccccacacaggcctccaaagagagttaaggccaaggcagtgcccagc

SEQ ID NO: 19306 - DNA, 1065 bp, synthetic construct
  misc_feature 1..1065: note = source = /note="Description of Artificial Sequence: Synthetic coding sequence"
  source 1..1065: mol_type = other DNA
atgtcggtcaactatgccgcaggactgtcgccatacgcagacaagggcaagtgtggccttccagagatatttgatccacccgaagagttggagcgtaaagtctgggagttggcacggcttgtgtggcaatcctcatcggtggtatttcacaccggggctggaatttccactgcatcgggtattcccgactttcgggggcctcatggcgtgtggactatggaggaacgcgggttggcacctaagttcgacaccacttttgaatctgcaagaccaactcagactcacatggctctggtgcaacttgaaagagtgggtctgcttcgatttctcgtcagccaaaacgtggatggactgcacgtgaggtcggggttccccagggataagctggcagaactgcatggcaatatgttcgtggaggaatgcgccaagtgtaagacgcaatacgttagggacacggtcgtggggactatgggtctgaaagccactgggcggctttgcaccgtggctaaggcccgaggactccgcgcctgtcggggtgaacttcgtgacactatccttgactgggaagatagccttcctgaccgggatctggcactggcagatgaggcctcgcgaaacgcggatcttagtatcactcttggcacctcattgcagatcaggccctctggaaatcttcctcttgccaccaagaggcgcggagggcgcctcgtgattgtcaaccttcaaccaactaagcatgatagacatgcagacctcagaatccacggatacgtggatgaagttatgacccggcttatgaaacatttgggacttgaaattcctgcatgggatggacccagagtccttgaaagagcactgccaccgctgccccgaccaccaactcctaaacttgaacctaaagaagaatcacctaccagaataaacggttcgattcccgctggacctaagcaggagccttgtgcccagcataacggaagcgagcccgcctcgcccaagagagagcgcccaacctctcctgcacctcacagaccacctaaaagggtcaaggcaaaggccgttccatcc

SEQ ID NO: 19307 - DNA, 1065 bp, synthetic construct
  misc_feature 1..1065: note = source = /note="Description of Artificial Sequence: Synthetic coding sequence"
  source 1..1065: mol_type = other DNA
atgtcggtgaactacgcggccggcctgtccccctatgcggacaaaggaaaatgcggactgccggagatcttcgatcctccagaggagttggagcgcaaggtgtgggaactcgctcggcttgtgtggcagtctagctccgtggtgttccatactggagccgggatcagcaccgcctccggaatcccggacttccggggcccacatggagtctggaccatggaggagagaggactggcgcctaagtttgacaccaccttcgagtcggcgcggccaacccaaacgcacatggcactggtccaactcgaacgggtgggactgttgcgcttcctcgtgtcacagaacgtggacggcctccacgtccgtagcggttttcctagagataaactcgcggaactgcacggcaatatgtttgtggaagagtgcgcaaagtgcaagactcaatacgtccgggataccgtcgtgggaaccatgggcctgaaggccaccgggcgactttgtactgtcgccaaagcccgtggcctccgcgcgtgtcgtggggagctgcgcgacactatcctggactgggaagatagcctccctgaccgggatctcgctctcgcagacgaagcctcaagaaatgccgatctttccatcacgctcggtacttccctgcagattaggccgagcggcaacctgccgctggcaaccaagcgccggggcggtagactcgtgatcgtcaatctccaacccactaaacacgatcgccacgccgacctgcggatccacgggtacgtagacgaagtgatgacgcgcctcatgaagcatctgggactggaaataccggcttgggacgggcctcgggtgctcgaacgggccctgccaccgcttccgcgtcctccgactccaaaacttgagccgaaggaagagtcgccgaccagaatcaatgggagcatcccggctggtcctaagcaagaaccatgcgcgcagcataacggatctgaaccagcctccccaaagagggaacggcctacctcaccagccccccaccgccctccgaagagggtcaaggccaaggctgtcccctcc

SEQ ID NO: 19308 - DNA, 1065 bp, synthetic construct
  misc_feature 1..1065: note = source = /note="Description of Artificial Sequence: Synthetic coding sequence"
  source 1..1065: mol_type = other DNA
atgtccgtgaattacgccgccggactttccccttacgctgacaagggtaagtgcggactcccagagatcttcgatcccccagaagagctcgaacgaaaagtgtgggagctcgcccgactcgtgtggcagtctagtagtgtggtcttccatacaggcgcagggatctctacagcttctggcatacccgactttagggggccgcacggagtgtggacaatggaggagcgcggactggcccctaaatttgacaccactttcgaaagcgcccggccaactcagacacacatggcgctggttcagctggaacgggtcggtcttttgagattcctcgtgtctcagaacgtggatggtttgcacgttcgatcagggtttcccagggacaaacttgcagaactgcatgggaatatgttcgtggaggagtgcgcgaaatgcaaaactcagtacgtccgggacacagtggttggtaccatgggtctgaaagctaccggtagactgtgtaccgtggcgaaggcccgcgggctgcgcgcttgtagaggcgagctcagggacactattctggactgggaggactctctgccagatagggacctcgcgctggctgacgaagcttctaggaacgctgatctttccatcacactgggcacaagtctccagatccggccttctggcaacctgccactggcgaccaaacgccgagggggtagattggttatcgtcaaccttcagccaacgaagcacgacaggcacgcagatttgcggatacacggctacgtcgacgaagtgatgactcgactcatgaagcacttgggactggaaatccccgcatgggatgggccacgagtgctggagagagccctgcccccacttcctcggccacctacacctaagctcgagccaaaggaagagtctcccaccaggattaatgggtcaattcccgccggccccaagcaggaaccctgcgcccagcataacggaagcgagcctgcatctccaaaacgcgagcgccctacaagtccagccccccacagaccaccaaagagggtgaaggcgaaagcggttccctct

SEQ ID NO: 19309 - DNA, 1065 bp, synthetic construct
  misc_feature 1..1065: note = source = /note="Description of Artificial Sequence: Synthetic coding sequence"
  source 1..1065: mol_type = other DNA
atgagcgtcaattacgccgccgggctttcaccttacgcagacaagggtaagtgtggacttcccgagatttttgaccctccagaagagctcgaaagaaaagtctgggaacttgcgagattggtctggcaatcgtcgtccgtggtgtttcataccggagcgggcatatcaacggcaagcggtattccagactttaggggaccacatggtgtctggactatggaagaacgcggcttggcacctaagtttgacaccactttcgagagcgcaagaccgactcagacccatatggcacttgtgcaacttgaaagagtgggtttgctgcgattccttgtctcgcaaaatgtggatggactgcatgtgaggtccggatttcctagggataaacttgcagagctgcatggcaacatgtttgtggaggaatgtgcaaaatgtaagacgcagtacgtgcgagataccgtggtcggaactatgggtcttaaggcgactgggagactttgcactgtcgcaaaggcgagagggctgcgtgcttgtagaggagaactgcgggataccatcctggattgggaggactcactgccggatcgcgatcttgccctcgcagatgaggcgagccgaaacgctgatctgtccattaccctcggaacctccctccagattaggcctagcggaaacctgcctctggcaaccaagcgaagaggcggccgtcttgtgatcgtgaatctccaacccactaaacatgaccgtcacgccgatctgcggattcatggatacgtggatgaagtgatgacccgacttatgaagcatcttggcttggagattccagcatgggatggaccgcgggtgctggaaagagcactcccgcccctgcccagacccccaaccccgaaacttgaacctaaagaagagtctccgacccgcattaatggatcaattccagcaggacccaagcaagaaccttgcgcccagcataacggatcggaaccagcgtcgcccaagagagaaagacctacctctccagctccccaccggccccccaagcgcgtgaaagctaaggcagtgccatcc

SEQ ID NO: 19310 - DNA, 1065 bp, synthetic construct
  misc_feature 1..1065: note = source = /note="Description of Artificial Sequence: Synthetic coding sequence"
  source 1..1065: mol_type = other DNA
atgagtgtgaactatgccgcggggctctcgccttacgctgataagggaaagtgcggtctgcctgaaatcttcgaccctccagaagaactggaacggaaggtgtgggaactcgccagactcgtctggcaatccagctcggtggtattccacaccggagcgggcatttcgactgcatcgggaattccagattttcggggaccccatggcgtgtggactatggaggaacggggtcttgcgccgaagtttgataccacttttgaatcagcaagaccaactcaaacccatatggcattggtacaactcgaaagagtcggtcttttgagatttcttgtatcacagaacgtggatggacttcatgtgagatccggatttccgagggataaactggctgagcttcacggcaatatgttcgttgaggaatgtgctaaatgtaaaacccagtacgtgagagacaccgtggtgggaactatgggtttgaaggcaactggacgcctgtgcacggtcgccaaggcaaggggactgcgtgcatgtcgtggtgagcttcgagacacgattctcgattgggaagattcccttcctgacagggaccttgcactggcagatgaggcgtcacgcaatgcagatctctcaatcaccctgggtacttccttgcaaattcgtcctagcggaaacctccctctcgcaacgaaaaggagagggggaagattggtgatcgttaacctgcagccaaccaagcatgatcgccatgcggatctccggatccacggctatgtggacgaggtcatgactcgcctgatgaagcatctgggactggagataccggcctgggacggtccgcgtgtccttgagcgagctcttccaccactgccacgacctccaacgcccaagttggagcccaaggaggaatcgccgacccgcattaacggatccataccagcaggtccgaagcaggaaccttgcgcccaacacaatgggagcgaacctgcctcccctaagagagaacggccaactagccctgcacctcatcgaccccctaagagggtgaaagcaaaagcagtcccttcc

SEQ ID NO: 19311 - DNA, 1065 bp, synthetic construct
  misc_feature 1..1065: note = source = /note="Description of Artificial Sequence: Synthetic coding sequence"
  source 1..1065: mol_type = other DNA
atgagcgtaaactacgcagctgggctgtcaccctacgcggataaagggaagtgtggactcccagaaatcttcgacccccctgaggaactcgagaggaaagtatgggaactcgcgcgcttggtctggcagtcgtcgagcgtcgtgtttcacacaggtgccggtatctccaccgcgagcgggatcccagacttcagaggccctcacggagtgtggaccatggaagaacgggggctcgctccaaagttcgatacaacatttgaaagcgcccgaccaacacagacccatatggcgctggtacagctggagcgtgtgggcctattgagattcctggttagccaaaacgtggatggactgcacgtgcggtccggctttccccgcgataagctggcggagcttcacggtaatatgtttgtcgaagagtgtgcgaagtgcaaaacacagtatgtaagggacactgtggtgggcaccatgggattaaaagctaccggccgcctttgcactgtagccaaagcccgaggccttagggcatgcagaggggaactgagagacaccatactggactgggaggattccctgcccgacagagatctcgctttggcggacgaagccagccggaatgctgacctgagcattacgttaggcacctccctgcagatcagaccttctggtaaccttcccctggccacaaagcgcaggggggggcgcctggttatagtgaatctacagccgactaagcacgacagacacgcagatctgaggatacatggctacgtggacgaagtcatgacaagactgatgaagcacctaggtctcgagattcctgcatgggatggcccaagggtcctggagcgtgctctgcctccccttccgcggccccccacgccaaaactagagccgaaggaagagtctcccactcgtattaatggatcaattcctgccggacccaagcaggagccctgcgctcagcacaatggttcggaacccgccagtcccaaaagggagaggcctactagccccgcaccccatagaccccccaaaagggtgaaagccaaagccgtgccttcc

SEQ ID NO: 19312 - DNA, 1065 bp, synthetic construct
  misc_feature 1..1065: note = source = /note="Description of Artificial Sequence: Synthetic coding sequence"
  source 1..1065: mol_type = other DNA
atgtcagtcaattacgctgccggactgagcccgtatgctgacaaaggcaagtgtggtctgccagagatttttgaccctccggaggaattagagagaaaggtgtgggaattggctaggcttgtgtggcagagctctagcgttgtcttccataccggagccggcatcagcactgcctctgggatccctgacttcaggggcccacatggcgtgtggaccatggaagagcgtggtctcgctcccaaatttgacactacctttgaatccgccagaccaacgcagacccacatggctttggtacagctcgaacgtgtgggcttgttgaggttcctcgtgagccagaatgtagacggactgcacgtcaggtcgggattccctcgggacaagttggccgaactgcacgggaatatgttcgtggaagagtgtgccaagtgtaaaacccaatatgtacgcgacaccgttgtagggacaatgggcttaaaggccaccgggagactgtgtacagtagctaaggcccgcggcctaagagcatgcaggggggagcttcgcgataccatattagactgggaagactcactcccagatcgggatttggccttggccgacgaggctagtcggaatgcggatttatcaattacactagggacctcattacaaatccgtccatctggcaatctgccactggctactaaacggaggggcggcaggctggtgattgtgaaccttcagccaaccaagcatgatagacacgctgacctgcgcattcacgggtacgttgatgaggtaatgacaagactgatgaaacatctcgggctggaaatcccagcgtgggatgggccccgagtattagagcgcgctctcccacctctaccaaggccacctactcctaagcttgagccaaaagaggaatccccaacaagaataaatggaagtattcccgctggaccaaagcaagagccatgcgcacagcacaacgggtcagagcctgcaagccctaagagggagagacctaccagcccagcaccacaccgaccccctaaacgtgtgaaggctaaggccgtgccgtct

SEQ ID NO: 19313 - DNA, 1065 bp, synthetic construct
  misc_feature 1..1065: note = source = /note="Description of Artificial Sequence: Synthetic coding sequence"
  source 1..1065: mol_type = other DNA
atgtcagttaattatgctgctggtctttcaccttatgctgataaaggaaaatgtggattgccagaaatttttgatccaccagaagaattagaaagaaaagtatgggaattagctagattagtctggcaatcatcttcagttgttttccatactggagctggaatttctacagcttctggaataccagattttcgtggtccacatggtgtctggactatggaagaaagaggattagctccaaaatttgacacgacatttgaatcagctagacctacacaaactcatatggctttagtacaactagaaagagttggattgttgcgatttttagtttcacaaaacgttgatggacttcatgttaggtctggatttccacgtgataaattagccgaacttcatggaaatatgtttgtagaagaatgtgcaaaatgtaaaacacaatatgtaagagacactgtagttggaacaatgggattaaaagcaactggtagattatgtacagttgctaaagcaagaggattaagggcttgtagaggagagcttagagatacgattttagactgggaagattctttaccagatcgagatcttgcacttgcagatgaagctagtagaaatgctgatttgtctataacattaggaacctcacttcaaattagaccatcagggaatctacctttagcaactaaaagaagaggaggtcgtttggttattgttaatttacaaccaacgaaacacgacagacatgcagatttaagaattcatggatatgttgatgaagttatgactagattaatgaaacatcttggtttagaaatcccagcatgggatggtccaagagtattagaaagagctttaccacctttaccaagaccaccaactcctaaacttgaaccaaaagaagaatctcctacacgaattaatggatcaattcctgcaggaccaaaacaagaaccatgtgcacaacataacggttcagaaccagcttctcctaagagagaaagaccaactagtcctgcacctcatcgtcctcctaagagagtgaaagctaaggctgttccaagt

SEQ ID NO: 19314 - DNA, 1065 bp, synthetic construct
  misc_feature 1..1065: note = source = /note="Description of Artificial Sequence: Synthetic coding sequence"
  source 1..1065: mol_type = other DNA
atgtcagtgaactacgctgctggcctttctccatatgcagacaaaggcaagtgcggactacccgaaatattcgacccacctgaggaactggaacgtaaagtgtgggagctggcgcgcctcgtctggcaaagcagttctgtggtgtttcataccggcgccggcataagtacagccagcggcatacctgatttcagaggcccccacggagtttggactatggaagaacgaggcctagcaccgaagtttgacacaacattcgaatcagctcgcccgacacagacacacatggcactggtgcagctggagagagtcgggctgctgaggtttttggtgagccagaatgtggacggccttcatgtaagatccgggtttcctagggacaagcttgccgagctgcacggcaatatgttcgtcgaggagtgcgctaagtgtaagacccagtacgttagggacacggtcgttggaaccatgggactgaaggccaccggacgcctttgcacagtggcaaaagccagaggtcttcgagcgtgtagaggagaacttcgagacactatactcgactgggaagatagccttcctgacagagacctggccctcgctgacgaggcatcccgcaacgccgatctcagtatcaccttaggtacatcgctccagatcaggcctagcggcaacctgccactcgcaacaaagaggcgcggtggtcgactcgtgattgtaaacttgcagccaaccaagcatgaccggcatgcagaccttcgcattcacggatatgtggacgaggtaatgactcgccttatgaagcacctggggttagaaatccctgcctgggatggccctagagtgttggagagagctttgccacctctcccacgtccaccgacgccaaagctggaaccgaaggaagaatcgcctacaagaattaacggcagcatccctgctgggcctaagcaggagccgtgcgctcagcacaatggcagcgagcctgcttcgcccaaaagggagaggccaactagcccagcgcctcatagacctcccaaaagagtgaaggccaaggccgtgccctct

SEQ ID NO: 19315 - DNA, 1065 bp, synthetic construct
  misc_feature 1..1065: note = source = /note="Description of Artificial Sequence: Synthetic coding sequence"
  source 1..1065: mol_type = other DNA
atgagtgtgaattacgcagccgggctttccccttacgcagacaaggggaagtgcggcttgcccgagatcttcgacccacctgaagagcttgaaagaaaggtttgggaactggcacgtcttgtgtggcagagctcgtccgtcgtctttcacaccggagccggtatttcgacggcctcgggtattccggattttagaggcccacatggagtgtggactatggaagagagaggtctggcccctaagtttgacacgactttcgagtctgctagaccgactcagacccatatggctctcgtgcaacttgagcgagtaggacttcttagattcctggtgtcgcaaaacgttgatggactgcacgtgaggtccggctttcctcgcgacaaacttgccgaactccatggtaacatgtttgtggaagaatgtgcgaagtgcaaaacccaatatgtgagagacaccgtcgtaggaactatgggtcttaaagctacgggacgcctgtgtaccgtggcaaaagcaagaggcttgagggcctgtcgaggagaactccgcgataccatactggattgggaagattcgctgcccgatcgtgatcttgcactggcggatgaggcaagccgtaacgcagatctcagcatcactcttggcacgtcgctgcaaattcgaccttcaggtaacctgcccctcgcgactaagcgcagaggaggacggctcgtgattgtcaatctccaacccactaagcatgatcgtcacgctgacctgcggattcatggatacgtagacgaagtcatgactcggcttatgaagcaccttggcttggaaatccctgcgtgggatgggccccgagtcctggagcgagcactgcccccgcttccaagacctcctacccctaagctggagccaaaggaagaaagccccacccgcataaacggctcgattcctgcagggcctaagcaggaaccatgtgctcagcataatggatccgaacctgcatcaccaaagagagaaaggcccacctcacctgcaccgcatcggcccccaaagcgcgtgaaagcaaaagctgtgccatca

SEQ ID NO: 19316 - DNA, 1065 bp, synthetic construct
  misc_feature 1..1065: note = source = /note="Description of Artificial Sequence: Synthetic coding sequence"
  source 1..1065: mol_type = other DNA
atgagcgtcaactacgccgcaggactctcgccgtacgcagataaagggaagtgcggcctgccggaaatctttgatcctccggaagaactggaaagaaaggtgtgggagctcgcacgcctcgtctggcaatcatcctctgtcgtgttccacaccggagccggaatctcaacggcctcgggtatcccagattttcgcggcccgcatggagtgtggaccatggaagaacgcggcttggcccctaagtttgacactactttcgaaagcgctagacccactcaaacccacatggccctggtgcagctggaaagagtcggtctgctccgcttcctcgtctcacaaaacgtggacggcctgcatgtgcgctccggattccctcgggataagctggcggaattgcacggaaacatgttcgtggaagaatgtgctaagtgtaagactcagtatgtccgcgacactgtggtcgggaccatgggactcaaggcgaccggacgcctgtgtactgtggcgaaggcccgcgggttgagagcatgccggggtgaactcagagacacgattttggattgggaagattcgctgccggaccgggacctggcacttgccgatgaggcgtcgcgaaacgcggacctcagcatcactttgggaacctcacttcagatcagaccttcgggaaacctgcctctggcgaccaagcgccggggaggaaggctcgtgatcgttaacctgcagccaactaaacacgatcgccacgccgacctgcgcatccatggatacgtggacgaggtgatgacgcgcctgatgaaacatctcggattggagatccccgcttgggacggaccccgcgtgttggaacgcgcactgcctcctctgccgcggcctccgactccaaagctggagccgaaggaagaatcaccgacgagaataaacggctccatcccggctggacctaagcaggaaccctgtgcgcaacataatggttcggaaccggcgtccccgaaaagggagaggccgacttcgcctgccccacatcggccgcctaagagagttaaagcgaaggccgtgcccagc

SEQ ID NO: 19317 - DNA, 1065 bp, synthetic construct
  misc_feature 1..1065: note = source = /note="Description of Artificial Sequence: Synthetic coding sequence"
  source 1..1065: mol_type = other DNA
atgtctgtgaactatgctgctggcctgtccccttacgctgacaagggaaagtgtggcctgcccgagatctttgacccccccgaagagctggagaggaaggtgtgggaactagcacgcctggtctggcagagcagcagcgttgtctttcatactggcgccggcatcagtacagcgtccgggattccggacttccgtggcccacacggtgtctggacgatggaggagcgcgggctcgctcccaagttcgataccaccttcgagtctgcccgccccacccagacacacatggctctggtacagctggaacgcgtcggtctcctccgtttcctcgtcagccagaacgtagacggacttcacgtgcgttccggctttccccgtgacaagctcgctgagctgcacggcaacatgttcgtcgaggagtgtgctaagtgcaaaactcaatatgtgcgcgatacagtggtaggcaccatggggcttaaggctaccgggcgactgtgtaccgtcgcaaaagctcggggcttgcgtgcgtgccggggcgagctgcgtgacaccatcctcgactgggaggatagcctgccagatcgggacttggcactggctgacgaggcttctagaaatgccgatctgagcatcaccctcggtacatcgctccagatccggccctcgggaaacctccctctcgcaaccaagcgtcgggggggaagacttgtcatcgtcaacttgcagccgaccaagcacgaccgtcacgccgacttgcgcatccatggttacgttgatgaagtcatgacccgtttgatgaagcatttgggtttggagattcctgcttgggacggccctcgtgtccttgagcgcgctctgcccccgctcccgcgcccgcctactcctaagctcgagccgaaggaggaatcgcctactcgcatcaacgggagtattcccgctggcccaaagcaagagccttgcgctcagcacaacggctccgagccggcttcccctaagcgagagcggccgacgtccccggcaccgcatcgacccccgaagcgcgtcaaagcaaaggcagttccgtct

SEQ ID NO: 19318 - DNA, 1065 bp, synthetic construct
  misc_feature 1..1065: note = source = /note="Description of Artificial Sequence: Synthetic coding sequence"
  source 1..1065: mol_type = other DNA
atgagtgttaactacgctgccgggctatccccttatgctgataaagggaaatgtgggttaccagaaatcttcgatccacctgaagagctcgagcgaaaagtttgggaacttgctcggctcgtttggcagtcctcgtctgtcgttttccacacaggggctggaatcagtactgcttccggaattcccgatttccggggacctcacggagtctggactatggaggaacggggactggcccccaaattcgacacaacatttgaatctgctagacctactcagacacatatggcccttgttcagctcgaacgggtcgggttgcttagattcctagtgtctcagaatgtcgatggacttcatgtaaggtctgggtttccccgcgataagttagcggaactccacgggaacatgtttgtggaggaatgcgccaaatgtaaaacacagtacgtaagagatactgttgtggggactatgggattgaaagcaacagggagactgtgtacagtggctaaggcacggggattgcgagcatgtaggggggagctgcgagatactatactggattgggaggactcactccccgatagggatttggccctggcggatgaagcctctaggaacgctgacctgagtatcactttgggaacttcactgcagatacggccctcaggaaacctcccattagctactaaaagacgaggaggacgcctcgtcatcgttaacctgcagccaacaaagcatgatcgacacgccgatttgcgcatacatgggtatgtcgacgaagtgatgacaaggcttatgaaacatctggggctggaaatacccgcctgggatgggcctagggtgctcgaaagggctcttcctcccctcccccgaccccctacacctaaactggaaccgaaagaagaatcacctactcggatcaatgggtctatcccagctgggccaaaacaggaaccctgtgcccagcacaatgggagtgaaccagcttccccaaaaagagagagaccaacatcacctgccccccaccgcccaccaaaacgagttaaagcgaaagctgtgccatcg

SEQ ID NO: 19319 - DNA, 1065 bp, synthetic construct
  misc_feature 1..1065: note = source = /note="Description of Artificial Sequence: Synthetic coding sequence"
  source 1..1065: mol_type = other DNA
atgtctgtgaactacgccgctggcctgtctccttatgccgacaagggaaagtgtggactgcccgaaattttcgatcccccagaagagttagaacgtaaagtctgggaactggcgcgactggtgtggcaatcaagtagcgtggtgttccatacaggcgccggcatctccacagcgtctggcatccccgattttcgcggccctcacggcgtgtggacaatggaggaacgcggacttgcccccaagttcgataccacctttgagtctgccagacctacgcagacccatatggcattggttcaactcgaaagggtgggactccttagattccttgtcagccagaatgtggacggccttcacgtccgctccgggttccctagggacaagctcgctgaactccatgggaatatgtttgtggaggagtgcgccaaatgcaagacgcagtatgtgcgggacacggtagttggcaccatgggactgaaggctaccggccggctgtgtactgtggccaaagctcggggccttagggcttgcagaggagaattacgtgataccatcttggactgggaggattcactccctgatcgcgacttggccctcgcagacgaagccagcagaaatgcagatctctctattaccctgggaacttcactacagattcgcccaagcggaaacctcccactcgctactaagcgcagaggcggccgcttggtcatcgtgaatctgcaacccactaaacatgaccggcacgctgacctcaggatacacggatacgtggatgaggttatgacccggctgatgaagcatctgggattagagattcccgcatgggacggtccccgcgttctcgaaagggccctgcccccccttccaagacctcccacccctaagttggagcctaaagaggaatccccaacccgcattaatggcagcattccagccggtccgaaacaggaaccatgcgcccagcataacggaagcgagccggccagccctaaacgggaacgcccaacctcccctgcccctcaccggcctcctaagagagtcaaagccaaagctgtgccgtca

SEQ ID NO: 19320 - DNA, 1065 bp, synthetic construct
  misc_feature 1..1065: note = source = /note="Description of Artificial Sequence: Synthetic coding sequence"
  source 1..1065: mol_type = other DNA
atgtcggtgaattatgccgccggacttagtccctacgcagataagggtaaatgtggacttcccgaaatctttgacccccctgaagaactcgaacgaaaggtgtgggaactagctcggttagtgtggcaaagttccagcgtggtctttcatacaggagcaggcatctcaaccgcttcggggattcccgatttcagaggcccccatggggtctggacaatggaggagagaggcctggcccctaaattcgatacaacgttcgagagcgcaaggcccactcagactcatatggccttggttcaattagaacgcgtaggcctcctgagattcctggtgtctcaaaacgtcgacggacttcacgtcagaagtgggttccccagggataaactggctgagctccacgggaacatgttcgtggaagagtgcgctaaatgcaagactcaatatgtgcgagataccgtcgtggggactatgggattgaaagcgaccggccgtctctgtacagtggcaaaggctaggggactgagagcatgccgcggcgagctgcgagacacaatacttgactgggaagactcccttccggatcgagatctcgccctggccgacgaggccagccggaatgctgacctgtccataaccctgggaacatcactgcaaatcagaccgtctggtaacttgcctctcgccacgaagaggcgaggagggcgccttgtgatagtgaatctgcaacctacgaaacacgatcgtcacgcagatctgaggatccacggctatgtcgatgaggttatgaccaggcttatgaagcatttgggactcgaaataccagcctgggatggacctagagtcctggagcgagccttgccccccctcccgcggcctccgacgcctaagttggaacctaaggaagagtctcctacccgaattaatgggtctatcccggccggacctaagcaagaaccctgtgcccagcacaacggcagtgaacccgcctcccctaagagagagagacctacctcaccggcgcctcaccgacccccaaaaagagtcaaagcaaaagcggtcccatcc

SEQ ID NO: 19321 - DNA, 1065 bp, synthetic construct
  misc_feature 1..1065: note = source = /note="Description of Artificial Sequence: Synthetic coding sequence"
  source 1..1065: mol_type = other DNA
atgtccgtgaactatgctgcaggactcagcccttatgctgataaaggaaagtgtggtttgcccgagatctttgatcctccagaggagttggagcgcaaggtctgggaactcgcacgcctggtgtggcagtcctctagcgtggtcttccacactggcgccggtatcagcacagcctcaggaatcccagatttccgcggcccccatggtgtctggactatggaggagcgtggactcgccccaaagttcgacactactttcgaatctgcccgtcctactcaaacccacatggcactggtgcagctggaaagagttggcttgctgcgttttttggttagtcaaaacgtagacggcctgcacgtaagatccggatttccccgcgataaactggccgaattgcacggcaatatgtttgttgaggagtgcgccaaatgcaagacacagtatgtgagagacacagtcgttggtaccatgggacttaaggctacaggccgtctgtgcaccgtggctaaagccaggggcttgagagcctgcagaggtgagctgcgcgatacaatcctggactgggaagatagtctcccagacagagatttggcattggcagatgaagcttctagaaacgctgatctctcaattactctgggaaccagtctgcagatccgccccagtggtaatctgcccttggccaccaagcgtcgtggtggcaggttggtcatagtcaatcttcaacccactaagcatgatcgccatgctgacctgcgtattcacggttacgtggacgaagtaatgacccgcctgatgaaacatttgggtcttgagatccccgcctgggacggccctcgcgtgctggaacgtgccctcccaccacttccaagacctcccactcctaagctcgaacccaaggaagagagccctacaagaatcaacggaagtatcccagctggacctaagcaggaaccatgtgcccaacacaacggatccgagcctgcttcacccaagagagagagacccacaagtcccgccccacataggcctcctaaacgtgtgaaagcaaaagctgttccctcc

SEQ ID NO: 19322 - DNA, 1065 bp, synthetic construct
  misc_feature 1..1065: note = source = /note="Description of Artificial Sequence: Synthetic coding sequence"
  source 1..1065: mol_type = other DNA
atgtccgttaactacgccgctggtttgagcccatacgctgacaaaggtaaatgtgggcttcctgagatctttgacccgcctgaagaactagagcggaaggtgtgggagctggctcggttggtgtggcaatcttcatcagtcgtttttcatacaggggctggcatcagtaccgcttcaggcattccagactttcgggggccccacggcgtgtggaccatggaagaacggggtctggcccctaagttcgatacaacgttcgagagcgcccgcccaacacaaacccatatggccctcgtacaacttgaacgcgttggactgcttaggttcctcgtgagccagaacgtagacggactgcatgtgaggtcgggatttccccgagacaaacttgccgagctgcatggcaacatgttcgtggaagaatgcgctaaatgcaagacacagtatgtgagggacactgtggttggaaccatgggcctcaaggctacaggcaggctgtgcaccgttgccaaagcacggggcctgagggcctgcaggggcgaattgagggatacaatcctggactgggaagactcactgccagatagagatttggccttggcagatgaggctagcagaaacgcagacctctcaatcactctcggcacaagcctccagatccgcccaagcggcaatctacccctggctactaaacgccgcggcggaaggctggtgattgttaatcttcagccaacaaagcatgacagacacgccgacctgcgtattcacggctatgtcgatgaagtcatgacaaggcttatgaagcatctcggtctggagattcccgcttgggacggcccaagggttcttgagagggcattgccacccctgcctaggcctccaactccaaaactggaacctaaagaggaatcccccacccggattaatggctcgatccccgccggtccgaagcaagaaccttgtgcccagcacaatggaagcgagcctgcctctcccaagagggaacggcctacaagtcccgcccctcacagaccacctaaaagggtgaaagctaaagcagttcctagc

SEQ ID NO: 19323 - DNA, 1065 bp, synthetic construct
  misc_feature 1..1065: note = source = /note="Description of Artificial Sequence: Synthetic coding sequence"
  source 1..1065: mol_type = other DNA
atgtccgtaaactatgcagccggcctgtcaccctatgcagataaaggcaagtgcggtctccccgagatttttgatccccccgaggagctggagaggaaagtgtgggagctggccagactggtttggcagtcgtcctcagtggtgtttcacaccggcgctggtatctctacagcctccggaatccccgatttcaggggcccacatggggtgtggaccatggaagagaggggtttggctcctaaatttgataccacattcgaaagtgcgagaccaactcagacccacatggctcttgtgcagttggaacgggtcggcctacttagattcctggtatcccagaatgttgacggtctccacgttagatccggcttccccagggacaaactggctgaactgcatggaaatatgttcgtggaagaatgcgcgaaatgcaagactcagtacgtgcgcgacaccgtagttggtaccatgggcttaaaagcaaccggccgactgtgcactgtcgcaaaagcgaggggccttcgagcctgtcgaggagaattacgagatactatactggactgggaagattccctccccgaccgagaccttgcccttgccgacgaggcgagccgtaacgcagacctgtcaatcaccctggggacatccctccagattaggccctctggaaacctgccactcgccaccaaaagacgaggaggaaggcttgtcatcgtcaacttacagcctacaaagcacgaccgacacgctgacctaagaattcacgggtacgtggacgaagtaatgacgagattgatgaagcatctcggcctagaaatacccgcctgggacggaccccgggttctggagcgggcccttcccccactgcccagaccacccacacccaagctggagcccaaagaggagtccccaactaggatcaacggttctatcccagcaggtccaaagcaggaaccctgcgcccagcacaacggatccgagcccgccagccccaagagagagcgacccacctcccccgcgccacatagacctcccaagcgggtgaaagcaaaggccgtacccagt

SEQ ID NO: 19324 - DNA, 1065 bp, synthetic construct
  misc_feature 1..1065: note = source = /note="Description of Artificial Sequence: Synthetic coding sequence"
  source 1..1065: mol_type = other DNA
atgtccgtgaactacgccgctgggctgtctccttacgctgataagggaaaatgcgggttgcctgaaatctttgatccaccagaagagcttgagcgcaaggtctgggaactggccaggcttgtgtggcagtcttctagcgtggtgtttcacaccggcgccggcatcagtaccgcctccgggatcccggattttcgagggccacatggggtgtggactatggaagagcgtgggcttgcacccaaattcgacaccacattcgagagtgcccgccccacacagacgcatatggccctggtgcagctggaaagagtcgggttactcagattcctggtttcccagaatgttgatggcttacatgtcagaagtggatttcccagagataagcttgctgagttgcacgggaatatgtttgtggaggagtgcgctaaatgcaagacccaatacgtgagggacactgttgttggaactatgggcctgaaggctactgggcgactctgtaccgtggctaaggcacgggggttgagagcctgcagaggagagctgcgagacacaatacttgactgggaagatagtctgccggaccgggatcttgctcttgctgacgaggcctccaggaatgctgatctatctattacgctcggcacctccctccagatccgaccgtcaggaaaccttcctctggcaacaaagcggcgcgggggacgcctcgtgatagtgaatctgcagccaaccaaacacgaccgccatgccgacttgcgaatccatgggtacgttgatgaagtgatgaccagactgatgaagcatttaggactagagattccagcctgggacgggccccgggtcttggaacgggcactgccccctctgcccagaccgcccacccctaaactcgaaccgaaggaagaaagcccgacgcggataaacggttctattcccgcggggcccaagcaggaaccctgcgctcagcacaacggaagcgaacccgcatccccgaaaagggagcggcctaccagccccgcgccacacagaccaccaaagagggtcaaggcgaaggcagtcccatcc

SEQ ID NO: 19325 - DNA, 1065 bp, synthetic construct
  misc_feature 1..1065: note = source = /note="Description of Artificial Sequence: Synthetic coding sequence"
  source 1..1065: mol_type = other DNA
atgtcggtcaattacgccgccggtctgtctccatacgccgataaagggaagtgcggacttcctgagatcttcgatccaccggaagaactcgagcgcaaggtgtgggaactggcccggcttgtgtggcaaagctcgtcagtcgtgttccacaccggtgcagggatttccacggcgagcggcatcccggactttcgcgggccccatggggtgtggactatggaagaacggggactcgcgcctaagtttgacaccactttcgaatcagcgaggccaactcagactcacatggccctggtgcagctggaacgggttgggctgctccgcttcctcgtgtcccaaaacgtggatggtctgcacgtcagatcaggattcccccgggacaagttggccgaactgcacggcaatatgttcgtggaggagtgcgccaaatgcaaaacccagtacgtccgggacactgtcgtaggtacgatgggactcaaggccaccggacgcctttgcacggtggccaaggcacggggcctgcgggcttgcagaggcgaactcagagacactatcctcgactgggaggactccctcccagacagagatctcgccctggccgacgaagctagccgcaacgctgacctgagtattaccctcggaacctcactgcagatccgaccgtcaggcaatctccctctggcgaccaaacggagaggtggccgactggtgatcgtgaacctgcagcccaccaagcacgacagacatgcggatttgcgcatccatggttacgtcgatgaagtgatgactcggttgatgaagcatctcggactggaaataccagcttgggatggaccgagagtgctggaacgggcactccctcctctccctaggcctccaaccccgaagctcgagccgaaggaagagtcaccgaccaggatcaacggatcgatccctgcaggacctaaacaggagccgtgcgcgcaacataacggcagtgagcccgcgagcccgaagagagagcggcccacgtcgccggcaccgcaccgcccacccaagcgggtgaaagcaaaggctgtcccctcg

SEQ ID NO: 19326 - DNA, 1065 bp, synthetic construct
  misc_feature 1..1065: note = source = /note="Description of Artificial Sequence: Synthetic coding sequence"
  source 1..1065: mol_type = other DNA
atgtcggtgaactatgccgcgggactttcaccctacgctgataagggaaagtgtggactgccagagatcttcgacccaccggaggagctcgaacggaaggtctgggagcttgcccggctcgtgtggcagagctcgtccgtggtgttccacaccggtgccggtatctccaccgcctcgggaatcccggactttcgcggaccgcacggagtgtggacgatggaggaacggggtctggccccgaagtttgatactactttcgagtcagctagacctactcagacgcacatggccttggttcaactggaacgcgtcggacttctgcggttcttggtgagccagaatgtggatggcctgcacgtcagaagcggattccctcgcgacaagctggcggaactccacggaaacatgttcgtggaagagtgcgccaagtgtaagactcagtacgttagagatacggtcgtcggcacgatgggcctcaaggccactggccgcctgtgcaccgtcgccaaagcccggggcctgcgggcttgccggggggaactccgggacactattctggactgggaagattccctgccggacagggacttggccctggctgatgaagcgtcgcgcaacgccgacctgtcgatcacccttggcacttcgctccagatcaggccttcggggaacctgccgctcgcgactaaaagacggggaggaagattggtgattgtgaacctccagcctaccaaacacgaccggcatgctgatttgcggatccatgggtacgtggatgaagtgatgacgcggttgatgaagcacctcggactggagatcccggcatgggatggacctcgggtgctggaacgcgctcttccgccgttgcctcggccacccacccctaaactggaaccgaaggaggaaagcccaacccggatcaatggatccatccccgcgggaccaaagcaagaaccgtgcgcccaacataatggaagcgagccggcgtccccaaagcgcgaaagaccgacttcaccagctccgcacagacctcctaagcgggtcaaagcgaaggcggtgccgagc

SEQ ID NO: 19327 - DNA, 1065 bp, synthetic construct
  misc_feature 1..1065: note = source = /note="Description of Artificial Sequence: Synthetic coding sequence"
  source 1..1065: mol_type = other DNA
atgtccgtaaattatgcggctggtttatcgccctacgctgacaagggtaagtgtggcctaccagagatattcgatccccccgaagagctagagagaaaagtgtgggaattggctcggcttgtctggcaaagctcatccgtggtctttcataccggagcgggtatctccacggcttctggaattccagactttcgggggcctcatggcgtctggacgatggaggagcggggactggcccccaagttcgacacgactttcgaaagcgcaaggccgacgcagacccatatggcactcgtgcaactagaacgggttggcctgctgagatttcttgtgtcccaaaacgtagacggcttgcatgtgcgatccggtttccccagggataagcttgctgaattgcacggcaacatgtttgtggaagagtgcgcaaaatgtaagactcagtacgtgcgggatacagtggtaggaactatgggtcttaaggcgactggaaggctgtgcaccgtggcgaaggcccggggtctgcgtgcttgccgcggtgaactacgggatacgatcctggattgggaagacagtcttcctgatcgggatctcgctctggccgacgaggcgtctcgtaacgccgatttgagtattactctggggacctccctacagatacgtccatccggtaacctcccgctggcaactaagcgccgcggagggcggctcgtgatcgtaaacctacagcccaccaagcatgaccgccacgccgatttgcgaatacatggctacgttgacgaagtgatgactagactgatgaaacacctggggttagaaatcccggcatgggacggcccacgggtgctcgaaagagctctcccgccactcccaagaccaccaacccctaagctcgaaccgaaagaggagtcccctacaaggatcaatggtagcatccctgcgggccccaaacaggagccctgcgcacaacacaatgggtctgaaccagccagtccaaaacgcgagaggcccactagcccagcaccacatcggccccctaagcgcgttaaggccaaggccgttccctcc

SEQ ID NO: 19328 - DNA, 1065 bp, synthetic construct
  misc_feature 1..1065: note = source = /note="Description of Artificial Sequence: Synthetic coding sequence"
  source 1..1065: mol_type = other DNA
atgtcagtgaactacgcagccggtttgagtccctacgctgataaagggaagtgcgggctgccggaaattttcgatccaccagaggaactcgagaggaaggtgtgggaattggctcgactagtctggcagagttcctcggtcgtgtttcacactggtgcaggtatttcaacggcttccggaattcctgattttagaggcccccacggagtttggactatggaagagagaggattagcaccaaaatttgataccacgttcgaatccgcaaggcctacgcaaacccatatggctctcgttcagttggagcgtgttggcttgttgagatttttagtgtcccaaaatgttgatggtctacatgttaggtctgggttcccacgtgacaaattggctgaactacatggaaacatgtttgttgaagagtgtgctaaatgcaagacgcaatacgttagagacactgtcgtcggaacaatgggtttaaaggctaccgggcgattatgcaccgtcgccaaagcacgaggattaagggcctgcagaggtgagttgcgcgacaccatcctcgattgggaggattctttacctgatagagacctggcacttgctgacgaggcatctagaaacgctgacttatccattactttgggtacatcgttgcaaattagaccttctggcaatctacctttggctactaagaggaggggcggaagacttgtgatcgttaacctgcagcccactaaacacgaccgtcatgcagatctaagaatacatggctatgtagatgaagtaatgactaggcttatgaagcacttaggtttggaaattcccgcctgggacggccctcgcgttcttgagcgtgctctccctcctcttcctaggcctcctacccctaagctcgagcctaaggaggagtctcctactcggatcaacggaagtattcccgcaggcccgaaacaagagccttgtgcacagcataacggcagtgaaccagccagtcccaaaagagagagacccacatcacctgctcctcatagacctcctaaacgcgttaaagccaaggcagttccttca

SEQ ID NO: 19329 - DNA, 1065 bp, synthetic construct
  misc_feature 1..1065: note = source = /note="Description of Artificial Sequence: Synthetic coding sequence"
  source 1..1065: mol_type = other DNA
atgtcggtcaattatgccgccgggctttccccatacgcggacaaaggcaagtgtgggctgcctgaaatctttgatcctcctgaggaacttgaacgtaaggtttgggaactggccagactggtctggcaatcctcatctgtggtgtttcatactggcgcaggaatttccaccgcgtccggaattccagatttcagaggcccacatggggtctggacgatggaagaaaggggcttggcaccgaagtttgacaccactttcgaatccgcaagaccgacccagactcacatggcactggtgcagctggaaagagtcggacttctgaggttcctggtgtcacagaatgtggatggacttcacgtcagatcaggttttccacgagacaaactggcagaactgcacggtaatatgttcgtcgaagaatgtgcgaagtgcaaaactcaatacgtgcgtgataccgtggtgggaacgatgggacttaaagcaactggacgcctttgcacggttgcaaaggcccggggacttagggcgtgtagaggggaacttcgggatactattctcgattgggaagattcccttccagatcgcgacctggccctggcagatgaagcaagcagaaatgcagatctctcaatcaccctgggtactagcctgcagatccggccatcgggtaaccttcccctggcaactaaacggcgtggggggcggctggtgatcgttaaccttcagcctaccaagcacgacagacatgcagatttgaggattcacggttacgtggatgaggtgatgactaggctgatgaagcatctcggacttgagatcccagcatgggacggtcccagagtgcttgagagggccctccctcctcttccgcgcccccctaccccaaaacttgagcctaaggaggagtcgccaactcgcattaacggatccatccctgcgggaccaaagcaagaaccatgcgcacagcataatggctccgagccagctagcccaaaacgggaacgccccacttcacccgcaccacatagaccaccgaagcgcgttaaggcaaaggcagttccatcc

SEQ ID NO: 19330 - DNA, 1065 bp, synthetic construct
  misc_feature 1..1065: note = source = /note="Description of Artificial Sequence: Synthetic coding sequence"
  source 1..1065: mol_type = other DNA
atgtcggtgaactacgcggccggcctgtcgccttacgcggacaagggaaaatgcggcttgccagagatctttgaccccccggaagagttggaaaggaaggtttgggagctggcccgcctcgtctggcagtcctcctcggtcgtgttccacaccggtgcggggatctccacggcatcaggcattcccgatttccggggaccgcatggagtgtggaccatggaggaacgcgggctcgcacctaagttcgataccactttcgagagcgcacgtccgacccaaacccacatggctctggtgcagcttgaacgagtggggctcttgaggttcttggtttcccagaatgtggatggacttcatgtgcggtcggggttcccaagggacaaactcgctgagttgcatgggaacatgtttgtcgaagaatgcgcgaagtgtaagactcagtacgtgcgggacactgtcgtggggactatggggctcaaagctaccggtcgcctctgcactgtcgctaaagcccgtggactgagagcctgcagaggagagctccgggacacgatcctggactgggaggacagcctgcctgaccgcgatttggccctggctgacgaagcaagccgaaacgccgatctctccatcacgctgggcacttccctccaaatccgaccaagtggaaatctccctctggcgaccaagcgccgcggtggtcggctggttatcgtcaatctgcagccaacgaaacatgaccgccacgccgatctcagaatccacggatacgtggacgaggtgatgaccaggctgatgaaacacctcggactggaaataccggcctgggacggacctagggtgttggagcgtgccctgcctccgctgccgcgcccacctaccccgaaactcgaaccgaaagaagagagtccgactcgcattaacggatcgatccccgccggccctaagcaagaaccatgtgcccaacataacggaagcgaaccagcctcgcccaagcgagagcggcccacttcaccagccccgcacagacccccaaagagagtgaaggccaaggcagtgccctcg

SEQ ID NO: 19331 - DNA, 1065 bp, synthetic construct
  misc_feature 1..1065: note = source = /note="Description of Artificial Sequence: Synthetic coding sequence"
  source 1..1065: mol_type = other DNA
atgtccgttaattacgccgcaggactttcgccatacgccgacaaagggaagtgtggcctcccagaaatattcgaccctcctgaggagctggagcgtaaggtgtgggagctggcaaggttggtgtggcaatctagctccgtcgtgtttcacactggggcagggatttccactgctagcggcataccagattttcggggtccacatggagtgtggactatggaggagcgagggctggcaccaaagttcgataccacctttgaatccgcacgacccacacagacacacatggccctagttcagctggagcgagtcggtctgctgaggttcctcgtgtcacagaatgtagacggcctgcatgtaagatccggtttccccagagacaaactggccgagcttcatgggaatatgtttgtggaggaatgcgctaaatgcaagacacagtacgtgcgggacaccgtggtcggaactatgggactgaaagccacaggcaggctgtgtactgttgctaaggcaaggggcttgagggcttgccgtggcgaactccgggacacgatcctggactgggaagatagcctgccagatagagatctggcactggcggacgaggctagtcgtaacgccgaccttagtatcactctgggaactagcctgcagatcagaccgtcaggtaatctccctttggccaccaagcgcaggggcggccgcctcgtgatcgttaatcttcagcctaccaagcacgatcggcacgccgatctgcgcattcatggttatgtcgatgaggtgatgacacgccttatgaagcatcttgggttggaaatcccggcatgggacggtcctagggtgctggagagggccttacccccactaccccggccacccacccctaaactggagccgaaagaggaaagccccactcggatcaatggctccatccctgccggcccaaagcaggagccttgcgctcaacacaacggatctgaacctgcctctccaaaacgggaacgcccaacaagcccggccccccacagaccccccaaaagggttaaggccaaggcggttcctagc

SEQ ID NO: 19332 - DNA, 1065 bp, synthetic construct
  misc_feature 1..1065: note = source = /note="Description of Artificial Sequence: Synthetic coding sequence"
  source 1..1065: mol_type = other DNA
atgtcggtgaattacgctgccggactttctccgtatgcagataaaggtaagtgcggactcccagaaattttcgatccgcccgaagaacttgaacgaaaagtctgggaactagcccgactcgtgtggcaatcctcatctgttgtgtttcacacgggtgctggaatatcaactgcatctggtattccggatttccgaggacctcatggtgtatggactatggaagaaagagggttggctccgaaattcgatacaacattcgaatctgcacgcccaactcagacacacatggcactcgtccaactcgaaagggttggattgttgagattcttggtgagtcaaaacgtagatggattacatgttaggtcagggttccctcgtgacaagctggctgaactccacggtaacatgtttgtagaagaatgtgcgaagtgtaagactcaatatgttcgagatacggtggtcggcacaatgggcctgaaagccaccggacgcctttgcactgttgctaaggcaagaggactcagagcatgtcggggagaattaagggacacgattcttgactgggaggatagtctccctgacagggatctggcgcttgctgacgaagcaagtcgaaatgcagatctttcaattacacttggaacctctctacagattaggccaagcggaaatcttccgttggcaactaaacgacgaggtggaagactcgttattgtgaatctgcaaccaacaaaacacgatcggcacgcagatttgagaatccacggatatgtggatgaagttatgacacgtttaatgaagcacttgggtcttgagatcccggcatgggatggaccacgcgtactggaaagagcgttgccacctctccccagaccacctacaccaaagcttgaacccaaggaagagagcccaactcggattaatggatcgattccagcagggcccaaacaagaaccatgtgctcagcacaacggatcggaacctgccagcccgaaacgtgaacgtcccacatcccctgcaccacaccggccgcccaagcgtgtaaaggccaaggcagtcccaagc

SEQ ID NO: 19333 - DNA, 1065 bp, synthetic construct
  misc_feature 1..1065: note = source = /note="Description of Artificial Sequence: Synthetic coding sequence"
  source 1..1065: mol_type = other DNA
atgtctgtgaattatgccgccgggctcagcccatacgcggataaaggcaagtgcgggctcccggagatctttgatccgccagaagaactggagaggaaagtgtgggaactggctcggctggtgtggcagtcctcctcggtcgtgttccataccggagcgggtatttcaactgcgtcgggcatcccggacttccgcggaccgcatggagtttggaccatggaagaacgaggcttggccccgaaattcgacaccacctttgaaagcgcacgacccactcagacgcacatggctctggtccagctcgaaagagtcggactgttgcgttttctggtcagtcaaaatgtggacggactgcacgtgcgctcgggattcccgcgcgacaaacttgccgaactccatgggaacatgttcgtggaagaatgtgcgaagtgtaagacgcagtacgtacgggatactgtggtgggcactatgggactgaaggcaaccgggcgcttgtgcaccgtggccaaggccagaggtctgagagcatgccggggtgaactgagggacaccattctggattgggaagactccctgcctgacagagatctcgcccttgcagacgaggccagcaggaacgcggacctgtcgattacgcttggaacttcacttcaaattagaccatccggaaaccttccgctggccactaagcggcggggcggacgcctggtcatcgttaacctccagccgaccaagcatgacaggcacgccgaccttaggatccatggatacgtcgacgaggtgatgaccaggttgatgaagcacctgggactcgagatcccagcgtgggatggtccgagggtgttggaacgcgcgttgcctcccttgccaaggccgccgactccaaagctcgagccgaaggaggagagccccactagaatcaacggatctatcccagccggaccaaaacaagaaccatgcgcccagcacaatggctccgaacctgcatcccccaagagggaaagaccaacttcacctgcgccgcatcggccgccaaagcgggtgaaagcgaaggctgtgccatct

SEQ ID NO: 19334 - DNA, 1065 bp, synthetic construct
  misc_feature 1..1065: note = source = /note="Description of Artificial Sequence: Synthetic coding sequence"
  source 1..1065: mol_type = other DNA
atgagcgtgaactatgctgctggtctctccccatacgccgacaaagggaaatgtgggcttcccgagatcttcgatccacctgaggagctggagagaaaggtttgggagctagcacggctggtctggcagtcttcatctgtggtgtttcacaccggggcaggtattagtaccgcctccggcattcccgatttccgggggcctcatggggtgtggacaatggaagagaggggcctggcccctaaatttgacaccaccttcgaaagcgctaggccaacccagactcacatggccctcgtgcagttggaacgtgtcggactgctgcgcttcctcgtgagtcaaaacgtcgacgggctgcacgtgcgaagcggttttcctagagataaacttgctgagcttcatgggaatatgttcgttgaggaatgcgccaagtgcaaaacgcaatatgttagagataccgtggtggggaccatgggtctgaaggccaccgggagactgtgcacggtggctaaggccaggggtctccgtgcatgccgtggagaattaagagatacaatcctcgattgggaagatagcttgccggatcgcgacctggcgctggcagatgaggctagtagaaacgccgacctgtctatcactctagggaccagcctgcagattcgtccatccggcaatttgcccctggcaactaagaggagaggcggcaggcttgtgatcgttaacctgcagccaaccaaacatgatagacatgccgatctgcgcatccatggctacgttgatgaggtgatgacacgcttgatgaagcatcttggactcgagataccagcgtgggacggtcccagggtgctggagagggccctgcccccactgccaaggccaccaacaccaaagctggagccaaaagaagaatcccctacgagaattaacgggtcaatccctgccggaccaaaacaagagccgtgcgcccagcacaacggctccgagcccgctagcccaaagcgcgaaaggcctacatccccggcgccccatagaccccctaaacgcgtgaaagcaaaagccgtgccctca

SEQ ID NO: 19335 - DNA, 1065 bp, synthetic construct
  misc_feature 1..1065: note = source = /note="Description of Artificial Sequence: Synthetic coding sequence"
  source 1..1065: mol_type = other DNA
atgagcgtcaactacgcggcaggactgtcgccatatgcagataagggtaagtgtggactcccggaaatctttgatcctccagaagaactggagcgtaaggtctgggagctggcccgtcttgtgtggcaatcctcatccgtcgtgtttcatactggagccggaataagcactgcgtccggtattcccgattttagaggcccccacggcgtgtggaccatggaggaaagaggacttgcacctaagtttgataccacctttgaatcagcccgacctactcagacccacatggcactggtgcaactggagcgcgtcggattgctccgctttctcgtgtcgcagaacgtggacgggctgcacgtgcggtcgggttttccaagagacaagctggcagaactgcatggcaacatgtttgtggaagaatgtgcaaagtgcaagacccaatacgtcagagacactgttgttggtactatgggtcttaaggcaaccggacgcctttgcaccgtggctaaggccagaggattgcgcgcatgtaggggcgagttgcgtgatacgattcttgattgggaagatagccttcccgatagggatctggcacttgcagatgaagcgtcaagaaatgcggatcttagcattactcttggaacttctttgcaaattcgcccttccggaaacctcccgcttgcaaccaagcgcagagggggcagactggtcattgtcaatctccagccaaccaagcacgaccggcacgcggatctgcggatccatggttacgtggatgaggtcatgaccagactcatgaaacatttgggccttgaaatccctgcgtgggatggacctcgggtccttgaacgggcactgcctcctttgccacgtcctcctaccccgaagctggaacctaaagaagagtcgcccaccagaataaacggaagcattcccgcaggtcccaaacaagagccatgtgcacaacacaacggatccgaaccagcaagcccaaagagagagcgtccaaccagccctgcaccacacaggccgcctaagcgggtgaaggcaaaggccgtgccatcc

SEQ ID NO: 19336 - DNA, 1065 bp, synthetic construct
  misc_feature 1..1065: note = source = /note="Description of Artificial Sequence: Synthetic coding sequence"
  source 1..1065: mol_type = other DNA
atgtctgtgaactacgctgcgggattgtctccatatgcagacaaagggaagtgtggcctccccgagatctttgacccacccgaagaactagagagaaaagtgtgggaactggcacgactggtttggcaatctagctcagtggtgtttcacactggggcaggtatttctaccgcctctggaattccagactttcgggggccccatggagtttggaccatggaagaacgtggactggctcctaagtttgatactaccttcgagtcagcacggcccacacaaacccacatggctctcgtgcagctcgagcgcgttgggctacttcgcttcctggttagccagaacgttgatggattacatgttagatctgggttcccacgcgataagcttgccgagttacacgggaacatgtttgttgaggagtgtgccaagtgcaaaacccaatatgtgagagataccgtggttggcactatgggcctgaaggccactgggaggttgtgtaccgtggccaaggcaaggggtctgcgtgcttgccggggcgagctgagggatacaatcttggactgggaagactcactgccagatcgcgacctagcactcgccgatgaagcctcaagaaacgcagatctgagcattacactaggaacttctcttcaaatccgacctagcggaaatctgccgctcgcaacgaagcggcgggggggccgtcttgtaatcgttaacttacaaccaaccaaacacgacaggcacgctgacctcagaattcacggatacgttgatgaagtgatgacccgtctgatgaagcacctaggtctggaaattcctgcctgggacggccctagagtcttagagcgagccctgccccccctgcctcgtccccccaccccaaagctggagcccaaggaagagtctcccacaaggattaacggatccattccagcaggccctaagcaagaaccctgtgcccagcacaacggctccgaacctgctagcccgaaaagggaaagacccactagtcccgctccacatcgcccgcctaaaagggtcaaggctaaggctgtgccctca

SEQ ID NO: 19337 - DNA, 1065 bp, synthetic construct
  misc_feature 1..1065: note = source = /note="Description of Artificial Sequence: Synthetic coding sequence"
  source 1..1065: mol_type = other DNA
atgtccgtgaattacgcggcaggcctgtctccatacgcggataaggggaagtgcggactgccagagatcttcgatccgccggaagaattggagagaaaggtgtgggaactggcacggctggtctggcaatcgtcctcggtcgtctttcacacgggcgcagggatcagcactgcgtcgggaatccccgatttccgcggaccacacggtgtgtggaccatggaggagaggggtcttgccccgaagtttgacaccaccttcgaatccgcaaggcccactcagactcacatggcactggtgcaactggagagggtgggcctgctccgctttctggtgagccagaacgtggacggtttgcacgtgagatcaggattcccacgggataagctggcagaacttcacggaaacatgttcgttgaagagtgcgctaagtgcaagactcaatacgttagagataccgttgtgggaacgatggggctgaaggcaaccggacggctctgcaccgtggccaaagccagaggactccgagcgtgcaggggggaactccgcgacaccatcttggattgggaggactcattgcctgaccgagatctcgcgctggcagacgaggcatcacgcaatgcggatctctccatcaccctcggaacctccctgcagatccgcccgtccgggaacttgccactcgctacgaagcgccgcggcggtaggctggtcattgtgaacctgcagccgaccaagcacgacaggcacgctgaccttcgcatccatggctacgtagacgaagtgatgacgagactgatgaagcatctcggccttgagataccagcctgggacggaccacgcgtcctggagcgcgcactgcccccgctccccagaccgccaactcctaaactggaaccgaaggaggagagccctaccagaatcaatggttcaatccctgctggccctaagcaagaaccgtgcgctcagcacaacggatccgaacccgcaagcccgaagagagaacgcccaacttcaccggcgcctcaccggccgcctaagcgcgtgaaagccaaggccgtcccgtca

SEQ ID NO: 19338 - DNA, 1065 bp, synthetic construct
  misc_feature 1..1065: note = source = /note="Description of Artificial Sequence: Synthetic coding sequence"
  source 1..1065: mol_type = other DNA
atgtctgttaattacgctgccggtctcagcccctatgccgacaagggaaaatgtgggctgccggagatcttcgaccctccagaagagctggagaggaaagtctgggagctggccaggctggtctggcagtcctcaagcgttgtattccacaccggagctggaatcagcactgcgagtggaatcccagatttcaggggaccccatggagtgtggaccatggaggagagaggcttggcaccaaaatttgacactaccttcgagagcgcccgaccaacgcaaacacacatggcactggttcagctcgagagagtaggactactgaggtttctcgtcagtcagaacgtcgatggtttgcatgtccgcagcggtttccctagagataaactcgcagaattacatgggaacatgtttgttgaggaatgcgctaagtgtaaaactcagtacgttcgcgacaccgttgtaggcaccatgggtctgaaggccaccgggcgtttatgcaccgtcgctaaggcaaggggcctgcgagcctgcagaggagagttgcgggataccattctggactgggaggatagccttcccgatagggatctggctcttgctgatgaagcctctagaaacgccgacctttctataacactcggcacctctctgcaaatacggccatcaggaaatctgcctttggccacgaagcgaagaggcggccgactggtcatagtcaatctgcaacccactaaacacgacaggcatgcagatctgcggatacacggatacgttgacgaagtcatgactcgactgatgaaacatctgggcctcgaaattcctgcctgggacggcccccgggtgctcgagagggcactgccccctctcccaaggccccctaccccaaaactggagcctaaagaagaatcacctacccgtattaatggctctattccagcaggccccaaacaggaaccatgcgcgcagcataatggcagtgagccggccagtcccaagagagagagacccacaagccctgctcctcataggccccccaaacgggtcaaagcgaaagctgtgccctct

SEQ ID NO: 19339 - DNA, 1065 bp, synthetic construct
  misc_feature 1..1065: note = source = /note="Description of Artificial Sequence: Synthetic coding sequence"
  source 1..1065: mol_type = other DNA
atgtcggtcaattacgctgcaggactgtcgccgtacgcggacaaagggaagtgcggactcccggagatttttgatcccccggaggaacttgaacgtaaagtctgggagctggctagactggtgtggcagagcagcagcgtcgttttccacaccggagctggaatctcgactgcgtccggcatcccggattttagagggccccacggcgtgtggactatggaggagagaggacttgcccccaagtttgacaccacgttcgaatccgcccgcccaacgcagacccatatggcattggtgcagcttgaacgagtgggactgctgcgattcctcgttagccaaaacgtggatggactgcatgtgagatcgggattcccacgtgacaaactcgccgagctgcatggcaatatgttcgtcgaagaatgcgccaagtgtaagactcagtacgtgcgggatactgtggtggggacgatgggacttaaggcgaccggcaggctgtgtactgtcgcgaaggcacgcggactccgtgcttgcagaggtgagctgcgcgacactatcctcgattgggaggactcgctcccggaccgcgacctggccctcgcggacgaagcatccaggaacgcagacctctccatcactctgggaacttcactccaaatccgccctagcggtaacttgccgctggcgaccaagcggcggggaggacggctggtgatcgtcaacctgcagccgaccaagcacgaccggcacgcggatctgaggattcacggctacgtcgatgaggtcatgacccgcttgatgaagcacttgggcctcgaaatccctgcctgggacggcccgcgcgtgctcgaaagggccctgcctcctctgcctcgcccaccgaccccgaaactcgagccaaaggaggaatccccgacccggattaacggatcgatcccagccggtccaaagcaagaaccctgcgcccagcataatggctcagaaccggccagcccgaaaagagagcgtccgacgtccccggctccccaccgcccaccaaagagagtgaaggcgaaggcagtgccatca

SEQ ID NO: 19340 - DNA, 1065 bp, synthetic construct
  misc_feature 1..1065: note = source = /note="Description of Artificial Sequence: Synthetic coding sequence"
  source 1..1065: mol_type = other DNA
atgagcgtcaactatgcggccggcctatcaccatacgctgataaaggcaagtgtggtctgcccgagattttcgaccctccggaggaactggaaagaaaggtgtgggaactcgcacgcctggtgtggcagtcttctagtgtagtgttccataccggcgctggtatttccactgcttcaggaatccctgatttccgtggcccccacggggtctggaccatggaagaacgcggacttgcccctaaattcgatacaacattcgagtcagctcgcccaacccaaacccacatggccctagttcagctcgaaagggtcggattgctcagattccttgtttctcagaatgtagatggcctccatgtaagaagtggttttcctagagataagctcgccgaactccacgggaacatgttcgtagaggaatgcgctaaatgcaaaacacagtatgtccgcgatacagtggtgggaaccatggggctaaaggcaactggcagactctgcacggtggctaaggctaggggactgagggcatgcaggggggagctgagagatacaattcttgactgggaagacagtctcccagatcgcgacctcgcgcttgccgatgaggcaagccggaatgcagacttaagtattactctgggaacctcgcttcagatcaggccatcaggcaacctccccctggcaactaaaagaagaggcggacggcttgtgatcgtcaacctacagccaaccaagcacgacagacacgctgacctccgaatccacgggtatgtggatgaagtgatgaccaggctcatgaaacacttaggactggagatacccgcatgggatggcccccgagtgctcgagcgggccctgcccccacttccgcgccctccaactcctaagctcgaacccaaagaggaaagcccaacacggatcaacgggagtataccagcagggccaaaacaggaaccatgtgcccaacataacggtagcgaaccggcatctcccaaacgcgagcgcccgacatctcctgcacctcacagaccacccaaacgggtgaaggcaaaagcagtcccgtcc

SEQ ID NO: 19341 - DNA, 1065 bp, synthetic construct
  misc_feature 1..1065: note = source = /note="Description of Artificial Sequence: Synthetic coding sequence"
  source 1..1065: mol_type = other DNA
atgagtgtcaattacgcggccggacttagcccttatgctgacaagggtaagtgtggtctccccgaaatcttcgacccacccgaagagctggagagaaaagtatgggagttggcaagactggtttggcagtcttcttcagtcgtctttcacacaggcgctggcatctccacagccagtggaatccccgacttccgcggccctcatggagtctggacgatggaagaaagaggtcttgcgcctaagtttgatacgacattcgagtcagcacgcccgacacagacccatatggccctcgtgcagttggaacgcgtaggcctgctgaggtttctcgtatcacagaatgtggatggacttcacgtccgcagcggtttccccagagataagctggccgaactccacggaaatatgttcgttgaggagtgcgcaaagtgtaagactcagtatgttagggacaccgtggttggcactatgggcctgaaggccacaggcagactttgcaccgttgccaaagcgcgcggcctgagagcctgcaggggagaattgcgcgacacgattcttgattgggaggactccctccctgacagagatctggctctggccgacgaagccagccgcaatgcggacctcagtataaccctgggtacatcccttcaaattcgcccctccggcaatctgccattggcaaccaaaagaaggggcggccgccttgtgatcgtgaacttgcaacctactaaacatgacagacacgccgacctcagaattcatggctatgtggatgaggtaatgacccgcctgatgaaacatctgggtcttgaaattcctgcgtgggatggccccagagtgctggaaagagctttgccccccttgcccaggccgcctaccccaaagcttgagcccaaggaggagtcccctacaaggattaacggatctattccagctggacccaagcaggagccctgcgctcagcataacggaagcgagccagcttctcccaagcgcgagaggccgacatcacccgccccacacaggccgcccaagcgcgtgaaggccaaggctgtcccttcc

SEQ ID NO: 19342 - DNA, 1065 bp, synthetic construct
  misc_feature 1..1065: note = source = /note="Description of Artificial Sequence: Synthetic coding sequence"
  source 1..1065: mol_type = other DNA
atgtctgttaactacgccgccggtctgtcgccctacgctgataaggggaaatgtggacttcctgagattttcgaccctccagaagagttggaaagaaaagtgtgggaattagctcggctcgtctggcaaagctcaagcgtagtatttcataccggcgctggcatttcaaccgcgtctgggatacccgacttccgggggccacatggggtgtggacaatggaagagaggggtctggcccctaaatttgataccacatttgagtcagcgcgtcccactcaaacacacatggctctggtgcagttggaaagagtggggctacttcggttcctggtgtcccagaacgttgacgggctccacgtgcgaagcgggttcccaagggacaagctggccgagcttcatggcaacatgtttgtggaggagtgtgctaagtgtaaaacacagtacgtgcgtgacacagtcgtgggcaccatgggtttaaaggctacagggcgcctctgcaccgtggctaaggcgagaggactgagagcctgccggggtgagttgcgggacaccatcctggattgggaggacagccttcctgatcgcgacttagccctcgcagacgaggcatctcggaatgctgacttgtctatcaccctagggactagcctgcagatcaggcccagcggcaatctgccgttggcaaccaagagacgtggaggccgtcttgtaattgtcaacttacagccgaccaaacacgatcggcatgctgacttgaggatacatgggtatgttgatgaggttatgactcgcttgatgaagcacctagggcttgagataccagcctgggatgggccacgggtcttggaaagagcgctgcccccactgccacgacccccgacacccaagctggaacccaaggaggaaagtcccacgaggattaacgggagcatccccgcaggccctaaacaggagccctgcgctcagcataacggaagcgaacctgcctcccccaagagagaacgaccgacatctcctgctccgcaccgcccacccaagcgcgtgaaggccaaagctgtgccttct

SEQ ID NO: 19343 - DNA, 1065 bp, synthetic construct
  misc_feature 1..1065: note = source = /note="Description of Artificial Sequence: Synthetic coding sequence"
  source 1..1065: mol_type = other DNA
atgagcgttaactacgcagctggcctgtcgccttacgctgataagggaaagtgcggcctcccagagattttcgatcctcccgaggaattggagcgcaaagtgtgggaactcgcacgccttgtatggcagtcctcatccgtggtgtttcatactggggctggtatttcgactgcctcgggtatccctgatttcagaggtccacacggggtctggactatggaggaacgcggccttgcacccaagtttgataccacgttcgagtcggctaggccaacccaaactcatatggcgctggtgcagctcgaaagagtggggcttctgcggtttttggtgtcgcagaacgtggacggactgcacgtgaggtccggattcccccgggataagctcgccgaactccatggaaacatgtttgtggaggaatgcgctaagtgtaaaacccaatatgtgcgagacactgtggtgggaactatgggtcttaaggcgactggacgcctttgtactgtggccaaggcgcggggtctgcgagcctgtagaggtgagcttcgtgataccatcctggattgggaggatagccttccagatcgagatcttgcgcttgcagatgaagcaagcaggaacgcagacctcagcattactctgggtacgagcctgcaaattcgcccatcgggcaacctgccgcttgcaactaagcgtaggggtggtagactggtgattgttaatctccagcctaccaaacatgataggcacgcagatctcaggattcacggatacgtcgacgaagtgatgacccgccttatgaaacatctgggtcttgaaatacctgcctgggatggaccccgagtccttgagcgtgcccttcctccactgccacggcctcctactccaaaactggaacctaaagaggaatcccccacccgcattaacggatccatcccagctggaccgaagcaagagccttgtgcacaacataacggttcggagccagcatcaccaaaacgcgagcgtcctaccagccctgcacctcaccgaccacctaaacgggtcaaagccaaggccgtgcctagc

SEQ ID NO: 19344 - DNA, 1065 bp, synthetic construct
  misc_feature 1..1065: note = source = /note="Description of Artificial Sequence: Synthetic coding sequence"
  source 1..1065: mol_type = other DNA
atgtcagtgaactacgctgccgggttgtctccctatgcggacaagggaaagtgtggtctgcccgaaatctttgaccctcctgaagagcttgaacgcaaggtgtgggagctggccaggctcgtctggcaaagcagcagcgtggttttccatacgggagcagggattagtaccgccagcggcatcccagatttcagaggaccccatggggtctggactatggaagagcgggggctggcccccaaattcgacacaaccttcgagagcgcacggccaacccagacacatatggctttggtccagctggaacgggtggggttgttgcgctttctggtctcacagaacgtcgatggtctccatgtgaggtcaggcttcccccgcgacaagctggctgagttacacgggaacatgtttgtggaggagtgcgccaagtgtaagacccaatatgtgcgagacaccgtggtgggaaccatgggcctcaaggccacaggacgcctttgcaccgtggctaaggcacgcggcctccgagcctgccggggagaactgcgcgacactatcctggattgggaagactccctccccgaccgagaccttgccctggcagatgaggccagtaggaatgccgatttaagcatcactctcggcacctcgctccagattcggccatcaggaaatctgcccctagccacaaagcggcggggcggacgcctggtgatagtgaacctgcagcccaccaagcatgatcgacacgcggatctgcgcatacatggctatgttgatgaggttatgactaggctgatgaaacatctgggcctcgaaattccggcatgggatggacctcgcgtgctggagagagcattacctcctcttccccggcctccaacacccaaattggaacccaaggaagagtccccaactagaataaatggcagcatacccgcgggacccaagcaagagccgtgtgctcagcataatggcagcgagcctgcctcccccaagcgagagagacccacctctccagctcctcacaggcccccaaagagagtgaaagccaaagcggtcccttcc

SEQ ID NO: 19345 - DNA, 1065 bp, synthetic construct
  misc_feature 1..1065: note = source = /note="Description of Artificial Sequence: Synthetic coding sequence"
  source 1..1065: mol_type = other DNA
atgtcggttaattatgccgctggtctgtctccctatgcagacaaaggcaagtgcggtttgcccgagatatttgacccccccgaagagctggagcggaaagtgtgggaactcgcgcggctcgtgtggcagagctcaagtgttgtcttccatacaggggcagggatctctacagcatcaggtattcccgacttccggggaccccacggggtctggacgatggaggagcgggggctggctcccaagtttgatacaactttcgagtccgcccggcctacccagacgcacatggccctggtgcaattggagcgcgtcggccttctgcgattcctggtttcccagaatgtcgacggtctgcacgtccgtagcggcttccctagggataagctggccgagttacacggtaacatgttcgtggaagaatgcgccaagtgtaagactcaatatgtgcgagatactgttgtcggcactatgggtctgaaggctaccggcaggctctgcactgtggcaaaggcccggggtcttcgcgcttgtcgcggcgaattaagagataccatccttgattgggaggattcgctgcccgacagagacctcgcgctcgccgacgaggcttcacgcaatgctgatctgagcatcaccctggggacctctctccagattcgcccttctggcaacctgccgcttgcaacaaagcggcggggcggtagactcgtcattgttaacctacagcccacaaagcacgaccggcatgccgaccttcgcattcatggttatgttgatgaggtgatgacacgcttgatgaaacatctcggcttggagattcctgcctgggacggcccccgcgtcctggagcgtgcccttccaccccttccacgtcctccgacacctaagttggagcccaaggaggagtcaccaactcggataaatgggtcaattccagcagggccaaaacaggaaccctgtgcgcaacataatggctccgagcccgcctcaccgaagcgcgaacgcccgacatctccagctcctcacagaccccctaagagagtgaaagcgaaagctgtcccttct

SEQ ID NO: 19346 - DNA, 1065 bp, synthetic construct
  misc_feature 1..1065: note = source = /note="Description of Artificial Sequence: Synthetic coding sequence"
  source 1..1065: mol_type = other DNA
atgtcagtgaattacgcagctgggctgtccccatacgccgataagggaaagtgcggattgcccgagattttcgatccccccgaagaactcgagcggaaggtctgggaattggcacggctcgtctggcagtcgtcatcagtcgtgtttcataccggagccggaatttcaactgcctctggtattcccgattttaggggcccacacggagtgtggactatggaggaacgaggactggcaccgaagttcgatactacttttgaatcggcacggcctacgcaaactcacatggcgctcgtgcaactggagcgagttggacttctgcggtttcttgtgtcacagaacgtggacggccttcatgtgcgttcgggatttccgcgcgacaagctggctgaactgcacggtaatatgttcgtggaagaatgcgcaaagtgtaaaactcaatacgtccgggacaccgtcgtgggtacgatgggactgaaggccaccggaaggttgtgtaccgtggcaaaggcgagaggtcttagagcgtgtcgcggagaacttcgggataccattcttgattgggaggacagccttcctgaccgcgatttggcacttgcagacgaggctagcaggaatgcagatcttagcatcactcttgggacgtccctccagatcagaccttccggaaacctgcccctggccactaaacggcggggaggacgcttggtgatcgtcaaccttcaacctacgaaacacgatagacatgccgatctgagaatacatggctacgttgatgaagtgatgactcgacttatgaagcatcttggactggaaatacctgcgtgggatggtccaagagtgcttgaacgtgcactgccacctcttcctcggcctccaacccctaaactggagccaaaagaagagagccctacgcgcattaatgggtcaatcccggcaggaccaaagcaggaaccatgcgcccagcataacggctccgagccagcatcccctaagagagagcgcccaacctcacctgccccacaccgccccccaaagagggtcaaggcgaaggcagtgccttct

SEQ ID NO: 19347 - DNA, 1065 bp, synthetic construct
  misc_feature 1..1065: note = source = /note="Description of Artificial Sequence: Synthetic coding sequence"
  source 1..1065: mol_type = other DNA
atgtcggtgaactacgccgctggactgtcaccgtacgcagacaaaggcaagtgcgggctgccggagattttcgatcctccggaagaattggaacgtaaggtgtgggagctggcgcgcctcgtctggcagagttcatctgtcgttttccacaccggagccggaatctccaccgcgtcaggtattccggacttcagaggaccgcacggagtgtggactatggaggaacgcggtctggccccgaagtttgataccaccttcgagtccgcccggccgacccaaacccacatggccctggtgcaactggagcgcgtcggactgctcagattccttgtctcccagaatgtggatggactccacgtccggtctggcttcccgagagacaaactggccgaactccacggtaacatgttcgtggaggaatgtgcgaagtgcaagacgcagtacgtgagagataccgtggtgggcacgatgggcttgaaggcaaccggaaggctctgcactgtggcaaaggctcgcgggctgcgagcctgccgaggcgagctgcgcgacacgatcctcgactgggaggactccctcccagaccgggacctggcgctggctgacgaggcctcgcgcaacgcagatctgtccattaccctcggaacttcgttgcagatccggccttcgggcaacctgccgctggcaactaaaaggcggggagggagactcgtgatcgtcaacctccagcctactaagcatgacaggcacgccgacctgcggatccatgggtatgtcgatgaagtcatgacccgcctgatgaagcatttgggtctggaaatcccggcgtgggacggaccgagagtgctcgagcgcgccctgcctcccctgccccggccgccgactccgaagctcgaaccgaaggaagaaagcccgacccggatcaatggatcaattcctgcaggacccaaacaagagccttgtgcccaacataacggaagcgagccggcatcgccgaaacgggagcgccctacctccccggccccgcatcggcctcccaaaagagtgaaggccaaggcagtgccgtct

SEQ ID NO: 19348 - DNA, 1065 bp, synthetic construct
  misc_feature 1..1065: note = source = /note="Description of Artificial Sequence: Synthetic coding sequence"
  source 1..1065: mol_type = other DNA
atgagcgttaactacgcagccggactttcgccgtacgcagataaggggaagtgcgggctcccagaaatctttgaccctcctgaagaacttgagcgcaaggtctgggaattggcacgtctggtgtggcaatcctccagcgtggtgtttcataccggagcaggaatttccacggcctcggggattcccgattttagaggtccacacggtgtgtggactatggaagaacggggactcgcccctaaattcgatacgacgtttgaatctgcacggcctacccaaacccatatggcacttgtgcagttggaacgcgtgggactcctgcgattcctcgtgtcccagaatgtggacggcctccacgtgagaagcggattccctagggataaacttgctgaactgcacggaaacatgttcgtggaagagtgtgctaagtgtaaaacccaatacgtcagagacactgtcgtcggaactatgggtctgaaggctaccggtagactgtgtactgtggcgaaggcaagaggtctgcgggcatgtagaggggaactcagggacactattcttgattgggaggactcacttcctgacagagacttggccctggcagatgaagcgtctcgcaatgcagatctgtccataactcttgggacctccctccaaattcgaccttctggtaatctccctctggcaaccaagcggagaggaggtagacttgtgattgtgaatctgcagcctaccaagcatgaccgccatgcggatctgcggattcatggttacgtggatgaagtcatgactcgcctgatgaagcatctcggcctcgagatccctgcgtgggacggtccacgcgtcctggagcgtgcactgcccccacttcctcgacctcctactccaaaactcgaacccaaggaagaaagcccaacccgtattaacggctcaattccagcgggccctaagcaagaaccttgtgcacagcataatggttccgaacccgcatcgccaaagcgggaaagacctacctcacccgcgccacaccgacccccaaagagagtcaaagcgaaggcagtgccaagc

SEQ ID NO: 19349 - DNA, 1065 bp, synthetic construct
  misc_feature 1..1065: note = source = /note="Description of Artificial Sequence: Synthetic coding sequence"
  source 1..1065: mol_type = other DNA
atgtccgtcaactacgcggctggactcagcccttacgcggataaaggaaagtgcggcctcccggaaatctttgacccaccagaagaactggagaggaaagtctgggagctggcccgcctcgtctggcagtcctcctcagtggtgttccacacgggagcgggaatctcgacggcaagcggcatcccggattttagagggccgcatggcgtgtggactatggaagagagggggctggccccaaaattcgacaccacctttgaaagcgcccggccaactcagactcacatggcgctcgtccaacttgagagagtcggactgctgcgcttcctggtgtcacagaacgtggatggactgcacgtgcgctctggattccctagagataagctggccgaactccacgggaacatgttcgtcgaagaatgtgcgaagtgcaagacccagtacgtccgggatactgtggtcggcactatgggactcaaggctaccggaagattgtgcactgtggccaaagcgcgagggttgcgcgcctgtcggggagaactcagagatactatcctcgactgggaagattccctcccagatcgggacctggccctcgcagacgaagcgagccgcaatgccgacttgtcgatcacgcttggcacctccctccaaatccgaccaagcggcaatctgccgctggccaccaagaggcggggcggtaggctggtcattgttaacctgcaacctaccaagcacgatagacatgcggatctccggatccacggatacgttgacgaggtgatgactcgactcatgaaacacctggggctcgagatcccggcctgggatggcccacgggtgctcgagagggcactgccgccgctcccgcgcccaccgactccgaagctggagccaaaggaggagtcaccgacccgcatcaacggatcaatcccggcaggaccaaagcaagagccttgcgcacagcataatggaagcgagccggcatcgcccaagcgggagcggcctacctccccagccccacaccggcccccgaagcgcgtgaaggccaaggcggtgccgtcg

SEQ ID NO: 19350 - DNA, 1065 bp, synthetic construct
  misc_feature 1..1065: note = source = /note="Description of Artificial Sequence: Synthetic coding sequence"
  source 1..1065: mol_type = other DNA
atgtctgtcaactacgcagcagggttgtccccttacgccgataagggcaagtgcgggttgcccgaaatcttcgatcctccagaggagctggagcgcaaagtatgggagctcgctagactcgtctggcagtcgtcttcggttgtttttcacacgggcgcaggcatcagcacggcttccggcatccccgactttcgcgggcctcacggcgtctggaccatggaggagaggggcttggcccctaagtttgatacaacatttgagagtgcacgccccacacaaacacatatggcactcgtgcagctcgagcgcgtcggcctgctccgctttctcgtctcccagaatgtggacgggttgcatgtgagatcgggctttccgagagacaagttggccgagttacacggaaacatgttcgtcgaggagtgcgccaagtgcaagactcagtatgtgcgcgacacagtggtcggaactatgggcctgaaggctaccggcaggctctgtacagtggccaaggcgcgggggttgagagcttgtcgtggggaattgagggacacaattctggactgggaggactccctgcccgaccgcgacttggcgctggccgatgaggcgagcagaaacgctgacttgtcaatcaccttaggtacgtccctccagattagaccatctggtaacctgcctctagctacaaaacggcgagggggtcggttggtgatagtcaacttgcaaccaaccaaacatgaccgacatgccgatctgcggattcatggatacgtggacgaagtaatgacccgcctgatgaagcacttggggctggagatcccggcctgggacggacctagggtcctcgagagggccctgccccctttacctagaccccctaccccaaagcttgagcctaaggaggagtccccaacccgcataaacggttctatccccgccgggcctaagcaggagccctgcgcgcaacacaacggaagcgaacccgcatctcccaagagagagcggccaaccagccccgcgccccacaggccgcccaaaagagtgaaggcgaaggctgtgcctagc

SEQ ID NO: 19351 - DNA, 1065 bp, synthetic construct
  misc_feature 1..1065: note = source = /note="Description of Artificial Sequence: Synthetic coding sequence"
  source 1..1065: mol_type = other DNA
atgtcagtgaactacgctgccgggttgagtccttacgcagataagggtaaatgtggcctgcctgaaatctttgacccgcctgaagagcttgagagaaaggtctgggaactcgcccgcctggtctggcagtccagttccgtggtctttcacaccggtgcaggaatcagcactgcttccggaattcctgacttcagaggtcctcacggagtctggaccatggaggaaagaggtttggcaccaaaattcgatacgaccttcgaatccgcccggccaactcaaacccatatggcactcgtgcaactcgaacgagtggggctgctccgatttctggtgtcacagaacgtggacgggcttcatgtgaggagcgggtttcctcgagacaaacttgcggaattgcacggaaacatgtttgtggaagagtgtgcgaagtgtaaaacccagtacgtgcgcgatactgtggtcggaaccatgggcctgaaggcaactggacggctgtgtactgtggcaaaggcccgcggattgcgagcatgtcgcggtgaacttcgggatactattcttgattgggaagatagccttcctgatagagatttggcacttgcagatgaggcatcacgtaatgcagacctttctattacccttggaacttcgctgcaaattcgccccagcggaaacctgcctcttgcgaccaagcggaggggtggccggcttgtgatagtgaatcttcaacctaccaagcatgatagacatgcagatctgcggatacatggatacgtggatgaggtgatgaccagacttatgaagcatctgggcttggaaattcctgcctgggatggtcctcgtgtcctcgaacgggcactcccgcctcttccacgccctccgacccctaagctcgagccgaaggaagaatcacccactcggatcaacggatcgattccagccggacctaagcaggaaccttgcgcgcaacacaacggctccgagcctgcttcccctaagagagaaagacctacctcccctgcaccacatagaccaccaaagagagtgaaagcaaaggctgtgccatcg

SEQ ID NO: 19352 - DNA, 1065 bp, synthetic construct
  misc_feature 1..1065: note = source = /note="Description of Artificial Sequence: Synthetic coding sequence"
  source 1..1065: mol_type = other DNA
atgtcagtgaattacgctgctggcttgagcccctacgcagacaaggggaagtgcggcctgccggaaatcttcgatccgccagaggaactggagcgaaaagtgtgggaactggctcggctggtgtggcaatcatcgtcagttgtgtttcacacgggagcgggaatttctactgcctcagggatcccagacttcaggggaccgcacggagtgtggaccatggaagaaagaggactcgcacctaagttcgatactacttttgaatccgctagaccaactcaaacccatatggcgctcgtgcagctggagagggtcgggcttctcagattcttggtgagccagaacgtggatggactgcacgtgagatcgggattcccaagagataagctcgccgaactgcacggaaatatgttcgtggaagagtgtgcgaagtgcaaaacccaatacgtaagggacaccgtcgtcggaaccatggggttgaaagccactgggaggctctgtaccgtcgctaaagccaggggactgcgcgcctgccggggagaattgagggacaccattctggattgggaggactcgcttcctgaccgtgacctggccctcgctgatgaagccagccggaacgcagacctgtcgattaccctgggcacctccctgcagattcgtccgtccggcaacctgccgcttgcgaccaagcggcgcggaggaagattggtgatcgtcaaccttcagcctactaagcacgatcgccatgcggacttgcgaatccatggctacgtggacgaggtgatgacgagactcatgaaacacctgggactggagatcccggcctgggacggaccccgtgtcctggagcgggccctgccacctctgccgcgtccaccaaccccgaaactcgaaccaaaggaagaatccccgacgcgcatcaacggttcaatcccagctggcccgaagcaggaaccttgcgcacagcacaatggcagcgagccagcctcccctaagcgggaacgcccaacctccccagccccacatcgcccgccgaagcgcgtcaaggctaaggcggtgcccagc

SEQ ID NO: 19353 - DNA, 1065 bp, synthetic construct
  misc_feature 1..1065: note = source = /note="Description of Artificial Sequence: Synthetic coding sequence"
  source 1..1065: mol_type = other DNA
atgagcgtgaactacgcagctggcctctccccatacgcagataaaggcaagtgcggccttcccgagatatttgatccgcctgaagagttggagcgcaaggtgtgggagcttgcgcggctcgtctggcagtcctcgtcggtcgtttttcataccggagcgggtatctccaccgcatcgggcattcccgattttagaggtccccatggtgtgtggaccatggaagaaagagggctggcccccaagtttgacaccacctttgaatcggccaggcccacccagacccacatggcactggtccaacttgagcgagtaggtctgctgcggtttctggtgtcgcagaacgtggatggccttcacgtgaggtctggattccctagagataaactcgccgaactgcacggtaatatgtttgtcgaggaatgcgcaaagtgtaagacgcaatacgtgagagacactgtggttggaaccatgggactgaaggcaactgggaggctctgcaccgtggcaaaggcacgcgggctcagggcctgtaggggagagcttagagataccattctcgactgggaggactcactgccggatcgggatctggcactggcggacgaggctagccgcaatgcagacctttcaattaccctgggcacttcccttcagataagaccatccgggaacctcccactggcaactaagagaagaggaggccggcttgtgatcgtgaatctgcaaccaaccaagcatgaccggcatgccgaccttcgaatccacggttacgtggatgaagtgatgactaggctcatgaagcatctgggactcgaaatccctgcgtgggatgggccacgcgtgctcgaacgcgcactgcctcctctgccccgaccaccaacccctaaactcgaacccaaagaagaatcacctactcgcattaatggttccatacctgcaggaccaaaacaagagccctgtgcgcaacataacggtagcgagccagcatcacctaagagagaacgcccaacgtcacctgcacctcataggcctccaaaacgcgtgaaggcaaaggcagttccttcc

SEQ ID NO: 19354 - DNA, 1065 bp, synthetic construct
  misc_feature 1..1065: note = source = /note="Description of Artificial Sequence: Synthetic coding sequence"
  source 1..1065: mol_type = other DNA
atgagcgtgaactacgccgccggactgtcaccgtacgctgataagggaaagtgtggactcccagaaatcttcgacccgcctgaagaactggagaggaaggtgtgggaactggcccggctggtgtggcagtcgtccagcgtggtctttcacactggcgccggaatctccaccgcgtccggaattccagatttccgcggcccgcacggagtgtggaccatggaggaacgcggtttggcccctaagttcgacaccaccttcgaatccgccagacctacccagacccatatggcgttggtgcaactcgagcgcgtgggtctgctgcgcttcctcgtgtcccaaaatgtcgatggactccacgtgcgctcgggattccccagagacaagctggcggaactgcacggaaacatgtttgtggaggagtgcgcaaaatgcaagacccagtacgtgcgcgacactgtggtgggaaccatgggactgaaggcgactggacggctgtgtaccgtggcgaaggcccggggcttgagagcttgtaggggcgaactgagagataccatccttgattgggaagattcattgcctgaccgcgaccttgcgctcgctgacgaagcctcccggaatgccgacctgtccatcacccttggaacttccctgcagatccgcccgagcggcaacctgccgttggccaccaaacgccgcgggggccgcctcgtgattgtcaatctccagcccaccaagcacgaccggcacgctgatcttcggatccatggatacgtcgatgaagtcatgacccggctcatgaagcatctcggcctggaaattcctgcatgggacggccctcgcgtgctcgagcgagccctgccaccattgccgcgaccgccgacgccgaagctcgaaccgaaggaggagagcccaactagaattaacggatcgatccctgcgggaccaaagcaggagccatgcgcgcaacacaacggcagcgagcctgcatccccgaaacgggaacgcccgacttcgcccgcccctcaccggccgccgaaacgggtgaaagccaaagcagtgccgagc

SEQ ID NO: 19355 - DNA, 1065 bp, synthetic construct
  misc_feature 1..1065: note = source = /note="Description of Artificial Sequence: Synthetic coding sequence"
  source 1..1065: mol_type = other DNA
atgtccgtgaattatgccgcaggcctcagcccttacgcagacaagggaaaatgcggactccccgagatcttcgatccccctgaggaactggagcgcaaagtatgggaactcgccaggctagtatggcagagtagctctgtcgtgtttcacacgggggccggaatttccaccgctagcggaattcccgactttcgagggcctcatggcgtctggacaatggaggagcggggcctggccccgaagtttgacactaccttcgagagcgcccgcccgactcagactcatatggcactggtccaactggagagggtgggcctgctgcgatttttggtctcccagaacgtggacggactgcacgttcgatcagggtttccaagagacaagctggccgaactgcacggaaatatgtttgtggaagaatgtgctaagtgtaaaacgcagtatgtgagagataccgtggtgggcactatgggtctaaaggccacgggcagactgtgcacggttgcaaaggctagggggctgcgggcttgccggggcgaactgcgcgatacaatcctggattgggaggattcactgccggatagggacctggccttggccgacgaggcctctaggaatgccgacctcagcattacgctgggaacttccctgcagattagaccgtcgggaaatctgcccctggcgactaagagacggggcgggcggctcgtcatcgtgaacctccagccaactaagcacgacaggcatgcggatttacgtattcacggctacgtggatgaggttatgaccaggctcatgaagcatttgggcttagagattccggcttgggatgggcctcgcgtcttagagcgtgccctccctcctctacccaggcctcctactcctaagctggagcccaaggaagaatcccctacccgtattaacggttcaataccggccggcccaaagcaagaaccctgtgcgcagcataacggatccgaacctgcctcacccaagagagaacggcctacatctcccgcccctcatcgaccaccaaagagggtgaaggccaaggcagtgccctca

SEQ ID NO: 19356 - DNA, 1065 bp, synthetic construct
  misc_feature 1..1065: note = source = /note="Description of Artificial Sequence: Synthetic coding sequence"
  source 1..1065: mol_type = other DNA
atgtccgtcaactatgcagcagggctcagtccatacgcagataaaggcaagtgtgggctcccagagatttttgatcctcctgaagaactcgagcggaaggtttgggaactggctagactagtttggcaaagcagcagcgtcgtgtttcacacaggcgcaggcatcagcaccgcctccggcatcccagacttccgcggaccccatggcgtatggaccatggaagagagaggcctggcacctaaattcgacactacattcgagtctgcccggccaacccagactcatatggccctggtgcagctggagcgggtgggccttctcagattcctggtttcccagaatgtcgatggactgcatgtcaggtccggctttcccagagataaactcgctgagctacacggaaacatgttcgtggaggagtgcgctaaatgtaagacgcaatacgtgagggacaccgttgtcggaacaatgggattgaaggcaaccggaagactctgtactgtggccaaagcccgaggacttagggcgtgccggggtgagctgcgagacacaattctggactgggaagacagtctgcccgaccgcgacctggcacttgcagatgaggcaagtcgcaatgcagatctgagtatcactctgggaacttccctgcagatcaggccatctggaaatctgcccctggctactaagcgaaggggcggaagattagtgattgttaacctccaaccaaccaaacacgaccggcacgccgacttgcgtattcatggctacgtcgacgaggtgatgacccgactgatgaagcacctcggcctcgagattcctgcttgggatggaccccgcgtcttagaaagagccttacccccgctgccacggccgccaactcccaagctagagccaaaggaggagtcacctactcgaatcaacggaagcatccctgctggccccaaacaagaaccctgcgcccaacataatggctctgaacccgcctctccaaaacgcgagaggcctacatcccctgctccacaccgcccaccaaaaagggtgaaagccaaggcggttccctct

SEQ ID NO: 19357 - DNA, 1065 bp, synthetic construct
  misc_feature 1..1065: note = source = /note="Description of Artificial Sequence: Synthetic coding sequence"
  source 1..1065: mol_type = other DNA
atgagcgtgaactatgccgcgggactgtccccctacgcggataaggggaagtgtgggctgccggagatcttcgatcctccggaagaactggaacgcaaggtgtgggagctggcccgcctcgtgtggcaatccagctcggtcgttttccacactggagcaggaatctcaactgcatctggcatacccgatttcagaggaccacacggcgtgtggactatggaggaaagaggactggcacctaagttcgataccactttcgagtcggcaagaccgactcagacccacatggcactggtgcaactggagcgcgtgggcttgttgcgcttcctggtcagtcaaaacgtggatggactccatgtccggagcggatttcccagagacaagctcgccgaacttcacgggaatatgtttgtggaggaatgcgcaaagtgcaagacccagtacgtccgcgataccgtggttggaaccatgggactgaaagctaccgggcgactgtgcacggtggccaaagcaagaggattgagagcctgcaggggcgaactccgcgataccattctggattgggaagattccctgccggaccgggaccttgccctcgcggacgaggcgtcgagaaacgcagacttgtcaatcaccctcggtacttcgctgcagatccggccttccggaaacttgcctctggcgacgaagcggcgcggaggacgcctcgttatcgtcaacctccagccgactaaacatgatagacatgccgacctgcgaatccatgggtatgtcgacgaggtcatgactcggctgatgaaacacctcggattggaaatcccagcttgggacggccctcgcgtgctcgagcgcgctctgcccccgctgccacggccgccaaccccgaaactcgagccgaaggaagaaagcccaacccgcatcaacggatccatcccggctggaccgaagcaggagccgtgtgcccagcacaacggatccgaaccagcgtcgccgaaaagagaacgccctacttcacccgctccgcatcgaccgcctaagcgcgtgaaggccaaggctgtgcccagc

SEQ ID NO: 19358 - DNA, 1065 bp, synthetic construct
  misc_feature 1..1065: note = source = /note="Description of Artificial Sequence: Synthetic coding sequence"
  source 1..1065: mol_type = other DNA
atgtcagtgaactacgcagcaggactgtccccttacgccgacaagggtaagtgcggcctgccagagatttttgatccccctgaagagcttgaacgtaaggtgtgggagcttgctcggcttgtgtggcagtcctcgtcggtggtctttcatactggagccgggatttcgaccgcaagcggtattcctgattttagaggaccccacggagtgtggaccatggaagaacggggactggcacctaagtttgataccacttttgaatccgcacgacccactcagactcatatggcacttgtgcaactggaacgcgtcggtctgctccgttttttggtatcgcagaacgtcgatggactccatgtccgctctggctttccacgcgataagctggcagaacttcatggcaacatgtttgttgaagaatgtgcaaagtgtaagactcagtacgtgcgcgacacggtggtcggtaccatgggcctgaaagcgaccggcagactttgtaccgtggccaaggcacgcggtctgagagcgtgtaggggagaacttcgagatactatccttgactgggaagatagtctgccggaccgcgatctggctctggcagacgaggcttcgcggaacgcagatctttcgatcacccttggaacctcacttcagatccgaccatcgggtaaccttcccctggccactaagaggagaggcggcagacttgtgattgtgaatctccaacctaccaagcatgatagacacgcagatctccgcatccatggatacgtcgatgaagtcatgactcgacttatgaaacaccttggcttggagatcccagcatgggacggaccgagagtgctggaaagggcgcttcccccactgccaagacctcccactcccaagctcgaaccaaaggaagagtcccctacgcgcattaacgggtcgattcccgccggacctaagcaggaaccttgtgcccaacataatgggtccgaaccggcatccccgaaaagagagcgcccaacgagccccgcaccacatcgaccacctaagagagtcaaggcaaaagcagtcccatcc

SEQ ID NO: 19359 - DNA, 1065 bp, synthetic construct
  misc_feature 1..1065: note = source = /note="Description of Artificial Sequence: Synthetic coding sequence"
  source 1..1065: mol_type = other DNA
atgtcagtcaattacgcagctggactgagtccatatgccgataagggcaagtgcggcctgcccgaaatttttgaccccccggaagagctagagcgcaaggtatgggaactcgctagactagtttggcagtccagctctgtcgtcttccataccggcgcaggcatatcgaccgcctctggcatccctgacttccgtggccctcatggcgtgtggaccatggaggaaaggggcctggcgcctaagttcgacaccaccttcgagtccgccagaccaacccagactcacatggcacttgtgcagctcgagcgcgtgggccttcttcgattcttggtaagccaaaacgtcgacggcttgcacgtacgttcaggctttccacgcgataagttggcggagctacatggcaatatgttcgtggaggagtgtgccaaatgtaagacacagtacgtgcgtgatacggtcgtgggaacaatgggcttgaaggccacgggacggttgtgtactgttgctaaggcccggggcttgcgagcgtgccgtggagagttgcgagatacaatcctggactgggaagactctcttccagatcgcgaccttgcgttggccgacgaggcctcgcggaacgcagatctctcaatcaccctgggcacgtcacttcaaatccggccctcaggcaacctgcccctagcgacgaaacgtcgagggggaagactcgttattgtgaacctgcaaccaaccaaacatgaccgtcacgctgacctgcgtatccacggctatgtcgacgaagtcatgacacgacttatgaagcacctaggcctggagataccggcttgggatggcccccgggtgctcgagcgcgcgttgcccccgctgcccaggccccccacgccgaagctcgagcccaaggaggaaagccccacaaggattaacggcagcatccccgccggccccaagcaggagccctgtgctcagcacaacggctcggaaccggcctcccctaagagagagcggccaacctcaccagccccgcataggcctccgaagagagtcaaggcgaaggctgtaccatct

SEQ ID NO: 19360 - DNA, 1065 bp, synthetic construct
  misc_feature 1..1065: note = source = /note="Description of Artificial Sequence: Synthetic coding sequence"
  source 1..1065: mol_type = other DNA
atgagcgtcaattacgcagcagggctgtcaccttacgcggataagggaaaatgtgggcttcctgagatattcgaccctccagaggaacttgagaggaaggtgtgggaactggcaaggcttgtctggcaatcgtcgtccgtggtctttcatactggcgcaggcatctccaccgccagcggaattccggattttagaggacctcatggtgtgtggactatggaagaaagaggacttgctccaaagtttgataccacctttgagtccgcccgccctactcagactcatatggcactggtccaattggaaagggttggtctgctgcgctttctcgtgtcacaaaatgtcgatgggttgcatgtgagatccgggtttcctagagataaactcgcggagctgcacggaaacatgttcgtggaggagtgtgcaaagtgcaaaactcagtatgtgcgtgatactgtggtggggacgatgggactgaaggcaacgggacgcctgtgtactgtggcaaaggccagaggactcagagcctgccgtggagaattgagagatactattctggattgggaggactcacttccagacagggatctggcgcttgctgatgaagcctcccgcaatgccgatctgagcattacgttgggcacgagccttcaaatcagaccttccggcaacctgcctcttgccactaagcggcgtggggggaggctggtgattgtgaaccttcaacccactaagcatgatcgtcatgccgacctcagaattcacggttacgtggatgaagtgatgactagacttatgaagcatctgggactggaaattcctgcgtgggatgggcctagggtccttgaaagagctctgcctccactgcctagaccaccaactccgaaacttgaaccaaaggaagagtccccgacccggattaatggttccatcccggcaggtcccaagcaggagccctgtgctcaacataacggtagcgagcctgcatcgccaaagcgagaacgcccaacttcgccggcgccacaccgaccacccaagcgcgtgaaggccaaagctgtgccttca

SEQ ID NO: 19361 - DNA, 1065 bp, synthetic construct
  misc_feature 1..1065: note = source = /note="Description of Artificial Sequence: Synthetic coding sequence"
  source 1..1065: mol_type = other DNA
atgtctgtcaactacgcagcaggactgtccccatatgctgacaaagggaagtgtggacttccagagatatttgacccacctgaagagctcgaaaggaaggtgtgggaattggcccgcttggtgtggcaatcgtcctccgtcgtgttccacacgggtgcaggaatttcgacggcctccgggatccccgattttcggggccctcacggcgtgtggaccatggaggaacggggcctggcaccaaagttcgatactacttttgaaagcgccagacccactcagacccatatggcacttgtccagcttgagagagtggggctcctgcggtttttggtatcacagaatgtggatggtctgcacgtcagatcaggattcccaagggataagctggcagaattgcatggtaacatgtttgtggaggaatgcgcaaagtgtaagacccaatacgtccgggataccgtggtgggtactatgggccttaaggcaaccggccggctctgtactgttgcgaaagccagaggacttcgtgcttgtcgcggtgagctgcgggatacgattctcgattgggaagatagccttcccgatcgagatctcgcgcttgctgatgaggcctctcggaatgcggacctgagcatcaccctgggaacttctctgcagattcgaccatccggtaacttgccgctggcaacgaagaggagaggaggtcgcttggtcattgtaaacctgcaacccactaaacatgaccgacatgcagacctgcgcatccacggatacgttgacgaggtcatgaccagactgatgaaacatctcggccttgaaattccagcatgggacgggccaagagtgcttgaaagagcactgccccctcttcctaggcctcctactccaaaacttgaacccaaggaagaaagccctacccgcattaatggaagcataccagctggaccaaagcaagaaccttgcgcccaacacaacgggtccgaacccgcctcacctaaacgagagaggcctacctcaccggcaccccatcgcccccctaaaagggtgaaagctaaggcagtgccatcg

SEQ ID NO: 19362 - DNA, 1065 bp, synthetic construct; identical to SEQ ID NO: 19336
  misc_feature 1..1065: note = source = /note="Description of Artificial Sequence: Synthetic coding sequence"
  source 1..1065: mol_type = other DNA

SEQ ID NO: 19363 - DNA, 1065 bp, synthetic construct
  misc_feature 1..1065: note = source = /note="Description of Artificial Sequence: Synthetic coding sequence"
  source 1..1065: mol_type = other DNA
atgtcggttaactacgcagcaggactgagcccatacgctgataaggggaaatgcggactcccggaaatctttgacccgccggaagagctggaacggaaagtctgggaactggcgcggctcgtgtggcagtccagctccgtggtattccacactggagcaggaatcagcacggctagcggtattcccgatttccgcggacctcacggagtgtggaccatggaggaacgcggcctggccccgaaatttgatactactttcgagagcgcccgcccaactcaaacccacatggcgctggtgcaactggaaagagtgggtttgcttcgcttcctcgtctcgcagaacgtggatggtctgcatgtcaggtccggattcccgagggacaaactggcagagctgcatggaaacatgttcgtggaggagtgcgctaagtgcaagacccagtatgtccgcgatactgtggtgggaaccatggggctcaaagcgaccggaaggctctgcaccgttgcaaaggcacggggactcagagcgtgccgcggagaactgagagatactattctggattgggaggactcgctgccggacagagatctggctctcgcagacgaagcaagcaggaacgccgacttgtccatcacgctcgggacctcgctgcaaatccggccatcaggaaacttgccgctcgcaaccaagcggcggggaggacgtcttgtgattgtgaatctgcagcctactaaacatgatagacacgctgacctgcgcatccacgggtacgtggacgaggtcatgactcggctgatgaagcatctggggttggaaatcccggcatgggacgggccaagagtgctcgaaagggcactgccaccgctcccacggcccccaacccctaagctggagccgaaggaggaaagccccactcgcatcaacggttctattccggccggtcctaagcaggagccatgtgcccaacacaatggctcggaacccgcgagcccaaagagagaacggccgacctctccggcaccccaccggccgccgaagcgggtgaaggccaaggctgtgccatcc

SEQ ID NO: 19364 - DNA, 1065 bp, synthetic construct
  misc_feature 1..1065: note = source = /note="Description of Artificial Sequence: Synthetic coding sequence"
  source 1..1065: mol_type = other DNA
atgtcggttaactatgccgccggccttagtccttacgccgacaaggggaaatgcggcctacctgagattttcgatcctcctgaggagctcgagagaaaggtatgggagcttgcccgattggtttggcagtcttcttcggtggtctttcacaccggggccggtataagcaccgccagtggtatccctgattttagaggaccgcatggcgtatggaccatggaggaacggggtttagcccctaaattcgacacaacattcgagagtgctagacccacccagacccacatggccttggtacaactagaacgggttgggctccttaggttcctagtctcacagaatgtggatggtctgcacgtgagatctggatttccgcgggacaagctggccgagcttcatggtaacatgtttgttgaggaatgtgcaaagtgtaagacccagtatgttcgtgatacggtggtgggtacaatgggactgaaggcgacaggccggctgtgtactgttgccaaagccagagggctaagggcctgtagaggagagctgcgggacaccatactggattgggaggactctcttccagacagggatctggcactagcagatgaagcctctcgcaacgcagacctctcaatcaccttgggaacttctcttcagatccgtccaagcgggaacctgcctctcgcgacaaaacggaggggagggagactggtgatcgtcaacctacagcctaccaaacatgaccgtcacgccgatttgaggatccatgggtacgtagacgaggtcatgacgaggcttatgaaacatctgggattggagatcccagcttgggacggtccccgcgtattggaacgagcgctgcctccgctcccacggccacctacccccaagcttgaaccaaaggaagagagtcctactcggatcaacgggtccataccggctggccctaaacaagagccatgcgctcagcacaacgggtcagagcctgccagccctaaacgtgagcgccctacttcccctgctccccatcgcccgcccaaaagagtcaaggccaaagctgtccccagc

SEQ ID NO: 19365 - DNA, 1065 bp, synthetic construct
  misc_feature 1..1065: note = source = /note="Description of Artificial Sequence: Synthetic coding sequence"
  source 1..1065: mol_type = other DNA
atgagcgttaattatgctgctggactgagtccctacgcagataagggcaagtgcggcctaccggaaattttcgatcccccagaagagctagagcggaaggtctgggaactggcgcgcctagtgtggcagagctcttcggtggtttttcacactggagctggaatatctactgccagtggcatacccgattttcgggggcctcatggcgtgtggaccatggaagaacgaggtctcgccccgaaatttgatacaacattcgaaagtgctcgcccaactcagacacatatggccttggtacaactcgagagagtagggctgctcaggttcctcgtgtcccaaaatgttgatggactccatgtgcgctccggtttcccacgagacaaattggctgagctccatgggaatatgtttgtagaagagtgcgccaagtgtaaaactcagtacgttagggatactgtggttggaacgatgggtctgaaggcaacagggcgcttgtgtacagtggccaaagccagaggactgagggcatgtcgtggagagctgcgcgatacgatccttgattgggaggactccctacctgacagagatttggccctagccgatgaggcaagccgaaatgcagatctaagtatcaccctgggaaccagcctgcagattcgcccgtcgggcaatcttcccctagccaccaagaggcggggaggccgacttgttatcgtgaacttgcagccaacaaaacatgataggcacgccgacctgcgtatccacggatacgtcgatgaggtgatgaccagactgatgaagcatctgggcttggagatccccgcttgggacgggccgagggtcctggaacgagccctgcctccacttcccagacccccgacccccaaacttgagcccaaagaagaaagccctactcgaattaacgggagcattcccgctggcccgaaacaggaaccatgcgctcagcataatggctcagagcctgcgagccccaaacgcgaacggcctacttctcctgccccccaccgcccccctaaacgcgtgaaggctaaggcagtgccttcc

SEQ ID NO: 19366 - DNA, 1065 bp, synthetic construct
  misc_feature 1..1065: note = source = /note="Description of Artificial Sequence: Synthetic coding sequence"
  source 1..1065: mol_type = other DNA
atgtctgtcaactatgcagcgggtctgtcaccttatgccgacaaaggcaagtgcggcctccccgaaatattcgacccacctgaagagttggaaagaaaagtgtgggaactggctcgtttggtctggcaatcatcaagtgtggtgttccacacgggggcggggataagcacagcctccgggatacctgactttagaggaccacacggggtctggacaatggaggaaaggggtctggctcccaaattcgacaccacatttgagagcgctcggcccacacagacacacatggcattagtgcagctggagcgcgtgggactcctgagattccttgtatcccagaacgtcgacgggctgcacgtgcgctcaggcttcccccgtgataaattggccgagctccacgggaacatgtttgttgaggagtgtgccaaatgtaagacccagtacgtgagggataccgtggtaggaacaatgggcctgaaggctactggacggctttgcactgttgcaaaggcccgtgggctgcgcgcttgtcggggcgaattgagggacactattctggactgggaggacagcctgcccgatagagatctggccttagccgacgaggccagtcgaaacgccgacctcagtattacgctgggaactagcctccagatccgacccagcggaaacctgccacttgcgacgaaaaggaggggagggcggcttgtaatcgtgaacctgcaaccaactaaacatgataggcacgcagatttgcggattcacggatacgtggatgaggttatgactcggctgatgaaacatctaggtttggagatcccggcctgggatggcccacgggtcctggagcgcgccctgccaccccttccgcgccctcccacccctaagctcgagcctaaggaagaatcgccaacccgcattaacggctccattccagccgggcccaaacaagagccatgtgcacaacataacggctccgagcctgcttcgccaaagagggaaaggccgacgagcccagctccgcatcgaccacccaaacgcgttaaagcaaaggctgtcccgtcc

SEQ ID NO: 19367 - DNA, 1065 bp, synthetic construct
  misc_feature 1..1065: note = source = /note="Description of Artificial Sequence: Synthetic coding sequence"
  source 1..1065: mol_type = other DNA
atgagcgtgaattatgcggccggcctgagcccctacgcagacaaaggaaagtgcggcctcccagagatcttcgatccacccgaagaactcgaaaggaaggtttgggagctagcccggcttgtttggcagagtagtagtgttgtgttccacaccggagctgggattagcacagcatccgggatccctgactttagaggccctcatggggtgtggacaatggaagagcgtggtctggctccgaaattcgatactaccttcgagagcgcaaggcccactcagactcatatggctcttgtgcagctcgaacgtgtgggacttctcaggttcctggtttcacagaatgtcgatggcctccacgtgcgcagtggttttccccgcgataagctcgccgaactacatggaaacatgttcgtcgaagaatgtgccaagtgcaagactcagtacgtgcgggataccgttgttgggacaatgggccttaaagcaaccggaagactgtgcacggtcgcaaaggccaggggccttcgagcctgtcgcggagagcttcgagatactatacttgattgggaagattcactgccagaccgggatctggctttagcggatgaggcatctcggaacgccgatctgtccataaccttggggacttcactgcagatccgtccctcaggcaacctccctctggcgacgaaacggcgcggagggcgattagtcattgtcaacctgcaacctacaaagcacgatagacacgctgacctcagaattcacggatacgttgacgaagtgatgactaggctgatgaaacatcttggcttagaaatccccgcttgggacggccctcgggtcttggaacgggcgttacctccattgcctcgtccacccacccctaagcttgaacctaaggaggagagcccaactaggatcaatggtagcatccccgccggtcctaaacaagaaccctgcgcgcagcacaacggcagcgagcccgcgtctccaaagagagaacggcccacatctcccgctcctcacagaccccccaagagagtcaaggctaaggcagtcccatcg

SEQ ID NO: 19368 - DNA, 1065 bp, synthetic construct
  misc_feature 1..1065: note = source = /note="Description of Artificial Sequence: Synthetic coding sequence"
  source 1..1065: mol_type = other DNA
atgtccgtcaactatgcagctggtctttccccatacgccgataagggaaagtgcgggctgccagaaatattcgaccctcccgaagagctggagcggaaggtttgggagttggcccgactagtgtggcagtccagcagtgtggtctttcatactggcgccggaatctcgactgcatctggcattccagactttcgcggtcctcatggagtctggacaatggaggagcgtggattggcgcctaagtttgacacaaccttcgagtctgccagacccacccagacccatatggctctggtgcagctggaacgagttgggctgctgcgctttctggtgtctcagaacgtcgacggactgcacgtgagatcaggcttccccagggataaactggccgagcttcacggcaatatgtttgtcgaggagtgcgccaaatgtaagacgcagtacgtaagagacactgtcgtggggactatgggattgaaagcaaccgggcgcttatgtacggtggcaaaggctcgggggttgcgggcttgcagaggagagttgagggataccatacttgactgggaggacagcctgccagaccgcgacctagccctcgctgacgaggcttccaggaacgctgatctgagtataacgttgggaacttcgcttcaaataagaccgtccggaaatcttccactggccaccaagagacgaggtggcaggctggtgatcgtgaacctgcagcccaccaagcatgacagacatgcagacctgcgaatccacggttatgtggatgaggtaatgactcggctaatgaaacatctcggattggagataccagcttgggatggccctcgggtattagagcgagccttacctcccctcccacggcctcccacacccaagctagagccaaaagaggagagtcccacaagaattaacggaagtatccctgccggacccaaacaggagccgtgtgcacagcataacgggtccgagcccgcatcccccaagcgcgagcgccccacaagccctgccccacatcgcccccctaagcgggttaaggcgaaggctgtgcccagc

SEQ ID NO: 19369 - DNA, 1065 bp, synthetic construct
  misc_feature 1..1065: note = source = /note="Description of Artificial Sequence: Synthetic coding sequence"
  source 1..1065: mol_type = other DNA
atgtcagttaactatgcggcgggcctcagcccatacgccgacaaaggaaagtgcggactgccagaaatcttcgatccgccggaagaattggaacggaaggtctgggagctcgcccggctggtttggcagagctcatccgtcgtgtttcacaccggtgcaggcatttcgaccgcatcaggcattccggactttagaggtccacacggcgtgtggacgatggaggaaagaggactggcaccaaaattcgataccactttcgagagcgccaggccgacgcaaacccacatggcgctcgtccaactggaacgagtgggactcctgcgcttcttggtgtcgcagaacgtagacggactccatgtgcggagcggattcccccgcgacaagctcgcggaactgcacggaaacatgttcgttgaagagtgcgctaaatgcaagactcagtacgtgcgcgacaccgtggtgggaacgatgggtctgaaggccactggaaggctgtgcactgttgccaaggcccgcgggctccgcgcgtgccggggggagctccgggatacgatccttgactgggaggactccctgccggaccgcgatctggcactcgctgatgaagcctcgaggaacgctgacctctctatcaccctgggaacttcgctccagatccgcccgtccgggaacctgcctctggctaccaagcgccggggaggtcgcctggtgatcgtcaatctgcagccaaccaagcacgatcggcacgcagatctgagaatccacggttacgtggacgaggtcatgacccggctgatgaaacaccttggactcgaaatccccgcatgggacggcccgcgggtgctcgagcgggctctgcccccgttgccacggccgccaactccgaaactggaaccaaaggaggaatcaccgacccggattaacggttcgattccagcgggaccgaagcaagaaccgtgtgctcagcacaacggctcggagccggcctcgccgaagagagagaggccgacctcgccagcccctcaccgcccgccgaagcgagtgaaagctaaagctgtgccttct

SEQ ID NO: 19370 - DNA, 1065 bp, synthetic construct
  misc_feature 1..1065: note = source = /note="Description of Artificial Sequence: Synthetic coding sequence"
  source 1..1065: mol_type = other DNA
atgagcgtgaactacgctgccggattgagcccatacgcagacaagggaaagtgcggactgcccgaaatcttcgaccccccggaggaactggaacgcaaggtgtgggagctggccagactcgtgtggcaaagctcatccgtggtgttccacaccggagccggtatctcgaccgcgtcaggaatcccggactttcgggggccgcacggtgtgtggactatggaagaacgaggacttgcgcccaagttcgacacgacttttgagtccgcccgcccaacgcagacccacatggcgcttgttcagttggagcgcgtgggattgctgagattcctcgtgtctcagaacgtcgatgggctgcatgtgaggtcgggcttccctagagataagctggcagagttgcacggcaacatgttcgtggaagagtgtgccaaatgcaagacccagtacgtcagagacaccgtggtcggtactatgggcctcaaagccactggacggctgtgcaccgtcgcaaaagcccgcggcttgcgggcctgtcggggggagctccgcgataccatcctcgactgggaagattcacttcctgatagggatctcgccctggcggacgaggcttcacgcaacgcagatctgtccattactctgggaacgtcgctgcaaatccgcccgtcgggcaatctcccgctggcgaccaagagacggggaggtcggctggtcattgtcaatctgcagccaaccaagcatgacagacatgccgacctgcgaatccacggctacgtggacgaggtgatgactaggctcatgaagcatctgggacttgagatcccggcttgggacggaccgcgggtactcgaacgcgcactcccgccgctgcctcgcccacccactccaaaactggaaccaaaggaggaatcccccacccgtatcaatgggtcgatcccggccggacctaagcaagaaccttgcgctcagcacaacggcagcgaaccagcgtccccgaaacgggaacggccgacttcgccggcgccacaccgccctccgaagcgcgtgaaggcaaaagctgtcccatcc

SEQ ID NO: 19371 - DNA, 1065 bp, synthetic construct
  misc_feature 1..1065: note = source = /note="Description of Artificial Sequence: Synthetic coding sequence"
  source 1..1065: mol_type = other DNA
atgtccgtcaattacgctgccggtctcagtccttacgccgataagggaaagtgtggtttgccggagatctttgatcccccagaagaactggagcgcaaagtttgggaactcgccaggctcgtctggcaatcttcttcagttgtctttcataccggtgccggaatcagtacggcctctggaattcctgacttcaggggaccccatggcgtttggacaatggaagagcgtgggcttgcgccaaagttcgacacgacgtttgaatccgcccgccctactcaaacacacatggcccttgtccagctggaaagggtcggactcctgcggttcttagtgtcgcagaatgtagatggtttgcatgtaaggtcgggtttcccgcgcgacaagttggccgagctccatggcaacatgttcgtggaggaatgtgccaaatgcaaaactcagtatgtccgagatacagtcgtcgggaccatgggtttgaaggctacggggcgcctatgtacggttgctaaagctagggggctccgcgcgtgccgcggagaattgagggacaccattctggattgggaggactcattacctgatagagacctggcactagcagatgaagcctctcgtaatgcagatctctccattacgctgggtaccagcctgcagattcgcccgtcaggtaacctgccacttgcgactaagcgccgtgggggcagacttgttatcgtcaatctccaacccacaaagcacgatcgacacgccgatttgcgaatccatggatacgtagatgaggtgatgacccgcctgatgaagcacctcggtttggaaattccggcctgggatggcccacgagtgctagaaagagctttaccaccgctgccccggccacctaccccaaagctcgagccaaaggaggaatcgcctacacgtatcaacgggtcaatcccggctggtccaaagcaagagccttgtgctcaacacaatgggtcggaacctgcctccccgaaacgtgaacgaccaacttcgcccgctccgcaccgtccgccaaagagagtcaaggcaaaggcggtgccttcc

SEQ ID NO: 19372 - DNA, 1065 bp, synthetic construct
  misc_feature 1..1065: note = source = /note="Description of Artificial Sequence: Synthetic coding sequence"
  source 1..1065: mol_type = other DNA
atgtcagtgaattacgccgcaggactgtcaccttacgccgataaaggaaagtgtggtttgccagagatattcgatccacctgaagaactggaaagaaaggtttgggaacttgctcgactggtgtggcagtcatcgagcgtggtgtttcatacgggcgcaggaatttcaactgcatccggaatcccagatttccggggtccacatggcgtgtggaccatggaagaaaggggtctggcacccaagtttgatacgacctttgaatcggcacgtcctactcaaactcacatggcgctcgtccagcttgagcgggttggcctgctccggtttctcgtgtcacaaaatgtcgatggacttcatgtgaggagcggatttccacgagataagctggctgaacttcacggaaacatgttcgtggaggaatgcgcaaagtgtaagactcagtatgtgagagacacggtcgtgggtactatgggactcaaggcaaccggacgtctctgcactgttgcaaaggcaagaggtcttagagcctgccggggcgagctgcgagacaccatccttgattgggaggattcgctcccggatagggatctggctctggccgatgaagccagccgaaacgctgatctctcaatcacccttggtacctcgctgcaaatacgtccttcgggaaatttgcccttggccactaagagaagaggaggaaggcttgtaatcgtcaaccttcaaccaaccaagcacgataggcatgccgatcttcgcattcatggctatgtcgacgaggtcatgaccagactgatgaagcacctgggtcttgaaattccagcgtgggatggaccgcgggtgctggaacgcgcactgcctccactccctcgcccacccacccctaagctggaaccgaaggaggagtcccctactagaattaacggatccattccagccggtccgaaacaagagccttgtgcacagcataacggttcagagcccgcatcgcctaagcgggaacgccctacctcccccgccccccataggcctcccaagcgggtgaaggcaaaggccgtcccgtcg

SEQ ID NO: 19373 - DNA, 1065 bp, synthetic construct
  misc_feature 1..1065: note = source = /note="Description of Artificial Sequence: Synthetic coding sequence"
  source 1..1065: mol_type = other DNA
atgtccgtgaactacgcagctggactcagtccatacgccgacaaggggaagtgtgggctgcccgagatttttgatcctcccgaggaacttgaaagaaaggtctgggagctggccaggcttgtgtggcagagttccagcgtggtgtttcacaccggcgcgggcatcagcacagcttctggaattccagatttcagaggacctcatggcgtttggactatggaggaaaggggactcgcaccgaagttcgacacaacgttcgagtctgctagacccactcagacccacatggcccttgtgcagctcgagagagtcggattgctgcgcttcctggtcagccaaaacgtggacggcctgcatgtgcgatccggtttcccgcgcgacaagttggccgagctgcatggcaacatgttcgttgaggaatgtgccaaatgtaagacgcaatatgtgcgagatacggtggttgggacaatgggccttaaagctaccggtagactgtgcacagtggccaaagccaggggcctccgggcttgcaggggcgagctgagagacacgatccttgactgggaggatagtctgcccgatagagatctggcactcgctgacgaggctagcagaaacgcagatctctccatcactctcggcacgtctttgcagatcaggccctccggtaacttgccccttgccaccaagcgacggggcggaagactggtgatcgtcaacttgcaacccactaaacacgaccgacacgctgacttgcgcatccatggttatgttgacgaggtcatgacgcggttgatgaaacatctgggcctcgagatacctgcgtgggatgggccccgggtattggagagagccctgccgcctctgccaaggccacccactcctaaactggagcccaaggaggagtcacccaccagaatcaacggatctatccctgcagggcccaaacaagaaccctgcgctcagcacaatgggtcagaacccgcatccccgaagagggagcggcccacgtcccccgccccccacaggcctcccaaacgggtgaaggctaaagcagtgcctagt

SEQ ID NO: 19374 - DNA, 1065 bp, synthetic construct
  misc_feature 1..1065: note = source = /note="Description of Artificial Sequence: Synthetic coding sequence"
  source 1..1065: mol_type = other DNA
atgagcgtcaactacgccgcggggctcagcccttatgccgataagggaaagtgcggactgcccgaaattttcgatcctcctgaggaactggagagaaaggtttgggagctcgcacggttagtttggcagtcttcatccgtcgtgttccataccggcgcaggcatcagcaccgcgagcggtattcccgatttcaggggcccccatggggtgtggaccatggaggaaaggggactagcccctaaattcgacaccaccttcgaaagcgctaggccgacccagacccacatggctctggtgcagctagagcgggtgggacttttgaggtttctggtgtcacagaacgtcgacggtctgcatgtgcgctcaggctttcctcgagacaagctggccgaactccatggcaacatgttcgtggaggagtgtgcgaagtgtaagactcagtatgtccgcgacaccgtagtgggaacgatgggcctgaaagcaacaggacgtctgtgcacagtggctaaagcaaggggattgcgcgcctgccgtggagagctgagggatactattctagactgggaagattctctacccgatcgggatcttgctctggccgatgaggcttcgaggaacgccgacctgtcgattaccctgggcacgagcctacagattcggcctagtggcaaccttccccttgccacaaagaggaggggcggacgtttggtgatagtgaatttgcagccaactaagcacgatagacacgctgacctcaggatacacgggtacgttgatgaagtgatgacgaggttaatgaagcaccttggattggagattcccgcatgggacggcccaagggtgctggaacgcgcactgccaccactgccgaggccccccaccccgaaactggagcccaaagaggaatcccccacacgcataaacgggtctataccagctggaccaaagcaggagccctgcgcccaacataatggaagtgagccagcatctcccaagcgggaaaggccgacatctccggcccctcatcgaccccctaaaagggttaaggccaaggccgtgcctagt

SEQ ID NO: 19375 - DNA, 1065 bp, synthetic construct
  misc_feature 1..1065: note = source = /note="Description of Artificial Sequence: Synthetic coding sequence"
  source 1..1065: mol_type = other DNA
atgtcggtaaattacgccgcgggtctgtcgccatatgccgacaaaggcaaatgtggactacccgaaattttcgatcctccggaggaattggaaagaaaggtgtgggagttggcccggctcgtctggcagtcgagctcagtcgtgtttcacaccggggcaggcatttccacagcatccgggatccccgattttagagggccccacggagtatggacaatggaggagaggggcctggcaccgaaattcgacactacatttgagagtgcaaggcctactcagacccacatggctttagtgcagttggaacgcgttggcttactgcggtttcttgtatctcagaatgttgatggattgcacgtccggtccggcttcccacgggataagctcgcggagttgcatggaaatatgtttgtggaggaatgcgccaagtgtaagacacagtacgtaagggatacagtggtggggaccatgggcctgaaggccaccgggcgcctatgtaccgtcgcaaaggcccgcggactgcgcgcatgccgcggggaattgcgcgataccatcctggactgggaagattcactaccggacagagatctcgccctggccgacgaggcctctcgcaacgccgatttgagtatcactttgggcacttcccttcagatacgtcctagcggaaatctgccgctcgctaccaagagacgaggcggacgactggtcatcgtgaatctgcagcccacgaaacacgacaggcatgcagatctgaggattcacggatacgtggacgaagtcatgactcgacttatgaagcacctgggcctggagatccctgcgtgggacggccctcgtgtacttgaacgggccctgccgcctcttcccagacctccaactcccaaactagaacctaaagaggaaagccccaccagaatcaacggcagtatacccgccggtcccaagcaggagccgtgcgcccagcacaatggcagcgaacctgctagccctaagagggagcgaccaacatcaccagcaccccaccgtccccctaagcgggtaaaggccaaggccgtgccaagc

SEQ ID NO: 19376 - DNA, 1065 bp, synthetic construct
  misc_feature 1..1065: note = source = /note="Description of Artificial Sequence: Synthetic coding sequence"
  source 1..1065: mol_type = other DNA
atgagcgtcaattatgcagcaggtcttagcccttatgctgataaaggtaaatgcggtctgcctgaaattttcgatccgcccgaggaacttgaacgtaaagtctgggagttagcacgccttgtatggcagagtagcagcgtcgtgttccatacaggcgcgggcatttcgactgcgtccgggatacctgactttcgtgggccgcatggggtctggaccatggaagaacgagggttagccccgaaatttgacacgacctttgaatcggcaaggccgacacaaacacacatggctttggtgcaacttgagagagtcggactgctacgatttcttgtgtcacaaaacgttgatggattacatgtccgcagcggctttccgcgtgataaacttgcggaactacatggaaacatgtttgtggaggagtgtgccaaatgtaaaacgcagtatgttcgagatactgttgttggaacgatgggcttgaaggcaacaggacggctgtgtacagttgctaaagcgagaggccttcgtgcatgccgtggagaactcagagacacaattttagattgggaggatagtctgcccgaccgagacctggcccttgccgatgaagcaagtagaaatgctgatttatcgattacccttggaacgtccctgcagattcgcccatcggggaatctcccgctcgcaacaaaacgccgtggcggccgactggtgattgttaatttacagccgacaaagcacgatcgacacgcagatctgagaattcacggatatgttgatgaagtgatgacacgactcatgaagcacctgggcttagaaattccagcgtgggatggtccgagagttttggaaagggctttgccgccgttacctcgtccgcctacgccgaagctggaaccgaaggaagaatcacctacgagaatcaacggctcaattcccgcgggtccgaaacaagaaccgtgcgcgcagcataatggtagcgaaccggcctccccgaaacgggaacgtcctacatcaccggcgccccatcggccaccgaaaagggttaaagctaaagcggttccgtct

SEQ ID NO: 19377 - DNA, 1065 bp, synthetic construct
  misc_feature 1..1065: note = source = /note="Description of Artificial Sequence: Synthetic coding sequence"
  source 1..1065: mol_type = other DNA
atgagcgttaattacgctgctggactgtccccttatgctgacaaaggaaagtgcggcctccccgagatctttgatccaccggaggagctagagaggaaagtgtgggagctggcccgcctagtttggcagtcctcctccgtggttttccacaccggcgccggtatctccactgctagcggcattcctgactttcgaggaccccatggcgtctggactatggaagaacgcggactcgcccccaagttcgataccacttttgaatcagcgagacctactcaaacacacatggcattggtgcaacttgagcgcgtcggcctgctacggtttctggttagccagaacgtggatggtctgcatgtgaggtctgggtttcccagggataagctggctgagctgcacggaaacatgttcgtggaggagtgtgcaaaatgtaaaactcagtacgtgcgcgatactgtagtgggtaccatgggccttaaagccacgggacgcttgtgtacggttgccaaagcaaggggcctccgcgcatgccgtggcgagctcagagatactatcttggactgggaggactctctgccagatcgggacctggctctggcagacgaggcttctcgcaatgccgatctgtcgattaccctgggtaccagcttgcagatccgccccagcggtaatctccctttggctacgaaacgtaggggcggtagacttgttattgtaaacctgcaacccactaagcacgatagacatgctgatctgaggatccacgggtacgtagacgaagtcatgacacggctcatgaaacacttgggactggagatccctgcatgggatggaccacgcgtgctggaacgggctctgcctcccttaccccggcccccgacaccaaagctggagccaaaggaggaatcccctacccggatcaatggtagtatccctgctgggccgaaacaagagccctgtgcgcagcacaatgggagcgaaccagcaagcccaaagagggaacggcctacatctcccgcaccacatagaccaccaaaaagggtgaaggccaaggcagtgcctagc

SEQ ID NO: 19378 - DNA, 1065 bp, synthetic construct
  misc_feature 1..1065: note = source = /note="Description of Artificial Sequence: Synthetic coding sequence"
  source 1..1065: mol_type = other DNA
atgtctgtcaactatgctgctggtttatctccgtacgccgacaaagggaagtgcggcttacccgaaatatttgatccacctgaagagttggagcggaaggtgtgggaactggcccgactcgtgtggcaaagcagctcagtggtcttccatacaggagcgggaatctcgactgcctcaggaattcccgatttcaggggtccgcacggagtctggaccatggaggaacgtggactggcgcccaaattcgacacgacttttgagtcagctcgcccgacacaaactcacatggcgctggtacagttggagcgcgtcggactgctgcggttcctcgtttcacagaatgtggacggcttgcacgtgcggtctggctttcctcgggataaactggcggagctccatggaaatatgttcgtggaagaatgcgcaaaatgtaagactcagtacgttagagacacagtcgtgggcaccatgggactcaaagccaccggaaggctgtgtacagtagccaaggctagggggctgcgggcttgtagaggagaactaagggataccatcttggattgggaagacagcctgcctgatcgggacctagccctggctgatgaggcttcaaggaacgcagatctctccattacgttgggcaccagcctgcagataaggccttccggaaaccttcccttggccacaaagcgacggggagggcgcttagtcatagtcaatttgcagcccacgaagcacgacagacacgctgacctacgcatccatgggtacgtcgatgaggtgatgacgcggcttatgaagcaccttggcttggaaataccggcgtgggacggacctcgggtgctcgaacgagccttgccgccactcccccggccaccgaccccaaagttagaaccgaaggaggaaagccccactcgcattaatgggagcattcctgccggccctaaacaagagccctgcgcccagcacaatgggagtgaacccgcctcgccgaaaagagagcggcctacgagccccgccccccatcgcccgccaaagagagtgaaggccaaggcagtgccttct

SEQ ID NO: 19379 - DNA, 1065 bp, synthetic construct
  misc_feature 1..1065: note = source = /note="Description of Artificial Sequence: Synthetic coding sequence"
  source 1..1065: mol_type = other DNA
atgtccgtgaattacgcagcagggctgtcgccgtatgcagataagggaaaatgtggcctccctgagatcttcgatcctccagaagaactggagagaaaggtctgggagcttgcgagactggtgtggcaatcgtcatccgtggtctttcataccggtgcgggaatatcgactgccagcggtatccccgattttagaggcccacacggagtttggaccatggaggaaagagggctcgccccaaaattcgacactaccttcgagagcgcgcgtccgactcagactcacatggctcttgtccagctcgaacgcgtcggtctgcttcgtttcctggtgagccaaaacgtggacggcctccacgtgcgttcaggatttccaagagataaactggcggaattgcacggaaatatgtttgtggaagaatgtgcaaaatgcaagacgcagtacgtgagagacaccgtcgtgggaactatgggccttaaggctaccggacgtctgtgtaccgtggccaaggctagggggctgagagcatgtaggggcgaactgcgggacaccattctggactgggaggattcactgcctgaccgggaccttgcacttgcggacgaagccagccgaaacgcagacctttcgattacccttggaactagcctgcaaattcggccaagcggtaatttgccgctcgcaaccaagagacgcggaggtcggctggtgatagtgaacctccaacccaccaagcatgatcgccatgccgatttgaggatccatggttacgtcgatgaggtgatgacccggcttatgaagcatctcggcctggagataccggcgtgggatggaccgagagtgctggaaagggctctccctccccttccaagacctcctaccccaaagctcgaacccaaggaagaatcgccgacccggataaatggaagcattccagcaggcccaaagcaagaaccatgcgcacaacataacggttccgaacctgcgtcgccaaaaagggagaggcctaccagtcctgctccacaccgtcctccaaaacgcgtcaaggccaaggcggtgccctcc

SEQ ID NO: 19380 - DNA, 1065 bp, synthetic construct
  misc_feature 1..1065: note = source = /note="Description of Artificial Sequence: Synthetic coding sequence"
  source 1..1065: mol_type = other DNA
atgtccgtgaactatgccgcggggctgtccccttacgcagacaaggggaagtgtggcctcccagagattttcgaccctcccgaggaacttgaacgaaaggtctgggagttggctagactggtgtggcagagctcaagcgtcgttttccatacaggagccggcatttccactgccagtggaatcccagattttcgaggcccacatggagtgtggactatggaagagagaggactcgccccaaaattcgatactacctttgagtccgcgcggccaacccaaacccacatggctctggtgcagctcgaaagggtgggcctgctgaggttcctggtaagtcagaacgttgacggactgcatgtaagaagtggtttcccccgggacaagttagcggagttgcacggaaacatgtttgtggaagaatgcgccaaatgcaaaacccagtacgtgcgcgacaccgttgtcggcactatggggttgaaagccacaggacggctgtgtacagtcgccaaggcaaggggccttagggcatgtcgaggcgagctgcgggatactattctggactgggaggatagcctccctgatcgggacttagcactggctgatgaggcctctaggaatgcggatctgtcaatcacactagggacctcactgcagatccgtccaagcggaaatttgcctctcgcaacaaagagacggggagggagactggtgatcgtcaatctgcagccgactaagcacgacagacacgccgatttgaggattcacggctatgtggacgaggtgatgactcggctgatgaagcatctcggcttggagattccggcatgggatgggcctagggtcctggagcgggcgttaccccctctcccaaggccccctaccccaaaactcgagccaaaggaggagtcaccaacacgaattaacggaagtattcccgcaggacctaagcaggagccatgcgctcaacataacggatctgagccggcctcccctaaacgcgaacggcccacttcccccgctccacatcggccccccaaacgagtgaaggcgaaggccgttccttcg

SEQ ID NO: 19381 - DNA, 1065 bp, synthetic construct
  misc_feature 1..1065: note = source = /note="Description of Artificial Sequence: Synthetic coding sequence"
  source 1..1065: mol_type = other DNA
atgtcagtgaattatgcggcgggactgtcgccgtacgccgacaaaggaaagtgcggactgcctgaaatctttgacccgccggaggaactggagcggaaggtctgggaacttgcacgcctggtgtggcagtcatcgtcggtggtgttccatactggtgccggaatcagcactgcgtccggaatccctgacttcaggggaccccacggcgtgtggaccatggaggagaggggcctggctccgaagttcgataccactttcgaaagcgcccggccgacgcagacccacatggccctcgtgcaactggagcgggtggggctgctccggtttcttgtctcgcaaaacgtggacggactgcatgtgcgctcaggattcccgcgggataagctggctgagctccacggtaatatgttcgtggaagagtgcgccaaatgcaagactcaatacgtgcgggataccgtggtcggtaccatgggcctcaaggcgaccggaaggctctgtaccgtcgcgaaggcccggggactcagagcgtgccggggagaactccgcgataccatcctggactgggaagatagcttgccggaccgcgacctggctcttgcggatgaagcgtcgcgcaatgcggatctgtctataaccctcggaacgagcctgcaaatccgcccatccgggaacctccctttggccactaaacggcggggcgggaggctggtgattgtcaacttgcagccaactaagcacgaccggcatgcggatctgcggattcatggatacgtggatgaagtgatgactcgcctgatgaagcatcttggattggaaatccctgcgtgggacggaccacgcgtgctcgaacgcgctctgccgccactcccacgcccgccgacccctaagctggaaccgaaggaggaatcgccaactagaatcaacggtagcatcccggcaggaccgaagcaggagccctgcgcacagcacaacggatcagaacctgcgtcccctaagagagaaaggccaacgtccccggccccacaccgtccaccgaaaagagtgaaggccaaggccgttccatcc

SEQ ID NO: 19382 - DNA, 1065 bp, synthetic construct
  misc_feature 1..1065: note = source = /note="Description of Artificial Sequence: Synthetic coding sequence"
  source 1..1065: mol_type = other DNA
atgagcgttaactacgccgccggcctttccccctacgctgataaaggcaagtgcggactcccagagattttcgacccgccggaagagctcgaacggaaggtttgggagcttgcacgcctggtctggcagagctcgagcgtcgtgttccacaccggcgccggaatctcgactgcgtccgggatccctgacttccgcggtccccatggagtgtggaccatggaagaaagaggactcgcccctaaattcgatacgactttcgagtcggccagacccacgcagacccacatggcattggtgcagctggagagagtcggactgctgcgatttcttgtgagccagaacgtggacggactccacgtgcgctcagggttcccgcgggacaagttggctgaactgcatggaaacatgtttgtcgaagaatgcgcaaagtgtaagacccagtacgtcagggacactgtggtgggcaccatggggcttaaggccacgggacggctctgtaccgtggcaaaggcaagggggctgcgcgcgtgcagaggcgagctgcgcgacactatcctggattgggaggacagcttgcccgatagggacctggcactcgcagatgaggcttcgcgcaatgcggacctctccataactttgggcacttcactgcaaatcaggccgtcaggaaacctgccattggcgaccaagagacgcggaggacggctggtgatcgtgaatctccagcctaccaaacacgaccggcacgcggacttgaggatccacggttacgtggatgaggtgatgaccaggctcatgaaacatctgggtctggagatcccggcgtgggacggcccccgcgtattggaaagagcactcccgccgctccctcgcccgccgactcctaaactggaaccgaaggaagaatcaccgactcggattaatggaagtatccccgccggacctaaacaagaaccttgcgcacaacacaacggatcggagcccgcgtccccgaagcgcgagcgtccaacgtccccagctcctcatcggccgcccaagcgcgttaaggccaaggcggtaccttct

SEQ ID NO: 19383 - DNA, 1065 bp, synthetic construct
  misc_feature 1..1065: note = source = /note="Description of Artificial Sequence: Synthetic coding sequence"
  source 1..1065: mol_type = other DNA
atgtcagttaattatgcagccgggctctcgccctatgcggataagggaaaatgcgggctccctgaaatctttgaccccccagaagaactcgaacggaaagtttgggagcttgcccggttggtctggcagtcctcttccgtggttttccacactggagccgggatcagtacagcctccgggatacccgatttccgggggcctcacggagtttggacaatggaagaacgcggactggcccccaaatttgatacaacatttgaatcagctcggccgactcaaacacacatggctctcgtccagctcgaacgggtaggactgcttcgatttctcgtatctcagaatgtcgatgggcttcatgtccgatccgggtttcctagggataaacttgcagaactccatgggaacatgttcgtcgaagaatgcgctaaatgcaaaactcagtatgtgagggatactgtcgtgggaacaatgggactcaaagctacagggaggctatgtacagttgcgaaggcacggggactaagagcatgtcggggagagctgagagatacaatcctagattgggaagattctctgcctgatcgggacctggccctcgctgatgaggcatctcggaacgcagatctctccatcacactcggaacatcactccagataaggccttccggaaacttgcccctagcaacaaaaagaagagggggacggctcgtgatagtgaacctgcagcctacaaaacatgatcggcatgccgatctgcgaattcatgggtacgtggatgaagtgatgactcgccttatgaaacatctgggacttgaaattcccgcctgggatgggcctcgagtattggaaagggccctcccaccactccctcgaccccccacacctaaactggaaccaaaagaagaatccccaactcggatcaacggatccattcccgctgggcccaaacaagaaccatgcgctcagcataatggatctgagccagcatctccaaaacgtgagcggcctacttctcctgctccccaccggcctcccaaaagagtgaaagctaaagctgtaccctct

SEQ ID NO: 19384 - DNA, 1065 bp, synthetic construct
  misc_feature 1..1065: note = source = /note="Description of Artificial Sequence: Synthetic coding sequence"
  source 1..1065: mol_type = other DNA
atgtccgtcaactacgcggctggtctgtcaccatacgctgataaaggcaaatgcggcctgccggaaatctttgatccacctgaagagttggagaggaaggtgtgggagctggccagattagtgtggcagagctcgtccgttgtgttccatacgggtgctggtatcagcactgcatccggcatcccggacttccggggcccacatggagtgtggacaatggaggaaaggggactggccccaaagtttgacacaacctttgaaagcgctaggccaacccagacccacatggctctggtccaacttgagagagtaggcctgttgcgtttcctggtgtcacagaacgtagatggactccatgttcgaagcggcttcccaagagataagctggccgaattacatggcaacatgtttgttgaggagtgtgccaagtgcaaaacccagtacgtgagggacacagtggtcggaactatgggtctgaaggcgaccggcaggctgtgtaccgtagcgaaggccaggggcctcagagcctgccgaggtgaactgcgcgatacaattctagattgggaagactctctacctgacagggatctggccctagcagatgaggcctcccggaacgcagatctgtctataaccctagggacatctctgcagatcaggccctctggcaacctgccacttgccacgaaacgcaggggaggaagactggtaatcgtcaacttgcagccgacaaagcatgatagacatgcggaccttaggattcacggctacgtagacgaggttatgactcgactaatgaaacacctgggcctggagatccccgcgtgggatggacccagggtcttagagcgggcgctgcctcctctaccacggccccctacccctaagttggaaccaaaggaagaatctccaacgagaatcaacgggtcgatcccagccggtcccaaacaggagccatgtgcacagcacaacgggtctgagcctgcgagtcccaagcgtgagagacctacctcaccagccccgcatagaccgcccaagagagtgaaagccaaagccgtcccgtcc

SEQ ID NO: 19385 - DNA, 1572 bp, synthetic construct
  misc_feature 1..1572: note = source = /note="Description of Artificial Sequence: Synthetic coding sequence"
  source 1..1572: mol_type = other DNA
atgacagaggacaaggtgactgggaccctggtgttcacagtgataactgctgtcctggggtcgtttcagttcggatatgatattggtgtgatcaacgcgccccagcaggtgattatctcgcattataggcatgtgctgggcgtgcccctggatgatagaaaagcaatcaacaattatgtaattaacagcacggatgagctcccgactatatcctactcaatgaatcccaagcctaccccctgggccgaggaagaaactgtggcagctgcccagttgatcactatgctttggtcactcagtgtgtcctccttcgccgtgggaggcatgacagcctccttcttcggagggtggcttggtgacaccttgggtaggatcaaagcgatgttggtcgctaacattctttcactggtgggcgccctccttatgggcttcagtaagctcggacctagtcacatcttaataatcgcgggccggagcatatcagggctgtactgtgggctcatttctggtctggtgcccatgtatatcggggagattgctcctacggcactgcgcggggccctgggtacatttcaccagttggccatcgtgaccggtatcctgatcagtcagattattggcctggagtttattctcggaaactacgacctttggcacattcttctgggactaagtggcgttcgcgccattctgcagtcccttctcttattcttttgcccagagtctccaagatacttgtatattaagctggatgaggaggtcaaagccaagcagagcttaaagcgtcttagagggtatgatgatgtgacaaaggatataaatgaaatgagaaaggagcgcgaggaggcaagcagtgagcagaaagtgtccatcatccagctcttcaccaattcttcatatcggcaacccatcctggtcgccttgatgctgcacgtggcacagcagttctcaggcataaacggtatcttctactattccacttcaatcttccagaccgccggcatctccaagcccgtgtacgctaccattggcgtgggggcagtcaatatggtgttcaccgcggtgagcgtcttcctcgtggaaaaagccggaagacgctcgctatttttaatcggaatgagcggtatgttcgtttgcgctatcttcatgtcagtgggactcgtgctccttaacaagttctcttggatgtcatacgtttctatgattgctatctttctttttgtcagcttctttgaaatcggccctggaccaatcccatggttcatggtagccgaattctttagtcagggaccaagacctgccgccctggcaatagccgccttttccaattggacttgtaactttatcgtggcactgtgttttcaatacattgctgacttttgcgggccctacgtttttttccttttcgcgggcgtcctgctcgcctttacgctttttaccttttttaaggtgcccgagactaaaggcaagagttttgaagaaatagccgcagagttccagaagaagtctgggtctgcccaccgcccgaaggccgcagtggagatgaaattcctcggggccaccgaaactgtc

SEQ ID NO: 19386 - DNA, 1572 bp, synthetic construct
  misc_feature 1..1572: note = source = /note="Description of Artificial Sequence: Synthetic coding sequence"
  source 1..1572: mol_type = other DNA
atgaccgaggataaggtgactggtactctcgtctttactgtcatcaccgccgtgcttggatccttccagttcggctacgacatcggagtgatcaatgctcctcagcaggtgatcatctcccactacaggcacgtgctgggcgtgccactcgacgatcggaaagctatcaataactacgtgatcaactcgaccgacgagctgccgactatctcatactctatgaatcctaagcccaccccgtgggcggaagaagaaactgtggccgcggcccagctgataactatgctgtggtccctgtcagtgtcctcgtttgcggtgggcggaatgactgccagtttctttggaggatggctgggggacaccctgggacggatcaaagcaatgctggtggctaacattctgtctttggtgggtgccctgctgatgggtttctcgaagctgggaccatcacacatcctcatcatcgcaggacgctcgatctcgggcctgtactgcggactcatttcaggcctcgtacctatgtacatcggtgagatcgcaccgaccgcgttgcgcggggctctgggtactttccatcaactggcaatcgtgacgggaatactcatttcacagatcattggtctggagttcatcttgggaaattacgacctgtggcatatactgctcggcctctcgggagtgcgtgcaattctccaaagcctgctcctgttcttttgtccagaatcaccgcggtatctgtatatcaaactggatgaagaagtcaaggctaagcagtcccttaagagattgcgtggatacgacgatgtcacgaaggatatcaacgagatgcggaaggaacgagaggaagcgtcgtcagagcagaaagtgagcatcatccaactctttactaactctagctaccgccagcccatcctcgtcgccctcatgctgcacgtggcccagcaattctcgggaattaacggaattttctactactcgacctccatcttccagaccgccggcatcagcaaaccggtctacgccactataggtgtgggggcggtgaacatggtgttcacggcagtctctgttttcttggtcgagaaagcgggtaggcgctccttgttcctgattggaatgtccggtatgttcgtctgcgctatctttatgagcgtgggactggtgctcctcaacaagttctcgtggatgagctacgtttcgatgatcgctatcttcctgtttgtgtcgttcttcgaaatcggacctggacccatcccatggttcatggtcgccgagttcttcagccaagggccgcgcccagcagcgctggccatcgctgccttttccaactggacttgcaactttattgtggcgttgtgcttccagtacatcgccgacttctgtggcccttacgtcttttttctctttgcgggtgtcctcctggccttcaccctgttcacgttcttcaaagtcccagagacgaaaggtaagagctttgaagagattgccgccgaattccaaaagaagtcggggtccgcccatcgaccgaaagccgcggtggaaatgaagtttttgggcgcgaccgaaaccgtg

SEQ ID NO: 19387 - DNA, 1572 bp, synthetic construct
  misc_feature 1..1572: note = source = /note="Description of Artificial Sequence: Synthetic coding sequence"
  source 1..1572: mol_type = other DNA
atgaccgaggataaagtcactggcaccctggtgtttactgtcattaccgccgtgctgggttcatttcaattcggatacgacattggtgttatcaacgccccacagcaggtgataatctcgcattaccgacacgtgcttggcgtgccacttgatgatagaaaggcaatcaacaattatgtcattaacagtacggatgaactgcctaccatctcatactctatgaatcctaagccgacgccttgggctgaggaagaaactgtggcagccgcgcagctcattactatgctgtggtcactttcagtgtcatcattcgcggtcgggggcatgaccgcgtcgttttttggcggatggctcggtgacactctgggtcgcattaaggcgatgctggtggcgaacatcctttccctggttggggccctcctcatggggttttcgaaacttggtccttcacatattctcattatcgcaggaaggtcaatctcggggttgtactgtggacttatttcagggctggtccctatgtacatcggcgaaattgcaccaactgcgctgaggggggcactggggactttccaccagctggcgatagtgactggaattctgatatcccaaatcattggtcttgaattcattctgggtaattacgacctgtggcatattctccttggactctccggagtgagagccattctgcaatcactcctgctgttcttctgccccgaatcccccaggtacttgtacattaaactggatgaagaagtgaaggccaagcagagccttaagcgcctgaggggttacgatgatgtgaccaaagacattaacgaaatgcggaaggagcgagaggaagcatcgagcgaacagaaggtcagcattatacaacttttcaccaactcctcctacaggcaaccaatccttgtggcgttgatgctccatgtcgcacagcaattttccggaatcaacgggattttctattactcgactagcatctttcaaaccgcgggtatatccaagcccgtgtacgccacgattggagtgggagcagtgaacatggtctttaccgcggtatcggtctttcttgtggaaaaggccggccggcgtagcctgtttcttatcgggatgtccggtatgtttgtttgcgcaatattcatgtcggttggactggtcctgttgaacaaattctcctggatgtcgtacgtgtcaatgatcgcgattttcctgtttgtctcctttttcgaaatcggacctggaccaatcccatggtttatggtcgcggagttcttttcgcaaggacctcggccagcagcacttgccatcgcagcattttcgaactggacctgtaatttcatcgtggcgctttgttttcagtacattgcggatttttgcggaccatacgtgttctttctgtttgccggtgtgcttctggcgtttaccctgttcactttctttaaggtgccagagacgaagggaaaatcctttgaggaaattgcagccgaatttcaaaagaagtccggatccgctcacagaccgaaggccgcggtggagatgaagttccttggagcaaccgaaaccgtg

SEQ ID NO: 19388 - DNA, 1572 bp, synthetic construct
  misc_feature 1..1572: note = source = /note="Description of Artificial Sequence: Synthetic coding sequence"
  source 1..1572: mol_type = other DNA
atgacggaggacaaggtcaccggtaccctggttttcacagtgataaccgcggtgctaggcagcttccagttcggttacgatattggcgtcataaatgccccccagcaagttattatcagtcattaccgccacgttctcggtgtcccgcttgacgaccgtaaggctatcaacaattatgtcatcaactccaccgacgaacttcccacgatatcatattcgatgaacccaaaacctacgccctgggctgaagaggaaacagttgcggcagcacaactcatcacgatgttgtggagtctgagtgtttcgtcgttcgctgtcgggggtatgactgcgtcttttttcggcggatggttaggcgacactctgggccgtataaaggcaatgctcgtggctaacatactttcgctagtcggagcattgctgatgggtttttcgaagctgggcccttcccacattctcattatcgctgggaggtcgatttctggtctctattgtggtcttattagtggtctcgttccaatgtacatcggggagattgcccctactgcgctgcggggtgccctcggtacctttcaccaattggcaatcgtgaccgggatcctcatttcccaaataatcggattggaatttattctgggaaattacgatctgtggcatatcttgctggggctttcaggggtgcgtgccatcctccagtcactgctgctctttttttgccccgagtcgcctcgttacttatacatcaaactggatgaggaggttaaggccaagcaatcgttgaaacgtctccgaggctatgacgacgtgacaaaagatattaacgaaatgcgaaaggaacgcgaagaagcctcgtccgagcagaaggtttccatcatccagctcttcaccaattcttcataccggcagccaatcttggtcgccctcatgctacacgttgcacagcagttttctggaatcaatggtatcttttactactccacttctatcttccaaacagccgggatctccaagccggtatatgcgacaatcggcgttggcgcggtaaatatggtgttcaccgcagtgagtgtattccttgtggagaaggctgggcgacgatccctctttcttattggcatgagcggcatgtttgtttgtgcaattttcatgtcggttggccttgtacttctcaacaagttcagctggatgagttacgtctccatgattgctatcttcctattcgtctcgttttttgaaattgggccaggaccaattccctggtttatggtggcggagttcttttcacaagggcctcgcccagcggccttggccatagcggcgttctcgaattggacatgcaatttcatagtggctttgtgcttccaatatatcgccgatttctgcggtccctatgttttcttcctgttcgcaggcgtcttgctcgcgtttaccctctttacgttctttaaggttcccgagaccaaaggtaagtcattcgaggagattgccgcggagttccaaaagaaatctgggagtgcccatcgaccaaaagcagccgttgaaatgaagtttctcggtgcgaccgaaaccgtg

SEQ ID NO: 19389 - DNA, 1572 bp, synthetic construct
  misc_feature 1..1572: note = source = /note="Description of Artificial Sequence: Synthetic coding sequence"
  source 1..1572: mol_type = other DNA
atgactgaggataaggtgacaggcaccctggtgtttactgtgatcaccgccgtcctcggaagtttccagtttggatacgatatcggagtgattaatgcgccccagcaggtcatcatcagccattaccgacatgtgctgggagtacccctggatgaccgaaaggccatcaataactatgttataaattccacagatgaactccctacaatttcctactcaatgaatccaaaacccaccccatgggccgaggaggaaacagtcgccgcagcacaattgatcactatgctgtggtccctcagcgtgagttctttcgcggtcggcggcatgacagcctcatttttcgggggctggcttggagatactctgggacggataaaagccatgctggttgccaatatactgtcattagtgggtgcgctcctaatggggtttagcaaacttgggccttcacatattctgattatcgccggacgttccatctcaggcctctactgtggcctgattagcggtctcgtccctatgtacatcggcgaaatagcccccaccgctctgagaggtgcactcggaacctttcatcagctggccattgtgactggaatcctgatcagccagattatcggcctcgagttcatcttgggaaattacgacttgtggcacatcctgcttggcttgtctggagtcagagcaattctgcaatctctgctgctgtttttttgtccagaatctccgcgatatctttacattaagttagacgaagaagtgaaggcaaaacagagtctaaaacgacttcgaggttatgacgatgtgaccaaggacatcaatgaaatgagaaaagagagagaggaggcaagctctgagcagaaagtgtcaattatccagctgttcactaactccagttacaggcagccgatccttgtcgccttgatgctgcacgtggcccagcagttctccggcatcaatgggatcttttattacagtaccagcatctttcaaaccgctggcattagtaaacctgtgtatgctacaatcggtgtcggcgctgttaatatggtttttacagcagtgagcgtgttcctcgtggaaaaggctgggcgaagatccctgtttctgataggaatgtcgggaatgtttgtttgcgccatatttatgtcagtcgggttagtgctgcttaacaagttttcttggatgtcatacgtctctatgattgccatctttctcttcgtgagcttttttgagatcggaccaggccccattccctggttcatggtggccgaatttttttcgcagggccctaggcctgcagctcttgcaatcgccgccttctctaattggacctgtaactttatagtggcactttgcttccaatacatagctgacttctgcggcccatatgtgttctttctgtttgctggggtgctgctcgctttcactctgttcacattcttcaaagtgccggaaaccaaagggaaatcttttgaggaaatcgccgccgaattccaaaagaagtccggttctgcacacagacctaaagctgctgttgaaatgaagtttcttggtgccactgaaaccgtc

SEQ ID NO: 19390 - DNA, 1572 bp, synthetic construct
  misc_feature 1..1572: note = source = /note="Description of Artificial Sequence: Synthetic coding sequence"
  source 1..1572: mol_type = other DNA
atgaccgaagataaggtcaccggtactctggtttttaccgtgatcactgccgtcctcggctcgtttcagttcgggtacgacatcggagttatcaatgcacctcaacaggtgatcatcagccactaccgccacgtgcttggcgtccctctggacgaccgcaaggccataaacaattacgtgatcaactccaccgacgaactgccgactatttcctactcgatgaacccaaaaccaactccttgggcggaagaggaaaccgtggccgccgcccagctgatcaccatgctgtggagcctcagcgtctcatcgtttgctgtgggagggatgacggcgtctttctttggcggctggctgggagatactctcggccggatcaaagccatgctcgtggccaacatcctctccttggtcggagctctgctcatgggatttagcaaactgggcccgtcccatatcctgattattgcgggaaggtcgatttcgggactgtactgcggactgatcagcggcctggtgccgatgtacattggagagatcgctccgactgcgctcaggggcgcgctgggaacctttcatcagctggcgatcgtgaccggaatcctgatctcccagatcatcggcctggaattcatccttggaaactacgatctctggcatatcctgctcggtctgtcaggagtgcgggctatcctgcagtccctcctcttgtttttctgcccggaatcaccgcgatacctgtacatcaaactggatgaggaagtgaaggccaagcaatcgctcaaacggcttagaggctacgacgatgtgactaaggacatcaatgagatgaggaaggaaagagaagaggcatcatcggaacaaaaggtgtcgatcatccagctgtttaccaattccagctacagacaaccgattctggtggccctgatgctccacgtggcacagcaattcagcggaatcaacggaatattctattactcaacttcaatcttccaaactgccggcattagcaagccagtgtacgcaaccattggagtgggcgccgtgaatatggtgtttaccgcagtgtcggtctttctggtggaaaaagcaggacggcggagcctgttcctgatcggcatgtcagggatgttcgtgtgtgcaatcttcatgagcgtgggcctggtgttgcttaacaagttctcctggatgtcgtatgtcagcatgatcgcgatcttccttttcgtctcattcttcgagatcggtcctggccctatcccttggttcatggtggcggagttcttctcgcaagggcctcggccggccgcgctcgcaatagccgcgttctccaactggacttgcaatttcatcgtggcgctctgtttccaatacatcgccgacttctgcggaccttacgtgtttttcctgttcgccggagtcctcctggctttcaccctgttcactttcttcaaggtgccagaaacgaagggcaagtcatttgaagagattgctgccgagttccagaagaagtcaggatccgctcacagacccaaggcggcggtcgagatgaagtttctcggagccaccgaaaccgtg

SEQ ID NO: 19391 - DNA, 1572 bp, synthetic construct
  misc_feature 1..1572: note = source = /note="Description of Artificial Sequence: Synthetic coding sequence"
  source 1..1572: mol_type = other DNA
atgacagaagacaaggtaacaggcacccttgtgttcactgtcattaccgccgtgctgggctcattccagtttggctacgacataggcgtgatcaatgccccgcagcaggtgatcatctctcactataggcacgtgctgggggtccccctagatgaccgcaaggctatcaacaattatgtgatcaatagtaccgacgagcttccaactatctcctacagcatgaatccgaagccaactccctgggccgaggaagagactgtggctgccgcccagttaataactatgctatggtccctaagtgtatcttcatttgctgttggcggcatgaccgcgagcttcttcgggggatggctcggcgatactctagggagaatcaaggccatgctcgtcgctaacattctatctctcgtgggagccttactgatgggcttcagtaaactgggccccagtcacatcctgatcatagctggccgctcgatatccggcctgtattgcggccttatctcaggtttagttcccatgtacataggagaaatcgcaccaacagctttgcgaggggctctgggaacattccatcagctcgccatagtcacagggatcttgatctcccagatcataggactggaatttatcctcggcaactacgatctgtggcatattctcctaggtttatcaggagtaagggcgattctccagtctttgctcctgtttttttgtcccgagtcccctcggtacctgtatatcaagttggacgaagaggtgaaagccaaacagtcattaaagagattaaggggctacgatgacgtcaccaaggacatcaatgagatgagaaaggaaagagaggaggctagcagtgagcagaaagtgagtatcattcagttgttcaccaattcaagttaccgtcagcccatcctcgtcgcgctgatgctgcacgtcgctcaacagttctctggcattaacggaatcttttactactcgacaagcatctttcagaccgccgggattagcaagcctgtgtatgccacaattggcgtgggggccgtcaacatggttttcaccgcagtgtcagtgttcctggtagagaaggcaggcagacgcagcctttttctcattggaatgagcgggatgtttgtctgcgccatctttatgagcgtcggtctcgtgctcctcaacaaatttagctggatgagttatgtgagcatgatcgcaatattcctgttcgtgtcatttttcgagattggtccaggcccgatcccctggtttatggtggcagagttttttagtcagggacctaggcctgctgcactggccatagcagccttttccaattggacctgtaatttcatcgtagctctgtgcttccagtacatagcagacttctgcggtccttacgtgttcttcctgttcgctggagtgttgctcgccttcactctgttcaccttcttcaaggtgcctgagacgaagggaaaaagcttcgaagagatcgcggcggaattccagaaaaagagtggctccgctcaccgtcctaaagctgccgtggagatgaaattcctgggtgccacagagactgtt

SEQ ID NO: 19392 - DNA, 1572 bp, synthetic construct
  misc_feature 1..1572: note = source = /note="Description of Artificial Sequence: Synthetic coding sequence"
  source 1..1572: mol_type = other DNA
atgaccgaagacaaggttaccggtaccctggttttcactgttatcaccgcagtactcggttcattccaatttggttacgacatcggtgtcattaacgcgccccaacaagtcatcatatcgcactatcgccacgtccttggcgtcccactggatgacaggaaggctattaataattacgtgatcaactccacggacgagctcccaactatcagttactcgatgaacccaaagcccacgccgtgggccgaagaagaaaccgtcgctgctgcccaattaatcacgatgctttggagtctgtccgtctcctccttcgccgtcggtggcatgaccgcttccttctttggaggctggctcggtgacaccttgggccgtattaaagccatgcttgtcgccaacattctcagcttagtcggcgccctccttatgggtttctcgaagcttggtccgagccacatcctgatcattgccggtcggtctatcagcggtttgtactgcgggctcatttcaggcttggtgcccatgtacataggtgagatcgcccccaccgctctccgtggcgccctcggaaccttccaccagctggctatcgtcactggaatcctcatttcacagataatcggtctggaattcatcctaggcaactacgatctgtggcatatcctcttgggcctgtccggtgtccgggctatcctgcagtccttgttgctgttcttctgccccgagtccccccgatacctgtatatcaagttggacgaggaggttaaggccaagcagtccttgaagcgcctccgtggctacgacgacgtgacgaaagatatcaacgagatgcgcaaggagcgtgaagaagcctcgtccgagcagaaggtgtctatcatccagctttttactaacagctcgtacaggcaaccaatcttggtagctctgatgctccatgtggcacagcagttctctggcatcaacgggatcttctactattcgaccagtatttttcagaccgcgggtatctccaagcccgtatatgccactatcggtgtcggtgctgtcaacatggttttcactgcagtctctgtcttccttgttgagaaggcgggacgacgctcgctgttcctcatcggtatgtccggaatgttcgtctgcgccatctttatgagcgttggactcgttctcttaaacaagttttcgtggatgtcctacgtctcgatgattgccatctttctcttcgtcagcttcttcgagatcggccctgggcccatcccatggttcatggtggcagagtttttttctcaaggcccacgccccgccgccctggccattgctgccttcagcaactggacctgtaattttatcgtcgccctttgcttccagtacatagccgacttctgcgggccttacgtcttcttcctcttcgctggcgtactccttgccttcacattattcacgtttttcaaggtccccgagacaaagggtaagtcatttgaggaaatcgccgccgaattccaaaagaagtccggctcggctcaccgtcctaaggctgctgtggagatgaagttcctgggggcaacggagactgtg

SEQ ID NO: 19393 - DNA, 1572 bp, synthetic construct
  misc_feature 1..1572: note = source = /note="Description of Artificial Sequence: Synthetic coding sequence"
  source 1..1572: mol_type = other DNA
atgactgaagataaggtgactggcaccctggtctttactgttatcactgcagtgctgggttccttccaattcggttacgacattggagtcattaacgccccgcaacaggtcatcatcagccactacaggcacgtgttgggagtgccgctggatgaccgcaaagccattaacaactacgtcatcaactcgactgatgagctccctactatttcctactctatgaatcccaagccgacgccatgggcggaggaagagactgtcgccgcagcgcaactgattaccatgctgtggtcgctctcggtgtcatcctttgcggtcggagggatgactgcctcattctttggaggatggctcggcgacactcttggaagaatcaaggcaatgctggtcgccaacattctcagcttggtgggggcgcttctgatgggtttctcgaagctgggaccttctcacattctcatcatcgccggacgctccattagcggactgtactgcggcctcatctcgggattggttcccatgtacatcggagaaatcgctccgactgccctgcgcggagcgctgggaacttttcaccaactcgcgatcgtcaccggtatcctcatttcacagatcatcgggctcgaattcatcctgggcaattacgacctctggcatatacttcttggattgtcgggcgtgcgcgccatcttgcagagcctgctgctcttcttctgtccggaaagcccacgctacctttacattaagctggacgaggaagtgaaggccaagcaatcccttaaaaggctgcggggctacgacgatgtcaccaaggacatcaacgaaatgcgcaaagagcgcgaggaagccagcagcgaacaaaaagtgtcgatcatccagctgttcaccaattcgtcgtaccgccagccaatcttggttgctctgatgctgcatgtcgcccaacaattttccggcatcaatgggatcttctactactccacttccatctttcaaaccgccgggatttccaagcccgtgtacgcaactatcggagtgggagctgtgaacatggtgttcactgcagtgtctgtgttcctggtcgaaaaagcgggacggcgctcgctcttcctgatcgggatgtcaggaatgtttgtgtgcgccatcttcatgtcggtcggactggtgctcctcaacaagttctcatggatgtcgtacgtctccatgattgcaatcttcctgttcgtttcgttctttgaaatcggaccgggccccattccatggttcatggtggcggagttcttctcccagggaccacggccggcggctctggcaattgccgctttcagcaattggacttgcaatttcattgttgccctgtgcttccagtacatcgcggacttctgcgggccttatgtgttcttcctctttgccggagtcttgctggctttcaccttgttcaccttcttcaaggtgcctgaaactaagggaaagtccttcgaggaaatagccgccgaatttcagaagaaatcgggatcagcccaccgcccgaaagcagcggtggaaatgaagttccttggagccaccgagactgtc

SEQ ID NO: 19394 - DNA, 1572 bp, synthetic construct
  misc_feature 1..1572: note = source = /note="Description of Artificial Sequence: Synthetic coding sequence"
  source 1..1572: mol_type = other DNA
atgacggaagataaagtaacaggtaccctggtattcacagttattacggccgtcctgggtagcttccaatttggttacgatataggcgttatcaacgcgccgcagcaagtgattatctcgcactatcgtcatgtacttggtgttccattagatgatagaaaagcgattaataactatgtgattaactctacagatgaactgccgacgatttcatatagtatgaacccaaagccgacaccgtgggctgaggaggaaaccgtcgctgccgctcagctgataacaatgctttggtcattatcagtatcatcgttcgctgttggcggtatgactgcgagctttttcggtggctggttaggggatacacttggacggattaaggcgatgcttgttgctaacattctgtctctggtcggcgcattacttatgggcttttctaaacttggaccctcacatatcttaattatcgccggacgtagcatctcaggactttattgtggattgatttctggtttagttccgatgtacattggcgagattgccccgactgccctgaggggcgcgcttggaacctttcatcaactggcaatcgttacgggcatcctgataagccagataatcgggctagaattcattcttggaaactatgatttgtggcatattttacttgggctttcaggagttagagcaatccttcaaagccttcttctgtttttttgtccggaaagtccgcggtatctatacattaagcttgatgaagaagtcaaagctaaacagtcattaaaaagactgagaggatatgatgacgtcacaaaggacataaacgaaatgcggaaagaacgcgaagaggcgtcgagcgaacaaaaagtctccatcattcagttgtttactaatagctcgtatagacagccaatcttagttgcgcttatgttacatgttgcacagcagttttcggggatcaacggaattttctattactcaacaagtatctttcagacagcaggcattagcaaaccggtgtatgcgactattggggtgggcgcggtgaatatggtgtttacagcggtttctgtctttttagttgaaaaagcaggacgccggagcctgtttctgattggcatgtccgggatgtttgtatgcgccatcttcatgtctgtgggtttggtactgcttaataaatttagctggatgtcttacgtttcgatgattgccatttttctgtttgtaagctttttcgagatcgggccagggccgatcccttggttcatggtagcagaattcttttctcaaggaccgcgcccggctgcattggcgattgcagcctttagtaattggacttgtaattttattgtcgccctctgctttcaatatattgccgatttttgcggcccttacgtattttttctgtttgcgggagtgctgttagcgtttacgttgtttacattttttaaagtgccagaaacaaaggggaagtcattcgaagagatcgctgcggagtttcaaaaaaaatccggaagtgctcatcggcctaaggccgccgttgaaatgaaattcttgggcgccactgaaacggtc

SEQ ID NO: 19395 - DNA, 1572 bp, synthetic construct
  misc_feature 1..1572: note = source = /note="Description of Artificial Sequence: Synthetic coding sequence"
  source 1..1572: mol_type = other DNA
atgacggaagataaagtgactgggactctggtctttacggtcattactgcagtgctgggatcctttcaattcggatacgatataggagtcatcaatgccccccaacaggtgataatctcacactacagacatgtgctgggggtgcctttggatgacaggaaggcaatcaacaactacgtcattaactctaccgacgaacttcctaccatttcctactcaatgaaccctaaacctactccttgggccgaggaagaaaccgtcgccgccgcccagcttattaccatgctgtggtcactgtcagtctccagctttgcggtcggaggaatgacggcatcgttttttggaggttggttgggcgacacgctgggaagaatcaaagcaatgctcgtggctaatatccttagcctggtgggtgctctccttatgggattttcaaaactcggtccttcccatatcctgattatcgcaggacgaagcattagcggtctgtactgtggactcatttcaggcctggtccctatgtacattggagagatcgcgcctactgcactcagaggtgcgctgggcacctttcatcagctggccatcgtgaccggtatacttatctcgcagataatcggcctggagtttatactcggcaattacgatctttggcacattctccttggtttgtcgggtgtgcgtgctattctgcagtcgctgcttctgttcttttgtccggagtcaccacgttacctctacatcaagctggatgaggaagtgaaggcaaagcagtccctgaagagacttcgcggttacgatgatgtgaccaaggacatcaatgaaatgcggaaggagcgagaagaggcatcatcggaacaaaaggtgagcataatccagctctttaccaactcttcctacaggcaaccaatcctggtcgcccttatgcttcatgtggcacagcaattttcagggattaatggcatcttctactattccactagtattttccagactgcaggaatttcgaagccagtgtacgcgaccatcggtgtgggtgcagtgaatatggtgtttacggcagtgtcggtctttttggtggaaaaagcgggaaggaggtcgctgttccttattggcatgagcggcatgtttgtttgcgcgattttcatgtccgtcggacttgtacttcttaacaaattcagctggatgtcttatgtgtccatgattgcgatttttctctttgtttcattcttcgaaatagggcccggacccattccgtggttcatggtcgcagaattctttagccaaggccctcggccagcggccctggcgatcgccgcattctcaaactggacttgtaactttattgtggcgctttgctttcaatacattgcggatttttgtgggccttacgtcttttttctttttgcaggggtccttcttgcgtttaccctctttacgttctttaaggttccagaaaccaaaggtaaatcgtttgaagaaattgccgcagaattccagaagaaaagcggttctgcccatcgccctaaggcagctgtggaaatgaagttccttggagctactgaaaccgtc

SEQ ID NO: 19396 - DNA, 1572 bp, synthetic construct
  misc_feature 1..1572: note = source = /note="Description of Artificial Sequence: Synthetic coding sequence"
  source 1..1572: mol_type = other DNA
atgactgaagataaggtgaccgggactctcgtgttcactgtcattactgcagtgctcggatcgtttcaattcggttacgacattggggtgattaacgctccacagcaggtgatcatatcacattaccgtcacgtgttgggggtgcctcttgatgatcggaaagcaatcaacaactacgtgattaactcgaccgatgaacttcctactatctcgtactcaatgaacccaaaacctactccctgggcggaagaagaaacggtcgctgctgcccaacttatcaccatgctgtggtccctgtcggtgagctcctttgcagtcggaggaatgaccgcatcgttcttcggaggctggcttggggataccctcggcagaataaaggcaatgctggtcgcgaatattctttcactggtgggggcactccttatggggtttagcaagctggggccatcccatattctcatcattgcggggcggtccatctcgggactgtactgtggactgatctcgggtttggtccccatgtacataggcgaaattgcaccaactgccttgcggggtgcactcggaacttttcatcaactggcaatcgtgactgggatacttattagccagattatcggcctggaattcattctgggcaactacgacctttggcatattcttcttggactgtcgggtgtccgcgccattttgcaaagccttctgctctttttctgtccggaatcaccgagatacctctacattaagctggatgaagaagtcaaagccaagcagagcctgaaacgtcttagaggatatgatgatgtgactaaggacattaatgaaatgaggaaggaacgggaggaagcctcgtcggaacagaaagtgtcaatcattcagctttttaccaattcttcgtacaggcagccgattctggtggcactgatgctccacgtggcacagcaattttcaggtattaacgggattttctattactccacttccattttccagaccgcaggaatttcaaaacctgtctatgcaactatcggtgtcggcgctgtgaatatggtctttacggccgtgtccgtgttcctcgtggagaaagcaggacggcgctcgctttttctgattggcatgtccgggatgttcgtgtgtgccatctttatgtcagtgggcctggtcctccttaacaaattctcgtggatgtcatacgtttccatgattgccatcttccttttcgtctcgttttttgagattggtcctggaccaattccctggtttatggtggcggagtttttcagccaaggacctagaccagccgctctcgccatcgcagcattctccaactggacctgcaactttattgtggcgctttgttttcagtacattgccgatttctgcggtccttacgtattctttctgtttgcgggcgtcctgctggcatttaccctgtttacgtttttcaaagtccctgaaaccaaggggaaatcctttgaggaaatagccgctgaatttcagaagaaatccggctcagcacatagacccaaggcagccgtggaaatgaaatttctgggtgcgaccgaaaccgtc

SEQ ID NO: 19397 - DNA, 1572 bp, synthetic construct
  misc_feature 1..1572: note = source = /note="Description of Artificial Sequence: Synthetic coding sequence"
  source 1..1572: mol_type = other DNA
atgacagaggacaaggtgacaggaacgttggtgtttacggtgattaccgctgttctcggatcgttccagttcggttatgacataggagtgattaatgctcctcagcaggtcattatcagccactaccgccacgttctcggcgtgcccttggacgacaggaaagccatcaacaactatgtgattaatagcaccgatgagctcccaactatttcttattctatgaaccccaagcctaccccctgggctgaagaggagacagtcgcggcagcacagctgataacaatgctgtggagcctcagcgtttccagtttcgctgtaggtggtatgactgccagcttttttgggggctggctcggtgacaccttggggaggatcaaggctatgctcgtggctaatatcctatccttagtgggtgccctcttgatgggtttttcgaagttgggcccctcgcatattctgatcattgccggccgatccattagcggactttactgtggcctaatatcaggcctcgtgccaatgtatattggcgagatagcccctaccgcactaagaggagccctagggaccttccatcaactcgcaatcgtgaccggaatactgatatctcagatcataggcctggaatttattctgggcaactatgacctgtggcatatactgctcggcctgtcgggggtgcgcgctattcttcagagtctcctgctgttcttttgtcctgaaagtccgcggtacctgtacattaaactggacgaggaagtaaaggctaagcagagtttgaagcgactgaggggctacgatgatgtcactaaggatattaatgagatgcgaaaagaaagagaagaggcgagctccgaacaaaaagtgtccataatccagctgtttacaaattcttcctaccgacagcccatacttgttgctctgatgctgcacgtggcacagcagttcagtggtatcaacggaattttttactattccacctccatatttcagacagccggcataagcaagcccgtatacgcaaccatcggcgtgggcgccgtgaatatggtcttcactgctgtctccgtcttccttgtggagaaggccgggcgtcggagcctgtttttaattgggatgagcgggatgttcgtgtgtgctatatttatgtctgttggcctggtgctccttaataagttttcatggatgtcctacgtttccatgattgccatctttctgtttgtgtccttttttgaaataggacccgggcctataccatggtttatggtggcagagtttttctctcagggccctaggccagccgcgttggccattgccgcgttcagcaattggacctgtaactttattgtggcattgtgcttccagtacatagccgacttttgtgggccctatgtgtttttcctctttgcgggcgttctgctggccttcactctcttcacattttttaaagtccccgagacaaagggtaagtccttcgaagagatcgctgccgaattccagaagaaatccgggtccgcccaccggccgaaggcagctgtcgaaatgaagtttctgggagccaccgagacagtt

SEQ ID NO: 19398 - DNA, 1572 bp, synthetic construct
  misc_feature 1..1572: note = source = /note="Description of Artificial Sequence: Synthetic coding sequence"
  source 1..1572: mol_type = other DNA
atgaccgaggataaggtgactggaaccctggtgttcactgtgatcaccgcggtgctgggttcatttcaattcgggtacgacatcggagtgatcaacgcaccgcaacaggttatcatttcacactacagacacgtgctgggcgtgccacttgatgatcgcaaagcaatcaacaattacgtgataaactcgacggatgagctgccaaccatctcatattcaatgaatccgaagcccacgccttgggcggaggaagagactgtcgccgccgctcagctcattaccatgctgtggtccctttcagtcagctccttcgctgtggggggaatgaccgctagcttcttcggtggctggttgggcgataccctcgggcgcatcaaagcaatgctggtcgcaaatatcctgtccctggtcggtgccctgcttatgggattcagcaagttgggtccgtcgcatattctcatcatcgccggaagaagcatatcaggactctactgcgggctcatctcaggactggtacccatgtacataggagagatcgcccccactgcactgagaggggctttggggactttccatcagctcgcaattgtcacgggtatcctgattagccaaatcatcggactggagtttatcctgggaaactacgacctctggcatatcctgctgggactgagcggcgtccgggcgatcctgcagtccctgttgctcttcttttgcccagaatcccctcggtacctgtacatcaaactggacgaggaagtgaaggctaagcaatccctgaagcggctccggggatatgacgacgttactaaggacatcaatgaaatgcgcaaggagcgggaagaggcttcctcagaacaaaaagtctcgatcattcaactgtttacgaactcgagctaccgccagcctatcctcgtggccctgatgcttcacgtggctcagcagttctcaggcataaacggaatcttttactactcgaccagcatctttcagaccgccggcatttcgaagccagtctatgcgactattggcgtgggagcggtcaacatggtattcaccgccgtctctgttttcctcgtggaaaaggccggcagaagatccctgtttctgatcgggatgtccggaatgttcgtctgcgcaatctttatgtccgttggactcgtgctcctgaacaagttctcttggatgtcgtacgtgagcatgatcgccatcttcctgttcgtgtctttctttgagatcggcccggggccgattccgtggtttatggtggctgagttcttctcgcagggaccccgccccgccgctctggccattgccgcatttagcaattggacttgtaactttattgtcgccctctgctttcaatacatcgccgacttctgcggcccgtacgtgttctttcttttcgccggcgtgctgcttgcctttactcttttcaccttctttaaagttcctgaaacgaagggcaaatcgttcgaagaaatcgccgcagaattccagaagaagagcgggagcgcacaccgacctaaggccgcggtggagatgaaattcctgggagctactgaaactgtg

SEQ ID NO: 19399 - DNA, 1572 bp, synthetic construct
  misc_feature 1..1572: note = source = /note="Description of Artificial Sequence: Synthetic coding sequence"
  source 1..1572: mol_type = other DNA
atgaccgaagataaagtgacgggaacgctggtgtttaccgtcatcactgcagtgctgggctcattccagtttggatacgacattggagtcatcaacgctcctcaacaagtgattatttcccattaccgtcacgtgctgggagtgccgctcgatgacagaaaagccatcaacaactacgtcatcaacagcaccgacgagctcccaacgatttcgtacagtatgaatccgaaaccgaccccgtgggctgaagaagaaacggtggcagcggcgcagctgatcaccatgttgtggagcctgtcagtttcgagcttcgccgtgggaggcatgacggcctcctttttcggtggctggctgggcgacaccctcgggcgcatcaaggcaatgcttgtggcgaacattctgtcgctggtgggagcactgctcatggggttctccaaactcggaccttcgcacattttgatcatcgctgggcgttctatttccggattgtactgcggtctgatctccggcctcgtcccaatgtatatcggggagatcgcccctaccgcgctgcgcggcgccctcggtaccttccaccagctggcgatcgtgactggtatccttatctcacaaatcatcggacttgagtttatcctcggaaattacgatttgtggcatattctccttggactctcgggagtgcgcgccatcctgcaaagcctgctgctgttcttctgtcctgaatctccacgctacctttacatcaaacttgacgaagaggtgaaggcaaagcagagccttaagaggctccggggatacgatgatgtgaccaaggatataaacgagatgcgcaaggagcgcgaagaggcatccagcgagcagaaggtttccatcattcagctgttcaccaactcaagctatcggcaacccatcctcgtggcactgatgctgcacgtagcgcagcagttctcgggtatcaatggcatcttctactacagcacttcaattttccagactgccggcatctctaaaccggtctacgcaaccataggagtgggggccgtcaacatggtcttcactgctgtgtcggtgttccttgtggaaaaggctggacggcggtcgctcttccttatcggaatgtccgggatgttcgtgtgcgccatcttcatgtcggtgggactggtcttgctgaataagttctcctggatgtcatatgtatccatgattgcgatcttcctcttcgtgagcttctttgaaatcggtcccggacctataccctggtttatggtggcggagttcttttctcaaggaccccggcccgcagccctggccatcgcggctttctcaaattggacctgcaatttcatcgtggccctgtgcttccagtacatcgcggacttttgtggaccatacgtcttcttcctgttcgcaggggtcctgttggccttcactctgttcacttttttcaaggtgccggaaactaaggggaagtcgttcgaagaaatcgccgcagagttccagaagaagagcggaagcgctcacaggccgaaggctgctgtggagatgaagttcctgggagccactgaaactgtc

SEQ ID NO: 19400 - DNA, 1572 bp, synthetic construct
  misc_feature 1..1572: note = source = /note="Description of Artificial Sequence: Synthetic coding sequence"
  source 1..1572: mol_type = other DNA
atgactgaagataaggtgaccggcaccctcgtgttcactgttataactgcagtcctgggatcctttcagtttggttacgatatcggggtgatcaacgcgcctcagcaggtgatcatcagccactacagacatgttttgggcgtgccactcgatgaccgaaaggcaatcaacaattatgtcatcaattcaaccgatgaactccctaccatctcgtactccatgaacccaaagcccaccccgtgggcagaggaagaaaccgtggccgccgcacaactcattactatgttgtggtcgctgtcggtgtcgtcatttgcagtgggagggatgacggcatcgttctttggtgggtggcttggagacactcttggtaggattaaggcaatgcttgttgccaacatattgagcctggtgggagcgcttcttatgggttttagcaagctcggtccgtcccatatacttatcatagcaggccggtccatttccggactctactgcggccttatctcggggctggtgcctatgtacattggtgagattgcaccaactgcactgcgtggagcattgggaacttttcatcaactggccatcgtcaccggaatacttatctctcagattattggacttgagttcatcctgggcaactacgacctgtggcacatcctgctggggctgtcgggcgtccgcgcaatactgcaatccctcctcctgttcttttgtccagagtcgccccggtacctttacattaaacttgatgaagaggtgaaggcaaaacagtcccttaagcgattgcgtgggtacgacgatgtgactaaagacattaatgagatgagaaaagaacgagaagaggcttcatctgagcagaaagtctcgataattcaattgtttaccaattcgtcctataggcagcctatcctggtggcccttatgcttcacgtggctcaacagttttcggggattaatggcatcttttactacagcacctcgatttttcagaccgcgggtatctcgaagccagtctatgcgaccattggagtgggcgcagtcaacatggtgtttacggctgtgtccgtctttttggtggagaaggcaggtaggagaagcctctttctcattggaatgtccggtatgtttgtctgtgcaatcttcatgtcagtgggtcttgtccttctgaataagttcagctggatgtcatacgtgtcaatgattgctattttcctctttgtgagcttttttgagattggacccggaccgattccgtggttcatggtggcggagtttttcagccagggcccacggccagccgccctcgcaatcgcagcattttcgaattggacttgtaactttatagtggccctctgttttcaatacattgccgatttctgtgggccatacgtcttttttctgtttgctggcgtgctgctcgcattcactctgtttaccttcttcaaagtccccgaaactaagggaaagtcctttgaagaaattgcagccgaattccagaaaaagtcggggtccgcccatcgcccaaaggccgctgtggagatgaaatttcttggggctactgaaacggtg

SEQ ID NO: 19401 - DNA, 1572 bp, synthetic construct
  misc_feature 1..1572: note = source = /note="Description of Artificial Sequence: Synthetic coding sequence"
  source 1..1572: mol_type = other DNA
atgacggaagataaggttacgggaacattagttttcacggtgatcactgcggtgttgggtagtttccagtttgggtatgacataggtgtcatcaacgctcctcagcaggtgatcatctcacactaccggcacgtcctgggagtccccctagatgaccgcaaggcgatcaataactacgtcatcaattcgactgatgaattaccaacaatcagctactccatgaatcccaaaccaactccctgggccgaagaggagaccgtcgccgccgcacagctgattactatgctatggagtctcagcgtttcctccttcgccgttggcggtatgacggcaagctttttcggcggatggctgggagatacccttggcagaattaaggccatgctggtagctaacattttgtctctggtgggggctcttctaatggggttttcaaagctggggccgtctcatatattgattattgccggacgttcaatcagcggcctttactgcgggctcatcagcggactggtcccaatgtacattggcgagattgctcccactgccctgagaggcgcactcggtactttccatcagctggccattgttaccggcatcctgataagccagattattggactggagtttatcctgggaaattacgacctgtggcatatcctcctcggcttaagcggagtccgagccatacttcagtccctactcctgttcttctgccccgagtcccctaggtatctctacatcaagctcgacgaagaggtaaaggctaaacagtctcttaagcggctgagaggatatgacgacgtcaccaaggatataaatgagatgcgcaaggagagagaagaggccagcagtgagcagaaggtgtccattattcaattatttaccaattctagttacagacaacctattctggtagcactgatgctccacgtagcacaacagttctccggtataaatggcatcttctactattctacgtctatttttcagactgccggcatttctaaacccgtttatgctacgattggtgttggagccgtgaacatggtattcacggccgtcagtgtcttccttgtcgagaaggccggccgccggtccctctttcttatcgggatgagtgggatgtttgtgtgtgcaatcttcatgtcagtggggttagttctcttgaacaaattctcatggatgtcctacgtcagtatgatagccatttttctgttcgtgtcatttttcgagatcggacccgggccgatcccatggttcatggtggcagaattcttctcgcagggtcctcgaccagccgctctagcgattgcagccttctcgaattggacttgcaacttcatagtggccctgtgtttccagtatattgctgacttttgcggaccctacgtgttcttccttttcgcaggagtattgttggcattcactctttttactttcttcaaggtaccggaaacaaaaggcaagtcctttgaggagattgctgcagaattccagaaaaaatccggctcagcccatcggcctaaagctgcagtggaaatgaagtttcttggggctactgagacagtg

SEQ ID NO: 19402 - DNA, 1572 bp, synthetic construct
  misc_feature 1..1572: note = source = /note="Description of Artificial Sequence: Synthetic coding sequence"
  source 1..1572: mol_type = other DNA
atgacagaagataaggtaactggcactcttgtgttcacagtgattacagctgttcttggtagcttccagttcggctatgatattggggttatcaacgctccgcaacaggtcattatctcgcattacagacacgttctgggcgttcctctggacgatcgaaaggcaattaacaactatgtaattaatagcactgacgagttaccaacgatttcctactcaatgaacccaaaaccgaccccatgggctgaagaggaaacagtggctgcagcacaacttatcactatgctatggtccttgtcggtttccagttttgctgtaggcggaatgactgcatccttttttggtggatggcttggtgatacacttggaaggatcaaagccatgctagtagctaacatcttgagtctggtcggagcgcttcttatgggattcagtaaacttggacctagccatatactcataattgcgggcaggagtatttccggactttattgcggattgattagcggacttgttccgatgtatataggagaaatagctccaactgcacttaggggagcgttgggaactttccatcaactggctattgtaaccggtatcttaatctctcaaatcattggactcgagtttattctcggtaattacgacttgtggcatattcttttaggactctcgggcgttagagctattcttcagtccttgctcctgttcttctgccctgagagcccgaggtacctgtatattaagctcgatgaggaggtgaaagccaaacaaagcttgaaaagactcagaggttatgatgatgtgacaaaggatatcaatgagatgaggaaagaacgtgaagaggcatcttctgagcaaaaggtttcaattattcagttattcactaacagtagctatcgccagccaatcttagtagcccttatgctacatgttgcacagcaatttagtggaattaatggcatcttttactattcaacaagtatctttcaaaccgccggtataagtaaacctgtttacgccaccataggagttggtgcagttaatatggttttcactgctgtttccgtttttctggttgaaaaggctgggagacgctccctcttcctgattgggatgagtggaatgtttgtttgtgccatctttatgagcgttggacttgtactattaaacaaattttcttggatgtcatatgtttcgatgattgctattttcttattcgtgagtttttttgagatcggtcctggaccaatcccatggtttatggtcgcagaattcttctctcagggaccacgtcctgcggctttagcaattgccgcattttctaactggacttgtaattttatcgtggcattatgttttcagtacattgctgacttctgtggtccctacgtgtttttcttgtttgccggtgttttgttagcttttactctattcactttctttaaggttcctgaaaccaaggggaagagtttcgaagagattgctgctgaatttcaaaagaaatccgggagtgcacacagaccaaaggccgccgtggagatgaaattccttggtgctacggagactgtt

SEQ ID NO: 19403 - DNA, 1572 bp, synthetic construct
  misc_feature 1..1572: note = source = /note="Description of Artificial Sequence: Synthetic coding sequence"
  source 1..1572: mol_type = other DNA
atgactgaagataaggtgacgggcactcttgtattcacagtaataactgctgtgctcgggagcttccaattcggctacgacattggcgtcattaatgctcctcagcaggtcattattagccattacaggcacgtcctgggcgtgcccctcgacgatagaaaggcaatcaacaattatgtcattaacagtacagacgagttgcccacaatctcttacagcatgaatccaaagccaaccccatgggctgaggaagagacggtcgctgctgcacagttaattactatgttgtggagcctgagcgtctcatcatttgcagtgggcgggatgactgcgagcttttttggaggatggctcggtgacactcttgggagaatcaaggccatgctagtcgctaacatcctcagtctggtcggggcccttttgatgggcttttccaaactaggtcccagtcacatcttaatcatcgcaggcagatctatttccggactgtattgtggactgattagcggcctcgtgccaatgtatatcggagagatcgcccctacagccctgaggggggcactgggtacattccatcagctcgctatagtgaccggcatcctcatttcgcagatcattgggttggagtttattttggggaactacgatctctggcacatactgttgggcctgtccggcgttcgtgcgatcctccagagcctgttgctcttcttctgtcccgaatccccgcggtatctctatatcaaactggatgaggaggtcaaggcgaagcagagtctgaaacgtctgagggggtatgacgacgtaaccaaggacataaatgagatgagaaaggaaagagaagaagcctcctctgagcagaaggtaagcataatccagctgtttacaaattcctcctatcggcagccgatcctggtagccctgatgctgcacgtagcacagcaattttcgggcattaatgggatcttctattactctacaagcattttccagactgccgggattagtaaacctgtctacgccacaataggcgtaggggcggtgaatatggtgttcacagccgtgagtgtgtttttggtcgaaaaagctggacggcggagtcttttccttataggtatgtccggcatgttcgtctgtgctatttttatgagtgtgggactcgttctgttgaataagtttagctggatgagttatgtgagtatgatcgccatattccttttcgtgtccttttttgagataggccccggtcccatcccctggttcatggtagcggaatttttttcccagggccctaggcccgccgcgctggcaatcgccgcgttctctaactggacctgcaactttatcgtggcactatgtttccagtacatagccgacttctgtggaccatacgtgttcttcctctttgctggggtgctgctggctttcaccctgttcacattctttaaggtgcccgaaacaaagggcaagtccttcgaggagatcgcggccgagtttcagaaaaagtctgggtctgctcataggccaaaagcagcagtggagatgaaattccttggcgccactgaaaccgtg

SEQ ID NO: 19404 - DNA, 1572 bp, synthetic construct
  misc_feature 1..1572: note = source = /note="Description of Artificial Sequence: Synthetic coding sequence"
  source 1..1572: mol_type = other DNA
atgaccgaggacaaggtgactgggacactggtcttcaccgtaattaccgccgtgctgggctcgttccaattcggttacgatattggagtcatcaatgctccacagcaggttataatttctcactatagacatgtgttgggagtcccccttgatgatcgcaaggccattaataattacgtgattaatagtacagatgagctcccaacaatctcttactctatgaaccccaagcccaccccctgggctgaggaggaaaccgtggcagccgctcagctgatcaccatgttgtggtccctcagcgtgagtagcttcgccgttggcgggatgactgccagctttttcggagggtggttaggcgacacccttgggaggattaaagcaatgctcgttgcaaacatactgtcacttgtgggggccctcttaatggggttcagtaaattgggaccctcacacatactcataatagccggccgctctatatcaggactctactgtggccttataagtgggctcgtaccaatgtacattggagaaatagccccgacagccctgcgcggagcgcttggcacatttcatcagctcgcaatcgtgaccggcatactcatttcacagataatcgggctagagtttattctgggcaattacgacctgtggcatatacttttaggactatcaggagtgagggcaatactgcaaagcttgctgctgttcttttgcccagagtcaccgaggtacctgtacatcaagctggatgaggaagtaaaagcaaaacagtctctcaaaaggctaagaggctacgacgatgtcaccaaggatattaatgaaatgcgaaaggaaagggaggaagcaagctcagagcagaaggtgagcattatccagctatttaccaactcttcctacaggcagcctatcctcgttgctcttatgctgcatgtggcccagcagttttcgggaattaatggcatcttttattatagcacctctatctttcaaaccgccgggatttccaaaccagtgtacgctacgatcggagtgggggccgtgaacatggtgtttactgccgttagcgtgttcctggtggagaaggcaggtaggagaagtctattcttaattgggatgtctggcatgtttgtttgcgccattttcatgagtgtaggcttggtactgctgaacaagttctcctggatgagctacgttagcatgattgcaatttttttattcgtttcattttttgagatcgggcctggccctattccttggttcatggtcgcagagttctttagtcagggacccagaccagccgctttggcaattgccgccttttccaactggacatgtaacttcatagtagcactgtgcttccagtatatcgccgatttctgcgggccctacgtctttttccttttcgccggggtactgctcgccttcacactgttcaccttcttcaaggtccctgaaacgaagggcaaaagtttcgaagaaattgctgcagagtttcagaagaagtctgggtctgctcacagacccaaagcagccgttgagatgaagttcctcggggccactgagaccgtg

SEQ ID NO: 19405 - DNA, 1572 bp, synthetic construct
  misc_feature 1..1572: note = source = /note="Description of Artificial Sequence: Synthetic coding sequence"
  source 1..1572: mol_type = other DNA
atgactgaggacaaagttacagggacccttgtcttcacagtgatcacggctgttctggggtctttccagtttggatatgacattggtgtgatcaatgcgccacagcaagtgattatctcgcattaccgtcatgttctaggcgtgcctctggatgatcgaaaggcgatcaacaactacgtgatcaattctaccgatgaactccctacgatttcatatagcatgaacccaaagcccacaccctgggcagaagaagagactgtagccgccgcccaactcatcacaatgttgtggtctctatcggtatcatccttcgcggtgggcggcatgacagcttcattctttgggggatggctgggcgacaccctcggccggatcaaagctatgttagtggctaacatactatccctggtgggagctctcctgatgggttttagcaagctgggacctagccacattctgattatcgctggacgctcaatttctgggttgtattgtggactcatatcaggcttggtgccaatgtacatcggtgagatcgccccaactgcgctccgcggcgcccttggcactttccatcagctggcgattgtgacagggattctcatttcccagataattggattagagtttatcttaggaaactatgacctctggcacatactcctcgggctcagtggggtgagggcgattcttcagtcactgctgttgttcttctgcccagagagccctagatacttgtacatcaagctggatgaggaggtgaaggctaagcagtccctgaagcgcttaaggggatacgatgatgtgaccaaagatattaatgagatgcggaaggagagagaagaggcatcttctgagcaaaaggtaagtatcatacaactcttcacaaattcctcttatcgacagcctatcctggtagccctgatgctgcacgttgcgcagcagttcagcggtatcaacggaattttttactactccaccagcattttccaaactgctggcatttccaaaccagtctacgctaccataggtgtcggagccgtcaatatggtctttacggctgtgagcgtctttctggtggagaaggcaggacggcggagtctgtttctgatcggcatgtccgggatgtttgtgtgtgctatttttatgtctgtgggcctggtgctcttgaacaaattctcctggatgtcctacgtctcaatgattgccatcttcctgtttgtctccttctttgaaatagggcccggtccgataccctggttcatggtcgccgagttctttagccagggaccgcgacccgctgccttagccattgcagccttctcgaattggacctgcaattttattgtcgcattgtgttttcaatacattgcggatttctgcggcccgtacgtgttttttttatttgcaggagttctgctggcatttacactattcaccttctttaaagtgccagaaacaaaaggaaaaagcttcgaggaaatagccgccgaatttcagaagaagagcggctctgctcacaggcctaaggccgctgtcgagatgaaattcctcggagctaccgagaccgtg

SEQ ID NO: 19406 - DNA, 1572 bp, synthetic construct
  misc_feature 1..1572: note = source = /note="Description of Artificial Sequence: Synthetic coding sequence"
  source 1..1572: mol_type = other DNA
atgaccgaagataaggtgaccggaaccctggtgtttaccgtgattaccgcagtccttggttcctttcagttcggatacgacattggggtgattaatgcacctcaacaagtgatcatttcgcattacaggcatgtgcttggggtgcctctggacgatagaaaagccataaacaattacgtcattaacagcaccgacgagctcccaactatttcctactcaatgaatcctaagcccactccatgggcagaagaagaaaccgtcgcggcagcccagctcattaccatgctgtggtcgctcagcgtctcttccttcgcagtgggaggtatgacggcatccttctttggaggctggctgggcgatactctcggcaggatcaaagccatgctggtggcaaatatcctcagcctcgtgggagctctgcttatgggattttctaaactcggaccaagccatatcctgataattgcgggacggagcataagcggtctgtactgtggcctcatcagcggtttggtgcccatgtacatcggagagattgcacccaccgcactccgaggcgcgcttgggacttttcaccagctggcaatcgtgaccggaatcctgataagccagattatcgggctcgaattcattctcggtaactacgacctctggcacatacttcttggattgtccggagtgagggctatccttcaaagccttcttttgtttttctgtcctgaaagccctcgctacttgtacattaagttggacgaggaggtgaaggcaaagcagagcctgaagcgactgagaggatacgatgatgtgacgaaggatatcaacgaaatgaggaaggaaagagaggaggcttcgtccgaacaaaaggtgagcattattcaactctttaccaactcgagctacagacagcctatcctcgtcgcacttatgctccatgtggcccaacaattctcaggtattaacggaatcttttactactccacctcaattttccaaactgccggaatttccaagccagtgtacgcaactataggggtcggtgcagtcaatatggtctttaccgcagtctcggtctttctggtggagaaggccgggagacgtagcctttttctgattggaatgtcaggcatgtttgtgtgcgccatctttatgtccgtgggactcgtcctgcttaacaagttctcgtggatgtcctacgtgtcgatgatagccatctttttgttcgtctctttcttcgaaatcggacccggtcccattccatggtttatggttgccgagttcttttcgcagggacctcggcctgctgcccttgctatcgccgcattctccaattggacgtgcaactttatcgtggctctgtgttttcaatacattgcagatttctgtggaccttacgtgttcttcctcttcgccggtgtcctccttgcatttaccctctttacctttttcaaagtgccagaaacgaagggcaagtccttcgaagagattgcagcggagttccagaagaaaagcggatccgcacataggccaaaggcagccgtggagatgaagtttctcggtgccactgagactgtt

SEQ ID NO: 19407 - DNA, 1572 bp, synthetic construct
  misc_feature 1..1572: note = source = /note="Description of Artificial Sequence: Synthetic coding sequence"
  source 1..1572: mol_type = other DNA
atgactgaggacaaggtgaccggaactctcgtgtttactgtgataacggcagtcctcggctcgttccagtttggttacgatatcggagtgatcaacgcacctcaacaagtcatcatttcacattacaggcatgtgctcggagtgcctcttgacgatcggaaggcaatcaacaattacgtgatcaattcgaccgacgagctccccactatttcctactcaatgaatcctaagcctaccccatgggccgaagaagaaactgtggcagccgcacaactgatcactatgctttggtccctgtcggtcagtagcttcgcggtggggggaatgaccgcatccttttttggaggatggctgggcgacactctcggtaggataaaggccatgctggtggcaaacatccttagcctggttggtgcactgctgatgggattttcgaagctcggtccctcgcacatattgattattgctggtcgtagcatatcgggcctgtattgtgggcttattagcgggctggtccctatgtacatcggcgaaattgcacccaccgcacttcggggggcacttgggacgttccaccagctggcaattgtcactgggattctcatctcccagattataggactggagttcattctgggaaattacgatctttggcacatacttcttggcctttccggtgttagagcaatccttcagtcgcttcttctcttcttttgtcctgaatcgccgaggtacctgtatatcaagctcgatgaagaggtgaaggcgaagcagagcctcaagcgtctgagaggatacgacgacgttaccaaggacattaatgaaatgcgtaaagaaagggaagaagcgtcctccgaacagaaggtcagcatcattcaactgtttactaattccagctacagacaacctattctggtcgcgctgatgttgcacgtggcacaacaattttcgggaatcaatggaatcttctactacagcaccagcatctttcagacggcaggaatctctaagccggtctacgctactattggcgtgggcgcagttaacatggtttttaccgctgtgtcggtgttcctcgtcgaaaaggctggacgacgatcactgtttttgataggaatgtcgggaatgtttgtctgcgcaatctttatgtcggtcggtcttgtcctgttgaacaagttttcgtggatgagctacgtgtcaatgatcgctattttccttttcgtgtcctttttcgaaattggtcctgggcctattccgtggtttatggtggcggagtttttctctcagggccctcgccctgcagcgctcgcaattgcggcattttcgaactggacttgtaatttcattgtcgcgctgtgctttcagtacattgccgatttctgtggaccatacgtgtttttcctgttcgccggagtcctgcttgccttcacgctcttcactttctttaaggtgccagaaactaagggcaagtcgtttgaggaaattgccgcagaatttcaaaagaaatccgggtcggcacatcgtccaaaggccgcagtggagatgaagtttctcggggcaaccgaaaccgtg

SEQ ID NO: 19408 - DNA, 1572 bp, synthetic construct
  misc_feature 1..1572: note = source = /note="Description of Artificial Sequence: Synthetic coding sequence"
  source 1..1572: mol_type = other DNA
atgactgaagataaagtgactggaacccttgtttttacagtgataactgcggttctgggaagctttcaatttggatatgacatcggtgtcattaacgctccacagcaagtcattatttcgcactatagacacgttttgggtgttccattagatgatagaaaggcgatcaataattatgttattaatagtactgacgagcttccaactatttcatactctatgaacccaaagccaactccatgggcagaggaagaaacagtagctgcggcccaattgatcactatgctgtggagcctttctgtatcttcattcgccgttggcggaatgaccgcttcgttctttggaggttggcttggagacactttaggcaggattaaggctatgctggttgccaatatcctatcactcgtcggagctcttcttatgggtttttccaaattaggaccatcacacatactgataatcgcgggacgaagtatttctggtctttattgcggacttatcagtggactagtgccgatgtacatcggagagattgctccaactgcgctcaggggagcactaggaacattccatcagctcgccattgtcaccggtattctcattagtcaaatcataggtctagagtttatccttggaaattatgacttgtggcatatcttgctaggactctctggtgtcagagctattttgcaatcgctcctgttgtttttctgcccagagagtccacgttacctttacatcaagttagatgaagaagtcaaagctaaacaatcccttaaacgattgcgtggctacgatgatgtcactaaggatattaatgagatgcgaaaagaacgagaagaagctagcagcgaacaaaaagtcagtataatccaactttttacgaactcatcgtaccgacaaccgatcttagtagccttaatgttacacgtagcacagcagttttcgggcattaatggaatcttctattattctacttcgatttttcaaactgctggaataagcaaaccggtttatgccactattggcgtaggggctgttaacatggtgttcactgcagtgtccgtgttcctagttgaaaaggcgggaagacgtagtctctttcttattggaatgtcaggaatgttcgtgtgtgcgatcttcatgtcggtcggcctggtcctcctaaataaattctcctggatgtcttacgtgagtatgatcgcaatttttttgtttgtgtcgttttttgagattggaccaggtccaattccgtggtttatggttgctgaattcttttctcaaggaccacgtccggccgccctcgccatcgcagctttcagtaattggacgtgcaatttcattgtcgcattgtgtttccaatacatcgctgatttctgtgggccttatgtcttctttctctttgcaggagttttgttagcttttacgttatttacattcttcaaagttccagaaacaaagggaaagagcttcgaggagattgcagctgagttccaaaagaaatcgggctctgctcatagaccaaaggctgcagttgagatgaaattcttaggtgctaccgaaacagta

SEQ ID NO: 19409 - DNA, 1572 bp, synthetic construct
  misc_feature 1..1572: note = source = /note="Description of Artificial Sequence: Synthetic coding sequence"
  source 1..1572: mol_type = other DNA
atgacagaggacaaggttacaggcactctcgtgtttaccgtcatcacagctgtgctgggatccttccagttcggttatgacatcggcgtgattaatgccccacagcaggtgatcatctcccactatcgccacgttcttggggtgcctctcgatgaccggaaagctataaataattacgtaattaactcaactgatgaactgccaactattagctactctatgaaccctaagccaacaccctgggccgaggaggagacagtggccgctgctcagcttattacaatgctatggtccctttccgtttctagctttgccgtaggaggaatgaccgcctcattttttggggggtggctgggtgataccttaggtagaatcaaggctatgctggtggccaacattttatctctggttggcgctctcctcatgggtttctctaaattagggccttctcacatcctcatcattgccggccggagtatctccgggctgtactgcggcctcatctctggtctggtgcctatgtatattggagaaattgccccaaccgcactgcggggtgccctgggcaccttccaccagcttgctatcgttactggcatcctcattagccagattataggtttagagtttatactgggcaattatgatttatggcacattctgttaggcctgtctggagttcgtgccatacttcaatctctcctgctgttcttttgccccgagagtccccgctacctgtacatcaagcttgatgaagaagttaaagccaagcagagccttaaaaggttgcgcggatacgatgatgtgaccaaggacattaacgagatgcgaaaagagagagaggaggcttcttccgagcagaaggtcagcatcatccagctcttcaccaatagctcctaccgtcagcccatactagtggccctgatgctgcacgtcgctcagcaattttctggtatcaatggcattttttattatagtacatcgatttttcagacagccggcatctccaaacctgtgtatgccaccattggcgtaggcgccgttaatatggtcttcaccgccgtgtcagtcttcctcgtcgaaaaagctgggcgtagaagtctgttcctgatcggcatgagcggaatgtttgtgtgcgccatcttcatgagcgtgggattggtactgctgaacaaattttcctggatgagctacgtatcaatgatcgctatatttctgttcgtctctttcttcgaaattgggcctgggccaataccctggttcatggtcgccgagtttttttcgcagggtccaaggcccgcggctctcgctatcgctgctttctccaactggacttgtaatttcatcgttgcactgtgttttcagtacattgcagacttttgtggtccgtacgttttcttcctcttcgccggtgtgctgctggcattcactctgttcacttttttcaaagtgccagagaccaaggggaaatctttcgaagaaatcgccgcggagttccagaaaaagagcggctcagctcatagacctaaggccgccgtcgagatgaagttcctgggtgccacagagacagta

SEQ ID NO: 19410 - DNA, 1572 bp, synthetic construct
  misc_feature 1..1572: note = source = /note="Description of Artificial Sequence: Synthetic coding sequence"
  source 1..1572: mol_type = other DNA
atgactgaggacaaagtgactggaaccttggttttcaccgttattaccgcagttcttggatcgtttcaatttggttacgatattggcgtcattaatgcaccccaacaagtgatcattagccattatcgccacgtgttgggcgtcccactggatgacagaaaagcaattaacaattacgtgattaactcgacggatgaactgccaaccattagctactcgatgaatcctaagccaacgccttgggcggaagaggaaacggtcgcagcagcacaactcatcaccatgctttggtcactgtccgtgagctcgttcgctgtcggaggaatgaccgcatcattctttggaggttggttgggtgacacgttgggcaggattaaggcaatgctcgtcgccaacattctctcgctcgtgggggcacttctgatgggcttttccaaacttggaccttcgcatatccttatcatagccggtcggtctatctcgggtctgtactgtggactgatcagcggactcgtgcctatgtacatcggagaaatcgcgccaacggctctgagaggtgctcttggcacctttcaccagttggcaatcgtcaccgggatcctgattagccagatcattggactcgaattcatcctcggcaattacgacctttggcacatattgcttggcctgtcgggagtgcgcgcaattcttcagagcctgctcctgtttttctgtcccgagagcccccgatacctttacattaagctcgatgaagaagttaaagcgaagcagtcccttaaacgccttagaggatacgatgacgtgaccaaggatatcaatgaaatgcgcaaagaacgggaagaagcaagctcggaacagaaggtgtccattatccaactgtttaccaatagcagctacagacagccaattctggtcgccctgatgttgcatgtggcacaacagttttcgggaatcaatggaatcttctattactcaacttcgatttttcagaccgcgggaatcagcaagcctgtgtacgcgactatcggtgtcggtgccgtgaatatggtgttcaccgcagtctcggtgttcctggtggagaaggcggggcgtaggtcgctgttcctgataggaatgagcggtatgtttgtctgcgcaatcttcatgtccgtgggtctggtgctgctgaataagtttagctggatgtcatacgtgtccatgatcgccatttttctcttcgtgtcgttctttgaaattggtcctggtcctattccatggtttatggtcgcagaattcttttctcaaggaccacggcctgcagctttggccattgccgcattttccaactggacttgtaacttcattgtggcgctgtgttttcaatacattgccgatttttgtgggccttacgtgttttttctgtttgccggagttctgctggcattcacccttttcacctttttcaaagtgccagaaaccaaaggcaagtccttcgaagaaatcgcggcagaattccagaagaagagcggatccgcccatagaccaaaggcagcggtcgagatgaagttccttggtgccactgaaaccgtc

SEQ ID NO: 19411 - DNA, 1572 bp, synthetic construct
  misc_feature 1..1572: note = source = /note="Description of Artificial Sequence: Synthetic coding sequence"
  source 1..1572: mol_type = other DNA
atgactgaggataaagtcactggcaccctggtttttaccgtgatcacagctgtgctggggagctttcaattcggatacgacattggcgtgattaatgctccgcagcaggtgatcatttctcattatcgacacgtattgggtgtaccgttggacgacagaaaggccattaataactacgtaataaatagtacagatgagctgccgacaatatcttattctatgaatcccaagcctactccctgggctgaggaagagactgtggcagcggctcagcttattaccatgctctggtctctctccgtgagcagttttgcggtcggggggatgaccgccagctttttcggaggatggctgggcgataccctggggagaatcaaggccatgctggtggctaatattctgtcccttgtcggagctctcctgatgggcttcagtaagttgggccctagtcacatcctgatcatcgctggccgttccattagcgggttgtattgtggtttgatctctggacttgttccaatgtatatcggcgaaatcgctcctactgccctgcggggagcccttgggacttttcatcagttggcaatcgttacggggatcctcatctcgcagattattggcttggaattcatactgggtaactatgacctgtggcacattttgctggggctgtcaggtgtgcgtgccattctccaaagtcttctgctgttcttttgtccagagtctccccgttatctgtacattaagctcgatgaagaggtcaaagcaaaacagagtctgaagagactgcgggggtacgatgacgtcactaaggatattaatgagatgcgaaaggaacgagaggaagcctcatctgaacagaaggtttccatcatccagctgttcaccaacagttcgtacaggcagccaatcctggttgcactgatgttacacgttgctcagcaattcagcgggatcaacggcatcttctattacagtaccagcatcttccagaccgctgggatatccaaaccagtctatgccacaatcggggttggtgccgttaacatggtcttcacggccgtctctgtgttcctggtcgagaaggcaggtcgaaggtccttattcctgatagggatgagcggcatgttcgtgtgcgccattttcatgtcagtgggcctggtcctgctcaataaattctcctggatgtcttacgtctctatgatagccatattcttgttcgtctccttttttgaaatagggcctgggcccattccctggttcatggttgcagagttcttcagccagggacctagaccagccgccctcgcaattgccgcattcagcaattggacctgcaacttcatcgttgccctgtgctttcaatacatcgcagacttctgcggcccgtatgtgttcttccttttcgcaggggttctgctggcattcactctgttcaccttcttcaaggtgcccgagactaaggggaagagcttcgaagagatagctgccgaattccagaaaaaatctgggtcggcccacaggcccaaagcagcagtggaaatgaagtttcttggggctactgaaaccgtg

SEQ ID NO: 19412 - DNA, 1572 bp, synthetic construct
  misc_feature 1..1572: note = source = /note="Description of Artificial Sequence: Synthetic coding sequence"
  source 1..1572: mol_type = other DNA
atgaccgaagataaggtaaccggtacccttgtttttaccgtgattacggcggtgcttggtagcttccagttcggctacgacatcggagtcataaacgccccgcaacaggtgatcatttcacactaccgccatgtcctcggcgtgccccttgacgacaggaaggctatcaacaactacgttatcaactcgaccgatgaactcccaactatctcatacagcatgaaccccaagcctaccccatgggcagaagaagaaaccgtggctgcagcccagctcataactatgctgtggtcgctttcggtgtcatcgtttgcagttggaggtatgactgcgtcgtttttcgggggatggctgggagatactctgggccgcattaaggcgatgctggtggccaatattctttcactggttggtgccttgcttatgggttttagcaagctggggcctagccatattcttatcatcgcggggagatcgatttccggcctgtactgcggtcttatttccggactggtgccaatgtacatcggagaaattgccccaacggctctcagaggtgcacttggaacttttcatcaactggcaatcgtgactggaatacttatttcacaaatcatcggacttgaattcattcttggcaattacgatttgtggcatattctgctgggacttagcggagtgcgagcaattctccagtccctgctgctgtttttctgtcctgaatcccctaggtacctttacatcaagctggatgaagaggtcaaggcaaagcaaagcctcaaaagacttagggggtacgacgatgtgaccaaggacattaacgaaatgcgtaaggaacgggaggaagcgtcgtccgaacaaaaggtgagcataatccaactgtttactaactcgtcatatcggcagcctatactggtggcactgatgctgcacgtggcccagcaattctccggaatcaatggcatcttctattactcaaccagcatttttcaaaccgcagggatttccaaacctgtttacgctactattggggtcggggcagtgaatatggtctttaccgccgtgtccgtgttcctggttgaaaaagccgggcgcagatccctgttcctgatcggcatgtccgggatgtttgtctgtgcaatctttatgtcagtgggactggtgctccttaacaagtttagctggatgtcgtacgtgtccatgatagctattttcctttttgtctcatttttcgaaattggtcctgggcccattccttggttcatggtggcagagtttttctcacaaggaccaagaccagcagcactggcaattgccgcattttcgaactggacgtgcaactttatagtggcattgtgctttcagtacatcgcagacttctgtggcccttacgtgtttttcctcttcgcaggcgtgctgctggcatttactctttttaccttctttaaggtccctgaaactaaggggaagagctttgaagaaattgcagcagagttccaaaagaaatccggctccgcacatcgcccgaaggctgcagtggaaatgaaattcctgggcgcaactgagactgtt

SEQ ID NO: 19413 - DNA, 1572 bp, synthetic construct
  misc_feature 1..1572: note = source = /note="Description of Artificial Sequence: Synthetic coding sequence"
  source 1..1572: mol_type = other DNA
atgacagaagacaaggtgaccgggacgctggtgttcacagtcattaccgcggtcttgggaagcttccagtttggatatgacattggcgtgataaacgcaccacagcaggttatcatctcccactacagacatgttctgggtgtgccgctggatgacagaaaagctatcaataattacgtcatcaatagcaccgatgagctgcctactataagctactctatgaacccgaagcccacgccctgggccgaagaagagaccgtggccgctgctcagctgattacaatgctgtggtctctgagtgtttcatcattcgctgtgggaggaatgaccgcaagcttctttggcggctggctgggggatacattgggacggattaaagccatgctggttgccaacatcctgtccctcgtcggcgcactgctgatgggattctccaaactcggaccgagccatatcctgatcatcgctggcagaagcatcagcggactgtattgtggactgatttccggactggtgcccatgtacatcggggaaatcgcaccaaccgcactgcggggcgccctggggaccttccatcagttggccattgtgaccggtatcctcatctcacagatcatcggccttgagttcattcttggaaactatgatctgtggcatatcctccttggtctgtccggcgtacgggcaattttgcagtccctgctgctgtttttttgccctgaatcccctagatacctgtacataaagctggacgaggaggtgaaggcaaagcagtctctgaaacggttgcgcggctacgatgatgtgacgaaagatatcaatgaaatgaggaaggagcgcgaagaagccagtagcgaacaaaaggtcagcataatacagctcttcaccaactcctcttatcgccaacctattctggtggccctgatgctgcatgtggcacagcagttcagcgggataaacggtatcttttattattcaacctccatcttccagactgctgggatcagcaagccggtatatgcaacaatcggcgtaggtgccgtgaacatggtctttaccgccgtttctgtctttctcgtggagaaagctggtcggcgcagcttgtttctgattgggatgagcgggatgttcgtgtgcgcaatcttcatgtctgtgggtctggtgctgctcaacaaattctcatggatgtcatacgtgtccatgattgccatttttctttttgttagtttcttcgagatcgggccaggacccattccttggtttatggtggcggagtttttctcacagggcccgcgccccgctgccttggcgattgccgcctttagtaactggacgtgtaactttattgtggcgctctgtttccagtacattgccgatttttgcggtccatacgttttttttctgttcgccggcgttctcctcgcctttactctcttcacatttttcaaagttcccgagacaaaggggaagtcttttgaggaaattgccgctgagtttcagaagaagagcggctcagcacaccgccccaaggctgcggttgagatgaaattcctcggggctacggagactgtt

SEQ ID NO: 19414 - DNA, 1572 bp, synthetic construct
  misc_feature 1..1572: note = source = /note="Description of Artificial Sequence: Synthetic coding sequence"
  source 1..1572: mol_type = other DNA
atgactgaggataaagtgacggggaccctggtatttaccgtaatcacggccgtactcggatccttccagtttgggtatgacattggcgtgattaacgctccacagcaagtcatcattagtcactaccggcatgtcctgggcgtcccacttgacgacaggaaagcaattaacaattacgtgataaactcgacagatgaactccctacgatatcctattctatgaacccaaaacctaccccctgggctgaagaagagactgtggcagctgcccaactgataaccatgctgtggtcgctgagcgtgtcctcgtttgccgttggcgggatgacggcttccttttttggcggctggctcggggatacccttggacgaatcaaggccatgctcgtggccaacatcctttcgcttgtcggcgccctgctgatgggattctccaaactgggaccttctcacatccttataatcgccgggcgaagtatatctggtctttattgcggcctgatatcggggcttgtccctatgtatatcggcgagattgcaccaaccgcattgaggggagcacttggtactttccaccagctggccattgtcacgggtatcctgattagtcagatcataggtttggagtttatactgggcaactatgatttgtggcatatccttctcggactcagtggggtccgggcgattctgcaatctctgcttctattcttttgccccgagtcaccaaggtacctttacattaaattggatgaggaggtgaaggctaagcaatcattgaagcgtctgcgcggctatgacgatgtgacaaaggatattaacgaaatgagaaaggagcgggaggaggcctcttcagaacagaaggtgtccatcatccagttatttacaaacagctcctacaggcaacctatcctagtggccttgatgctgcacgtcgcgcaacaatttagcggtatcaatgggatcttttattactcaacctccatatttcaaaccgccggcatctccaaacctgtgtatgcgacaattggcgtcggggccgtgaacatggtgtttacagcagtctctgttttcttagtggagaaggctggacggcggtccctgtttctgatcggcatgtcaggcatgtttgtgtgtgcgatcttcatgagcgtgggactggtcctattgaataagttttcatggatgagctacgtaagcatgattgctatatttctgtttgtgagttttttcgagatcgggcccggacccatcccctggtttatggtggcagagttttttagtcagggcccccgcccagctgccctggctattgccgctttctcaaactggacttgtaacttcatcgttgccttgtgcttccaatatatagccgatttttgcggcccgtacgtcttcttcctgttcgcgggagtcctcctggcctttaccctgttcacttttttcaaggtgcctgagaccaaggggaagtccttcgaggagatcgctgccgaattccaaaagaaaagtggatctgcacatcgacctaaagcagcggtggagatgaagttcctgggcgccaccgagacggtc

SEQ ID NO: 19415 - DNA, 1572 bp, synthetic construct
  misc_feature 1..1572: note = source = /note="Description of Artificial Sequence: Synthetic coding sequence"
  source 1..1572: mol_type = other DNA
atgactgaggacaaagtcaccgggaccctcgtgtttaccgtgatcactgcagtcctgggctcgtttcaattcggatacgacatcggagtgatcaatgcgccacagcaggtgatcatctcgcactatcggcacgtcctgggggttccgctggacgaccggaaggcaatcaacaactatgtgattaactcgaccgatgaactgccgaccatctcttactcaatgaatcccaaaccgaccccctgggccgaagaggaaactgtcgctgcagctcaactgatcactatgctgtggtccctttcggtgtcgtcgttcgcggtagggggaatgactgcatccttcttcggggggtggctgggagacactctcggacggatcaaggcaatgctggtcgctaatatcctgagcctcgtgggagccctgctcatgggattctcgaaattgggaccttcgcatatcctgatcatcgcaggacgatccatctcaggcctgtactgcgggctgatctcagggttggtgccgatgtacattggggaaatcgcgcctaccgcgctgcggggagcccttggaactttccaccagctcgccatcgtgaccggtatcctgatcagccagattatcggactggaattcatcctcggcaactacgacttgtggcacatcctgctggggttgtcgggcgtccgcgcgatcctgcagtccctcctgctgttcttctgcccagagtcccctcggtacctgtatatcaagctcgacgaagaagtgaaggctaagcaatctctcaagcgcctgcgcggttacgacgacgtgacgaaggacattaacgagatgagaaaggaacgggaagaggcgagcagcgaacaaaaagtgtcaatcatccagctctttaccaatagctcctaccggcagccgatactcgtggctctcatgctccatgtcgctcagcaattctcagggatcaatggaatcttctattactcgacttccatcttccagactgctggcatcagcaagcctgtttacgccactatcggcgtcggagccgtgaatatggtgtttaccgcagtgtcagtgttcctggtggaaaaggcgggacgcaggtcattgtttctgatcggtatgtccgggatgttcgtgtgcgctatcttcatgtcggtgggactcgtgttgcttaacaagttttcctggatgagctacgtgtcgatgatcgctattttccttttcgtctccttctttgagattgggccaggaccgatcccatggttcatggtggccgaattcttttcacaagggccaagaccagccgccctcgcaattgcggccttctcgaactggacgtgcaacttcatcgtggcactgtgcttccagtacatcgcggacttctgcggaccgtacgttttcttcctctttgccggtgtcctgctggcgttcaccctcttcactttctttaaggtcccggaaaccaaaggcaagtcgtttgaagaaatcgctgccgagttccagaaaaagtcgggctcggctcaccgccccaaagcggctgtcgagatgaagtttctgggagcaaccgagactgtg

SEQ ID NO: 19416 - DNA, 1572 bp, synthetic construct
  misc_feature 1..1572: note = source = /note="Description of Artificial Sequence: Synthetic coding sequence"
  source 1..1572: mol_type = other DNA
atgaccgaagataaagtcaccggaaccctggtgttcactgtcatcaccgcagtccttggatcgtttcaattcggttacgatatcggagtgatcaatgcacctcaacaggtgattatctcccattaccgacacgtgctgggagttccactcgatgatagaaaggccataaacaactacgtgatcaattccacggatgagttgcccactatctcctactccatgaatccaaagccgaccccttgggcagaagaggaaactgtcgcggccgcgcagctcatcaccatgctttggtccctcagtgtctcctccttcgctgtcgggggaatgactgcatcattcttcggaggctggttgggcgacacgctggggaggattaaggcgatgctggtcgctaatatcctgtcgctggttggagcgctgttgatgggtttctcgaaattgggaccttcgcacatcctgatcattgcagggaggtccatctcgggtctgtactgcggcttgatctccggtcttgtcccaatgtatatcggagagatcgcaccgactgccctgaggggagccttgggaaccttccaccaactcgccatcgtcacgggaatcttgattagccaaatcattggactcgaattcatccttggcaactacgacctgtggcatattcttttgggcctctcgggagtgcgggccatcctgcagtcactgctgctctttttctgcccggagtcgccgcgctacctgtacattaagttggatgaggaagtgaaggccaagcagtcactcaagcgcctccggggatacgacgacgtgaccaaggacattaacgaaatgcgcaaggaacgggaggaagcgtcgtccgagcagaaggtgtccatcatccagctgtttacgaactcctcctatcgccagccgatcctggtcgctctcatgttgcacgttgcacaacagttctcaggaattaacggaatcttctactactccaccagcatcttccaaactgcgggtatctctaagcccgtgtacgcgaccatcggagtgggcgcggtgaatatggtgtttacggccgtgtctgtgttcctcgtggaaaaggcgggaagaaggtccctgtttcttatcggaatgtcaggaatgtttgtgtgtgctattttcatgtcagtgggtctggtcctgctcaataagttctcatggatgagctacgtgagcatgattgcgatcttcctgttcgtgtcttttttcgagatcggaccgggaccgatcccgtggttcatggtggcagagtttttctcacagggacccagaccggcggctcttgctatcgctgctttttccaactggacttgcaactttatcgtggccctctgtttccagtacatcgccgacttctgcgggccgtacgtgttctttcttttcgccggagtgttgctggccttcaccctcttcacgttcttcaaggttccggaaaccaagggaaaatccttcgaagagatagccgccgagttccagaagaaatcgggctccgcccaccgcccgaaggctgccgtcgaaatgaaattcctgggagctactgaaactgtc

SEQ ID NO: 19417 - DNA, 1572 bp, synthetic construct
  misc_feature 1..1572: note = source = /note="Description of Artificial Sequence: Synthetic coding sequence"
  source 1..1572: mol_type = other DNA
atgaccgaggataaagttaccggcactctcgtcttcactgtgataactgcagttctaggttcttttcagtttggttatgatatcggcgttattaatgccccccagcaggtcataattagccactataggcacgtgcttggggttccactggatgatcgtaaggcaataaacaactacgtgattaactctaccgacgaactgcctactatctcttactctatgaacccaaaaccaactccatgggccgaagaggagactgtggcagccgctcagctaatcaccatgctttggtccctgtccgtgtcctcattcgccgtcggcggtatgaccgccagtttcttcggcggatggttaggcgatactctgggccggatcaaggcaatgctcgttgccaatatcttgtctctcgtcggcgcactactcatgggctttagcaagctgggccccagccacattttaattatagcagggaggtccataagcgggttgtactgcgggctgatttcaggtctggtgccaatgtacattggcgagatcgcacccacagccctgaggggagccctgggcactttccaccagctagctattgtgacaggcattctgatatctcagatcatcggtctggaattcattctgggcaattacgacttatggcacattttgcttggactgtccggagtgcgggcaatacttcaatcactgctgctttttttctgccctgaatcaccaaggtatttgtatattaaactggatgaggaagtcaaggccaagcagtctctgaaacgcctgaggggctacgatgacgtgactaaggacatcaatgaaatgcgtaaggagcgagaggaggcctcatctgagcaaaaggtgtctattatccaacttttcactaatagcagttataggcagccaatcctggttgctctgatgctgcatgttgcccagcaattcagtgggataaacggcattttctattacagcacctccatattccagaccgctggcatctccaaaccagtttacgccactattggtgttggcgccgtcaacatggtattcaccgccgtatcagtgtttctggtcgagaaagcaggaaggcgttccctgtttctgatcggcatgtcaggcatgttcgtgtgcgccatcttcatgagcgtgggtctggttctcttgaacaaattcagctggatgagctatgtgtccatgatagctatatttctgttcgtgagtttcttcgaaattggccctggacctattccctggtttatggtggcagagtttttttcacagggtccccggcctgcagcccttgcaattgcagcattctctaactggacatgtaatttcattgtcgcactgtgtttccagtacatagccgatttttgtggcccatacgtttttttcctgtttgctggcgttctcttggcctttaccctgtttacttttttcaaagtgccggaaacaaaggggaaaagcttcgaagaaattgcagctgagttccagaaaaagtctggctctgcccatcgtcctaaagcagctgttgagatgaagtttctgggcgccactgaaactgtc

SEQ ID NO: 19418 - DNA, 1572 bp, synthetic construct
  misc_feature 1..1572: note = source = /note="Description of Artificial Sequence: Synthetic coding sequence"
  source 1..1572: mol_type = other DNA
atgactgaagataaggttactgggacccttgtgttcaccgtgatcactgcagtgctcggttcgtttcagtttgggtacgacattggagtgatcaatgcgccgcagcaagtgatcatctcccactacagacacgtgctcggcgtcccactcgatgaccgaaaggccatcaacaattacgtgatcaattccactgacgaactgccgaccattagctacagcatgaaccctaagccaactccatgggctgaggaggaaaccgttgccgcggcccaattgattactatgctgtggtcgctctccgtgagctcctttgccgtgggaggcatgaccgctagcttcttcggcggatggctgggagacaccttgggcaggataaaggccatgttggtggcgaatattctctcactcgtcggcgccctgctgatgggattcagcaagctcggcccatcgcatattctgatcatcgcaggaagatccatctccggactctactgcggactgatctcgggactcgtgccaatgtatatcggcgagatcgcccccaccgcccttagaggagccctggggactttccatcaactggcaatcgtgactggaattctcatctcacaaatcattggcctcgaattcatcctcggaaactacgacctgtggcacatcctcctgggattgtccggagtgagagccatcctccagtcgttgctgctgttcttctgcccggaatcaccaaggtacctgtacatcaaacttgacgaagaggtcaaggcgaagcaatcactgaagcgcttgcgcggatacgacgacgtgactaaggacattaatgagatgagaaaggaacgcgaggaagcgagctcggaacagaaggtgtcgatcatccagctgttcactaactcctcctaccgccaaccaatcctggtggccttgatgctgcatgtcgcccaacaattctcggggatcaatgggatcttctactacagcacctccatttttcagaccgccggaattagcaagcctgtgtacgcgaccatcggagtgggagccgtgaatatggtgttcaccgctgtgtcggtgttcctggtcgagaaagccggacgtcgcagtctttttcttattggaatgtccggtatgttcgtgtgcgccatcttcatgtcggtggggctcgttctgctgaacaagttctcctggatgagctacgtgtcaatgatcgcgatcttcctcttcgtgagcttttttgagatcggcccggggccaatcccgtggttcatggtggctgagttctttagccaaggccctcggcctgcagcgctggctatcgcagcattctcgaactggacctgcaacttcatcgttgcattgtgcttccagtatatcgctgatttttgtggaccttacgtcttttttctcttcgccggggtgctgctggctttcaccctgttcactttcttcaaggtgccagagactaagggtaaatcgttcgaagaaatcgcagcggaattccagaagaagtcgggatcggctcatcgcccgaaggcagccgtggagatgaagttcctgggcgccaccgagactgtg

SEQ ID NO: 19419 - DNA, 1572 bp, synthetic construct
  misc_feature 1..1572: note = source = /note="Description of Artificial Sequence: Synthetic coding sequence"
  source 1..1572: mol_type = other DNA
atgaccgaggacaaggtgaccggtacactagttttcacggtcatcaccgccgtgctgggcagcttccagttcggctatgacataggagttattaacgcccctcagcaagtgatcatatcccattatcgccacgtactcggtgtacctctagatgatagaaaagctatcaataattatgttatcaacagcacagacgagttaccaaccatctcttacagtatgaatccaaagcctacaccttgggctgaggaggaaacagtggctgccgctcagctgatcaccatgctctggtccctttctgtcagctccttcgcagtgggcgggatgaccgcttcgttctttggcggctggttaggagacaccctcggaaggatcaaggctatgctggtggcaaacatcttatccctggtgggggctctgttaatgggattcagtaagttagggccgtctcatattctcatcattgcaggccgaagtataagcggcctgtactgtggtctgattagtggactagtgcctatgtacataggcgagattgctcccaccgcactaagaggagcccttggaactttccatcagctggcgatcgtcacaggaattctcatcagccagattattgggctggaattcattctcggcaattatgatctttggcacattctattgggtctgtctggtgttagggccattctccagagccttctgctcttcttctgtcctgaatcccccaggtatttgtatatcaagctggacgaagaagtcaaggctaagcagtccctgaagagactcagagggtacgatgatgttactaaggacatcaacgagatgcgcaaggagagggaggaagctagtagcgaacaaaaggtatcgattattcagctgtttacgaactctagctacaggcaaccaattctggtcgctctgatgttgcatgtggcccaacagttcagtggcatcaacggaatcttctattatagcacctctatatttcaaaccgcaggcatctctaagccagtgtacgccacgatcggcgtcggggccgtgaatatggtgtttacagctgtctctgtgtttctggtcgagaaggccgggaggcgatccttgttccttataggtatgtcgggtatgtttgtatgcgctatctttatgagcgtagggctcgtgctgttaaacaagttttcatggatgtcctacgtcagcatgattgcgatctttcttttcgtttcctttttcgaaatcggtccgggccccattccctggttcatggtggcagagttcttctcacagggccccagacctgctgcacttgcgattgccgctttttccaattggacatgcaatttcatcgtggcgttgtgctttcagtatatcgctgacttctgtggcccgtacgtcttttttctgtttgcaggtgtgctcctggcatttactctgttcaccttcttcaaagtgccagagaccaaaggaaaatccttcgaagagatcgcagcagagtttcagaaaaagagtggctcagcacaccgacctaaggcagctgtggagatgaagtttctgggcgccacagagacagtt

SEQ ID NO: 19420 - DNA, 1572 bp, synthetic construct
  misc_feature 1..1572: note = source = /note="Description of Artificial Sequence: Synthetic coding sequence"
  source 1..1572: mol_type = other DNA
atgaccgaggataaggtgactggcaccctggtgtttaccgtcattactgcagtgttgggttcctttcagtttggttacgatataggtgtgattaacgcaccacagcaagtgattatctcccactaccggcatgtgcttggtgtccctctggatgatcggaaagccatcaacaattacgtgataaacagcaccgatgagctgccgactatttcgtactcaatgaatccaaagccaacgccgtgggcggaagaggaaaccgtggccgccgcacagctgattactatgctttggtctttgagtgtctcctcctttgcagtcgggggcatgactgcgagcttctttgggggatggctgggagacaccctcggacgaatcaaggcaatgcttgtggcaaacatacttagcctggtgggtgctcttctgatgggttttagcaagctcggaccttcccatattctgattattgcaggacgtagcatcagcggactgtattgtggtctgatttcggggttggtgcccatgtacattggtgaaatcgcgcccacggcgctgcggggtgctcttggcacttttcaccaacttgccatcgtgaccgggattcttatctcgcaaatcatcggactggaattcattctcggaaattacgacttgtggcatatccttcttggtctgtccggggtgcgggcgatacttcaaagcctgttgcttttcttttgtcctgaatccccaagatatctgtacataaagctggacgaggaggtgaaagcgaagcagtcgctcaagcggcttcgaggatacgatgatgtgactaaagatatcaatgaaatgcggaaagaaagggaagaagcgagctcggaacagaaggtgagcattattcagttgttcaccaattcgagctacagacaaccaattcttgtcgctctcatgttgcatgtggcacaacaattttccggcattaacggaattttctactactccactagcatattccagaccgcaggcatctcgaagcctgtgtacgcaactatcggcgtgggagcagtgaacatggtgttcaccgcagtgtccgtttttcttgtggagaaagctggacggcgttcattgttccttattgggatgtcaggaatgtttgtgtgcgccattttcatgagcgttggactggttctcctgaacaagtttagctggatgtcttacgtctcgatgatcgcaatcttcttgttcgtctcttttttcgaaatcggacccggcccaatcccttggtttatggtagcagagtttttcagccaaggaccccggccagcagcccttgccattgccgccttttcgaactggacctgtaatttcattgtggcactttgtttccagtatatagcagacttttgcggtccctacgtgttttttcttttcgccggtgtgctgctcgcatttaccctctttaccttctttaaggtcccagaaaccaagggaaaatcattcgaggagatcgccgcagaatttcagaagaaatcaggttccgcacatcgtcctaaggcagcagtggagatgaaatttcttggtgcgactgaaactgtg

SEQ ID NO: 19421 - DNA, 1572 bp, synthetic construct
  misc_feature 1..1572: note = source = /note="Description of Artificial Sequence: Synthetic coding sequence"
  source 1..1572: mol_type = other DNA
atgaccgaagataaggtgaccggtaccctggtgttcaccgtcattactgcagtgctgggttccttccagtttggctacgacattggcgtgatcaacgcaccacagcaggtgatcatcagtcactatagacacgtgttgggtgtgcccctggatgacaggaaagcaataaacaattacgtgatcaattctactgatgagctgccaacaatttcttactcaatgaaccctaaacctacgccttgggccgaggaagaaaccgtggccgctgcacagcttattactatgctgtggtcccttagcgtcagctcttttgcagtgggcggtatgaccgctagttttttcggaggatggctcggtgacacccttggaaggataaaggctatgctggtggcaaacatcttgtcccttgttggtgccctgcttatggggttctcaaaattagggcccagtcacatcctcatcattgcgggcagatcaattagtggactgtattgcggactgatttccgggctcgttccaatgtacatcggcgaaatcgcgccaaccgctctgcgtggtgctctgggcacttttcatcagctagcgatagttacaggcatcttgatttcgcagatcatcggcctggagtttatcctgggaaactatgacttgtggcatatcctgctgggcctgtccggcgttcgcgccattctgcagagcctcctcctgtttttttgtccggaatcacccagatacctgtatatcaaactggacgaagaggtgaaggcgaagcagagccttaaaagactgagagggtacgacgacgtcaccaaagacatcaacgaaatgaggaaggagcgggaggaagcttcatccgagcagaaagtcagcataatccagctgttcacaaacagcagctaccggcagcctatcttggtggccctcatgctccacgtcgcccagcagttctctgggatcaacggtatcttttattactcaacctcaatatttcagacagccggcatctccaagcctgtctacgccactataggcgtcggcgccgtgaatatggtgtttaccgcggtcagcgtatttctggtcgagaaggccggccgccgttctttgttcctcatcgggatgagtggcatgttcgtttgtgccatcttcatgagcgtaggactcgtgctcctgaacaagttcagctggatgagctacgtgtccatgatagctattttcttattcgtaagcttttttgagattggacctgggcccattccgtggtttatggtggctgagttcttctctcaaggacctcgccctgccgctctggcaatcgctgcgtttagcaactggacctgtaacttcattgtagccctatgctttcagtatatcgccgacttctgcgggccttacgtattcttcctgttcgccggcgtcttgctggcttttaccttgtttacattcttcaaagttcctgaaaccaagggcaaaagtttcgaggagatcgccgccgaatttcaaaaaaagagcggaagtgcccatcgacccaaagccgcagtggaaatgaagttcttaggcgctactgaaacggta

SEQ ID NO: 19422 - DNA, 1572 bp, synthetic construct
  misc_feature 1..1572: note = source = /note="Description of Artificial Sequence: Synthetic coding sequence"
  source 1..1572: mol_type = other DNA
atgacggaagataaggttaccggcaccctcgtgtttacggtgatcacagcggtccttggaagcttccagttcggctacgacattggcgtgatcaatgccccgcaacaggtcattatctcccactacaggcacgtgttgggtgtgccactggatgaccgaaaagccatcaacaattacgtcattaattcgactgatgaactgccaacgatcagctattcgatgaatcccaagcccacgccttgggccgaggaggagacggtggctgcagcgcaactgattacaatgctgtggtcgctgtctgtgagcagctttgcggtgggtggtatgacggcatccttcttcgggggctggctaggagatacactgggccgtattaaggccatgctggtcgccaacatcctttcgctggtcggagctttgctcatgggtttttcaaaattggggcccagtcacatactaatcattgccggccggtccatcagcggcctgtactgcggtctaatctcgggtctcgtcccaatgtatatcggtgaaatagcacctactgccctgcgcggagcgttaggcacgtttcatcagctggccatcgtcacaggcatcttgattagtcaaataatcggacttgagttcatactggggaactatgacctctggcacatattattggggctctccggagttcgggcaatcctgcagagtctgctgctgtttttctgcccagagtccccgagatacctgtacatcaaactcgatgaggaagttaaggcaaagcagtctctgaagcggctgcgggggtatgacgatgttaccaaggatataaacgagatgaggaaggagcgggaagaggcctcttcggaacaaaaggtttccataattcagctctttacgaattcctcttaccgccagccgattttggtggccctgatgctccacgtggcgcagcagttctcgggcatcaatggtatattttactacagcacgagcatcttccagacagccggcatttcgaagccggtgtacgccacgatcggtgtaggagccgtgaacatggtgttcacggccgtgagcgtgttcctggtagaaaaggcgggccgcagatcgctgtttcttatcggcatgtctggcatgtttgtttgtgcgatattcatgtccgtgggactggtgttgctaaataagttcagttggatgagctacgtgtcgatgatcgctattttcctgttcgtgagctttttcgaaattggacccggtccgatcccgtggtttatggttgccgaattcttcagtcaaggccctcgtccagccgcgttggcgatagcagctttttccaactggacgtgcaatttcattgtggcactatgttttcaatatattgccgatttctgcggcccgtacgtattcttcctgtttgccggcgtgctactggcattcactctgttcacgttctttaaggtcccggagacgaagggcaagtcttttgaagagattgccgccgagttccagaagaaatccggaagcgcgcacaggcctaaggcagctgtggagatgaagtttttgggggccacggagaccgtg

SEQ ID NO: 19423 - DNA, 1572 bp, synthetic construct
  misc_feature 1..1572: note = source = /note="Description of Artificial Sequence: Synthetic coding sequence"
  source 1..1572: mol_type = other DNA
atgaccgaggacaaggtcaccgggacgctcgtgttcaccgtgattactgcagtgctgggaagttttcaatttggatacgatattggcgtcataaacgcaccacagcaggtgatcataagccactacagacatgtgcttggcgtgccactggacgataggaaagcaattaacaattatgtcattaactcaaccgacgagctccctactatttcgtacagcatgaaccccaagcctactccctgggcggaagaagagactgtcgcagcggcccagctcattactatgctctggtccctttcagtgtcctcatttgccgtcggtggaatgactgcgagcttctttggtgggtggcttggcgataccttgggaagaattaaggcaatgcttgtcgccaacatcctgtccctcgtgggggcgcttctgatggggttttcgaaactgggcccctcccacattctcataattgcgggtagatccatttccggcctctactgcggacttattagcgggctggtccctatgtatattggcgagatcgcacctaccgcactcagaggagccttgggaacctttcatcaattggcaatcgtgactggaatccttatttcccagattattggcctggagttcatccttggtaactacgatctttggcatattcttctcggactttcaggagtgcgtgcaattctgcaatccctgcttcttttcttctgccctgaatcgccccgttatctctacatcaaattggatgaagaagtcaaggccaagcaatcgctgaagaggcttaggggatacgacgacgtgaccaaggacattaacgaaatgcggaaggaacgagaagaggcctccagcgagcaaaaggtgtcaatcattcagttgtttaccaactcatcgtacagacaaccaatcctggttgcattgatgctgcatgtggctcagcaattttccggtattaacggaatcttctactactcgacttccatatttcaaaccgcggggatctccaagcctgtctacgcgacgatcggcgtgggagcggtgaacatggtgtttaccgcagtgtcggtctttcttgttgagaaagccgggagaagatcactgttcctgattggcatgtcagggatgttcgtgtgcgcaattttcatgtccgtgggactcgttcttctcaacaaattcagctggatgagctacgtgtccatgattgcaattttcctgttcgtttcgttcttcgaaattggtcctgggcctataccgtggttcatggtggcagaattcttcagccaaggacctcgccctgcagcactggctatcgcagcattttcgaactggacctgtaactttattgtggccctgtgttttcaatacattgcggatttctgtgggccttacgtgtttttcctttttgccggggtgctgctggcatttaccctgtttaccttctttaaggtcccagaaactaaaggaaagtccttcgaagaaattgcagccgaatttcaaaagaagtcgggttcggcacacagaccaaaggcagccgtggagatgaagtttcttggagcgactgaaactgtc

SEQ ID NO: 19424 - DNA, 1572 bp, synthetic construct
  misc_feature 1..1572: note = source = /note="Description of Artificial Sequence: Synthetic coding sequence"
  source 1..1572: mol_type = other DNA
atgactgaagacaaggtcactggtaccctcgtgttcactgtaataactgcagtcctggggtcttttcaattcggctacgatatcggggtcataaacgctccccagcaggttataattagccattaccgacacgtgttaggagtccccttggacgataggaaagcgattaataactatgtgataaattcaaccgacgagttgcctactatttcttattctatgaacccgaagcccactccctgggcggaggaagagacagtggccgctgcacaactgatcactatgctctggagcttgagcgtatctagcttcgctgtaggggggatgacagccagctttttcggtggttggttgggcgacaccctcgggagaattaaagcaatgctggtcgccaacatcctaagcttggttggcgctcttctgatgggctttagcaaactgggcccttcacacatcctcatcattgctgggaggtcaatctcaggcctctattgtggcctgatatcaggccttgtgcctatgtatataggggaaattgcacccactgcgctgcgcggagccctcggcacgtttcatcagttggccatcgtgacaggcattctcatctcccagattattggcctggaatttatcctgggaaactacgacctgtggcacattttgttaggcttatcgggggtgcgagctattttgcaaagcctgctcttatttttctgccctgaatcacccagatatctgtacatcaagctggacgaggaagtgaaggctaagcagagcctgaagaggttacgcggatatgatgatgtgactaaggacatcaatgaaatgcgcaaggaacgcgaggaagcaagctctgaacagaaagtctctatcattcagctcttcacgaactcatcataccgacagcctattctggtagcattaatgctgcatgtagcacagcagttttctggaattaatggaattttttactattcgaccagcattttccagacggcaggaatctccaagcccgtctacgcgaccatcggagttggggcagtgaacatggtcttcacagctgtgagtgtattcctggtcgagaaggctggtaggaggtccttgttccttattggaatgtctggtatgtttgtatgcgctatctttatgtcggtgggcctcgtactgttgaacaagtttagttggatgagctatgtgtctatgatcgcgatcttcctgttcgtcagcttcttcgagattggtccaggacctataccttggttcatggtggccgaattcttcagccagggacctaggcctgctgccctggctattgccgctttctctaattggacttgcaactttatagtggccctgtgcttccagtacatcgccgacttttgtggaccatacgtgttctttcttttcgcgggggtattgctggcgtttacattgtttaccttctttaaggtgcctgaaactaagggtaagtcctttgaggagatcgctgccgaattccaaaagaaaagcggctctgcgcaccggcccaaggcagccgtcgagatgaagttccttggggctaccgagacagta

SEQ ID NO: 19425 - DNA, 1572 bp, synthetic construct
  misc_feature 1..1572: note = source = /note="Description of Artificial Sequence: Synthetic coding sequence"
  source 1..1572: mol_type = other DNA
atgacggaggacaaagtgacaggtacgctggtatttaccgtgattactgctgttctgggaagcttccaattcggctacgacattggggtgataaatgcacctcagcaggtaattatcagtcactataggcacgtgctgggggtgccgctggacgatcgcaaggcaattaacaactatgtgattaatagtaccgatgaactgccaactatttcttacagcatgaacccgaaaccaacgccctgggccgaagaggagacagtcgctgccgctcaactgatcaccatgctttggtccctcagcgtctctagcttcgcggtgggcgggatgaccgcgtccttcttcggcggctggctaggtgatacgttagggagaattaaggcaatgctggtggccaatatccttagtctggtcggggcacttttgatgggcttcagcaaactgggacctagtcacatcctgataattgcgggacggagcatcagtggattatactgtgggctcatttctggcctagtgcccatgtatatcggagagatcgccccaacagcattgcggggcgctctcggcacctttcaccagctcgcgatcgtaactggcatcctgatttcccagatcatcggcttagaattcatcctcgggaattatgacctttggcacattctgctgggtctttctggggtgcgcgccatactgcagagtcttctactgttcttctgtcccgagagcccaaggtatctatatatcaaactggacgaagaggtcaaagctaagcagtccctgaaaaggttacgtggttacgatgacgtgactaaagacataaacgaaatgcgcaaggaacgggaagaggcttcatccgagcagaaggtgtctatcattcagttgttcacaaactcctcttacagacagccaattctagtcgccctgatgctgcacgtggctcagcagttctcaggcattaacggaattttctactattccactagtatattccagaccgctggcatatcgaagcctgtctatgccaccatcggggtgggtgctgttaatatggtctttacggccgtttccgttttcttagtcgaaaaagccggtagacggtctctcttcctgattggcatgagcggcatgttcgtgtgcgcgatctttatgtctgtgggcttggtcttgctcaacaagttcagctggatgagctacgtttccatgatcgcgatattcctgttcgtcagcttttttgagatcggcccagggccgatcccgtggttcatggtcgctgagtttttctcccagggccctagacctgccgccctggcaattgccgctttttcgaactggacctgtaactttattgtcgcactgtgtttccagtatattgctgatttttgcggaccttacgtgttcttcttgttcgcgggggttctgcttgccttcacactgtttacctttttcaaggtgcccgagaccaagggtaaatccttcgaggagattgctgcggagttccaaaagaagtccgggagtgcccatcgacctaaagctgcagtggaaatgaagttcctgggagctacagaaacagtg

SEQ ID NO: 19426 - DNA, 1572 bp, synthetic construct
  misc_feature 1..1572: note = source = /note="Description of Artificial Sequence: Synthetic coding sequence"
  source 1..1572: mol_type = other DNA
atgaccgaagataaggtcaccgggactctggtgttcacggtgattactgctgtgctcgggtcgtttcaattcggttacgatatcggagtcatcaacgcgccccaacaagtgatcatttcccactacagacatgtcctgggagtgccactggacgatcggaaagccataaacaactacgtcatcaattccacggatgaacttcctactatctcgtattcaatgaatcctaaaccaaccccctgggcggaagaagaaaccgtggctgcagcacagctgataactatgctttggtcgttgtccgtgtcctcgtttgcagtgggagggatgaccgcatcattctttggcggatggctgggggatacgctggggagaatcaaggcgatgctcgtggcaaacatcctgtccctggtgggtgctcttctgatgggtttttccaaactcggtccgtcacacatattgattatagcaggccggagcatctctggtctttactgcggccttattagcggcctcgtgccaatgtacatcggagaaattgcgcctaccgcactgcgaggtgcacttggtacctttcatcagcttgccattgtgaccggtatcctgatttcccagattattggactggaattcattttggggaactacgacctttggcacattctgctgggcctgtcaggggttagggctattttgcaatcccttctgctcttcttctgtcctgaaagccctcgttacctgtacattaagctggatgaggaagtgaaggcgaaacagtccctgaagaggctgagaggttatgatgacgtgactaaagacattaatgaaatgcggaaggaaagagaagaagcatcctccgaacaaaaggtgtccattatccaactttttaccaattcttcgtataggcagccaatcttggtggccctgatgctccatgtcgcccaacaattttccggcataaatgggattttctactactcgacctcaattttccaaaccgccggaatttctaaacccgtgtacgcaaccatcggggtcggtgcagttaacatggtgtttactgcggtgagcgtgttcttggtcgaaaaggcaggacggcgcagcctgtttcttattggtatgtcgggtatgtttgtgtgtgccatctttatgtccgtgggcctggtcctgcttaacaagttttcctggatgagctacgtgtctatgattgcaatcttcctttttgtgtccttttttgaaataggacctggacctatcccctggtttatggtggccgaattcttttcccaagggccacggccggccgcccttgctattgcggcattcagcaactggacctgcaactttattgtggcgctttgttttcagtacatcgcagacttctgcggtccttacgtgttctttcttttcgcaggtgttctgttggctttcaccctttttaccttctttaaagtgccagagactaaggggaagtcgtttgaggagatcgccgccgagtttcaaaagaagtcaggatcggcacatcggccgaaagcagcagtggaaatgaagtttcttggcgcaactgaaactgtt

SEQ ID NO: 19427 - DNA, 1572 bp, synthetic construct
  misc_feature 1..1572: note = source = /note="Description of Artificial Sequence: Synthetic coding sequence"
  source 1..1572: mol_type = other DNA
atgaccgaggacaaggtgaccggcaccctggtctttactgtcatcaccgcagtcctggggtcgtttcagttcggctacgatatcggagtcatcaacgctccgcaacaggtgatcatctcgcattacaggcatgtgctgggcgtgccactggacgataggaaagccatcaataactacgtgatcaattccactgacgagttgccaaccatctcctactcgatgaacccgaaaccgactccttgggcagaagaggagactgtcgctgcagctcaactgattaccatgctttggtcgctcagcgtctcctcgttcgccgtgggaggcatgactgcctccttcttcggtggatggctgggagataccctggggagaatcaaggcaatgctcgtggcgaacatccttagcctggtgggagcgctgttgatgggtttctcgaagctcgggccatcacacatcctgatcattgcaggccgctctatctcaggactctactgcggcctgatcagcgggctggtgcccatgtatatcggagaaatcgcccccactgccctgcggggagccctgggaaccttccaccaactggccatcgtgaccgggatcctgatctcgcagatcattggactcgaattcattttgggcaattacgatctgtggcatattctcctcgggctctcaggcgttcgcgctattcttcagtcgctcctcctctttttctgtccggaatccccacgctacttgtacatcaagctcgacgaagaggtcaaagccaagcaaagtctgaagagactgcggggatacgatgacgtgacgaaggacatcaacgaaatgagaaaggagcgggaggaagccagctcagaacaaaaggttagcattatccagctgttcacgaacagcagctaccgccagccgatcctggtggcgctgatgttgcacgtggcccagcagttctccggaatcaacggaatcttctactactcaacctcgatcttccagaccgcgggaatctcaaaaccggtgtacgcgactattggagtgggagccgtgaacatggtgttcactgccgtgagcgttttcctggtggaaaaagcaggtcggcgttctctcttcctgatcggaatgtccggcatgttcgtctgcgcaatctttatgtccgtgggacttgtgttgctcaataagttttcatggatgtcatacgtgtccatgatcgccatcttcctcttcgtgtcgtttttcgagatcggtcctggcccgattccctggtttatggtcgcggaatttttctcgcagggtccacgccctgcagcccttgccatcgccgcgttctccaactggacctgtaatttcatcgtcgctctgtgcttccaatacatagctgacttctgcggcccttatgtgttcttcctgttcgctggtgtactgctggcctttactctcttcactttcttcaaggtcccggaaactaagggaaaatcctttgaagagatcgcggcggagtttcagaagaagtcgggaagcgcacaccgaccgaaggctgcggtcgagatgaaatttcttggagcgacggaaaccgtg

SEQ ID NO: 19428 - DNA, 1572 bp, synthetic construct
  misc_feature 1..1572: note = source = /note="Description of Artificial Sequence: Synthetic coding sequence"
  source 1..1572: mol_type = other DNA
atgaccgaggacaaggtgaccggcacgctggtcttcactgtgattaccgctgtactgggcagcttccagtttggctatgacattggagtcattaacgctcctcagcaggtgataatttcccactatcggcatgtcctgggcgtcccactggacgataggaaggccataaacaattacgtgataaatagtacagacgagctcccaacaatctcttattccatgaaccccaagcctaccccttgggcagaggaggaaactgtggctgcagctcaactaataaccatgctgtggagccttagtgtttcatccttcgccgtgggcggtatgacagcaagcttctttggcggctggttaggcgatactctggggcggataaaagctatgctggtggccaatattctgtccttggtcggcgcgctgttgatggggttctccaagctcggcccaagtcacatcctgattatcgccgggaggtctatctcagggctatattgcgggttaatttctggcctggtaccgatgtacatcggcgaaattgctccaacggcactgcgtggagcccttgggacttttcatcagctggcaattgtaaccggtatcctgataagccaaatcattgggcttgaattcatcctgggaaactatgacttgtggcatatcctgttaggacttagtggggtccgtgccatcctgcaatccttgctgctatttttctgccctgaatctccacgctacctgtacattaagctcgatgaagaggttaaagccaagcagagccttaaacggttgagaggctacgatgacgttacaaaagacataaacgaaatgagaaaggagagagaggaggccagctccgagcagaaggtttctattattcaacttttcaccaacagtagctaccgccagcccatcctggttgctctcatgctgcatgtggcccagcagttctcagggattaatggtattttctactattccactagcattttccaaacagccggaatctcaaagcccgtgtacgctactattggggttggcgcagtaaatatggtcttcaccgcagttagcgttttcctggtggaaaaggcaggccggcggtccctgttcctgattggaatgtctgggatgttcgtgtgcgccatcttcatgagcgtgggcctggtgttgcttaacaagttctcttggatgtcttacgtgagtatgatagctattttcctgtttgttagtttctttgaaatagggccggggccaattccgtggtttatggtggctgaatttttcagtcagggaccaagacctgccgccctcgcgatcgccgccttctcaaattggacgtgtaacttcatcgtggctctgtgtttccaatacattgctgacttctgtggaccatatgtcttctttctatttgcgggggtgttgctggctttcaccctttttaccttttttaaggtgccagagacaaagggcaaaagttttgaagaaatcgctgctgaattccagaaaaagtctggtagcgcccaccggcctaaagccgctgtagagatgaaatttctgggtgcaacagaaactgtg

SEQ ID NO: 19429 - DNA, 1572 bp, synthetic construct
  misc_feature 1..1572: note = source = /note="Description of Artificial Sequence: Synthetic coding sequence"
  source 1..1572: mol_type = other DNA
atgaccgaggataaggtgaccggaactcttgtctttactgtgatcactgctgtgctcggatcattccaattcggctacgatatcggagtgatcaatgccccacaacaggtcatcatttcgcactatcgccatgtcctgggagtcccgctcgatgatcggaaagctataaacaactacgtcatcaactcaaccgatgagctgccgactatcagctactcgatgaacccgaaaccgaccccttgggcagaggaggagactgttgcagcggcccagctgatcaccatgctctggagcctctcggtgtcctccttcgctgtggggggaatgactgcctcattctttggtggatggctgggcgacactctgggacggattaaggcaatgctggtggctaacatcctgtcgctggtgggcgccctgctgatgggtttcagcaagctggggccctcacatatcctgatcatcgccggccgctccatttccggattgtattgcggactgatctcaggactcgtgccgatgtatataggcgaaattgccccaactgcccttcgaggggctctgggcacttttcaccaactggctattgtcacgggaattctgatcagtcaaatcatcggacttgagtttattctgggcaattacgacctgtggcatatcctgctgggactgtccggcgtgagggcgatcctccagtcgctgctgcttttcttctgtcccgaaagcccccggtacctctacattaagttggacgaggaggttaaagctaagcagtcgctcaaaagactgcgcggatacgacgacgtgaccaaagacataaacgaaatgaggaaggaacgcgaggaagcctcgagcgaacaaaaggtcagcataatccagctgtttaccaatagctcctacagacagccgatcctggtggcactgatgctgcacgtggcccagcagttctccggaatcaacggtatcttctactactccacgtccatcttccagaccgccggtatttccaaacctgtgtacgccacgatcggcgtcggagctgtgaacatggtgtttacggctgtgtcggtctttctggtggagaaggcaggccgcagatcactgttcttgatcggcatgtccgggatgttcgtgtgtgccatcttcatgtcggtcggccttgtattgctcaacaagttctcgtggatgtcgtacgtgagcatgatcgccatctttcttttcgtgagttttttcgaaatcggaccgggacctatcccgtggttcatggtggccgaattcttttcccagggaccaaggccagcggcgctcgccattgcggcattcagcaattggacctgcaacttcatcgtcgccctttgtttccagtacatcgccgacttctgcggaccatacgtattctttctcttcgcaggcgtgctgcttgccttcaccctgttcacttttttcaaggtgccagaaaccaagggtaaatcatttgaagagatcgcggcggaattccaaaagaagtcaggatccgcgcaccgaccgaaggcagctgtcgaaatgaagttcctgggtgctacggaaacggtg

SEQ ID NO: 19430 - DNA, 1572 bp, synthetic construct
  misc_feature 1..1572: note = source = /note="Description of Artificial Sequence: Synthetic coding sequence"
  source 1..1572: mol_type = other DNA
atgactgaggacaaagtcactggaactctggtattcactgtcatcactgcagtcctcggatcgttccagttcgggtacgatatcggagtgatcaatgcgccgcaacaggtgatcatctcccattacagacacgtcctgggagtgccgctggacgaccggaaggccatcaacaactacgtgatcaactcgaccgatgagctgcctaccatatcgtactccatgaaccctaaaccgaccccttgggccgaggaggaaaccgtggccgcggcccaactgatcacgatgctctggtcactcagcgtctcatccttcgccgtgggaggaatgaccgcttccttcttcgggggctggttgggagatactctcggacggatcaaagccatgctggtggcaaatatcctgtcactcgtcggagccctgctcatggggttctcaaagctcggcccctcgcatatcctgatcatcgcggggagatccatctccggcctgtactgtggactcatcagcggcctggtgccgatgtatattggcgaaatcgcaccgaccgcactgcgaggagcactgggcacttttcatcaactcgcaatcgtgacgggaatcttgatctcgcaaatcatagggttggaattcatcttgggaaattacgatctttggcatatcctgcttgggctctccggagtgcgcgccatcctgcagagcctccttctcttcttctgcccagagtcaccacgctacctctatatcaagctggatgaggaagtgaaggccaagcagagcctgaagcgactgcgcgggtacgacgacgtgactaaggacatcaacgaaatgcgcaaagaacgcgaagaagcgagctccgaacaaaaggtttcgattatccagctgtttaccaattcctcataccggcaaccaatcctggtggccctgatgcttcacgtggcgcagcaattctcaggaattaacggaatcttctactactccacctccatcttccaaaccgcggggatctcgaagccagtgtacgcgactatcggagtgggagctgtgaacatggtgtttaccgcggtgtccgtattcctggtggaaaaagcaggcaggcgctccctcttcctgatcggaatgtcaggaatgttcgtgtgcgccatcttcatgtcggtcggtttggtgctgctgaataagttctcatggatgagctacgtgtcgatgatcgccattttcctcttcgtgagctttttcgagatcggtccaggcccaatcccctggttcatggttgccgagttcttttcgcaaggccctcgaccggctgctctggcgattgcagcattctcaaattggacgtgtaacttcatcgtcgcgctgtgcttccagtacatcgcagatttttgcgggccctatgtgttcttcctctttgccggtgtgctgctggccttcaccctgtttaccttctttaaagtgccggaaacgaaagggaagtctttcgaggagattgccgcggaatttcagaagaagtcggggtccgcgcaccggccgaaggctgcagtggagatgaagttcctgggcgcaaccgagactgtg

SEQ ID NO: 19431 - DNA, 1572 bp, synthetic construct
  misc_feature 1..1572: note = source = /note="Description of Artificial Sequence: Synthetic coding sequence"
  source 1..1572: mol_type = other DNA
atgaccgaagataaggtcactggaactctcgtgttcaccgtcatcactgccgttctcgggtcatttcaatttggctacgacatcggagtaatcaacgcaccgcaacaggtgatcatttcgcattacagacacgtcctcggcgttccgctggacgaccgcaaagccatcaataactacgtcatcaattctaccgatgaattgcccaccatctcatacagtatgaacccaaagccgactccatgggccgaagaggaaaccgtggctgccgcacagttgatcacgatgctgtggtccctgtcggtgagctcgttcgccgtgggaggaatgactgcgagtttcttcggggggtggctcggagacaccctgggaagaattaaggccatgcttgtggcgaacattctgtccctggtcggagccctcctgatgggtttttccaagctgggtccatcacacatcctgatcatcgcgggacgctcgatctcgggcctgtactgcggattgatctccggactggtgcccatgtatatcggcgaaatcgcccctacggcactccggggtgctctgggaactttccatcagctggcgatcgtgacgggcattttgatctcgcagatcattgggctggagttcatcctgggtaactacgatctgtggcacattctgctgggactgtcgggagtgcgtgctattttgcagtcgttgctcctgttcttttgccctgagagcccacggtacctctacattaagctggatgaagaagtcaaggctaagcagtccctgaaacggcttcggggttacgacgatgttactaaagacatcaatgagatgcgcaaggagcgcgaagaagcctcgtccgagcaaaaggtatcgatcatccagctttttactaacagctcatataggcaacctatccttgtcgccttgatgttgcatgtggctcagcagttctcgggaatcaacggtatcttctactactctacctccatctttcaaactgccggcatttcaaaaccggtgtacgcgaccatcggcgtgggggcagtgaatatggtgttcactgccgtgtctgtgttcctggtcgagaaggccggaaggcgcagcttgtttcttatcggaatgtccggaatgttcgtgtgcgcgatattcatgtccgttggactggtgcttctcaataagttttcctggatgtcgtacgtgagcatgatagctatcttccttttcgtgagcttcttcgaaataggccctggaccgatcccgtggttcatggtcgcggagttcttctcacaaggcccacgaccggcagccctggcgattgccgcgttttccaactggacctgtaactttatcgtggctctgtgcttccaatacatcgccgacttctgtggaccatacgtctttttcctgttcgcaggagtgcttctggcgttcaccctcttcacctttttcaaagtaccggaaaccaaggggaagtcttttgaagagatcgcagccgaattccagaaaaagtccggtagcgcacacagacccaaagccgccgtcgagatgaagttcctcggcgcaactgagactgtg

SEQ ID NO: 19432 - DNA, 1572 bp, synthetic construct
  misc_feature 1..1572: note = source = /note="Description of Artificial Sequence: Synthetic coding sequence"
  source 1..1572: mol_type = other DNA
atgaccgaggataaagtcacggggacgctcgtgttcacggtgatcacggctgtgctggggtcattccagtttgggtatgatattggggttattaatgccccgcagcaggtgataatatcccactatcggcacgtgctgggagttccgctcgacgataggaaagccattaataactatgtgatcaatagcaccgacgaactaccgaccatatcttattctatgaatcctaaacctactccgtgggctgaagaggagactgtggccgcagcccagcttattaccatgctttggtccttatccgtcagcagcttcgctgtgggaggaatgaccgcgtctttttttggcggttggttaggcgacactctgggcaggattaaggccatgctagtagcaaatatcctctcactggtgggggcattactgatgggattcagcaaactcggccccagtcacatactgatcatagccgggcggtcgatcagtgggctgtactgtggactaatctccggcttagttcctatgtacatcggagagatcgcccctaccgcattacgaggagcactgggcacttttcatcaacttgccattgtgacggggattctgatcagccagatcattggtctggaatttatcctgggcaattatgatctgtggcatatactgctgggcctgagcggtgtgcgcgccatcctgcagtccttactcctgttcttttgccccgagagccctaggtatttgtatattaagctggacgaagaagtgaaagccaagcagtcactgaaaagactgaggggttacgacgacgtcactaaggacataaatgagatgcgaaaagagagagaagaagcatcatcagagcagaaggtgtccatcattcaactctttacgaattcttcttatcgtcagcctattctggtggcgctgatgctacatgtggcccagcagttcagcgggatcaatgggatattctactacagcactagtatattccagacagcaggtatttctaagcccgtatatgcaactattggagtgggtgccgtcaatatggtgtttacagcggtttcagtgtttttagtcgagaaggccggacggagatcattgttcctaatcggcatgagcgggatgtttgtgtgcgccatatttatgtccgtgggcctggtgctgctcaacaagttctcttggatgagctatgtgagcatgatcgccattttcttgttcgtatctttctttgagattgggcccgggcccatcccttggttcatggtggccgagttcttctctcagggtcccagacctgccgccctggccatagcagctttctcgaattggacctgtaacttcatagtggctttatgcttccagtacatcgccgatttttgcgggccatacgtgtttttcctctttgctggtgtactgctggcttttactctattcacatttttcaaggtgccggagacaaaagggaaatctttcgaagaaatcgcagccgaattccagaagaagtcagggtcggcacatcgcccaaaggccgccgtggaaatgaaattcttgggcgccaccgaaactgtt

SEQ ID NO: 19433 - DNA, 1572 bp, synthetic construct
  misc_feature 1..1572: note = source = /note="Description of Artificial Sequence: Synthetic coding sequence"
  source 1..1572: mol_type = other DNA
atgaccgaagacaaggttaccgggaccctggtgttcaccgtgattacagccgtcctggggtccttccagttcgggtacgacataggagtgattaatgcaccgcagcaggtgataattagtcactatcgccacgtactgggtgtacccctggatgatcgtaaagccatcaacaattacgtcataaattctacagacgagttgccaaccatttcttattcaatgaacccgaaacccactccctgggctgaggaggagacggtagctgctgcgcagctcatcactatgttgtggtccttgtccgtgtccagcttcgctgtcggcgggatgacagcctccttttttggaggatggctcggcgacacactggggaggatcaaagctatgcttgtggcaaatatcttgagcttggtgggggcactcctgatgggattctcaaagctggggcctagccacatcttgattattgctggccgctctatctcaggactgtactgcggcctcatatccgggctagttcctatgtacatcggggagatcgcgcctactgctctgcgcggggccctcggcacatttcaccagctggcaattgtgacgggtatccttatcagtcagatcatcgggctagaatttattttagggaactatgatctctggcacatcctcctaggcctttcaggagtacgcgcaatactccagtcactcttactttttttctgccccgagtccccccggtatctctacatcaaactcgatgaagaggtgaaagccaaacagagcctcaaacggcttcgcggctacgacgatgttactaaggatatcaacgaaatgaggaaggaaagagaggaagcgagcagtgagcagaaggtgtccattatccaactttttacaaacagcagctatagacaacctattcttgtggcgctcatgctccacgtggcccagcagtttagcgggattaatggaatcttttattattccaccagcatattccagaccgcaggtatctccaaaccagtctatgccacaatcggagtaggagccgtgaatatggtatttaccgccgttagcgtgtttctggtggagaaagccgggcgaaggtccctattcctgattgggatgagcgggatgttcgtctgtgcgatcttcatgtcggttgggttggtccttctgaacaagttttcctggatgtcatacgtgagcatgattgctatattcctattcgtgtccttttttgagatcggccctgggcctataccctggtttatggttgctgagttctttagtcagggcccgcggcccgcggcactggcaatagccgctttctcaaactggacctgcaactttatcgtcgccctgtgttttcaatacatcgccgatttctgtggcccatacgtgttcttcctgttcgccggggtcctattggcattcacactttttactttctttaaggttccagaaaccaagggcaaatcttttgaggagattgctgcagagttccagaaaaagtccggttcagcacaccgaccaaaggctgcagtagagatgaagttcctcggggcaaccgagacagtg

SEQ ID NO: 19434 - DNA, 1572 bp, synthetic construct
  misc_feature 1..1572: note = source = /note="Description of Artificial Sequence: Synthetic coding sequence"
  source 1..1572: mol_type = other DNA
atgaccgaagataaggtcacaggaaccctggtcttcacagtgatcactgctgtccttggcagcttccagtttggctatgatattggcgtcatcaatgccccccagcaggtcatcatttctcattacagacacgttttgggcgtgccactcgacgacaggaaggccataaacaattacgtcattaatagcaccgacgagctgccaaccattagttattcaatgaatccaaaacccactccttgggccgaagaggagaccgtagccgctgcccagctgatcacaatgctctggtcattgtccgtgagcagtttcgctgtcggtggtatgacagctagcttcttcggaggctggctcggtgataccctgggccgcatcaaagctatgctcgtcgctaatatcctttcactggttggcgctctcctgatgggttttagtaagctcggcccctctcacatccttataattgcaggccgctccatctctggactctattgcggcctgatatccggtttggtaccaatgtatatcggcgagatcgcccctaccgccctcaggggtgcccttggtaccttccatcaactggctatcgtgactggtattctgatttctcagataatcggattggaatttatcctgggcaactatgacctctggcacattctgctcggtctgagtggcgtgcgcgcaatccttcagtccctccttctgtttttttgcccagaatcccctcgttatctgtatatcaaacttgacgaagaagtcaaggcaaaacaatctctcaagaggcttagaggatacgatgatgtgaccaaggacatcaacgagatgaggaaagagcgtgaagaggccagctccgagcagaaggtttcaatcatccagctgtttaccaactcctcttaccgtcagccaatcttggtggccctcatgctgcacgttgctcagcaattcagtggcattaacggaatcttctattactcaacaagcatcttccaaactgccggcatctctaagcccgtctatgccacaatcggtgtcggtgcagtcaatatggtcttcacagccgtttccgtctttcttgtagagaaggctggtaggcgctctctgtttttgattggcatgagtggtatgtttgtttgcgctatctttatgagtgttggtcttgtgcttttgaacaagttttcatggatgtcctacgtgtccatgatagctatattcctttttgtgtctttctttgaaattggacctggcccaatcccctggttcatggtagccgaatttttctctcagggtccccgtcccgccgcacttgcaatcgctgccttctctaactggacttgtaattttattgtcgccttgtgtttccagtacattgcagatttttgcggcccctatgtgttcttcctcttcgctggcgtgttgttggcttttacacttttcactttcttcaaggtgcctgaaacaaagggcaaatcatttgaggagatcgcagccgagttccagaagaagtctggttccgctcacagacccaaggctgctgttgaaatgaagttccttggcgcaaccgagacagtg

SEQ ID NO: 19435 - DNA, 1572 bp, synthetic construct
  misc_feature 1..1572: note = source = /note="Description of Artificial Sequence: Synthetic coding sequence"
  source 1..1572: mol_type = other DNA
atgaccgaggataaggtgaccggtaccctcgtgtttaccgtgatcaccgctgttctcggatcattccagtttggatacgacatcggtgtcatcaacgcacctcagcaagtcatcatctctcactaccggcatgtcctgggagtccctctcgacgatcgtaaggcaatcaacaattacgtcattaactccaccgacgagttgccaactatctcgtactccatgaatccaaaacccaccccgtgggcagaggaggaaactgtggctgccgctcaactgatcactatgctgtggtcgctgtcggtgtcgtcatttgctgtcggcggtatgacggcatcgttttttggagggtggctgggcgacaccctgggccgcatcaaagccatgctcgtggcaaatatcctgtcgctggtgggagcgctcttgatggggttctctaaactgggtccgtcacacatactcatcatagctggtcgctcaataagcggactgtactgcggcctcatttccggattggtgccgatgtatattggagagatcgccccaactgcgctcagaggtgctctgggtacctttcatcaattggcgatcgtcaccgggatcctgatctcgcagatcattggactggaattcatcctcggtaattacgatctctggcacattctgttgggactctcgggagtccgcgcgatcctgcagagcctgctgctgttcttttgtccggaatccccgcgctacctttacatcaagctggatgaggaggtgaaggccaagcagtcgttgaagaggcttcggggctacgacgacgttaccaaagacattaatgaaatgcgcaaagaacgggaggaagcctccagcgagcagaaggtgtcaattatccaactgtttaccaactcatcgtaccgccagcctattctggtggcactcatgctccacgtggcccaacagttctcaggcatcaacggaatcttctattactccacttccatcttccagacggctggaatttctaaacctgtgtacgcgaccatcggagtgggcgcagtcaacatggtctttactgcagtgtcggtgttcctcgtcgaaaaggctggcaggcggtcactgttcctgatcggaatgtccggcatgttcgtgtgtgcgatcttcatgtccgtcggactggtcttgttgaacaaattctcgtggatgtcctacgtgagcatgatcgctatcttcttgttcgtttccttcttcgagatcggaccgggacctattccgtggttcatggtggcagaattctttagccagggcccacggcccgccgccctggccatagcggcgttctcaaactggacttgcaactttatagtggccctgtgcttccaatacatcgcggatttctgtggtccgtacgttttcttcctgttcgctggcgtgcttctcgcattcactctcttcaccttctttaaagtaccagaaactaaggggaagtcgttcgaagaaattgcggcggaatttcagaagaagagcgggtcagctcatagacctaaggccgccgtggaaatgaagttcctcggcgcaaccgagacggtg

SEQ ID NO: 19436 - DNA, 1572 bp, synthetic construct
  misc_feature 1..1572: note = source = /note="Description of Artificial Sequence: Synthetic coding sequence"
  source 1..1572: mol_type = other DNA
atgactgaggacaaggtcaccggaacacttgtgttcacagtgatcactgccgtgctgggctccttccagtttggatacgacataggggtgatcaacgcacctcagcaggtaattatcagccactaccgccatgtcctcggagtgccactcgatgaccgcaaggcgattaacaattacgtgatcaatagcactgatgagctcccaaccatttcctattcaatgaaccccaagcccacgccatgggcggaggaggaaacagtagctgccgcccagttgatcacgatgctctggtccctttctgtcagcagctttgccgtgggaggcatgaccgctagcttttttggcgggtggctgggagatacgctcgggaggataaaagccatgctggtggccaacatactgagccttgtgggagccctcttgatgggcttttctaaactggggcccagccatattcttatcattgccggtaggtcaatttccgggctgtactgtggcctcattagtgggcttgtccctatgtacatcggagaaattgctcctacagcgctgagaggcgccttgggtaccttccaccagctcgccatagtgaccgggatcttgatctctcagattatagggcttgagttcatccttggcaactacgacctctggcacatcctgctgggcttgagtggcgtgcgcgcaattttgcagtccctgctcttgttcttctgccccgaatctcccaggtacctgtatatcaagctggatgaggaggtgaaagccaagcagagccttaagcggcttcgggggtacgacgatgtaactaaggatatcaacgaaatgcgaaaggaacgagaggaggcgagttctgagcagaaagttagcattatccaactcttcacaaactcatcttatcgccagcctatactggtggctcttatgcttcacgtggcccaacagttctccggaatcaacggaattttttactactcaacttcaatattccagactgctgggatttcaaagccagtgtacgcaactatcggggtgggcgccgtaaacatggttttcactgcagtgagtgtgttcctggtggaaaaggctggcagacggagtctctttttgatcggcatgtctggtatgttcgtctgtgcaattttcatgagtgtggggttggtcctgctgaacaagtttagctggatgtcatatgttagcatgatcgcgatctttctctttgtgtccttttttgaaatcggacccggtccgatcccctggttcatggtcgcggagttcttctctcaaggcccaaggcctgccgccctggccatcgccgcattttcaaattggacatgcaacttcatcgtggccctttgcttccagtatatcgctgatttttgtgggccttacgtgtttttcttgtttgccggggtcctgctggcgtttacacttttcacattctttaaggtccccgagacaaaggggaagagctttgaagagatcgcagctgagttccagaagaagtcaggttccgcccaccgacccaaagctgccgtagaaatgaaatttctgggagcaaccgagacagtc

SEQ ID NO: 19437 - DNA, 1572 bp, synthetic construct
  misc_feature 1..1572: note = source = /note="Description of Artificial Sequence: Synthetic coding sequence"
  source 1..1572: mol_type = other DNA
atgactgaagataaggtgaccggcaccctcgtgtttacggtgatcacggcagtgcttggttctttccagtttggttacgatattggagtgattaacgcaccacaacaagtcatcatatcgcattaccgccatgtcctgggtgtgcccctcgatgatcggaaggcaataaacaactatgtgatcaattcaactgatgagcttccaaccatatcgtactccatgaacccaaagcctacgccatgggcagaagaggaaactgtggccgcagcacagttgataaccatgctttggagcctttccgtcagttcattcgccgtgggtggcatgactgcatcgttttttggaggttggctcggtgacactcttgggcggataaaggcaatgcttgtagcaaatatcctgtccttggtgggtgcccttcttatgggattttcgaaactcggtccatcgcacatcctgattattgcaggacgtagcatatcaggcctgtactgtgggcttatttccggcctggtgccaatgtacatcggagagattgcacctactgcgctgagaggagcccttggtacttttcatcaacttgccatagtgacgggcattctcatttcgcagatcattggtctggagtttatccttggcaattacgacctgtggcacatcctcctgggactttcgggagtccgggcaatactccaaagccttcttcttttcttttgtcctgaatccccacggtacttgtacattaaacttgacgaggaagtcaaggccaagcagtcactgaagcgactgcgcggatacgacgatgtcacgaaagacattaatgaaatgagaaaggagcgggaggaagcgagctcggaacagaaagtgtccataatccagctctttaccaacagctcctaccgccagccaattctggtggcgcttatgttgcatgtggcgcaacagttttcaggaattaacggaattttctactattcaacttccatatttcagaccgcaggtatttcgaagcctgtgtacgcaaccattggagtcggagccgtgaatatggtgttcactgcagtttcggtctttctggtggaaaaggcgggccgaagatcactgttcctgatcggcatgtcgggtatgttcgtgtgcgcaatctttatgtcggtggggctggtgcttctgaacaagttttcgtggatgtcgtacgtctcaatgattgccatctttctgtttgtgtccttcttcgaaattggacccggtccaattccttggtttatggtggccgaattcttttcacagggaccaagacctgcagcactggcgatcgctgcgttttcgaattggacttgcaatttcattgtcgcactgtgctttcagtacattgcagatttttgtggcccatacgtgttttttctcttcgcgggggtgcttctggcatttactctcttcactttctttaaagtgccagaaaccaaaggaaaatcgttcgaagaaatcgcagccgaattccaaaagaaatccggctcagcgcaccgcccaaaggccgctgtcgaaatgaagtttctcggagcaaccgaaaccgtg

SEQ ID NO: 19438 - DNA, 1572 bp, synthetic construct
  misc_feature 1..1572: note = source = /note="Description of Artificial Sequence: Synthetic coding sequence"
  source 1..1572: mol_type = other DNA
atgacagaagacaaagtgacgggcactctggttttcacagttatcaccgccgtgcttggaagttttcagtttggttacgatattggtgtcatcaacgcccctcagcaggttatcatcagccactacagacacgtactgggcgtgccacttgacgacagaaaagccattaacaattacgtgatcaattctaccgatgaactgccgacgatttcttactccatgaaccccaagcccactccgtgggccgaggaggagacagtggcggctgcccagttgatcacgatgctgtggagcctttcagtctcttcattcgcagtcggcggtatgaccgcttccttctttggcggctggctgggagataccttgggccgcatcaaggcgatgctggtcgccaacatcttgtccctggtcggtgctctgctcatgggcttctccaagcttggtccatcacatatattgatcatcgccggtaggagcatctctggcctttactgtggacttataagcggacttgtgccaatgtacatcggagagattgccccaacagcgctcaggggagcgctgggtacattccaccagttggctatcgtaacaggtattctgatctctcagataatcggtctcgagttcattctgggcaattatgatctgtggcatattcttctgggtctctccggtgttcgcgcgatcctgcagtccctgctgctcttcttctgtcctgagtctcctcgctacttgtatattaagcttgatgaggaggtgaaagccaagcagtcacttaagaggctgcgcggttacgatgacgtgacgaaggacataaacgaaatgagaaaggagcgcgaggaggctagctctgaacagaaggtgtctattattcagctcttcaccaattcttcatacagacaaccaattctcgtggcgctgatgctccacgttgcacagcagttcagcggaattaacggcatcttctattactcaacttcaatctttcagactgccggcatctctaagccggtctatgctaccattggtgttggcgcagtcaacatggtcttcaccgctgtgtctgtgttcctggtcgaaaaggccggtagacgcagcttgtttctgattggtatgagcggcatgtttgtctgcgccatcttcatgtcagtgggcctggtcctgctgaacaagttctcttggatgagctacgtgagtatgatagccatcttcctttttgtcagtttttttgaaattggtccaggtccgataccctggttcatggttgcagagtttttctcccagggccctagacccgctgccctggctatcgctgctttttctaactggacgtgcaattttatcgttgcgttgtgctttcagtatatcgcggacttctgtggtccctacgtgttctttttgttcgccggtgttttgctggcctttaccctcttcactttcttcaaggtacccgagaccaagggtaaaagcttcgaagaaatcgcagccgagtttcaaaaaaagagtggatccgctcacaggcctaaagccgccgtcgaaatgaaattcttgggagccaccgaaacggtg

SEQ ID NO: 19439 - DNA, 1572 bp, synthetic construct
  misc_feature 1..1572: note = source = /note="Description of Artificial Sequence: Synthetic coding sequence"
  source 1..1572: mol_type = other DNA
atgactgaagacaaggtgaccggcaccctggtttttacagtgataactgctgtactgggttcctttcagtttgggtacgatatcggtgttatcaacgcgccccagcaagtgattattagtcattaccggcacgtcttgggtgtccccctggatgaccggaaagccattaataactatgtaattaactcaactgacgagctgcccaccatcagttacagtatgaatcccaagcctaccccctgggcagaagaggaaactgtggccgctgcgcagctgataacaatgctgtggagcctgagcgtgtcatcgtttgccgttggcggaatgactgccagtttctttggcgggtggctaggcgataccctgggccggatcaaggctatgctggtcgctaatatactgtctctggttggggcactgctaatgggattttcaaagctgggtcccagccacatccttatcatcgccggtcgatctattagtggtctctattgcggtctgatctctgggctggtccctatgtacatcggcgaaattgcccctaccgccctccgcggggctctgggcacttttcaccagctggcaattgtgaccggaatactcatatcacaaattatcggactggaattcatcctcggcaactacgatctgtggcacatactgctaggtttgtctggagtgcgagccattctccaatccctgctgttgtttttctgcccagaaagccccagatatctttatatcaaactggacgaggaggtcaaggccaagcaaagccttaagcggctcagggggtacgacgatgtgactaaggatattaatgaaatgagaaaagaacgggaagaagcctcttccgaacaaaaggtgagtatcattcagctatttactaacagtagttatcggcagccgatactggtcgccctgatgctccacgtggcccagcagttcagcgggatcaacggcattttttattacagcacgtctatcttccaaacggccgggatctctaaacctgtgtatgctaccataggtgtgggtgcggtgaacatggtatttaccgccgtttccgtgtttttggtcgagaaagctggaagaaggtcattgtttcttatcgggatgtctggtatgtttgtgtgcgcaatctttatgagcgtgggcctggtcctcctcaataagttttcctggatgagctatgtgtcaatgatcgccatattcctgttcgtgtccttctttgagattggaccagggcctataccgtggttcatggttgcggaattcttctcccaaggccccaggccggctgccctggcgatcgccgcattttcgaactggacctgtaactttatagtggctctgtgcttccagtacatcgcagacttctgtggcccttacgtgttttttctgttcgcgggggtgctcctcgccttcaccctgtttactttctttaaggtaccagaaaccaaaggaaaatctttcgaggagatcgcagccgaattccaaaagaaatcaggcagcgcgcacagaccaaaagcggctgtagaaatgaaattcctcggcgccactgagaccgtg

SEQ ID NO: 19440 - DNA, 1572 bp, synthetic construct
  misc_feature 1..1572: note = source = /note="Description of Artificial Sequence: Synthetic coding sequence"
  source 1..1572: mol_type = other DNA
atgaccgaagataaagtgacgggaaccctggtttttaccgtgatcacagctgttctcggctccttccagttcggctacgatatcggcgtaattaacgctccccaacaggttatcattagccactaccgacatgtacttggagtgccactggatgataggaaggcgattaacaattacgtgataaattctactgatgaactgccaactatttcttactctatgaatcctaagcctacgccctgggctgaggaggagacggttgccgctgcgcagctgatcacaatgctctggtctcttagcgtgtcctcctttgctgtgggtgggatgaccgcgtctttcttcggtgggtggcttggagataccctcggacggattaaagctatgctcgtagcaaatatcctcagcctcgtcggggctctccttatgggatttagtaagctgggtccaagtcatatcctgatcatcgcaggccggtctatctctggcctgtattgtgggctgattagtggcctggtgcctatgtacattggtgagattgcgccgaccgcacttcggggagctcttggcacttttcaccagctcgctatcgtcactggaatcctgatctcacaaattatcggccttgaatttatactgggtaactacgacctctggcacatcttgcttggactgtcaggcgttagggctatcttgcaatccctgctgctgtttttctgccccgagagtccacggtacctgtatataaaacttgacgaggaggtcaaggccaagcaatcccttaagcggctgcgcgggtatgacgatgttaccaaagatattaatgagatgcggaaggaaagagaggaagcttccagtgaacaaaaggtctccatcattcagctgtttactaactcttcctatagacagcccatcctcgttgcgcttatgctgcacgttgctcagcaattcagtggcattaatgggatattctattactcaacttccatcttccagaccgcaggcataagtaagcccgtgtacgccaccattggtgtgggcgctgtgaacatggtgttcaccgccgtttccgtattcctcgtcgagaaggctggacgacgatcactcttccttatcggaatgtccggtatgtttgtgtgcgctattttcatgtcagtgggactcgtgctgttgaataagttttcctggatgagttacgtgagcatgatcgccatctttttgtttgtctctttctttgagataggcccaggaccgatcccatggtttatggttgcggaatttttttctcaaggacccaggccagcagccctggctatcgccgcgtttagtaactggacttgcaacttcattgtggctctgtgttttcagtacatcgcagatttctgcggcccctatgtgtttttcctgtttgccggcgtcctgctcgccttcacgctgttcacttttttcaaagtccccgagacaaaaggcaagtcattcgaggagatcgcagctgagtttcaaaagaagagtgggtctgcgcatcggccaaaggcagctgtagagatgaagttccttggagctacagagacggtc

SEQ ID NO: 19441 - DNA, 1572 bp, synthetic construct
  misc_feature 1..1572: note = source = /note="Description of Artificial Sequence: Synthetic coding sequence"
  source 1..1572: mol_type = other DNA
atgaccgaggataaggttactggcacgctcgtttttactgtgatcactgctgtcttggggagttttcagtttggttatgatattggggtgatcaatgcacctcaacaggtaatcatctctcattacaggcatgtgctgggcgtgccccttgatgacaggaaggccatcaacaattacgtgattaatagcacagatgaactgccaactattagctatagcatgaatcctaagcctaccccttgggctgaggaagaaactgtggccgcagcccagctgattactatgctctggagcctatcagtgtcctcattcgctgtaggagggatgacagctagtttttttggcgggtggcttggtgacacactcgggcggataaaggcaatgctcgttgccaacatcctgtccttagtgggagcacttttgatgggcttcagtaagctggggccaagtcatatcctgattattgccggacggagcatctcgggtctatattgtggattaataagtggcctcgtcccaatgtatatcggtgagatcgctccaactgcccttcgcggggccctaggtacctttcatcagctggcaattgtcactgggatcctgatttcccagatcattggcttagaatttatcctgggaaattacgatctctggcacattctcctggggctgtctggagtccgggctattctgcaatcattgttgctgtttttctgcccagagagcccccgttacctgtacattaagctggatgaggaggtgaaagcaaaacagtcactgaagcgcttgcgcggttacgatgacgtcacgaaagacatcaatgagatgagaaaagaaagggaggaagcctcctctgaacagaaagtgtcgattatccagctgttcacgaactcctcttatcgacagcctatactcgtggctctgatgctccacgtggcccagcaattctctggaatcaacggcatattttactacagtacctcaatcttccaaactgcggggatatctaagccagtgtatgcaactattggcgtaggagcagtgaacatggtcttcacagccgttagtgtgttcttggtggaaaaagccgggaggagaagtctatttttgatcggtatgagcggaatgtttgtgtgtgcgatcttcatgtccgtcgggttggtgctgctgaacaagtttagctggatgtcttatgtgagcatgattgccattttccttttcgttagcttcttcgagatcggcccagggccgataccatggttcatggtagccgaatttttttcccaggggccaaggcctgcggcactggctatcgcagcattcagcaactggacctgcaatttcatcgttgcactgtgttttcagtatattgccgatttctgtggcccttacgttttcttcctgtttgctggagtacttcttgccttcaccctgttcaccttttttaaggtacctgagaccaaggggaagtccttcgaagaaattgccgccgaatttcagaaaaaaagcgggtccgctcacagacctaaggccgctgtcgagatgaaatttctgggtgctacagaaaccgtg

SEQ ID NO: 19442 - DNA, 1572 bp, synthetic construct
  misc_feature 1..1572: note = source = /note="Description of Artificial Sequence: Synthetic coding sequence"
  source 1..1572: mol_type = other DNA
atgaccgaggataaggttactggaaccctcgtgtttactgtgatcactgcagtgttgggtagcttccagtttggttacgacatcggcgtcattaacgccccgcagcaggtcatcatctcccactaccggcacgtccttggtgtgccgctggatgatcgcaaggccatcaataactacgtgatcaattctaccgacgaactgccgacgatttcatacagcatgaacccgaagccgacgccgtgggccgaggaggagacggtggcggccgcccaactcatcactatgctgtggtcgctgtcggtgagctcgttcgcggtgggagggatgactgcgtcattcttcggcggatggctgggcgacaccctgggacggatcaaggccatgttggtggccaatatcctgtcgctcgtcggggccttgctgatgggattctcgaaacttggtccttcccacatcctcatcatcgctggtcgctccatctcgggactctactgtggactgattagcgggttggtcccgatgtacattggtgaaatcgctccaaccgcgctgagaggagcactgggcacgtttcatcaactcgcgatcgtgaccgggatcctgatctcacaaatcattggactcgagttcatcttgggaaattacgacctctggcatatcctgctgggcctgtccggagtgagagccatcctgcaatccctgctgttgttcttctgcccggaaagcccgcggtatctgtacatcaagctggacgaggaagtgaaagctaagcagagcctgaagcgcctgcgcggctacgacgacgtgactaaggatatcaacgagatgcgcaaggagcgcgaggaggcatcgagcgaacaaaaagtctcaatcatccagttgttcactaattcctcgtatcggcagccgattttggtcgctctcatgctccacgtggcccagcagttctccggaatcaatggaatcttctactactccacttcgatcttccagaccgccgggatttccaagccggtttacgctactattggcgtcggagcagtgaacatggtgttcaccgcagtcagcgtgttcctggtcgagaaggccgggagacggagcctcttcctgataggaatgtcaggaatgttcgtctgcgcaattttcatgagcgtggggctggttctgttgaacaagttcagctggatgagctacgtcagcatgatcgccatattcctcttcgtgagctttttcgagatcgggccagggccaatcccgtggttcatggtggccgagtttttctcccagggtcccagacctgccgcactggccatcgcagccttctccaactggacttgcaatttcatcgtggcactctgcttccagtacatcgccgacttctgcggaccatacgtgttcttcctctttgcgggagtgctgctggccttcaccctgttcacttttttcaaagtgccggagactaagggaaagtcgtttgaagaaatagctgccgaattccagaagaagtcgggcagcgcacatcggcccaaggctgcggtggagatgaagttcttgggagccacggaaacggtc

SEQ ID NO: 19443 - DNA, 1572 bp, synthetic construct
  misc_feature 1..1572: note = source = /note="Description of Artificial Sequence: Synthetic coding sequence"
  source 1..1572: mol_type = other DNA
atgactgaagataaggtgactggtaccctggtgtttacggtgattaccgcagtacttggtagctttcaatttggttatgacatcggtgtcattaacgcacctcaacaagtgatcataagccattaccgccacgtcctgggagtgccccttgacgatcgaaaggcaattaacaactacgttatcaacagcacggatgaacttccaaccatttcctacagcatgaaccctaagcctacgccttgggcggaggaagagactgtcgcagcagcacagctgatcactatgctgtggtcactgtctgtctctagctttgcagttggggggatgacggctagcttctttggaggctggcttggggacactctgggtagaataaaggcgatgcttgtggcaaatatcctgtcgctggtgggtgcactgcttatgggcttcagcaagctggggccttcccatatactcattattgccggaagatcaattagcggactttactgcggcctgatctccggactggtgcctatgtacattggggaaatcgcacccaccgcacttagaggcgcactcggaaccttccatcagctcgcaatcgtgaccggaattttgatctcgcagatcataggactggagtttattctcggaaattacgatctttggcacattttgttgggtctttctggtgtccgtgcgattctccaatcactgctcctcttcttttgcccagagtcccctcgatacctgtacatcaagctggacgaagaagtgaaggctaagcaatccctgaagagactgaggggctacgacgatgtcacgaaagatatcaacgaaatgaggaaagaacgggaagaggccagcagcgaacagaaggtgagcatcatccagctttttaccaattcgtcgtaccgccagcccatccttgttgccctcatgttgcatgtcgcacaacaattttcaggaattaacgggattttctactactccacctccatctttcaaaccgccggcatcagcaagccggtgtacgcaaccatcggcgtcggcgctgtgaacatggtgtttaccgcagtgtcggtgttcctggtggagaaggccggacgaagatccctttttctcattggcatgagcggcatgttcgtctgtgcaattttcatgtcggtcggacttgtgttgctcaacaagtttagctggatgtcgtacgtctcgatgattgcaattttcctcttcgtgtcgtttttcgagatcggccccggacctatcccatggttcatggtcgcggagttcttttcacagggacctcggccagcagcactggcaatcgcagccttttccaactggacctgcaatttcatcgttgcactttgttttcaatacattgctgacttctgcgggccctacgtattctttctttttgcaggagtgcttctggcattcaccctgtttactttctttaaagtgcccgaaaccaaggggaaatcctttgaagagattgcagcagaattccagaagaagtcgggatccgcacatcggccaaaggcggcagtggaaatgaagttcctcggcgcaactgagactgtg

SEQ ID NO: 19444 - DNA, 1572 bp, synthetic construct
  misc_feature 1..1572: note = source = /note="Description of Artificial Sequence: Synthetic coding sequence"
  source 1..1572: mol_type = other DNA
atgacggaggataaagtgactggaaccctggtgttcactgtgatcaccgcagtccttggttcgtttcaatttggatacgatattggcgtcattaatgcaccacagcaagtgattatcagccactaccggcacgtgcttggcgttccactggatgatcggaaggctataaacaattacgtgatcaacagcactgacgagctgccaaccattagctactcgatgaatcctaagccaaccccttgggcagaagaagagactgtcgccgcagcccagctgatcaccatgctgtggtcccttagcgtgtcctcgtttgcagtaggtggtatgacggcatccttcttcggcgggtggctgggcgatactctcgggcgaattaaggctatgctggtggccaacatccttagcctggtgggtgcgcttctgatgggattttcgaagctcggacctagccatattctgattatagccgggagaagcatttctggcctgtactgtggcctcatctcaggactcgtcccaatgtacatcggtgaaattgcccccactgctctgcgtggagccctggggaccttccatcaacttgcaatcgtcactggcattctcatatcgcagatcattggccttgagtttattcttggtaactacgatctgtggcatatcctgcttggcctttccggggtccgggcaattttgcaaagcctgcttttgttcttttgtccggaatcgccgaggtacctgtacatcaaacttgacgaggaggtcaaggccaagcaaagtctcaagagacttcggggctacgacgatgtgaccaaagacataaacgagatgagaaaggaaagggaggaggcttcctcagaacaaaaggtgagcattatccaacttttcactaattcgtcgtatcgacaaccgattctggtcgccctgatgctgcacgtggcacagcagtttagcgggattaacggaatcttttactactcgactagcatttttcagaccgcaggaatctctaaaccagtgtacgcgacgatcggtgtgggtgcagtgaatatggtttttactgcagtcagcgtctttctcgtggaaaaggcaggccgaagatcgctttttcttatcggcatgtccgggatgttcgtgtgcgcaattttcatgtcagtcggtctggtgctgctgaacaagttctcatggatgtcctacgtgtccatgatcgcaattttcctcttcgtgtcgtttttcgaaattggacctggtccgataccgtggtttatggtcgcagagtttttctcgcaaggaccccgtcccgcagcgctggccattgcagcatttagcaattggacctgtaatttcattgtggcattgtgctttcagtacattgcagacttttgtggaccctatgtgttttttctgttcgcgggtgtcctgctggcctttacccttttcaccttcttcaaggtgcccgaaaccaagggtaagtcctttgaagaaatcgccgccgaattccaaaagaagtcagggtccgcacatcgaccgaaggctgcggtggagatgaaatttctcggggctactgaaactgtg

SEQ ID NO: 19445 - DNA, 1572 bp, synthetic construct
  misc_feature 1..1572: note = source = /note="Description of Artificial Sequence: Synthetic coding sequence"
  source 1..1572: mol_type = other DNA
atgaccgaggacaaagtcacaggaaccctcgtgttcaccgtgattaccgcagtgctcggcagctttcagtttgggtatgatatcggagttatcaatgctccccagcaagtcattatatcccattacaggcatgtcttgggggtgcccctggatgatcgtaaggcaattaataactacgtaattaacagcaccgacgaacttcctacaatcagctacagcatgaaccccaaacccacgccgtgggctgaggaggagactgttgccgccgcacagttgatcacaatgctgtggtctctgtcagtctcatcctttgcagtgggaggcatgacagccagcttcttcggagggtggctaggggacacgctcggcaggataaaagctatgttggtggcaaatatactctcattggtaggagcactgttaatggggttctccaagttgggaccaagccatatactgatcatagctggtaggtccatctctggtctctactgtggactaatttccgggctggttccaatgtatatcggtgagatagcccctactgctctgcggggcgcattaggaacttttcaccaactcgctatagttaccgggatcctgataagtcagattataggtctggaattcatcttgggcaattatgacttgtggcatatactcctggggttgagcggtgtcagggctatacttcagagcctgctcctcttcttctgccccgagagtccacgatacttatatatcaagctagatgaagaggtgaaggcgaagcagtcactgaagagactgcgaggctatgatgacgtcacaaaggatatcaacgaaatgcgaaaagaaagagaggaagcttcctcggagcaaaaagtcagcataattcagctattcaccaacagctcctaccgacagcctatcctagttgcccttatgctccatgtggcacagcagttctccggaattaacgggatcttctactattccacttctatctttcagacagccggaatctctaagccagtgtatgccactatcggcgtaggcgcagtgaacatggtctttacggccgtcagcgtatttctggtggaaaaggcgggtcgacgatccctgttcctgatcggcatgtccggtatgtttgtgtgcgcaatatttatgtcggtgggactagtgctcctgaacaagttctcctggatgagctacgtgtctatgatagcgattttcctctttgtttcattcttcgaaatcggtcctggcccaatcccatggtttatggtcgcggagttcttttctcaggggccgcgccccgccgccctggccatagccgcattctcaaattggacctgtaatttcatagtggccctgtgtttccaatatatcgccgatttctgtgggccatacgtgttctttctattcgctggcgtacttttggcgttcacgcttttcactttttttaaggttcctgagaccaagggcaaatctttcgaggagattgctgccgaattccagaaaaagagcggcagcgctcacaggcccaaagccgctgtggagatgaagtttttaggcgcgacggaaaccgtt

SEQ ID NO: 19446 - DNA, 1572 bp, synthetic construct
  misc_feature 1..1572: note = source = /note="Description of Artificial Sequence: Synthetic coding sequence"
  source 1..1572: mol_type = other DNA
atgactgaggataaggtgaccggcacactagtcttcactgtaatcacggccgtgttggggtcatttcagttcgggtacgacattggggtgatcaatgctccgcagcaggtgattatcagccattatcggcatgttctgggagtccccttggacgatcgtaaggccattaacaattacgtgattaacagtacggatgagctacccaccatttcttattcgatgaatcccaagcctactccatgggctgaggaggagaccgtggccgctgcccagctcatcactatgttgtggtcactctctgtgagctctttcgcagtgggaggaatgacagcaagtttctttgggggatggttgggtgatacgctgggcagaatcaaagccatgcttgttgctaacatcctgtctctggtcggggcccttctgatggggttctcaaagcttggcccctcccacattctgattatagccggccgctctattagcgggttgtactgtggcctcatttcgggccttgtcccgatgtacataggggagatcgctccaacagcacttagaggcgctctgggcactttccaccagttggctatagtcaccggtattttaatatcccaaattattggactggagttcatcctcgggaactatgacctatggcacatacttctggggctctcgggggtccgcgctatcctgcagagcctactgttgttcttttgccccgagtctcctaggtacctttacatcaagctggatgaggaggtcaaggcaaagcagtctttaaagaggctgagagggtatgacgacgtaacaaaggatatcaacgagatgcgcaaggagagagaggaagcgtccagcgagcagaaggtatctatcatccagctctttaccaatagttcctatcggcagccaatccttgttgcccttatgcttcacgttgcacagcagttttctggcatcaatggcatcttttactactccacttccatttttcaaacggccggcataagcaaacccgtttatgccacaattggggtgggcgccgttaatatggtcttcactgcggtgtcagtttttctggtggagaaggcaggccgccgctctctgttcttaatcggaatgtccggcatgtttgtgtgtgcgatcttcatgtccgtgggcctggtcctcctcaacaaattctcttggatgagctatgtttccatgattgctatctttctcttcgtgtctttctttgaaattggaccaggacctatcccttggttcatggtggccgaattcttttcacaggggcccagaccggccgccttagctattgcagccttttcaaactggacctgtaatttcatcgtcgcgctttgttttcagtatatcgctgatttctgcgggccttatgtgtttttcctattcgctggtgtgctgttggcttttacactttttacatttttcaaagtacctgaaaccaaaggaaagagcttcgaggagatagcagctgaatttcagaagaaatccggcagtgcccatcgtccaaaggcagcagtggaaatgaagttcctgggtgctactgaaactgtg

SEQ ID NO: 19447 - DNA, 1572 bp, synthetic construct
  misc_feature 1..1572: note = source = /note="Description of Artificial Sequence: Synthetic coding sequence"
  source 1..1572: mol_type = other DNA
atgacagaggacaaggtaacaggtacccttgtgtttaccgttatcactgcagtgcttggatccttccagtttggatatgatattggtgtgatcaacgccccacaacaggtgatcataagccactacaggcatgtcctgggggtgccactggacgatcgcaaagctataaataactatgtgatcaactccactgacgaactccctactatctcttactctatgaacccgaaacccaccccttgggccgaagaggagaccgtggcagctgctcagctgattacgatgctttggtcccttagcgtttcttcctttgccgtggggggcatgaccgcctccttcttcgggggttggctgggcgatacacttggtaggatcaaagccatgttggtggccaacattctgtcactggtgggagctttgttgatgggcttttctaaactagggccctcgcatatcctgattatcgcaggtcggtccatatctggtctgtactgtggactaatcagcggcctggtgcccatgtacataggagagatcgctcccaccgccctccgcggggcgcttgggacttttcatcaacttgccattgttaccggcatcctgatttcccagatcatcggactggagtttatactgggcaattatgatctctggcatatccttcttggactctccggggtgcgggcaattctgcagagcctcttactattcttctgtcctgagtctccaagatacctctacataaaactagacgaagaagttaaggccaaacagagtctgaagagactgcgtggatacgacgatgtgaccaaggacatcaatgaaatgagaaaggagagagaagaggcttcttccgaacagaaggtcagtatcatccagcttttcactaactcctcctataggcagccgatcctggttgctctcatgttacatgtggcgcagcagtttagtgggatcaatggaatcttttattacagcacatccatcttccaaacggccggtatcagtaagccagtatatgccacaattggggtgggagccgtgaatatggttttcacagccgtctctgtattcctggtcgagaaggcaggcagacggtcgctgtttctgattggaatgtcaggtatgttcgtttgcgcaattttcatgagcgtgggcctggtgctgttaaataaattctcttggatgtcatatgtgagcatgatcgcgatcttcctgtttgtatcattctttgaaattggtccaggccctatcccgtggtttatggtggctgaattctttagccagggcccccgaccagccgccttggctatagctgccttttcaaattggacgtgcaacttcattgtggccctgtgtttccagtacatcgctgacttttgcgggccatacgtcttctttctcttcgcaggggtgcttctggccttcaccttgttcactttctttaaagtaccagagacaaaaggaaaatcatttgaagagattgctgcggagtttcagaaaaagtcaggcagtgcgcaccggccaaaggccgcggtcgagatgaagttcctgggcgccactgagactgtt

SEQ ID NO: 19448 - DNA, 1572 bp, synthetic construct
  misc_feature 1..1572: note = source = /note="Description of Artificial Sequence: Synthetic coding sequence"
  source 1..1572: mol_type = other DNA
atgacggaagataaggtgactggtacgcttgtgttcaccgtcattaccgcagtgctggggagctttcagtttgggtacgatattggagtgataaacgccccccagcaagtgatcatatctcattaccgccatgtcctgggcgtgcccctggacgatagaaaagcaattaacaattacgtcatcaattcgactgatgaactcccgacgatctcgtattcgatgaaccctaagcctaccccgtgggccgaggaagaaaccgttgccgcagcccaactgattaccatgctgtggtcactgtccgttagctccttcgcagtgggaggcatgaccgcctctttcttcggaggatggttgggagacactctgggacggattaaggccatgctggttgcaaatatcctgtccctcgtgggcgctctgcttatgggcttttcgaagctcgggccttcacatatcctcattatcgccggacgatccattagcggcctgtactgcggtcttatatcggggctggtgcctatgtacattggagagatcgcacctacggcgctccgtggtgccctcggaaccttccaccaactggcaattgtcaccggtatactgatttcacagataattggtctggaattcatcctgggcaactatgatctttggcatatcttgttgggtctgtctggcgtgagggcgatcctccagagccttcttctcttcttttgtccggaatcccctaggtacctttacatcaaacttgatgaagaagtgaaagctaaacaatccctcaagcgactgcgtggctacgacgatgtgaccaaagacataaacgaaatgcgcaaggagcgcgaagaggccagcagcgaacaaaaggtgtccattattcaactttttacgaattcgtcgtacaggcagcctatacttgtggcactgatgctgcacgtggcacagcaattttcgggcattaatggtatcttttactactcaacttccatctttcagactgcaggaatttcgaaacctgtgtacgcaactataggtgtgggagcagtgaatatggtgtttactgcagtcagcgtgtttttggtggagaaggcaggaagaagatcgctcttcctcatcggtatgtcgggtatgtttgtctgcgctatctttatgagcgtcggccttgtgctccttaacaagtttagctggatgtcatacgtttccatgatagccattttcctctttgtctcgttctttgaaattggaccaggaccaatcccttggtttatggtcgcggagttcttttcccaagggcccaggcctgccgctcttgctattgctgcattttcgaactggacttgtaacttcatcgtggcactctgctttcagtacatcgccgacttctgcggaccttacgttttctttttgttcgcgggcgtgcttcttgcgttcaccctttttacctttttcaaagtgccagagactaagggaaagtcattcgaggaaatcgcagcagaattccaaaagaagtcgggaagcgcccatcgccccaaggcggcagtcgagatgaagtttctgggcgcaactgagactgtg

SEQ ID NO: 19449 - DNA, 1572 bp, synthetic construct
  misc_feature 1..1572: note = source = /note="Description of Artificial Sequence: Synthetic coding sequence"
  source 1..1572: mol_type = other DNA
atgaccgaggataaagttactggaacactggtcttcacagtcatcacagcggtgttgggctcctttcagttcggctacgacattggcgtcattaatgccccacaacaggtcatcatcagccattatcgtcatgtgctgggggtaccgctcgacgatcgcaaagctattaacaactacgtaatcaatagcacagacgaattgcctaccataagctacagtatgaaccctaaaccgactccgtgggctgaagaagagacagttgctgctgctcagctgataactatgctgtggagcttgagcgtgagcagctttgcggtgggaggaatgaccgcatccttttttggaggatggctcggcgatacgctcggtaggattaaggccatgctggtggcgaatatcctgagcctggtcggcgccctgctcatgggctttagcaagctgggcccgtcccatatcctgatcatagccggaaggtccatttcaggcttgtattgcggccttatctcaggactggtccctatgtacatcggcgagattgcacccactgctcttcgcggagcccttggcactttccaccagctggcaatcgtgactggaatcctcatctcacagattatcggcctggaatttattctggggaactatgacttgtggcacattctccttggcctgtcaggcgtcagagccatcctccaatccttgcttctgttcttttgcccagaatctccccgatacctgtacattaaactggatgaggaggtcaaagctaaacagagcctgaaaaggctccgcggttacgacgacgtcactaaggatattaatgaaatgagaaaagagcgcgaagaggctagctctgaacagaaagtcagcatcatccagttgtttactaattccagttatcgccaaccaattcttgtggctttaatgttgcacgtggcgcaacagttctccggaatcaacgggatcttttactacagcacctccatcttccaaaccgctggcatcagtaaaccagtctacgccaccatcggggtcggcgccgtgaacatggtgttcacagccgtgagcgtcttcttggtggagaaagcaggccggcgcagtctctttttgatcggcatgtctggaatgttcgtgtgtgccatctttatgtctgtaggtctggttctgttgaacaaattttcatggatgagttacgtctcaatgatcgctatctttctcttcgtatctttctttgagattggccccggcccaatcccttggttcatggtagccgaatttttctcacagggcccaagacccgccgccttagcaatcgcggcctttagcaactggacctgcaactttattgtagccctgtgtttccagtacattgctgatttttgcggaccttatgtattttttctgttcgcaggcgtgctgctggctttcaccctctttaccttttttaaggtgccagagactaaggggaagagttttgaggaaatcgctgctgagttccagaagaagtccggctctgcacacaggcccaaagcagctgtagaaatgaagttcctgggcgcaaccgagaccgtg

SEQ ID NO: 19450 - DNA, 1572 bp, synthetic construct
  misc_feature 1..1572: note = source = /note="Description of Artificial Sequence: Synthetic coding sequence"
  source 1..1572: mol_type = other DNA
atgactgaagataaggtgactgggacacttgtgtttactgtgatcacagctgtactagggagtttccaatttggatacgatataggagttataaacgctccacaacaggttatcatatctcattatcgacacgtactgggagttcctttggatgataggaaagctattaacaactatgtaataaactctacagatgagctcccaacaatatcgtattctatgaaccccaagcctacaccttgggctgaagaagagacagtggcagccgcacaactcattactatgttatggtccctttccgtcagttcctttgcggtggggggaatgactgcttctttctttggaggatggcttggagacacattagggaggataaaagccatgttagtggccaatattctctcactagtgggggccctactgatgggattttctaaactgggaccatctcatatcttaataatcgctgggcgctcaatttcaggactatattgtgggctcatctctgggctggtgcctatgtacatcggagaaatagcaccaacagccctccgcggagcactagggacatttcaccagttagcaatagtcacaggaatcctaatatctcagataatagggctcgaatttatacttggaaactatgacctatggcatatactactcgggcttagtggggtcagggccatcctccagagtctgctgctcttcttctgtcccgaatccccccgctatctctatataaaactagatgaggaagtgaaagctaaacagagtctgaagcggcttcgagggtatgatgatgtcacaaaagatataaacgaaatgcggaaggaaagagaagaagcctcctcagagcagaaagtgtccatcatccagttgttcacaaactcctcttatagacagcctatcctcgtggcattgatgttacatgtagctcagcagttctcagggatcaatggaatattctattattccacatccatatttcagactgctggaatctcaaagccagtatacgcaactattggagttggagcggtcaatatggtctttacagcagtgagtgttttcttggtggaaaaagccggacggcggagtttattcttgatcgggatgtctggaatgttcgtctgtgctatctttatgagtgtaggactcgttctgcttaataaattctcttggatgtcctacgtgagtatgattgctatattcctctttgtgagtttctttgaaatagggccagggccaataccctggttcatggtcgccgaatttttctcacaggggcctcggcccgctgccctcgcaatagctgcattctctaactggacatgcaattttattgtcgccctgtgtttccagtatattgccgatttttgtgggccatacgtgttttttctgttcgccggggtattactggcattcacactttttacattttttaaagttcctgaaactaaaggaaaatccttcgaagaaattgctgctgagttccagaaaaaaagtggatccgcgcacagacccaaagctgccgtcgaaatgaaatttttgggggccactgaaacagtc

SEQ ID NO: 19451 - DNA, 1572 bp, synthetic construct
  misc_feature 1..1572: note = source = /note="Description of Artificial Sequence: Synthetic coding sequence"
  source 1..1572: mol_type = other DNA
atgaccgaagataaggtgactggaactctggttttcaccgtgatcactgctgtgctgggatcgtttcagttcggttatgacatcggtgtgattaacgctccccagcaggtcattatctcccactacaggcacgtgctgggggtgcccctcgatgatcgcaaggccatcaataactacgtgataaactcgaccgacgaacttcctaccatcagctacagcatgaacccgaagcccaccccttgggcagaggaagagacggtcgccgccgcccagctgatcaccatgctctggtcgctgtccgtgtcgtcgttcgcggtgggcggaatgacggcctcgtttttcggcggatggctcggagacaccttgggtaggatcaaagctatgctggtggctaatatcctcagcctcgtgggagcgcttctgatgggcttctctaaactgggaccttcacacatcttgatcatcgcaggacgctcaatctccggtctgtactgtggactcatctccggattggtccctatgtacatcggagaaatcgccccgaccgccctgcggggagcgctcggaacttttcaccaactggcaatcgtgacgggtattctgatcagccaaatcatcggattggagttcatcttgggaaattacgacctgtggcatatcctgctgggtttgtccggtgtgagggccatcctgcagtcgctgctgctcttcttctgcccagaatccccgagatacctttacattaagttggacgaggaagtcaaggcgaaacagtccttgaagcggttgcggggttacgatgatgtgaccaaggacattaacgaaatgcgcaaggagcgggaagaggcaagctccgagcagaaggtgtcaattatccagctgttcactaactcgtcatatcggcaacccattcttgttgcgctcatgctgcatgtcgcccaacaattctcaggaatcaatggtatcttttactactcgacctcgatttttcagactgctgggatctcgaaaccagtgtacgccaccatcggcgtcggtgctgtgaatatggtctttaccgccgtctcagtgtttctggtggaaaaggccggccggaggtcgctgtttctgattggtatgtccggaatgttcgtctgcgcaatcttcatgtcggtgggactggtcctgttgaacaagttctcatggatgagctacgtgagcatgatcgcgatcttcctgttcgtgtccttcttcgaaatcggacctggcccaattccgtggttcatggtcgcagaattcttctctcaggggcctagacctgcggcgctcgcgatcgccgcgttctctaattggacctgtaacttcatcgtcgccctgtgctttcagtacatcgcggacttctgcggtccatacgtattctttctgttcgccggcgtcctcttggcatttactctgttcactttcttcaaggtccccgaaaccaagggcaagtcgttcgaggaaatcgcggcggaattccagaagaaatccggctcggctcatagaccgaaagcagccgtggaaatgaaatttctgggagccactgaaaccgtc

SEQ ID NO: 19452 - DNA, 1572 bp, synthetic construct
  misc_feature 1..1572: note = source = /note="Description of Artificial Sequence: Synthetic coding sequence"
  source 1..1572: mol_type = other DNA
atgactgaagataaggtgaccggcacactggtgtttactgtaataacggcggtcctcggaagcttccagtttggatacgatatcggggttataaacgcgccgcagcaggtgatcatttcccactataggcatgtgcttggggtacctttagatgatcgaaaagccatcaataactatgtaattaattctaccgacgagttgccaacgatttcatactccatgaatcccaaacctaccccatgggccgaggaagaaactgtcgccgccgcacaactgataacaatgctgtggtccctcagtgtaagttcattcgccgttggagggatgactgcgagcttttttggcggctggctgggggatacattgggccgcataaaagctatgctcgtggctaatatactcagcctggtcggcgcgctgttaatgggcttttctaagttagggcccagtcatatactcatcattgctggccggtcaatttctgggctgtactgtggactgatcagcggtctggttcctatgtacattggcgagatcgctcctaccgccctgcggggggcattagggacgtttcatcagctggcgatcgtcaccggtatcttgatcagccagattatcggcttagagttcattctcgggaactatgacttatggcacatcctgctgggccttagcggcgttagggccatactgcagtctttgctgttgtttttttgccccgagtcaccgaggtacctgtacatcaagctcgatgaagaggtgaaagctaagcagtctctgaaacgactccgtggctatgatgacgtgactaaagatatcaacgaaatgagaaaggaaagagaagaagcctcttctgaacagaaagtgagtataatccagctgtttaccaacagttcctatagacagccgattctcgtggccctgatgttgcacgtggcccagcagttctccgggatcaacggcattttctattactctacgagcattttccagaccgctggcatctctaagcccgtgtacgctacgatcggggtgggagctgttaatatggtgttcacagccgtgtccgtctttctcgtggagaaggcggggcgccggtccctgttcctgatcggaatgtccggcatgtttgtctgcgccatcttcatgtccgttggactggtgctgctgaacaaattttcttggatgtcctacgtcagcatgatcgctatattcttgtttgtgagtttcttcgaaattgggccagggcccataccgtggtttatggtggctgaatttttctcccaaggaccaagaccagccgctctagccattgcagcattctctaactggacatgtaacttcattgtcgccttatgctttcagtatatcgctgatttttgtggaccgtatgtgttttttctattcgctggtgtgctgctagctttcactctcttcacttttttcaaggtgcctgaaaccaaagggaaatctttcgaggagatcgccgccgagttccaaaagaagtcagggtctgcccatcggccgaaggccgctgtggagatgaagttcctaggcgccaccgagaccgtg

SEQ ID NO: 19453 - DNA, 1572 bp, synthetic construct
  misc_feature 1..1572: note = source = /note="Description of Artificial Sequence: Synthetic coding sequence"
  source 1..1572: mol_type = other DNA
atgaccgaggacaaagtaactggcacactagtgtttacagtgatcactgcagtgcttgggagttttcaattcggctacgatattggggtgattaacgcccctcagcaggtaattataagccactaccgacatgtgctgggggttccccttgacgaccgcaaggctattaataactacgttataaattcaacagacgagctgccgactatatcgtatagcatgaaccctaaacccactccatgggcagaggaagaaactgttgctgccgcccagcttataaccatgctgtggagcctctctgtttcctcttttgccgtcgggggtatgacagctagcttcttcgggggatggctaggcgacactctcggccggatcaaagctatgctggtcgctaatattctgtccctggtcggtgcgctccttatgggatttagcaagcttggcccaagtcatattctgatcatcgccggacgttccattagtggcttgtattgcggcttgatttccggacttgtcccgatgtatataggagagatagcaccaacagcccttcgtggtgctctgggtactttccaccaactagccatcgtgactgggatcttgatcagtcagatcattggcctggaattcatcctgggcaattacgacttatggcatattctgcttggcctctctggcgttagggctatcttgcagtccctcctgctgtttttttgtcccgaatcccctcggtacctgtatattaagctggacgaggaggtaaaagcgaaacaatcactcaagaggctccgaggatacgatgatgtgaccaaggacatcaatgaaatgagaaaggagcgcgaggaggccagttcagaacagaaggtgagcattatccaactctttactaacagttcttacaggcagccaatcctcgtggcgttaatgctgcatgtcgcccaacaatttagtggcataaacgggatattctactattccacatctatcttccaaactgcaggcatctccaagcccgtctacgcaacaatcggcgtcggtgcagttaatatggtgttcacagctgtgtctgtattcctcgtagagaaagcagggcgcaggtctctgttcctgatcggcatgtccggtatgtttgtctgcgccatctttatgtctgtcggattggtgctgctaaataaattcagctggatgtcttacgtgtccatgatcgccatctttctttttgttagctttttcgagataggtcctggccctatcccatggttcatggttgcagagtttttctcccaggggccccgcccagccgctctcgcaatagccgcattctcaaattggacatgcaactttattgttgcactgtgcttccaatatattgcagatttttgtgggccatatgttttttttctttttgcaggggtgttgttggccttcaccttgtttacgttcttcaaggtgcctgaaactaagggcaaaagcttcgaggaaattgccgcagaatttcaaaaaaaaagcggaagcgctcacagacccaaggcagctgtggaaatgaaattcctgggggcaactgaaaccgtt

SEQ ID NO: 19454 - DNA, 1572 bp, synthetic construct
  misc_feature 1..1572: note = source = /note="Description of Artificial Sequence: Synthetic coding sequence"
  source 1..1572: mol_type = other DNA
atgacagaggataaggtgacaggaaccctagtgttcacggtgatcaccgccgtcttgggcagttttcaatttgggtacgatattggtgtgatcaacgctcctcagcaggtgatcatcagccattacaggcatgtgctcggagtccctttggacgatcgcaaagcgataaacaattatgtcataaactccacagacgaactccccactatttcttactcaatgaatccaaagccaaccccctgggccgaagaagagaccgtggcagctgcgcagttaataaccatgctttggtctctgtctgtgtcttcttttgccgtgggggggatgaccgcctcgtttttcggcgggtggttgggtgataccctgggaagaattaaagcaatgctcgtagcaaacatcctgagtctggttggagccttgctcatgggcttttctaagctcggtccctctcacatattgatcatagctgggcgcagcatctccggtctgtactgtgggctgatttccggactggtgcctatgtacattggggagatcgctcctaccgcgctccgcggtgctttaggcaccttccatcagctcgctatcgtgactggaattttgatctcccagattatcggcctggaatttattctcgggaattacgacctgtggcacattctcctgggactttccggagtgcgcgctatccttcagtcgttgctgctgttcttttgccctgagagtccgcgatacttgtacatcaaattggacgaggaggtgaaagccaaacagtcactgaaacggctccgcggatatgatgacgtgaccaaagacattaacgaaatgcggaaggagcgagaagaggcctcaagcgaacagaaggtgagcataattcagctctttaccaatagcagctatagacaacccatcctggtggcgctgatgctgcatgttgcccaacagttctcaggcattaatggcattttctattactccacctccatcttccaaacagcgggcatcagcaaacccgtctacgctaccattggcgtgggagcagtgaacatggtgtttaccgccgtttcagtgttcttagtcgagaaagcagggcgtcgttcactgtttctgatcggcatgtccggaatgttcgtttgtgctatcttcatgtcagttggactggtgcttctcaacaaattcagttggatgtcatacgtaagtatgatcgcaatcttcctgtttgtgagctttttcgaaatcgggcctggcccaattccatggttcatggtggccgaattcttcagccagggaccacgcccggccgccctggccatagcagccttctctaattggacttgcaacttcatcgttgccctgtgtttccagtacattgcagatttctgcggcccctacgtgtttttcctctttgctggtgtactgttggccttcaccttgtttacctttttcaaggtgcctgagacgaagggcaagtcattcgaagagattgccgcagagttccagaaaaagagcgggtctgcacacagaccaaaggccgccgttgagatgaaatttttgggagcgaccgagacagtg

SEQ ID NO: 19455 - DNA, 1572 bp, synthetic construct
  misc_feature 1..1572: note = source = /note="Description of Artificial Sequence: Synthetic coding sequence"
  source 1..1572: mol_type = other DNA
atgaccgaggacaaggtgaccgggacactggtcttcaccgtgataacagcggtgctgggctccttccagtttggctacgacatcggggtgatcaacgcaccccagcaagtgattatctcgcactaccgacatgtgctcggagtaccactcgatgaccgcaaggccatcaataactatgtgatcaacagcacagacgagctgccgaccatttcgtattcaatgaatcctaagccaactccctgggccgaggaggagactgttgcggcggcccagctgatcaccatgctgtggtccttaagcgtgtcttcctttgctgttgggggcatgacagcctcgttcttcggtgggtggctcggcgacacacttgggaggatcaaggctatgctagtggccaatatcctctccttagttggtgctctgctcatgggcttcagtaaactggggccctcccatattctgatcatcgcgggacggtctattagtggactatattgcgggttgatctcaggcctcgtgccaatgtacatcggtgagatcgcccccactgcacttcgcggcgcactcggaaccttccaccagttggcaatcgtcaccggaattctcataagccagatcattggcctagaattcattttaggcaattacgacctgtggcacatcctcctgggcctttctggcgtaagggccatcctacagtcccttctgctctttttctgccctgaatcaccaagatatctatacatcaagctagacgaagaggtgaaggccaaacagtctctcaaacggctgcggggatacgacgacgtgactaaagacatcaacgagatgcggaaagaacgagaagaagcgtcctctgagcagaaggtatcgattattcagctgtttactaattctagttatcgacagcctatactagtggcccttatgctccacgtggctcagcagttctcaggcatcaatggtatcttttattactctacaagcatctttcagacagctgggatctctaagccagtgtacgccactattggggtgggggcagtaaatatggtgttcactgcagtgtctgtatttctggttgagaaggccgggagacggagcttgtttctgattggaatgtctggcatgttcgtatgcgctatctttatgagcgtgggcctggtgctgttgaataagttttcctggatgagttacgtttcaatgattgcaattttcctgttcgtaagcttctttgaaattgggccaggcccgattccgtggttcatggtcgctgaattcttctcacaaggtccccgaccggctgccctggccattgcagctttctctaactggacctgcaattttatcgtcgcgttgtgttttcaatacatagctgacttttgtggcccctatgtgttcttcttattcgccggcgtgctactggcctttactttatttaccttctttaaggtcccagaaacgaaaggcaaatccttcgaagaaatcgccgccgaattccagaaaaaatccgggagtgctcaccgacccaaagctgctgtcgaaatgaaattcctcggcgccaccgaaacagtc

SEQ ID NO: 19456 - DNA, 1572 bp, synthetic construct
  misc_feature 1..1572: note = source = /note="Description of Artificial Sequence: Synthetic coding sequence"
  source 1..1572: mol_type = other DNA
atgactgaggacaaggtgaccggtactctggtgttcaccgtcatcaccgcggtcctgggttcgttccagttcggttacgatataggtgttattaatgcgccacagcaggtgatcattagccactaccggcacgtactaggtgtccctctggatgatcgcaaggctatcaataactatgtgatcaactctacggacgaactccctacgattagttatagcatgaatccaaagccgactccgtgggcagaagaggaaaccgtcgcggccgcccagctgatcacgatgttgtggagcctgagcgtgtctagcttcgccgtgggtggaatgactgcgagcttttttggtgggtggcttggagataccctgggtcgcatcaaggcgatgctggtggcaaatatcctatcgctggtgggagctctgctgatgggcttttctaagcttggcccgtcgcacattctgatcatcgcgggccgtagcatcagcggcctgtactgtggcctgatttctggtctggtgccaatgtatatcggtgagatagctccgaccgcactgcgcggcgcattgggcacgttccaccagttggcaatcgtgaccggtatcctgatttcccaaatcatcggcctcgagtttattctgggcaactatgacctgtggcacatcctgttgggcctgagcggtgtgcgcgccatactgcaaagcctgctgctgttcttctgtccagagagcccacgctacttgtacatcaagttggatgaagaagtaaaggcaaaacagagcctgaagcgcctccgcggctatgacgatgtgacgaaagatatcaacgagatgcgcaaggagcgagaggaggccagcagcgagcagaaggtgtcgatcattcaactgtttaccaacagctcttacaggcagccgatcctggtcgcattgatgctgcacgttgcacagcaattttccggcatcaacggaattttctattactctacttcgatttttcagaccgccggtatctctaaaccagtgtacgccacaattggggttggcgcagtcaacatggtattcactgctgtctctgtgttcctcgtagaaaaggccggtcgccgaagcctgttcttgattggtatgagcggtatgtttgtatgtgccatttttatgagcgttggactcgtgctgctcaacaagttcagctggatgagctatgtttcgatgatcgccattttcttgttcgtgtctttcttcgaaatcggaccgggtcctattccttggttcatggtcgcagaattcttcagccaagggccgcgcccagccgcgttagcgatcgctgccttcagcaattggacctgcaatttcatcgtcgccctgtgttttcaatacatcgcggacttctgcggtccgtatgttttctttttatttgctggagtgctgttggcgtttaccttgtttacattctttaaagtgcccgagacgaagggcaaaagcttcgaagagatcgctgcggagtttcagaaaaaaagcggctcagctcaccgtccaaaagccgcggtggagatgaagtttttgggcgccaccgaaactgtg

SEQ ID NO: 19457 - DNA, 1572 bp, synthetic construct
  misc_feature 1..1572: note = source = /note="Description of Artificial Sequence: Synthetic coding sequence"
  source 1..1572: mol_type = other DNA
atgacagaagacaaagtgacgggcacgctagtttttacagtcataaccgccgtgttagggtcctttcagttcggatacgatattggcgtcatcaacgcccctcagcaggtaatcatttcccactaccgtcacgtgctgggagtgccgctagatgatcggaaagcgatcaataattacgtaatcaactctacagatgagcttcctacaattagctattcaatgaaccctaaaccgactccgtgggcagaagaggagacagtggccgcagcacaactaattacaatgttgtggtccctgagcgtgagtagcttcgcggtgggcggcatgacagcctcgttcttcggcggatggctgggggataccctgggcaggatcaaggccatgctcgtcgcaaatatcctcagcctggtgggtgccttactcatggggttctctaagttggggccttctcatattcttattatcgccggcagaagcatatccgggctgtattgtggtctgatatcaggccttgtccccatgtatattggcgaaatagcccctactgcattgcgcggggccctgggtactttccatcagctagcaatcgtcaccggaattctaatctctcagatcatcggactggagtttatactgggcaactacgatctgtggcatatacttttagggctgtctggcgtgcgagccattctacagagccttctgctcttcttttgcccagaatccccccgatacctctatatcaagctcgacgaggaggtaaaagccaagcagagtctgaagaggcttaggggctacgacgatgtaacaaaggatataaatgagatgcggaaagaaagggaggaggcctcctcagagcagaaggtgtctatcatccagctgttcaccaacagttcctataggcagcccatcctcgtggccctcatgctgcacgttgcccagcaatttagcggaatcaacgggattttctattactcaactagtatcttccagaccgctggaatctctaaacctgtgtatgctacaatcggcgtaggtgcagtcaatatggtattcactgccgtgtcggtttttcttgtggagaaagcagggcgccgttccctgttcttgattggaatgagcggtatgtttgtgtgcgccatcttcatgagtgtaggtctagtcctgctcaataagttctcctggatgtcttacgtttccatgatcgcaatcttcctgttcgtgtccttctttgaaatcggacctggtcctattccttggtttatggtggctgagtttttcagccagggacctagaccggccgccctcgcaatcgccgctttcagtaactggacctgtaactttatagtcgctctctgcttccagtacatcgcggacttctgtgggccttacgtgttttttctgtttgccggggtcctgttggcttttactctgtttactttctttaaggtccccgagactaaggggaaatccttcgaagagatagccgcagaatttcagaagaagagcggaagtgcgcaccgcccaaaggcagctgtggagatgaagttcctcggagcgacagagactgtg

SEQ ID NO: 19458 - DNA, 1572 bp, synthetic construct
  misc_feature 1..1572: note = source = /note="Description of Artificial Sequence: Synthetic coding sequence"
  source 1..1572: mol_type = other DNA
atgacggaagacaaggtgacaggaactctggttttcacagtgataacagccgtgctcggatcctttcagttcgggtacgacattggagtgatcaacgcaccccaacaggtgatcatatctcattataggcacgtcctgggagtgcccctagacgatagaaaagctatcaataattacgtcatcaactcaactgatgaactgcccactatctcctattctatgaaccctaaaccaacaccctgggctgaggaagagactgtcgccgctgcacagctcattacaatgttgtggtccctgtccgtgtcatcatttgctgttggggggatgactgcttcctttttcggaggatggctgggggatacacttggacggataaaagccatgctcgtcgctaatatactgtcactggtgggagcccttttaatggggttttccaaactggggccttctcacatccttataatcgcaggacggagtattagtggactatattgtgggttgattagtggattagtgcccatgtacattggagaaatagcaccgacagccctacggggagccctgggaactttccaccagttagctatcgttacaggaattcttatctctcagattatcgggttagaatttattctagggaactatgatctgtggcatatcttattaggactgtctggggtgcgcgccatcttacagtctttacttctattcttttgtccagaatctcctagatatctctatattaaactagatgaagaggtcaaagcaaaacagagtttgaaaaggctcagggggtatgatgacgtcacaaaggatatcaacgaaatgcgaaaagaacgagaagaagcttcaagtgaacagaaagttagtatcatccagttgttcacaaactcatcgtaccggcagccaattcttgttgcactcatgctccatgtcgcccagcaattctcagggatcaatgggatattctattacagtacatctatatttcagactgctggaattagtaaacctgtctatgcaacaattggggtgggggccgtcaatatggtgttcactgcagtttctgtattcttagtcgaaaaggcagggagacggtctctattccttatagggatgtcaggaatgtttgtatgcgctatcttcatgtcagtggggcttgtcctccttaacaaattctcttggatgtcatacgtgtctatgatcgctatctttctctttgttagtttcttcgaaatcggacctgggccaataccctggtttatggtcgccgaattcttctcacaggggcccaggcctgctgccctcgccattgccgccttttctaactggacttgcaactttatcgtagccctttgtttccagtacatcgccgatttttgcggaccttacgtgttttttttattcgccggagtacttctcgcatttacgctgttcacattctttaaagttccagaaactaaggggaaatccttcgaggaaatcgctgccgagtttcagaagaaatccgggtcagcacataggcctaaagcagctgttgagatgaaatttcttggagctacagaaacagtg

SEQ ID NO: 19459 - DNA, 1572 bp, synthetic construct
  misc_feature 1..1572: note = source = /note="Description of Artificial Sequence: Synthetic coding sequence"
  source 1..1572: mol_type = other DNA
atgacggaagataaagtaacgggtacgctagtttttacggtaataacggcggtattaggttcgtttcaatttggttatgatataggtgtaataaatgcgccgcaacaagttataatatcgcattatcgtcatgtattaggtgtaccgctagatgatcgtaaagcgataaataattatgtaataaattcgacggatgaactaccgacgatatcgtattcgatgaatccgaaaccgacgccgtgggcggaagaagaaacggtagcggcggcgcaattaataacgatgttatggtcgctatcggtttcgtcgtttgcggttggtggtatgacggcgtcgttttttggtggttggttaggtgatacgctaggtcgaataaaagcgatgctagtagcgaatatattatcgctagtaggtgcgttactaatgggtttttcgaaattaggtccgtcgcatatattaataatagcgggtcgttcgatatcgggtctatattgtggtctaatatcgggtttagtaccgatgtatataggtgaaatagcgccgacggcgttacgaggtgcgctaggtacgtttcatcaactagcgatagtaacgggtatattaatatcgcaaataataggtctagaatttatattaggtaattatgatttatggcatatattactaggtctatcgggtgtacgagcgatattacaatcgctactactatttttttgtccggaatcgccgcgttatctatatataaaattagatgaagaagtaaaagcgaaacaatcgttaaaacgattacgtggttatgatgatgtaacgaaagatataaatgaaatgcgtaaagaacgtgaagaagcgtcgtcggaacaaaaagtttcgataatacaactatttacgaattcgtcgtatcgacaaccgatactagtagcgttaatgttacatgttgcgcaacaattttcgggtataaatggtatattttattattcgacgtcgatatttcaaacggcgggtatatcgaaaccggtttatgcgacgataggtgtaggtgcggtaaatatggtatttacggcggtatcggtatttttagttgaaaaagcgggtcgtcgttcgttatttctaataggtatgtcgggtatgtttgtatgtgcgatatttatgtcggtaggtttagtattactaaataaattttcgtggatgtcgtatgtatcgatgatagcgatatttttatttgtttcgttttttgaaataggtccgggtccgataccgtggtttatggtagcggaatttttttcgcaaggtccgcgtccggcggcgctagcgatagcggcgttttcgaattggacgtgtaattttatagttgcgttatgttttcaatatatagcggatttttgtggtccgtatgttttttttctatttgcgggtgttctattagcgtttacgttatttacgttttttaaagtaccggaaacgaaaggtaaatcgtttgaagaaatagcggcggaatttcaaaaaaaatcgggttcggcgcatcgaccgaaagcggcggttgaaatgaaatttttaggtgcgacggaaacggta

SEQ ID NO: 19460 - DNA, 1572 bp, synthetic construct
  misc_feature 1..1572: note = source = /note="Description of Artificial Sequence: Synthetic coding sequence"
  source 1..1572: mol_type = other DNA
atgaccgaggacaaggtgactggcacgcttgttttcactgtcatcactgccgttcttggctcgtttcagttcgggtacgatattggtgtgatcaacgctcctcagcaggtcatcatctcgcactaccggcacgtgctgggtgtgccgctggatgaccgtaaagccatcaacaattacgtgatcaatagcaccgacgagctccctaccattagctattccatgaaccctaaaccaaccccatgggccgaagaggaaaccgtcgccgcggctcaactcatcaccatgctgtggtcattgtcggtgtcgtcatttgcagtgggcggaatgaccgctagtttcttcggcgggtggctgggagacacgctcgggcgcattaaagccatgctggtggcgaatatcctgtctctggtgggagctttgctgatgggattctcaaaactcggtccctcacatatccttatcatcgctggcaggtccatctccggactgtactgcggactgattagcggactggtgcccatgtatataggagaaatcgcgcctactgcactgcggggcgcgctgggaacctttcatcagctggcaatcgtgaccgggatcctcatctcacaaatcatcggacttgagtttatcctcggcaattacgacctgtggcacatcctgctgggactctcgggcgtgcgggccatcctccaatcgcttctcctcttcttctgcccagaatcgccgcgctacctgtatatcaagctcgatgaggaagtcaaggccaagcaaagcctgaaaagacttcgcggatacgacgatgtcacgaaggatatcaacgaaatgcgcaaggaacgggaagaggcctcgtccgagcaaaaggtgtccatcatccagcttttcactaactcctcgtaccgccagccgatccttgtggccctcatgctgcacgtggcacagcagttctcgggaatcaatgggattttctactacagcaccagcattttccagactgcaggtatctcaaagccagtgtacgcgactattggagtgggcgcagttaacatggtatttaccgccgtcagtgtgttcctggtcgagaaggccggtagaaggagccttttcctgattggcatgagcggcatgtttgtatgcgctatcttcatgagcgtgggcctggtgctgctgaacaagttttcctggatgtcttacgtctcgatgatcgccatcttcctctttgtgtcgtttttcgaaatcggaccggggccgattccgtggttcatggtggctgaattcttcagtcaaggtccacggccggcggccttggccatcgccgccttctccaattggacttgcaacttcattgtggcgctctgttttcagtacatcgcagacttttgtggaccatacgtgttcttccttttcgccggggtcctcctcgcgttcaccctgtttacgttcttcaaggtaccggaaactaagggaaaatccttcgaggaaatcgcagcagagttccagaaaaagtcgggctccgcgcatagaccgaaggccgccgtcgaaatgaagttcctcggagcgaccgagactgtc

SEQ ID NO: 19461 - DNA, 1572 bp, synthetic construct
  misc_feature 1..1572: note = source = /note="Description of Artificial Sequence: Synthetic coding sequence"
  source 1..1572: mol_type = other DNA
atgactgaggacaaagtgaccggtactctcgtgttcactgttatcactgcagtgctcggatcatttcaattcggatacgacattggagtcatcaacgctccgcaacaggtgataatcagccattaccgccacgtcctcggagtgccactcgacgaccgaaaggcaatcaacaattacgtgatcaactccaccgacgagctcccgactatctcatactccatgaatccgaagcctactccgtgggcggaagaggaaaccgtcgccgcggcacaactcatcaccatgctgtggtccctctccgtgtcgtcctttgccgtgggtggaatgactgcatcctttttcggaggatggttgggcgacacccttggccggatcaaggcaatgcttgtcgctaacatcttgtccctggtgggagcactcctgatggggttttccaagctgggaccgtcgcacatcctgattatcgccgggagatctattagcggactgtattgtggtctgatctcggggctggtgcccatgtacattggtgaaatcgcacctactgcgctgagaggagcactgggtaccttccatcagctcgcgatcgtgacgggaatcctcatctcacagatcattggtctggagttcatactgggaaactacgatctttggcatatcctgctcggtctttcgggcgtcagggcgatcctgcagtctctcctgctcttcttctgtcctgaatcgcctcgctacctctacatcaagctcgatgaggaagtgaaggcgaagcagtcgctcaagcgattgaggggctacgacgacgtcactaaggatatcaatgagatgcgcaaagaacgggaggaggcttcgagcgagcaaaaagtctcgattatccagctgttcactaactcgtcgtaccgccagcctatcctcgtggccctgatgcttcacgtggcgcagcagtttagcggaatcaatggtatcttctattactcgacttctattttccaaaccgccggaatctcaaagccagtgtacgcgaccatcggggttggagccgtgaatatggtgtttaccgccgtgtccgtgtttctggtggaaaaagcgggtcggaggtccctgttcctcatcggaatgagcggaatgttcgtctgcgccatcttcatgtcggtgggcctggtcttgcttaacaagttctcatggatgagctacgtgtcgatgatcgcaattttcctctttgtgtccttctttgaaattggcccaggacctatcccctggtttatggtggccgagttcttctcccaagggccgcggccagccgcgctggcaattgcagccttttccaactggacgtgtaacttcatcgtcgcgctgtgctttcagtacatcgcagatttctgcgggccatacgtctttttcctcttcgcgggcgttctgctggcattcaccctcttcacgttctttaaagtgccggaaaccaaaggcaagtcctttgaagagattgccgctgagttccagaagaaatcagggtcagcgcaccgccccaaagccgccgttgagatgaaattcctgggcgccaccgaaaccgtg

SEQ ID NO: 19462 - DNA, 1572 bp, synthetic construct
  misc_feature 1..1572: note = source = /note="Description of Artificial Sequence: Synthetic coding sequence"
  source 1..1572: mol_type = other DNA
atgacggaggataaggtgactgggaccctagtgtttacagtgattaccgccgtacttggctcatttcagtttggatacgacattggggtgatcaacgcgccccaacaagtgatcatatctcactatagacacgttctgggggtgcctcttgacgaccgcaaggctatcaacaactacgtcatcaacagcacagatgagttacccacaatttcatactctatgaaccctaagccaactccctgggcagaagaggagacggttgccgcagctcagctgattacaatgctctggtctctgagtgtgagcagctttgccgtgggcggtatgaccgcgagctttttcggcggttggttgggagatacgctgggccgcattaaggcaatgctggtggcaaacatccttagtctggtcggagccctgctcatggggttctctaagctaggcccaagccacatcctaatcatcgcgggcagatctatctccggactgtactgcggactgatctctggcctggtgcccatgtatattggagaaattgcaccaactgcactcaggggcgcattgggaacattccaccagctggcaatcgttacaggcatactgatcagtcagatcattgggctcgagtttatcctggggaattacgatttatggcatattctcctggggctcagtggcgtcagggccattctccagagcttgctcctgttcttttgtccggaaagcccgagatatctgtacatcaagcttgacgaagaggttaaggccaagcagtctctcaaacgtcttagggggtacgacgatgtgactaaggatatcaatgagatgagaaaagagcgcgaggaggcctcctcggagcagaaggtgtccatcattcagctatttacaaactcttcgtaccgccagcccattctggtcgcgttgatgctgcacgtggcacagcagttctccggaatcaacggcattttctattattctacaagtatcttccagactgcaggcatcagcaagccagtttacgccaccatcggggtgggagctgtgaatatggtgttcaccgccgtgagcgtctttctagtcgaaaaggccggtcggcgaagccttttcctcattggaatgtccgggatgttcgtctgcgccatttttatgtccgttgggttggttctgctcaataaattcagttggatgagttatgtgtctatgatcgcaatctttctgtttgtgtcctttttcgagattggcccgggtcctattccctggtttatggtggccgaattcttttcacagggaccacgcccagctgctcttgcgatcgctgcgttctcaaactggacctgtaattttatcgtcgctctgtgctttcagtacatcgccgacttctgcggcccctacgtgtttttcctgttcgccggcgttctgctggcctttaccctgttcacctttttcaaagtaccggagaccaagggcaaatctttcgaggagatcgctgccgagttccagaaaaaaagcggaagtgcccataggccaaaggcagccgtagaaatgaagtttctgggagccaccgaaacggtt

SEQ ID NO: 19463 - DNA, 1572 bp, synthetic construct
  misc_feature 1..1572: note = source = /note="Description of Artificial Sequence: Synthetic coding sequence"
  source 1..1572: mol_type = other DNA
atgacagaggacaaagttacagggactttagtttttacagtaataactgcagttcttggatcatttcaatttggatatgatatcggagttattaatgcaccacaacaagttattattagtcactatagacatgttttaggagtaccacttgatgatagaaaagctattaataattatgttataaatagtacagatgaattaccaactattagttattctatgaatccaaaaccaactccatgggcagaagaagaaacagttgctgcagctcaacttattacaatgttatggagtctttcagttagttcatttgcagttggaggtatgactgcatcattttttggaggttggttgggagatacattagggagaattaaagctatgttagtggctaatattctatctttagttggagctttattaatgggattttcaaagttaggaccaagtcatattcttatcattgcagggagatctatttcaggattgtactgtggattgatttctggacttgttccaatgtatattggagaaattgctccaactgctttaagaggagctcttggtacatttcatcaacttgccattgtcactggaattcttataagtcaaattattggtcttgaatttattttaggtaattatgacttatggcatatattattaggtcttagtggagttagagcaattttacaatctttattattatttttctgtccagaatctcctagatatctttatattaaattagatgaagaagtaaaagctaagcagtcacttaaaagattaagaggatatgatgatgttactaaagacattaatgaaatgcgtaaggaaagagaagaagcatcttcagaacaaaaagtttctataattcaactttttacaaattcaagttataggcaaccaatccttgttgcacttatgcttcatgtggctcagcaattttcgggaataaatggaattttttactattcaacaagtatttttcaaactgctggaatttctaaacctgtttatgctacaattggtgttggagcagttaatatggtttttacagctgtttcagtctttcttgtagaaaaagcaggtagaagaagtctttttttaattggaatgtctggaatgtttgtatgtgcaattttcatgagtgttggattagttcttttaaataagtttagttggatgtcatatgtttcaatgattgctattttcttatttgtttcattttttgaaattggtccaggtccaataccttggttcatggttgcagaattttttagtcaaggaccaagaccagcagcattagctatagcagcattctcaaattggacatgtaattttattgtagctctatgttttcaatatatagcagacttttgtggaccatatgtatttttcttatttgcaggtgtattacttgccttcacactttttacattttttaaagttccagagacaaaaggtaaatcatttgaagaaattgctgctgaattccaaaaaaaatccggttctgcacatagaccaaaagctgcagtagaaatgaaatttttgggagctacagaaactgtt

SEQ ID NO: 19464 - DNA, 1572 bp, synthetic construct
  misc_feature 1..1572: note = source = /note="Description of Artificial Sequence: Synthetic coding sequence"
  source 1..1572: mol_type = other DNA
atgaccgaggacaaagtcaccggaactctcgtgtttaccgtgatcactgcagtcttgggtagcttccaattcggatacgatatcggagtgataaacgcgccacagcaggtgataatctcacactatagacacgtgctgggtgtgccgctggacgatcgcaaggcaattaacaactacgtgatcaactcgactgatgaactgccgaccatttcctattcgatgaacccaaagcctaccccgtgggcggaggaagaaactgttgccgcggcacagctgattactatgctctggtcccttagcgtgtcgtcgttcgccgtggggggaatgactgcgtcattcttcggggggtggctgggagacaccctgggtcgaatcaaagcgatgctggtggccaatattctctccctggtgggggcactgctcatgggtttttccaaactggggccgtcgcacatcctgatcatcgctggccgatcaattagcggactgtactgcggcctcatcagcggtctggtgccaatgtacatcggcgagatcgcccccactgcacttcggggagcactgggaaccttccatcagttggccatcgtgacgggaatcctgatctcgcaaatcatcggtctggaattcatcttgggaaattacgacctctggcatatccttctgggactgtcaggagtgcgcgccattcttcagagcctgctcctgttcttctgtcccgagtcccctaggtacctttacatcaagctcgatgaagaggtgaaggcaaagcagtccctcaagcgcctgcggggatatgacgacgtgacgaaagacatcaatgagatgagaaaagaaagggaagaggcctcgtctgaacaaaaggtgtcgatcattcagctctttaccaactcctcgtaccgccagccgatcttggtggctcttatgttgcatgtcgcccagcaattctccggcattaacgggatcttttactatagtactagtatcttccaaaccgccggaatcagcaagccagtctacgcaaccatcggagtaggagcggtcaacatggtgttcaccgccgtcagcgtgtttctggtggaaaaggccggtcgccgctctctgtttctgatcggaatgtccggaatgtttgtgtgcgccatcttcatgagcgttggactggtgctgctcaataagttttcctggatgtcatacgtgagcatgatcgcaatcttcctcttcgtgagctttttcgaaataggacctggcccgattccgtggttcatggtcgcggagttcttttcgcaggggccgcgcccagcggcgcttgccatagccgcgttttcgaattggacttgtaatttcatcgtcgcactctgcttccaatacatcgccgatttctgcggcccgtacgttttctttcttttcgccggagtgttgctcgcgttcacgctctttactttctttaaggtgccggaaactaagggaaagtcgttcgaggagatcgcggcagagttccaaaagaaatccggttcggcccacagaccgaaggcagccgtggagatgaagttcctcggagccaccgagactgtg

SEQ ID NO: 19465 - DNA, 1572 bp, synthetic construct
  misc_feature 1..1572: note = source = /note="Description of Artificial Sequence: Synthetic coding sequence"
  source 1..1572: mol_type = other DNA
atgacggaggataaagtgacgggtactctggtgtttaccgtaattactgccgtgcttggttcctttcaatttggctacgacatcggagtcataaatgcgcctcaacaggtgataatctctcactaccgtcatgtcttgggggtgccactggacgatagaaaggcgattaacaactacgtgattaactccactgatgaactgccaactatctcatactcgatgaatccaaagccaactccatgggcagaagaagaaacggtggcagcagcccaactgatcaccatgctgtggtccctgagcgtgagctcgtttgctgtgggtgggatgactgctagcttctttggcggatggctgggtgacacgcttgggcgcattaaggcaatgctggtggcgaacattctgtctcttgtgggtgcactgctcatgggatttagcaaactggggcctagccacattctcataattgcaggtcgctctatctcgggactgtattgcggacttattagcggtttggtgccgatgtacattggtgagattgcgcctaccgcactgagaggtgcacttggaacctttcatcagctggcgattgtcaccgggatccttatatcccagataatcgggctcgaattcattcttggtaattacgatttgtggcatattcttctcggtctttccggagtgagggccatactccagtcgcttttgctgttcttttgtcctgaatcaccccggtacctctacattaaactcgacgaggaggtcaaagccaagcagtcattgaagcgcctgcggggatacgacgatgtgactaaagatatcaatgagatgcgcaaggaaagggaagaagcatcgagcgagcaaaaggtgtcaattatccaactgtttaccaacagctcatacagacagcctattttggtcgcactgatgcttcatgtcgcccagcaattctccggaataaacggtatattctactactcaacctcgatctttcagaccgctggaatctctaaacccgtgtacgcaaccattggagtcggcgcagtgaacatggtattcaccgcagtgtcggtgtttctcgtcgagaaggcaggaagaagatcgctcttcctgattggcatgagcggcatgttcgtctgtgcaatctttatgtcagtgggcctcgtgctcttgaataagttttcctggatgtcatatgtgtcgatgatcgcaattttcctttttgtgagcttctttgaaataggaccggggcctataccgtggtttatggtggcagagtttttctcccaaggtccacgaccggcagctcttgccatagcggcatttagtaactggacctgcaactttattgtggccctctgtttccaatacatcgcagacttttgtggcccttacgtctttttcctctttgccggcgtgttgctcgcgtttactctgttcactttcttcaaagtcccagaaaccaaggggaagtcgttcgaggaaattgccgcagaattccaaaagaagtcgggctccgcccaccgccccaaggccgcagtagaaatgaagtttcttggagcaactgaaactgtt

SEQ ID NO: 19466 - DNA, 1572 bp, synthetic construct
  misc_feature 1..1572: note = source = /note="Description of Artificial Sequence: Synthetic coding sequence"
  source 1..1572: mol_type = other DNA
atgacagaagataaagttacaggaactctcgtgtttaccgttattactgccgttctgggcagttttcagttcggatacgatattggcgtgataaatgcaccccagcaggtgatcatctcgcattaccggcacgtgttgggagtcccactggatgacaggaaagccataaataattatgtaataaattctactgacgaattgcccaccatctcatattctatgaatccgaagcctaccccttgggcagaggaggagacagtggccgcggcccagctgatcacaatgttgtggagcctatcagttagctctttcgccgtcggtggaatgactgcctccttttttggtggctggctgggcgacacactggggcggatcaaagcaatgctggtggctaacatcctgtctctggtcggagctctgttgatgggctttagtaaactcggaccctctcacatcctcattatagctggccggtccatcagcgggctatattgcgggctgatatccggactcgtccctatgtacattggcgaaatcgcccctacagccctgaggggggcgttgggaacttttcatcagctcgctatcgtcactggcatactgataagccaaatcatcggactcgagttcatcctcggaaattacgacctatggcacattctgctcggattgtcaggcgtcagggccattctacagagcctcctccttttcttttgtccagaaagtccccgatacctgtatatcaaactagacgaggaggtaaaggcaaagcagagtctgaaaaggctcaggggctacgatgatgtaactaaggacataaatgagatgagaaaggaacgcgaagaggcctcctccgagcaaaaggtcagcatcattcaactatttacaaactccagttacagacaacctatactcgtggccctcatgctacatgtggctcagcagttctccggtatcaacggaatcttctattattctacaagcatctttcagactgccggtattagcaaacccgtttacgccaccatcggagttggggcagtgaacatggtttttacggccgttagcgtctttcttgtcgaaaaagccggtcggcgatcactatttctgatcggtatgagcggcatgtttgtgtgtgccattttcatgtcggtgggattggtcctgttaaataagttttcatggatgtcttacgtgtctatgatcgctatctttctgtttgtctcttttttcgagatcggcccaggaccgattccatggtttatggtggcagagttcttcagtcaggggcctagaccagccgcactcgcaatcgcagcttttagcaattggacatgcaatttcatcgtcgctttgtgttttcagtatatcgctgatttttgtggaccgtatgtattcttcctattcgccggcgtgctcctcgcttttactctgtttacatttttcaaggtgccggagaccaaggggaagagctttgaggaaatagctgctgaattccagaagaaatctggatcggcccaccggcctaaggcagccgtagagatgaagtttctgggcgcgacagagaccgtg

SEQ ID NO: 19467 - DNA, 1572 bp, synthetic construct; identical to SEQ ID NO: 19462
  misc_feature 1..1572: note = source = /note="Description of Artificial Sequence: Synthetic coding sequence"
  source 1..1572: mol_type = other DNA

SEQ ID NO: 19468 - DNA, 1572 bp, synthetic construct
  misc_feature 1..1572: note = source = /note="Description of Artificial Sequence: Synthetic coding sequence"
  source 1..1572: mol_type = other DNA
atgacggaagacaaggtgaccgggaccctggtcttcaccgtgatcactgccgtgctgggatctttccagttcggatatgacattggagtcataaatgcccctcagcaggtgataatctcccattatagacacgtgttaggagttcctcttgacgaccggaaggctatcaacaactacgtgatcaactccactgatgagctgcctacaatatcttactctatgaatcccaagccaaccccttgggctgaggaagagaccgtcgcagccgcccagctgattaccatgttgtggagcctgtccgtttcctctttcgcagtgggagggatgacagcttcatttttcggcgggtggctgggcgataccttgggtcggatcaaggccatgctcgtcgcaaatattctgtcactcgttggcgccctgctcatgggttttagcaagttgggcccgtctcatatccttataattgcggggagaagcatctctggcttgtactgcggattaatatccggcctggttccgatgtatattggagaaatcgcaccaacggccctccgaggcgctctgggtacctttcaccagctggcaatagtcactgggattctgatctcacagattattgggctcgagttcatactcggtaactatgacctgtggcacatcttgttaggcttaagtggggtgcgagccatactccagagtctgctgttgtttttttgtcctgagtctcctcggtacttgtacatcaagctggacgaggaggtgaaggcaaagcagtctctcaaaaggctgcgcggttacgacgacgtcaccaaagacatcaatgagatgcgaaaggagcgtgaggaagccagcagcgaacagaaagtatccataattcagctctttactaatagtagctaccgccagcccatcctggtagcactcatgctgcatgtcgcgcaacaatttagcggaattaatgggattttttactacagtacgtctattttccaaaccgcaggaatcagcaagcccgtgtacgcgacgataggggttggcgcggtgaatatggtgttcactgctgtgtctgtcttccttgtcgagaaggctggacggaggagtcttttcctgattggtatgtccggaatgtttgtttgtgctatttttatgtcagtcgggctggtgctactgaataaattctcctggatgtcctatgtcagtatgatagccatttttcttttcgtctctttcttcgagatagggcccggtcctatcccttggtttatggttgccgagttcttctctcagggcccaagaccagctgcactggctattgcggcttttagcaactggacatgcaactttattgtagctctgtgcttccagtatatagctgatttttgtggcccctatgtttttttcctgtttgctggggtcctgctggcattcactctctttactttcttcaaggtaccagaaactaaaggcaaatcttttgaggagatcgcagccgagttccaaaagaagagtgggtccgctcaccggcctaaggccgctgtggagatgaagtttttgggcgccaccgaaaccgtt

SEQ ID NO: 19469 - DNA, 1572 bp, synthetic construct
  misc_feature 1..1572: note = source = /note="Description of Artificial Sequence: Synthetic coding sequence"
  source 1..1572: mol_type = other DNA
atgaccgaagataaggtgacgggcactctcgtgttcaccgtcattaccgccgtgctcggcagctttcaattcggctacgacatcggagtgataaatgcaccacagcaggtgatcatttcgcactaccggcatgttctcggggtcccgcttgatgaccgcaaggcaatcaataactacgtgatcaactccaccgatgaactgcccaccatcagctactcaatgaacccgaagccaaccccctgggccgaggaagaaaccgtggcagctgcgcaattgatcactatgctgtggtcgctgtcagtgagctcatttgcagtgggaggcatgaccgcatccttcttcggaggatggctcggcgatactctgggacgcatcaaagctatgttggtggctaatatcctgtccctggtcggggccctcttgatgggcttctcaaaactcggaccgtcgcacatcttgatcatcgcgggtcgctcaatctcagggttgtactgcgggctcatcagcggactggtccccatgtatattggcgagatcgccccaactgctttgcggggtgctctgggcactttccaccaactcgccattgtcaccggcatcctgatctcccagatcatcggactcgaattcattctgggaaattacgacctgtggcatatcctgttgggcctctctggcgtgcgcgccatcctgcagtcgctgctcctgttcttctgcccagagtcgccaagatatctctacatcaaactggacgaggaagtgaaggccaaacagtcattgaaaaggctccggggatacgacgacgtgaccaaggacatcaacgaaatgcgcaaggagcgggaggaggcttcgtccgagcagaaggtgtcgattatccagctcttcactaattcatcctaccgccagccaatcctggtggctctgatgctgcatgtggcccagcagttctccgggatcaacggtatcttctactactcaaccagcatctttcaaactgcaggaatctccaagccggtgtacgcgactatcggtgtcggtgcagttaacatggtgtttacggcagtgagtgtgttcttggtggaaaaggctggccgccggagtctgttcctcatcggaatgtctggcatgttcgtctgcgctatctttatgtcggtgggactggtgctgctcaacaagttttcgtggatgagctacgttagcatgattgccatctttctcttcgtctcgttctttgaaatcgggccaggacctatcccgtggttcatggtcgctgaattcttttcgcagggaccgcgccccgctgcgctggccattgctgctttttcgaactggacttgcaactttatagtggccttgtgcttccagtacatcgctgatttctgtggaccttacgtattcttcctcttcgctggagtgcttctggcgttcacgctgtttactttctttaaggtgccggaaaccaagggaaaatcgtttgaagagatcgcagcggaatttcagaagaagagcggcagcgcccaccgcccgaaggcagccgtggagatgaaattcctcggggcgaccgaaactgtc

SEQ ID NO: 19470 - DNA, 1572 bp, synthetic construct
  misc_feature 1..1572: note = source = /note="Description of Artificial Sequence: Synthetic coding sequence"
  source 1..1572: mol_type = other DNA
atgaccgaggataaagttaccgggacactggtgtttacagtaattacggctgtgctggggtcgttccagttcggctacgacattggcgtgattaatgcccctcagcaagttatcatttcccactatcgccatgtgctgggggtacctctagacgatcgaaaagccatcaataattatgtaattaattcgaccgatgagctcccgaccatctcatactccatgaaccctaaacctacaccttgggccgaggaagaaacagtcgcggccgcacaattaattacaatgctgtggtcactgtcggtgagcagctttgcggtcgggggtatgacagcctctttctttggaggctggctgggagatacgctgggtcggatcaaggccatgctcgtagctaatatcttgagccttgttggcgccctgctgatgggattctccaagctgggtccttcccacattctcatcattgccggccgcagtatctctgggctctattgtggattaatctctggcttggttcctatgtacatcggagagattgcacccacagccctgcgcggcgcgttgggtacttttcatcagttagccatcgtgacaggaatcctcatttcccagattatcggccttgagttcatactcgggaattacgacctctggcacattctgctgggcctctccggtgtccgcgccatactccagagcctgctgctcttcttctgcccggagtccccgcggtacctgtatatcaagctggatgaggaggtcaaggccaagcagtcgctaaagaggcttcgcggatacgatgatgtcaccaaggacataaatgagatgcgaaaggagagagaggaggcgtcatccgaacagaaggtatctattatccagctgtttaccaactcttcatatagacaacccatccttgttgccctgatgttacacgtggctcaacagttctctggcattaatggaatcttttattatagcacgagcatcttccagactgctggcatcagtaagcccgtgtacgctactatcggagttggagctgtcaacatggtctttacggcagtgtccgtcttcctcgtagagaaggccggccggcgcagtctcttcctgatcggcatgtccgggatgtttgtgtgtgcaattttcatgtccgtgggacttgtactccttaacaaattttcctggatgtcttacgtgagtatgattgcgatattcctttttgtgagcttctttgaaatcggtccgggccccattccttggtttatggtcgctgagttctttagccagggacctagacctgcagcactggccattgccgccttttcaaactggacttgtaatttcatcgtcgcattatgcttccaatacattgctgatttttgtggtccttatgtcttcttcctgttcgctggcgtcctgctcgcttttaccttgtttacattcttcaaagtacctgaaacaaaaggaaagagcttcgaagagatagcagctgagttccagaaaaagtctgggtctgcgcaccgacccaaggccgccgtagaaatgaagttcttaggcgctacagagaccgtg

SEQ ID NO: 19471 - DNA, 1572 bp, synthetic construct
  misc_feature 1..1572: note = source = /note="Description of Artificial Sequence: Synthetic coding sequence"
  source 1..1572: mol_type = other DNA
atgaccgaagataaggtcaccggtactctggtctttaccgtgatcactgcagtgctgggatcatttcaatttggatatgacataggagtgatcaatgccccacagcaggtgataatctcccattatcggcacgtcctgggcgtgccccttgatgaccgtaaggctatcaacaactatgtcatcaattctaccgacgaactgccaaccatctcatattcaatgaaccccaagcctactccttgggcagaagaggaaactgtggcagcggcacagctgataaccatgctttggtcactctcagtctccagctttgccgtgggaggtatgaccgccagtttctttggcggctggctcggcgataccctcggacgaataaaggcaatgctggttgctaatatcctctcccttgtgggagcactgctcatgggcttttccaagctcggcccgagccatattctgatcattgcaggtaggtccatatcgggtctttactgcggcctcatttcaggactcgtgcctatgtacatcggagaaattgcccctaccgcacttcgcggcgccctcgggacttttcaccaactcgcaattgtcacgggaattttgatttcacaaatcatcggactggaattcattcttggtaactacgatctttggcatatcctgctcgggctgagcggtgtgcgagcgatactgcaatccttgttgctctttttctgtcctgaatcccctagatacctgtatatcaaactggatgaggaagtcaaggcaaagcagagcctcaagagacttcgaggatacgatgatgtgacgaaggacatcaacgagatgcgaaaggagagggaggaggcctcatccgaacagaaagtgagcattattcaactgtttactaattcgtcctacagacagccgattcttgtcgcgttgatgctgcatgtcgcccagcaattctccggaattaacggaattttctactactccacttcgatattccaaactgctgggattagcaaaccagtgtacgcaaccataggcgtgggagctgtgaacatggtgttcaccgctgtgagcgtgtttcttgttgaaaaagcaggacgcagatcgctgtttctgattggcatgtcgggaatgtttgtctgcgcaatctttatgtcagtgggtcttgtccttctgaacaagttctcgtggatgtcctatgtctcgatgatagcgatcttcctttttgtgtccttcttcgaaattggacctggccccataccttggtttatggtggcagaattcttttcccaaggaccgcggcctgccgcacttgcaattgctgcattttccaactggacgtgtaactttattgtagcgctctgctttcaatacattgccgacttctgtggaccctacgtgtttttcctcttcgcaggggtcctgctggcattcaccttgttcaccttctttaaagtgcctgaaactaagggtaagagcttcgaagagatagccgcggaatttcagaagaaaagcggctctgcccatcgtcccaaggcagcagtggagatgaagtttctgggtgctaccgagactgtg

SEQ ID NO: 19472 - DNA, 1572 bp, synthetic construct
  misc_feature 1..1572: note = source = /note="Description of Artificial Sequence: Synthetic coding sequence"
  source 1..1572: mol_type = other DNA
atgaccgaagataaagtcacgggcacactagtctttaccgtaatcaccgcggtgctcggatcgttccagttcggttatgatatcggggtgattaacgcaccccagcaggttatcatctctcactacagacacgtcctcggtgttccacttgatgacaggaaggccataaataattatgtgattaattccactgacgagttaccgacgatctcgtacagcatgaatcctaagccaacaccctgggcagaggaagagaccgtggctgccgcccagctcataacaatgctgtggtccctttcagtcagtagctttgccgttggcgggatgactgcttctttttttggtggctggctaggcgacactctgggcaggatcaaggccatgctagtagctaacatcctgtccctggtgggcgctcttctgatggggttctccaagcttggacctagccacatacttataatcgccggccgctccatttctgggttgtattgtggtctcatctcgggactcgtacctatgtatataggagaaattgcaccaactgctcttaggggggctctcggtacctttcaccaactagcgatagttactggcattttgattagccagatcattggccttgagtttatcttggggaattatgacctgtggcatattttactgggactgtccggtgtgcgtgctatactgcagagcctgctcttgtttttttgccctgagagcccacgctacctgtacataaaactggatgaagaggtcaaagctaaacagagcttgaaaagattgcgagggtatgacgacgtgactaaggacatcaatgaaatgagaaaagagagagaagaagctagctccgagcagaaggtgtctataattcagctgtttaccaacagctcctatcgtcagcccattctggttgctttgatgttgcacgtggcccagcagttctcagggatcaatgggatattttattactccacctctatcttccagactgccggaatttctaaaccggtgtacgctacaattggagtaggtgccgtcaacatggtctttaccgccgtgagcgtatttttggttgagaaggctggacgcagatctctgtttctgataggaatgagtgggatgttcgtttgtgctattttcatgtcggtagggctggtactgttgaacaagttctcctggatgtcgtatgtttccatgatagccatctttctctttgtgagcttctttgagatcggacccggtcccatcccatggtttatggtagctgaatttttttctcaggggcctcggcccgccgcccttgcgatagccgcattcagcaactggacttgcaatttcattgtagcactgtgttttcaatacatcgcggacttctgtggcccctacgtcttctttttgttcgccggcgtgctcctcgcctttacactgttcacatttttcaaagttccggaaacgaaagggaaatcctttgaggagatagccgccgaattccaaaagaagtcaggctctgcgcatcggcctaaggcagccgttgagatgaagttcttgggcgctaccgaaaccgtc

SEQ ID NO: 19473 - DNA, 1572 bp, synthetic construct
  misc_feature 1..1572: note = source = /note="Description of Artificial Sequence: Synthetic coding sequence"
  source 1..1572: mol_type = other DNA
atgacagaggataaggtgaccgggacattggtgttcactgttattaccgctgtcctaggcagttttcagttcggctatgacatcggtgtgattaacgcaccgcaacaggtcatcatctcacattacagacacgtgcttggggtccctctggatgaccgaaaggccatcaacaattacgtaatcaacagtactgatgagctcccaaccatctcttacagcatgaacccgaaaccgactccctgggccgaggaggaaacagtggctgcggcacagctcatcacaatgctctggtcactcagcgtctcttcatttgcagttgggggcatgacagctagtttcttcgggggctggctgggggacacgctgggtaggatcaaagctatgctagtggcaaatattctatcactcgttggtgccctgttaatgggattcagtaaactggggcctagccacatcttgatcatcgccggtcgaagcatttctgggctgtactgcggactcattagcggattagtgcccatgtatattggggagattgcacctaccgccctaagaggcgcactaggaacttttcaccagttggcaattgtgactggaatcctgatcagccagattatcgggctagagtttatcctgggtaactatgacctttggcatatcttgttgggcctgtctggcgtacgggcaatactgcagagtctgcttcttttcttctgtccagaatcacccaggtatctgtatatcaagctggatgaggaggttaaggcaaaacagtccctcaaaaggttaagaggctacgacgacgttactaaagacattaatgagatgcggaaagagagggaagaggcaagctcagaacaaaaggtcagtatcattcagttgtttaccaactcatcttacagacagcctatcctcgtggctctgatgctgcacgttgcgcagcagttttccggcatcaacggaatcttttattatagtaccagcatcttccaaactgcaggaatctccaagccagtgtacgcgactataggagtgggagcggtgaacatggtttttactgccgtctccgtcttcttggtggagaaggcagggaggcggtccctgtttcttatcggaatgtcaggaatgtttgtttgcgccatctttatgtccgtaggcctggttctgctgaacaagttttcttggatgagctacgtctcaatgatagcgatcttcctattcgtcagtttctttgagatcggacctggccctattccttggttcatggttgcggaattcttttcgcaaggaccaaggccagccgcccttgctatcgcagcattctctaactggacatgtaactttattgtggccttgtgtttccagtatatcgccgatttctgcggcccctatgttttttttttattcgctggcgttctgctggcctttacactctttaccttcttcaaggtgccagaaacaaaggggaagtcatttgaggagattgcggcagaatttcagaaaaaaagtggcagcgcacatagacccaaggccgcagtagagatgaagtttctaggcgcgaccgaaacagtc

SEQ ID NO: 19474 - DNA, 1572 bp, synthetic construct
  misc_feature 1..1572: note = source = /note="Description of Artificial Sequence: Synthetic coding sequence"
  source 1..1572: mol_type = other DNA
atgactgaggataaggtgaccggtaccctggtgtttaccgttatcacggctgtgttgggtagtttccagttcggatacgatatcggcgttataaacgcaccacagcaggttatcatatcacattatcgccatgtgcttggcgttcccctcgatgaccgcaaggcaattaacaattacgtgatcaattcaacagacgaattgcccacaatctcctacagcatgaaccccaaacccacgccttgggcggaagaggagaccgtcgcggcagctcagttgatcacgatgctctggagcttatccgtctcatcatttgccgtcggaggaatgactgctagctttttcggagggtggctgggagataccctgggccggatcaaagcaatgctggttgccaatatcttgtctctggtcggagctctgctgatggggttcagtaagctcgggccctctcacatactgattatcgccggccgctcaatcagtggattatattgcgggctgatctcaggactggttcctatgtacattggcgaaatcgctccgacagccctgcggggggccttgggaactttccaccaactggctatcgtcacaggtatcctgatttctcagattatcggcctcgagttcatcttgggtaactacgatctctggcatattcttctgggacttagtggggtgagagcaattctgcagtcattactcttgttcttttgcccagaatctccccgttacctgtatattaagctcgacgaggaggtgaaggcgaagcaatctctgaaacggctccggggctatgatgatgtgaccaaagacattaatgaaatgagaaaggaacgtgaggaagcaagctcagagcagaaagttagcattattcagctgttcacaaacagcagctatcggcagcctattttggtggccctgatgctacacgttgcccagcaattctctgggataaatgggatcttttactattccaccagtatctttcagacggcgggcataagtaaacctgtatacgccaccattggcgtgggagcagttaatatggtttttaccgctgtgagtgtgtttctcgttgaaaaggcaggtcgcaggtcccttttcttaatcggcatgtccgggatgtttgtatgcgccatcttcatgtctgtgggcttggtcttgctgaataaattttcatggatgtcttatgtgagtatgattgctattttcttgttcgtgagctttttcgaaatcgggccaggccctatcccatggtttatggtcgctgaatttttctcccagggaccccgtcctgctgccttggcaatagctgcctttagtaactggacttgtaacttcatagtagccctgtgcttccagtacatcgctgacttctgcggaccctatgtgtttttcctcttcgccggagtactgctggcgtttaccctgtttactttctttaaagtgcccgagaccaaagggaaatcttttgaggagatcgctgccgaattccagaagaaatcagggtctgcacaccgtcctaaggctgccgtggagatgaaatttctgggcgctacagagactgtc

SEQ ID NO: 19475 - DNA, 1572 bp, synthetic construct
  misc_feature 1..1572: note = source = /note="Description of Artificial Sequence: Synthetic coding sequence"
  source 1..1572: mol_type = other DNA
atgactgaagataaagtgaccggcaccctcgttttcaccgtgataaccgcagtgctgggtagctttcagttcggatatgatatcggcgtgataaatgctcctcaacaggtgattatatcccattatcggcatgtactgggggtgcccctggacgaccggaaagctatcaataattacgtgatcaattccaccgacgaactccccaccatttcctatagtatgaatcccaagcctacaccctgggcagaggaagagaccgttgctgccgctcagcttataacaatgctgtggagcctgtccgtgtcttctttcgccgtgggagggatgacagcttccttctttggcggctggctgggagacacccttggaagaattaaggccatgctcgtggcaaacatcctgtccctggtcggagctctgctaatgggctttagcaagttaggtccaagccacattctgatcattgctggccgatctatcagtggcctctattgcggtctaattagtggtttagtccctatgtacattggggagatcgccccaaccgctctgagaggcgctctcggcactttccaccagctcgccattgtgaccgggatcctgatttcccaaattatcggacttgagtttatcctaggcaactacgatctgtggcacatcctactggggctgtccggagttcgtgcaatactgcaatcactgctcctgttcttctgccctgagtcaccacgttatctgtatataaaactcgatgaggaggtgaaggcaaagcaatctctgaaacggctacgcgggtacgatgatgtaaccaaggatattaacgagatgcgcaaagaaagggaggaagccagcagtgaacaaaaagtgtctataatacaactgttcactaactcctcctatcggcagcctattcttgtggctctgatgctgcacgtggctcaacagttcagcgggattaatggcattttctattactctacttcaatatttcagacagccggaattagtaaacctgtgtatgctactatcggcgtgggagccgttaatatggtttttactgcagtgtccgtattcctggttgaaaaggccggaagaagaagcctattcctgattggcatgtctgggatgtttgtttgcgccatattcatgagcgtgggcctggtgctactgaacaagttttcctggatgtcatatgtcagcatgatagctatattcctgttcgtttcctttttcgagatcggccccgggcctattccctggttcatggtcgccgagttcttttctcaggggcctcgaccagccgcactagctattgctgcattctctaattggacttgtaacttcatcgttgccctgtgtttccaatacattgcagatttctgcggtccatatgttttctttctatttgccggcgtgctgctggctttcactctgttcacatttttcaaggtcccagagaccaaggggaaaagcttcgaagagattgcagctgaattccagaaaaagagtggttccgctcaccgacccaaagccgcagttgagatgaagttcctgggcgctaccgagactgtt

SEQ ID NO: 19476 - DNA, 1572 bp, synthetic construct
  misc_feature 1..1572: note = source = /note="Description of Artificial Sequence: Synthetic coding sequence"
  source 1..1572: mol_type = other DNA
atgacagaagacaaggtaactggcacactggtgtttaccgttatcaccgcggttctgggctcctttcagtttggctatgacatcggcgtgataaatgcgccgcagcaggtgattatcagccactatcgacacgttctaggcgtgccgttggacgatcgcaaggcaatcaacaactacgtgattaactccactgatgaactacctaccatctcatactcaatgaaccccaagcccacgccatgggctgaagaggaaactgtggccgccgcccagctcattacgatgctgtggtcattgtcggtcagctcgttcgcggtgggcggaatgaccgcctcatttttcggtggttggttgggcgacaccctgggaaggatcaaagccatgttagtagccaacatcctgtccctcgtgggcgccctgttgatgggcttcagcaaactgggtccgtctcacatcctaatcatcgccggaaggagtatctccggcttgtattgtggtttaatcagcggtctggtgccaatgtatataggcgagattgccccgacggccttgcggggtgcgctaggcacgtttcaccagcttgctatcgtgaccggcatcctgatatcgcagatcatcggcttggagttcattctgggtaattacgatctgtggcacatccttctcggactgtcgggtgtgcgcgcaatcctgcaatctctgctgctgtttttctgccccgagagtccgcgatatctgtatataaagttggatgaagaggtgaaggccaagcagagtttgaagcgccttcgtggctatgacgatgtaaccaaagatatcaatgaaatgcgcaaggagcgtgaggaggcttcgtccgagcagaaggtctcgatcatccagttgttcactaactcatcctacagacaaccgattctggtggccctcatgctgcacgttgcccagcaattcagtgggataaacggcatattttactacagcacctcaattttccaaacagctggcatctctaagcctgtctacgcgactatcggcgtcggcgctgtcaatatggtttttaccgccgtgtccgtatttctggttgaaaaagccggccgccgaagcctattcctgattggtatgtcgggaatgttcgtgtgcgcgatctttatgtctgtcggactggtgttgctgaataagtttagctggatgtcttacgtgagtatgatcgcaatttttcttttcgtcagcttcttcgagattggtcccggtccaattccctggttcatggtggccgaattcttcagccagggtccccgccccgccgctctggccatcgccgcattctccaactggacgtgcaactttatagtagccctgtgctttcaatacatagccgatttttgtggaccctacgtgttcttcctgttcgccggagtactgctggccttcacactgttcaccttctttaaggtaccagaaacaaagggcaagagtttcgaagaaatcgccgcagaatttcagaagaaatcaggctccgcccaccgtccaaaggcggccgtggaaatgaagttcttgggcgctactgaaaccgtt

SEQ ID NO: 19477 - DNA, 1572 bp, synthetic construct
  misc_feature 1..1572: note = source = /note="Description of Artificial Sequence: Synthetic coding sequence"
  source 1..1572: mol_type = other DNA
atgactgaggacaaggtcacaggtacactggtcttcacagtcatcaccgccgtcctcggttctttccagtttggttacgacatcggagtaatcaatgcaccccaacaggtcataattagccattacaggcacgtactcggcgtacccctggacgacaggaaagctatcaataactacgtgatcaactctaccgatgagttgcctactatatcttactccatgaacccaaagcctactccttgggctgaggaagaaaccgtcgcagctgcccagctcatcaccatgctctggtcactcagcgtttcctcattcgctgtaggtggaatgacagcatcctttttcggcggctggcttggcgataccctgggtagaattaaggccatgcttgtcgccaatatccttagccttgtgggtgccctccttatgggattcagtaagctgggtccttctcatatcttgatcatcgctggccgttctatttccggtctgtactgcggattgatctccggcctcgtgcccatgtatatcggcgaaatcgcaccaacagctctcaggggagccctgggcactttccatcagctggctatagtgacaggaattttgattagtcaaataattggcttggagttcatactgggcaattacgatctgtggcacatactgcttggactgtctggagtgcgtgctattctccaatcactgttgttgttcttttgtcccgagtcaccccgttacttgtatattaagttggatgaagaggtgaaggctaaacagtccttgaagaggcttagaggctatgacgatgtgactaaggacatcaacgaaatgcgcaaggaacgcgaagaggcttcatctgaacagaaagtgtctataatccagctcttcaccaactcttcttatcgtcaaccaatccttgttgctctgatgctccacgtcgcccagcaattttccggaattaacggaatattttactacagtaccagtatatttcagactgccggcatctccaagccagtgtacgcaaccattggcgtcggagccgtaaacatggtattcacagccgtaagtgttttcttggtggagaaggcaggcaggcgttctctgttccttataggcatgagtggaatgttcgtatgtgccatcttcatgtctgtgggcctggtccttctgaacaagttttcttggatgtcctacgtttcaatgatagccatctttttgtttgtttcatttttcgagatcggtcctggccctattccttggttcatggttgcagagttcttttctcaaggacccaggcctgcagcccttgctatcgctgccttctctaattggacttgcaatttcattgtggccttgtgtttccaatacattgccgacttctgtggtccctatgtcttcttcctctttgctggcgttcttctcgcattcacactttttactttctttaaggtgcccgagaccaagggcaaatctttcgaagaaatcgccgcagaatttcaaaagaaatctggctcagcccataggcctaaggccgccgtggagatgaaatttttgggtgccactgaaacagtg

SEQ ID NO: 19478 - DNA, 1572 bp, synthetic construct
  misc_feature 1..1572: note = source = /note="Description of Artificial Sequence: Synthetic coding sequence"
  source 1..1572: mol_type = other DNA
atgaccgaggacaaagtgactggtacccttgtgttcacagtcatcactgccgtccttgggtctttccagttcggatacgacattggcgtgatcaatgccccccagcaggttattatctctcattatcggcatgtgcttggggtgccactggatgatcgcaaggccattaacaactacgtgatcaatagtaccgacgagttgcctacaatttcctattcaatgaatcctaagccaacaccatgggctgaggaagagacagtggctgccgctcagctcattacgatgctgtggtccttatcagtcagctctttcgccgtgggaggcatgactgcttcctttttcggaggatggctcggcgacactctgggcagaatcaaggcaatgctggtagctaacattctctccctggttggggccctgctgatggggttctcaaagttggggccatcacacatccttataatcgctggtcggtcaatcagtggactgtactgtggcttaatatcaggcctcgttcctatgtatatcggcgagatcgcaccaacggctcttaggggtgcactggggacctttcatcaactggccattgtaaccggcatactcatctcccagattattggtctggagttcattctgggcaactatgacttatggcatatcctccttggactcagcggagttcgagctatccttcagagtctcctgctattcttttgccccgagtctcctaggtatctgtatattaagctggacgaggaagttaaggctaagcagtctcttaagagactgcggggctatgatgatgttacaaaagatatcaacgaaatgaggaaggagagagaggaggcatccagcgagcagaaggttagcataatccagctgttcaccaattctagttaccgtcagcctatcctcgtggcactcatgctgcacgtggcccaacagttcagtgggattaacggcatcttttattatagcacttccattttccagacagctgggatctccaagccagtttacgctactataggcgtgggcgctgtgaatatggttttcactgccgtgtccgtgtttctagtcgaaaaagccggacgccggagcctgttcctgatcggcatgtcgggtatgttcgtgtgtgcaatctttatgtccgtggggttggtgctgctcaataaattttcctggatgtcctacgtttctatgatcgcgattttcttgttcgtatcattcttcgaaatcggtcctggccccataccatggtttatggtggccgagtttttttcccaggggcccaggcccgccgccctagctattgcagcgttcagcaactggacctgtaatttcatcgtggccctatgtttccagtacatcgcagatttttgtgggccctacgtgttttttttgtttgcaggagtccttctggcatttaccctgttcaccttcttcaaagtgcccgaaaccaaagggaagagttttgaagagatagccgccgaatttcagaagaagtctggatctgcccataggcctaaagctgccgtggaaatgaagtttttgggcgccacagaaacggtc

SEQ ID NO: 19479 - DNA, 1572 bp, synthetic construct
  misc_feature 1..1572: note = source = /note="Description of Artificial Sequence: Synthetic coding sequence"
  source 1..1572: mol_type = other DNA
atgacagaggataaggtcactggtacgcttgtgttcacagtaattaccgccgtcctgggatcctttcagtttggttacgacatcggtgtgatcaacgccccccagcaagtgataatttcacactatagacatgtgcttggtgtcccattggacgatcgcaaggctattaataattatgtcattaattctacagacgagctgccaaccatttcttattctatgaatcccaagccgacaccgtgggccgaagaggaaactgtggccgcggctcaactcatcaccatgctgtggtctctatcggtttcttcgttcgctgttggcggaatgactgcatcgtttttcgggggctggctgggggatacactcggcaggatcaaggctatgcttgtcgccaatatcttgtcactggtgggcgcccttcttatgggattcagcaagttggggccgagccacatccttataatcgccggtaggtcgatcagtggcttgtactgtggccttataagcggtctggtccccatgtatatcggcgagatcgcgccaactgcgctccgcggggcgctaggcacattccaccagctcgccatcgtgacgggcatcctcatttcccagattattggtctggagttcatcttgggcaattacgacttgtggcacatccttctgggattgtctggcgttcgtgcgatccttcaaagcctgctgttgttcttttgtcccgaaagtcctcgctatctttacataaagctagatgaagaagtgaaggcaaagcagtcgttgaaacgtctccggggctacgacgacgtcacaaaggacattaacgagatgcgtaaggaacgagaggaagcttcgtccgaacagaaggtttcgatcatccagttgttcaccaactcgtcatatcgccaacccattctagtcgccctcatgttacatgttgcacagcagttttccgggatcaacggcatcttctattattctacatcaatctttcaaactgctgggataagtaagccggtctacgctaccatcggagttggagcggttaacatggtgttcactgctgtctcggtgttcttggtcgagaaggctggacgtcgctctctcttccttatcgggatgtctggaatgttcgtttgcgccatttttatgagtgtaggtctggttctattaaataagttctcttggatgagttacgtgtctatgatcgccatatttcttttcgtgtcttttttcgaaatagggccggggcccatcccctggttcatggtcgcggaatttttttcacaaggaccgcgcccggcggcattggctatcgccgcgttctctaactggacatgtaatttcatcgtggccctctgtttccagtacatcgctgatttctgcgggccctacgtcttctttttgtttgctggcgttttgctcgcgtttaccttgttcaccttcttcaaggtgcctgaaactaaggggaagtcgttcgaggagatcgctgctgaattccaaaagaagagtggtagtgctcatcgccccaaagccgcagttgagatgaaattccttggcgcaaccgaaacagtc

SEQ ID NO: 19480 - DNA, 1572 bp, synthetic construct
  misc_feature 1..1572: note = source = /note="Description of Artificial Sequence: Synthetic coding sequence"
  source 1..1572: mol_type = other DNA
atgacggaggacaaggttactggaaccctggtatttaccgtgattacagccgtcttgggttcctttcagttcggatacgatatcggggtcatcaatgcacctcaacaagtgattatttcccactatcggcacgtcttgggtgtaccactcgacgatcggaaagcaattaataattacgtgatcaactcaaccgatgagctgcctaccatttcctacagtatgaatcccaagcccaccccctgggctgaagaggaaacggtagcagccgctcaacttattaccatgctctggtcacttagcgtgtcttcgttcgccgttgggggcatgacagctagctttttcggagggtggctgggcgataccctaggtcgcatcaaggctatgctagtcgctaacatacttagcttggtgggtgcgctgctcatgggcttcagcaaactgggaccatctcacatccttatcattgccgggcgcagcatctcaggcctgtactgtggccttattagtggactggtgccaatgtatatcggcgagatagcacctacagcgctgaggggcgcgctcggcactttccaccagctagccattgtgacaggcatactgatctcgcagataatcgggctcgaatttatcctggggaactacgacctctggcatattcttctgggtctgagcggggtgagggccatccttcagtcactcttgttgttcttctgccccgaaagcccaaggtacctgtacattaagcttgacgaggaggtaaaggcgaaacagtccctcaagcgtctgcgcggttacgacgacgtgacgaaggatattaatgagatgcgaaaggaacgcgaagaggcaagtagcgagcagaaggtctccattatccagctgttcaccaacagcagctatagacagccgatactcgttgccctgatgttgcacgtggctcagcaattctctggcatcaatgggattttctactacagcacttccatattccagaccgcaggaataagcaaaccggtgtatgctactatcggcgtcggcgccgttaatatggtgtttacagctgtttctgtattcctggtggagaaggcaggacgccgcagcttatttctaataggtatgtctgggatgttcgtgtgtgctatcttcatgtcagtggggctggtcctactgaacaagttttcctggatgtcctacgtcagtatgatcgcaatctttctgttcgtcagtttctttgaaattgggcccggccctatcccatggtttatggtcgctgaattcttctcccaaggtccgagacccgcagcactcgccatcgccgcgttctccaactggacttgcaatttcatcgtggcattgtgctttcaatatatcgcagacttttgcggaccctatgtgttctttctatttgccggggtgctgctcgcattcacactgtttaccttctttaaggtgccggagacaaaggggaagagctttgaggaaatcgccgcagaatttcaaaaaaaatccggctccgcgcataggccgaaggcggcggtggagatgaagttcctcggggctacagagaccgtt

SEQ ID NO: 19481 - DNA, 1572 bp, synthetic construct
  misc_feature 1..1572: note = source = /note="Description of Artificial Sequence: Synthetic coding sequence"
  source 1..1572: mol_type = other DNA
atgacagaggataaggttactggaacactggtctttacagtgatcacagccgtgctgggaagttttcaatttgggtatgatatcggggtgataaatgcgccccagcaggtgattatatcccattatcggcacgtgttaggagtaccactagacgatcggaaagccatcaataattatgtgatcaatagtactgatgaactccccacaataagttatagtatgaacccaaaacccactccatgggccgaagaagagacagttgccgctgcacagctcatcacaatgctctggtccctgtctgtgtcttcctttgcagtgggaggaatgacagcctccttcttcggagggtggctcggagatactcttggaaggattaaagccatgctggttgcaaatatactgtcactggtcggagcactgctgatggggttcagtaaacttgggccttctcacattctgatcatagctggacgctcaatatcgggactttattgtggactcataagtggactcgtaccaatgtatatcggggaaattgcacccacagcccttcggggggctctagggacttttcaccagcttgcaatcgtgactgggatcctcatttctcagatcataggactagaattcatcttgggaaattatgacttatggcacatcctgctggggctctcgggagtgagagcgattctacagtctctcttactttttttttgccccgagtctcctcggtacctctacattaaactcgatgaagaagtcaaagcaaaacagtccctgaagagactacgcgggtatgatgatgttacaaaagacattaatgagatgaggaaagagcgggaagaagcatcctctgaacagaaagtgagtatcattcagctcttcacaaactcctcttatagacagccaatactggtggcactgatgctgcatgtggctcagcagttcagtgggattaacggaatattctattattctacaagtatcttccaaactgcagggatttctaaacccgtgtatgcaacaatcggggtgggggcagtcaacatggtgttcacagccgtgagtgtgtttttagtggagaaggctgggaggaggtctctctttctgatcggaatgtccgggatgtttgtctgtgctattttcatgtcagttgggctcgtgctgctaaacaaattctcctggatgagttacgtttccatgatagcaatcttcctgttcgttagtttcttcgaaatagggcctgggcccataccctggttcatggtcgccgaatttttctctcagggaccccggcccgccgcactcgctatagccgctttttctaattggacttgcaattttattgtggccctctgctttcagtatattgctgatttctgtggaccctatgtctttttcctgtttgccggggtacttctagcttttacactcttcacattctttaaagtacccgagacaaaaggaaaatcgtttgaagaaatcgccgccgagttccagaaaaaatcaggatcagcccatcggcctaaggccgccgtggaaatgaaatttctgggagctactgaaacagtc

SEQ ID NO: 19482 - DNA, 1572 bp, synthetic construct
  misc_feature 1..1572: note = source = /note="Description of Artificial Sequence: Synthetic coding sequence"
  source 1..1572: mol_type = other DNA
atgacagaggacaaggttacaggcactcttgtgttcacagtaataacagccgtgcttggctcattccagttcggctacgacattggagtgataaatgccccacaacaagtgatcatctcccattaccgacatgtgctcggagtgcccctcgatgaccgcaaagccatcaacaactacgttattaacagcactgatgaactcccgaccatcagttactccatgaatccaaagcccacaccgtgggcagaggaggaaacggtggcagccgctcagctgatcactatgctctggtcactcagcgtctctagttttgccgtgggaggcatgacggcgtccttttttggtgggtggcttggtgatactctgggacgcatcaaagcaatgctggttgctaatatcctgagcctggtgggtgctttgttgatgggattcagtaagctgggtcccagccatattctgataatcgccggtcgctccatatccggcctgtattgtggtctcatcagtggtctggtcccaatgtatatcggcgagatcgcccctacagctctccgcggagcgttgggcacgtttcaccagctcgcgatcgtaaccgggattctcatctctcagatcattggcctggagtttatcctcgggaactatgatctctggcacatcctgttgggactgagtggcgtccgcgccatccttcagagcctgcttcttttcttctgccccgagagtccacggtatttgtacatcaaactcgatgaagaagtcaaagctaagcagagtctcaagaggttgcgcggatatgacgatgtgacaaaggatatcaacgagatgagaaaggagcgcgaggaagcgtcaagtgagcaaaaggtctctatcatccagcttttcactaacagctcctatagacagccaatcctggttgcgctgatgctgcatgtggctcagcagttctctgggatcaatggtatcttctactactctacctctatcttccagacagctggaattagcaagccagtctatgcaaccataggcgtgggtgcagttaacatggtgtttaccgctgtctctgtgttcttggtcgaaaaggccgggcggcgcagcctgtttctgataggaatgagcggcatgttcgtatgcgctatattcatgagcgtgggcctggtgctgctcaacaagttttcctggatgagttacgtatccatgattgccatcttcctgtttgtcagcttttttgagatcggcccaggtccgatcccctggttcatggtagccgagtttttttctcagggaccccgccccgccgctttggccatcgccgccttcagcaactggacatgtaactttattgtcgctttgtgtttccagtatatcgcggatttttgcgggccatacgtgttcttcttgtttgctggcgtgctgctggcttttaccctcttcacttttttcaaggtgcccgagaccaaaggcaaatctttcgaggagattgccgccgagtttcaaaagaagagtgggagtgcccacaggccaaaagccgctgttgagatgaagttcctgggagctacggagacagtc

SEQ ID NO: 19483 - DNA, 1572 bp, synthetic construct
  misc_feature 1..1572: note = source = /note="Description of Artificial Sequence: Synthetic coding sequence"
  source 1..1572: mol_type = other DNA
atgacagaagataaagttaccgggacccttgtatttaccgtgattactgctgtgttggggagtttccaattcggatatgacattggcgtcatcaatgcaccccagcaggtgataatcagtcattacagacacgtccttggtgtgcctctggatgatcgaaaggctatcaacaactacgtgattaacagtacggacgaactgccaacaatttcatacagcatgaatcctaagcccactccctgggccgaggaagagaccgttgcggctgctcaactgatcaccatgctgtggtccctgtctgtttcaagctttgctgtcgggggaatgactgcaagcttcttcggcggatggttgggggacacccttgggcgcataaaagcaatgctcgtcgctaatattctgtctctggtgggtgctcttcttatggggtttagtaaactcggcccttcccatatcctgattatcgcgggtagatccatctcaggactgtactgcggcctcatatccgggttagtgcccatgtatatcggagagattgccccaacagctttgcgcggcgctcttggcacattccatcagctggctatagtcaccggcatcctcatcagtcaaataatcggtcttgaattcatccttggcaactatgatttgtggcacatactgctcggactgtccggcgtgagggcaatcctccaaagcctgctgttgtttttctgccctgagtcccctcggtacctgtatataaaactcgacgaggaggttaaggcaaagcagagcctgaagagactgagaggatacgacgacgtgactaaggatattaacgaaatgagaaaagagagagaggaagcttcaagcgagcagaaggtcagcatcatccagctgttcacaaatagcagctatagacagccgatccttgtggcacttatgttacacgtggcacaacagtttagcggaataaacggaatattctactactccacctccatcttccagacagctggcatcagtaaaccggtctatgcaacaattggagtcggagccgtgaatatggtgtttacggccgtgtcagttttcctggttgaaaaggcaggtcgtaggagcttgtttctgattgggatgagtggcatgtttgtgtgcgctatcttcatgtctgtgggactggtcctgcttaacaaattttcttggatgagctacgtctctatgatcgctatctttcttttcgtgagtttctttgagatcggcccaggtcccatcccttggtttatggttgctgagttttttagtcaagggcctcgccctgccgctctggctatcgcagcttttagcaactggacctgtaatttcattgtggcactttgcttccagtatattgcagacttttgtggcccttacgttttctttctgtttgccggcgtgctcctggcttttactctgttcacatttttcaaggtcccggaaaccaaggggaagtccttcgaagaaattgccgctgaattccagaaaaaatccggaagcgcgcacaggcccaaggccgctgtcgagatgaagtttctgggcgcaactgagacggta

SEQ ID NO: 19484 - DNA, 1572 bp, synthetic construct
  misc_feature 1..1572: note = source = /note="Description of Artificial Sequence: Synthetic coding sequence"
  source 1..1572: mol_type = other DNA
atgaccgaagacaaagtgaccgggactctcgtcttcactgttattaccgctgtcctcggctcctttcagttcggttacgacatcggggttatcaatgctccccagcaggttatcatctctcactaccgacatgtcctcggcgtccccctcgatgatcgaaaggcgatcaataactatgtgatcaactccaccgacgaactgcccaccatttcctacagtatgaatccaaagccaacaccgtgggctgaagaggaaaccgtggcggcagcacagctcataacgatgctatggtccctgtcggtaagcagcttcgcagtgggcggtatgacggcctccttctttggaggttggctgggcgataccttgggccggattaaggccatgctggttgctaacattctcagcctcgttggcgcccttctcatgggcttcagcaagctcgggccttcccacatccttattatcgcaggcaggtccatctctggcctgtactgcggcttgatttcgggcctcgtccctatgtacattggcgagattgcccctaccgcgctgcgcggtgccttgggcacctttcatcagctggcaatcgttactggcatcctcatctcccagataattggcttggagttcattctgggtaactacgatctatggcacatcttgctcgggctcagcggtgtgcgtgcgatcttgcagagtttgctgttgttcttctgccctgagagtccccggtacctgtacataaagctggacgaggaagttaaggcgaagcagagtctgaagcgtcttcgtggttacgacgatgtgactaaggacatcaatgagatgagaaaggagcgtgaggaggcctcgtcggaacaaaaggtctcaatcatccagctcttcacgaactcgtcataccgccaacccatcctggtggcgctgatgctccacgtcgcccaacaattcagcggcatcaacggcattttttactactccacctcgatctttcaaaccgcgggtatcagcaaacccgtgtatgccacaatcggagtcggcgctgtcaacatggtcttcactgcagtctctgtcttccttgttgagaaggccggtcgccgcagcctgtttttgattggcatgtccggcatgtttgtctgcgcgatcttcatgagtgtcggcttggtcctgctgaataagttctcttggatgtcttacgtctccatgatcgctatattcctgttcgtgtctttcttcgaaatcggccctgggccaatcccctggtttatggtcgctgagttcttctctcagggtcctcggccggctgccttggcgatcgccgccttctccaactggacttgcaacttcattgtcgctctgtgctttcagtacatcgccgatttctgcggcccgtacgtcttcttcctcttcgctggagttctgttggcctttacactgtttaccttctttaaagtgcctgagaccaagggaaagtcgtttgaagagattgccgctgaattccagaagaagagcggttcggcgcatcggcctaaagctgcggtcgagatgaagttcctaggcgctaccgagaccgtt

SEQ ID NO: 19485 - DNA, 1572 bp, synthetic construct
  misc_feature 1..1572: note = source = /note="Description of Artificial Sequence: Synthetic coding sequence"
  source 1..1572: mol_type = other DNA
atgaccgaggataaggtgacagggaccttagtcttcactgtcatcaccgcagtgctgggcagcttccagtttggatatgatattggagtgatcaacgctccccaacaggtgatcataagccattaccgccacgtgctgggggtgccactggacgacagaaaggctatcaacaattacgtgatcaattccacagatgagttaccgactatcagctatagtatgaatcccaagcccaccccttgggcagaggaggaaaccgttgcggcggcacagcttatcactatgctgtggagcttatctgtgagctccttcgcagtgggtggcatgactgcatcctttttcggaggatggttaggcgacactctaggccggataaaagctatgctggtggccaacatcttgtccctggttggtgcgctcctgatgggctttagcaagctgggtcctagtcacatcctgatcatcgcagggcgtagcattagtgggctttattgcggcctaatatctggactcgtaccaatgtacatcggggagatcgcccccacagccctacggggagctttagggacgtttcaccaactggcaatcgtaaccggcatactgatttctcaaataatcggcctggagttcatcctaggtaattatgatctttggcacatcttgctcgggctgtccggcgtgagagcgatactccagtcactcctgctgttcttttgtcctgaatcacccaggtatctgtacattaaactggacgaggaggtgaaagccaaacagagtttaaaaaggctgcgggggtacgatgacgtaaccaaggacatcaacgagatgagaaaagagagagaggaagctagcagcgagcaaaaggtctctattatacagctgttcacaaactcttcctaccggcaacctatcctggtagccctgatgttacatgtcgctcagcagttctccggtatcaacggcattttttattattcgacctctatctttcaaactgccggcatttcaaagcccgtctatgcaactatcggcgtcggcgcagttaacatggttttcaccgccgtctccgtgtttctcgtggaaaaagctggacggcgctccctgttcctgatcggaatgagcggcatgttcgtgtgtgccatcttcatgagcgtgggtttggtcctgctgaataagttcagttggatgagttacgtcagcatgatagccatttttcttttcgtgagcttcttcgaaatcggaccaggccctattccttggttcatggtggcagagtttttttcccagggaccacgccccgccgcattggcaattgcagctttctccaattggacctgcaacttcatcgtcgcgctctgcttccagtatatcgccgatttctgcggtccatacgtattctttctgtttgcaggagttctgctagccttcacactcttcaccttcttcaaggtccccgagaccaagggtaagtccttcgaggagatagccgcagagttccagaagaagtctggcagcgcgcatcgacccaaagctgccgtggagatgaagttcctgggtgctaccgagacggtt

SEQ ID NO: 19486 - DNA, 1572 bp, synthetic construct
  misc_feature 1..1572: note = source = /note="Description of Artificial Sequence: Synthetic coding sequence"
  source 1..1572: mol_type = other DNA
atgactgaggataaggtcaccgggacacttgtgttcactgtgattaccgccgtgctgggcagtttccaatttgggtacgatataggggtgataaatgcaccgcagcaagttattataagccactaccggcacgtgttgggcgtgcccctggatgatcgcaaggccatcaacaactacgtcattaactccaccgacgaattgcccactattagctacagcatgaatccgaagccaacgccgtgggccgaggaagagacagtggctgctgctcagctgattaccatgctgtggagtttgtcggtgtccagttttgccgtcggagggatgacagccagtttctttggcggttggctcggcgacactttaggacggatcaaagctatgcttgtggcgaatattttgtctctcgtgggcgccttactgatggggttctcgaagctggggccctcccatattctgatcatcgcaggccgaagcattagtggcctgtattgtggactcatctcaggcttagtccccatgtacatcggcgagatcgccccaactgcccttcggggcgctctaggcaccttccatcagttagccatcgttaccggcatactgatcagccagattattgggctggaattcatcctggggaactacgatttgtggcacattctgctcggcctgtcaggagttcgagctattcttcagagtctcctgttgtttttttgcccagagagcccgaggtacctctacataaaactggatgaggaagttaaggccaagcagtccttgaagaggctgagggggtatgatgacgttaccaaggacatcaacgaaatgagaaaagagagagaagaagcgtcctccgaacagaaggtgagtatcatccagctttttacgaatagctcctaccgacagcccatcctggtggctctgatgctgcatgtagcacagcagttttctggcattaacggaatattctactacagcaccagtatctttcagaccgcaggaataagcaagcctgtgtacgctactattggtgttggcgctgtgaatatggtgttcaccgcagttagcgtatttctcgttgagaaggctggacgaagaagcctgtttctgattgggatgtcaggaatgtttgtgtgcgctatattcatgagtgtgggcttagtgctgctgaataaattctcatggatgagctacgtgtccatgattgctatctttctattcgtgtcttttttcgaaattggtcctggccccataccttggtttatggtggcggaattcttttctcaagggccgagacccgccgctcttgctatcgcagccttctcgaactggacctgtaactttatcgtggccctgtgctttcagtatatcgcagacttctgtggaccgtacgtcttttttctctttgcaggcgtgctcctcgcattcaccttgttcactttctttaaggttccggagactaagggcaagtcgtttgaagaaattgccgccgaattccagaaaaagtctggttcagcccacaggcctaaggcagcagtagaaatgaaatttttaggagcaacagagaccgtg

SEQ ID NO: 19487 - DNA, 1572 bp, synthetic construct
  misc_feature 1..1572: note = source = /note="Description of Artificial Sequence: Synthetic coding sequence"
  source 1..1572: mol_type = other DNA
atgaccgaggacaaagtgacgggaaccctagtgtttactgtgattaccgccgtcctaggtagtttccagttcggatacgatatcggggtgataaatgctccacagcaggtcatcatctctcattaccggcacgtcctgggcgtgccactggacgatagaaaagcaatcaataactacgtcatcaatagtacagacgaactgcctacaattagctactccatgaatcccaaacccaccccgtgggctgaggaggagaccgtcgctgccgctcaactgataaccatgctatggtctctatcagtcagctccttcgcggtgggagggatgacggcgtcttttttcggaggctggttaggggatactctgggcaggataaaggctatgttggtagcaaacattttgagtctggtgggcgcactcctcatgggcttttctaagctgggaccatctcacattctgattattgctggaaggtctatctcagggctttattgcggactaataagcggcctcgtacctatgtatattggcgagatagcccccaccgccctgaggggagcccttggtaccttccatcagttggctatagtcactgggatcctgatctcccaaattattggccttgagtttatcctggggaactacgacctctggcatatcctcctcgggcttagcggtgtgagagcaatcctgcaatccttgctcctattcttttgtccagagtcaccccgttatctgtacattaagctggacgaagaagtcaaggcaaagcaatctctgaagcggctgcgtggttacgacgatgtcaccaaggacataaacgaaatgcgcaaggaaagagaggaggcgtccagcgagcagaaggtgagcatcatccaactgtttactaatagctcgtacaggcagccaatcctggtggccctgatgctgcacgtggcacaacagttttcgggcatcaacggcattttctattacagtaccagtattttccagaccgctggtatatctaaacccgtttacgccactatcggcgtgggagcggtgaatatggtattcactgcagtgtccgtgttcctcgtagagaaagccggccgaagaagtctctttctcattggtatgtctggcatgtttgtgtgcgcgatttttatgtctgttggactggttctgctcaataaattctcctggatgtcttacgtttccatgatcgctattttcttatttgttagcttcttcgaaattggaccaggaccgatcccctggttcatggtcgcggagtttttctcccagggacccaggccagctgctctggcaatcgccgcattctcgaattggacctgtaatttcatcgtggcgctctgctttcagtatatagcggatttctgcggtccatatgtattcttcctgttcgccggggtccttctcgcattcaccctctttacgttctttaaagtgccggagaccaaggggaaatcatttgaagagatcgccgccgaattccagaaaaaatcaggaagcgcacaccggccaaaggcggccgtggagatgaagtttctaggcgcaaccgagactgtg

SEQ ID NO: 19488 - DNA, 1572 bp, synthetic construct
  misc_feature 1..1572: note = source = /note="Description of Artificial Sequence: Synthetic coding sequence"
  source 1..1572: mol_type = other DNA
atgaccgaggataaagtcactggaaccctagtctttactgtgattacagccgtcctgggctctttccagttcggctacgatattggagtgattaatgctcctcaacaggtgatcatctctcattaccggcatgtcctaggagtgcctttagacgatcgaaaggccataaacaattatgtgattaactcaaccgacgagctccctacgatctcctactcaatgaatcccaaacccacgccttgggctgaagaggaaacagtggccgcagcccaacttatcaccatgctatggtcgttatcagtctcatcctttgccgtgggcggaatgaccgcatcattcttcggtggttggctcggggatacattgggtagaatcaaagcaatgttggttgccaatatcttgagcctggtgggagctctgctgatggggttctctaagctcggcccctcccacatattaatcattgctgggagatcaataagcggactctactgtgggttgatcagcggcctggtccctatgtatatcggcgaaatagccccaactgctctgcggggagccctggggacatttcaccagctcgccatagtaacaggcatccttatctctcagatcataggcttagagtttatactcggtaattatgatctttggcatatattattggggctgagtggcgtgcgggccattttgcagagcctgttgctcttcttttgccccgaatcaccacgctacctctatattaaactggacgaagaggtgaaggctaaacagtccctgaagcgactgcgcggatatgacgatgtcacaaaagatatcaatgaaatgcggaaggagagggaggaagcgtcctcagagcagaaagtctccattatacagctcttcaccaattcctcctacaggcaacctatactggtggccctaatgctgcatgtagcccagcagttctccggcattaatgggatcttttactacagcacaagcatctttcagacggccggcatctcaaagccggtttatgccacaattggggttggcgctgttaatatggtatttaccgctgtaagcgttttcctggttgagaaggctgggcggcgttccctctttctgatcgggatgtcggggatgtttgtgtgtgccatctttatgtccgtggggctcgttcttttaaacaaattcagctggatgagttacgtgagcatgatcgccatctttctgtttgtaagctttttcgagatcggaccgggaccaatcccctggtttatggtcgctgaattcttctcacaaggcccaaggcccgctgctttggctatcgctgccttctctaactggacctgtaacttcatcgtggcattatgctttcaatatatagcagacttctgtggcccgtatgtcttctttctgtttgcaggggtgttgcttgctttcacattgtttacgttttttaaggtgccagaaacaaaaggcaagtcattcgaagaaattgccgccgagttccagaaaaagtcgggctcagcccatcgtcccaaagcagcggtggagatgaagtttctcggtgccacagaaactgtg

SEQ ID NO: 19489 - DNA, 1572 bp, synthetic construct
  misc_feature 1..1572: note = source = /note="Description of Artificial Sequence: Synthetic coding sequence"
  source 1..1572: mol_type = other DNA
atgaccgaggataaggtgacaggcaccctggtatttacggttatcactgctgtcctgggctccttccagtttggatatgacattggtgtgattaatgctccccagcaggtgattatttcacactaccgtcacgttctaggtgtgcccctggatgacaggaaagctatcaataattatgtcatcaacagtactgatgaactccctactatctcttacagtatgaatcctaagccaaccccctgggcagaagaggagacggttgccgccgctcagcttatcacaatgttatggagtctaagtgtgtcaagcttcgcagtcggggggatgaccgcatcattcttcggcgggtggcttggggataccttaggccgtattaaggctatgctggtagctaatatcttgagcctggtgggagcactgctgatggggttctccaagctcgggccatcgcacatactaatcattgctggtcggtcgatctcaggtttgtattgcggcttgatttcaggtttggtccccatgtatatcggcgagatagctcctaccgcgctgcggggcgccctcggtacctttcatcagctggccattgtgaccggtattttaatcagccagattataggcttagagtttattctaggcaactacgatctgtggcacatcctgctgggcttgagcggggtcagggccatattgcagtccctactgcttttcttttgtcctgaaagcccccgctacctttacatcaaacttgacgaagaagtgaaagcgaaacagtcacttaaaagactccgtggatacgacgacgtgacaaaggacatcaacgagatgagaaaggaacgagaggaggcatcctccgagcagaaggtcagcatcatccaactgtttacaaactcaagttaccgtcagcctatcctcgttgcacttatgctgcatgtcgcacagcagttttccggcatcaacggcattttctattactccacgtccatattccagacggctggcatcagcaagccagtatacgccaccatcggagttggtgctgtcaacatggtgttcaccgccgtgtcagtgtttctggttgagaaagcagggaggaggtccctttttctgataggtatgagtgggatgtttgtgtgcgccatatttatgtccgtgggcttggtgttgctaaataaattctcatggatgtcgtacgtttccatgattgcaatatttctgtttgtctccttctttgagattggaccaggccctatcccttggtttatggtggctgagtttttcagccagggacccagacctgcagccctggccatcgcggcgtttagcaattggacgtgtaatttcatcgtcgcgctgtgttttcagtacattgcagacttttgcggtccatacgttttcttcctcttcgccggggtgttgctggcattcaccttgttcaccttcttcaaagtgcccgagacaaaggggaaatccttcgaagagatcgcagctgaattccagaagaagagcggtagcgcgcatagacctaaggctgccgtcgagatgaagttcctcggggctacggagaccgta

SEQ ID NO: 19490 - DNA, 1572 bp, synthetic construct
  misc_feature 1..1572: note = source = /note="Description of Artificial Sequence: Synthetic coding sequence"
  source 1..1572: mol_type = other DNA
atgaccgaggacaaggttacaggtaccctcgtgtttactgtgatcactgccgttttgggctcatttcagtttgggtacgacatcggagtcatcaacgcacctcagcaggtgattatatctcactatagacatgtgctaggcgtgccactggatgacagaaaagccattaataactacgtgatcaattcgacagacgagttgcctactatatcgtactcgatgaacccgaagcccaccccttgggctgaagaagagaccgtagcagccgctcagttaattaccatgttatggagcctgtccgtgtcctccttcgccgtgggaggcatgaccgcatccttcttcggaggctggctgggagataccctgggcagaattaaggccatgctggtcgccaatatcctcagcctggtgggcgccctgttgatggggtttagcaaactggggccctcccacatcttgattatcgccggaaggtcaattagcggcctgtactgtggtctgatcagcggacttgtacccatgtacataggcgaaattgcccctacagcactccgtggggcgctcgggaccttccaccaactggctatcgtgactggaatcctcattagccagatcattggattagagtttatccttgggaactacgacctttggcacatactgttgggcttgtcaggtgttagggccattttacagtcactgctgctttttttttgccctgagtccccacggtatctgtatataaagctcgacgaagaagttaaggccaaacagtcactgaaacgactgaggggctatgatgatgtgactaaagacattaatgagatgcgaaaagagagggaggaagcatccagcgagcagaaagtgtccataattcagttgtttacaaatagttcttatcgtcaacccatactcgtcgccttgatgctccacgtggctcagcagtttagcggcataaacgggatattttactatagcacatcaattttccaaactgctggaatctccaagcccgtctatgcaaccatcggagtgggggccgtgaacatggtcttcaccgcagtatctgtcttcctggtggagaaggccgggaggcgtagcttatttctgattggaatgtccggtatgtttgtttgcgcgatctttatgagcgttggtcttgtcctgctgaacaaattcagctggatgtcgtatgtgtccatgatcgccatctttttgttcgtctctttcttcgagataggcccgggacctattccctggttcatggtcgccgagttcttctctcaggggccccgtcccgcggctctagccatcgcagcattttcaaactggacttgcaatttcatcgtggcgctttgcttccagtatatcgcagacttctgcggaccctacgtgttttttcttttcgcaggcgtgctgctggctttcacactcttcacattctttaaggtgcctgaaactaaaggcaaaagttttgaggagatcgctgctgaatttcagaagaagtccgggagcgcccatagaccaaaggccgccgtggagatgaagtttctgggggctacagaaacagtg

SEQ ID NO: 19491 - DNA, 1572 bp, synthetic construct
  misc_feature 1..1572: note = source = /note="Description of Artificial Sequence: Synthetic coding sequence"
  source 1..1572: mol_type = other DNA
atgacagaggacaaagtgacaggcactctggtttttaccgtgattaccgcagtactggggtcattccagttcggctatgatataggagtgattaatgctccacagcaagtcattatatcacattatcgccatgtgctgggggtgccgcttgacgaccgtaaagccatcaacaactatgtaatcaatagtacagatgaactgccaacaatctcgtacagcatgaatcccaagcccacaccatgggctgaagaggaaacagtagccgctgcgcaactaatcacaatgttatggagtctctccgtctcgtcattcgccgtgggtgggatgacagcgtcattttttggcggatggctgggagacacacttggtcggattaaagccatgctggtggcaaacattctgtcgctagttggtgccttgctcatggggttttcaaagctcggtcccagccacatcctgatcatcgcaggacggtctatctccggcctctactgcgggctgatatcaggacttgtccccatgtacattggcgaaattgcccctacagccctgcgcggggccctgggaacttttcaccagctcgcgatcgtgacagggattctgattagtcagatcatcggactcgaattcatcctgggcaattacgacctgtggcacattttactgggactcagcggtgtgcgcgccattctgcagagtctcctgcttttcttctgccccgaatccccgaggtacctgtatataaagctggatgaggaagtgaaggccaagcagagtctgaaacgcctgcgggggtatgatgacgtcacaaaggacattaacgagatgcgtaaggagagagaagaggctagtagcgagcagaaggtttctatcatccagctgttcacaaattcctcttaccggcagccaatactggtggcgttgatgctgcatgtggcccagcaatttagtggcatcaacggcattttctactactctaccagtattttccagacggctgggataagcaaaccagtctatgcgactatcggggtgggagcagtgaatatggtgttcactgccgtatctgtgttcctggtggaaaaggctggccgtcgttctttattccttatcgggatgtcaggaatgtttgtctgcgctatctttatgtccgttggactggttctgctgaacaagtttagttggatgagctatgtatctatgatagccatcttcctttttgtctccttctttgagataggaccagggcctatcccctggttcatggtagcagaatttttttcccaggggccacggccagcagcactcgctatcgctgctttctccaattggacatgcaattttatcgtggccttatgcttccaatatatcgccgacttttgcgggccctatgtattttttctgttcgcaggcgtgctcctcgcttttaccttatttacatttttcaaggtgccagagacaaagggcaagtcgttcgaggagattgccgccgagttccagaagaaaagtggatctgcacatcggcctaaggccgcggtagagatgaagtttctaggagccactgaaacagtt

SEQ ID NO: 19492 - DNA, 1572 bp, synthetic construct
  misc_feature 1..1572: note = source = /note="Description of Artificial Sequence: Synthetic coding sequence"
  source 1..1572: mol_type = other DNA
atgactgaagataaggtcacgggcaccctcgttttcaccgtgatcactgccgtgctcggttcctttcagttcggatatgatatcggagtgatcaacgctccgcagcaagtcatcatctcacactaccgccatgtgctgggcgttccgctggacgatcgaaaggccatcaacaactacgtgatcaactccacggacgaactgcccactatctcgtacagcatgaacccaaaaccgaccccgtgggcggaagaagagactgtagcggccgcacagcttattaccatgctctggagcctgtcggtgagctcattcgcagtcggagggatgactgcgtcgtttttcggaggttggttgggagacactctcggacgcatcaaggctatgctggtcgcgaatatcctgtcactggtgggcgcgctcctgatgggcttctcgaagctcggaccatctcatatcctgatcattgctggcaggtcaataagcggattgtactgcgggttgatctctggccttgtgccgatgtacattggagagatcgccccgactgcgttgcgcggtgcgctcggaacttttcatcagctcgccatcgtgaccgggatcctgatctcgcaaatcatcggactggagtttatcctgggaaattacgacctgtggcacatcctccttgggctttcgggcgtgagggccatccttcagtcgctgctgctcttcttttgtcctgagtccccgcgctacctgtatatcaaactggacgaagaggtcaaggcaaagcagtcgctgaaacggctgagaggatacgatgatgtaacgaaagacatcaacgagatgagaaaggaacgggaagaagccagctcggagcaaaaggtgagcatcattcagttgtttaccaatagttcgtaccggcagcctatcctggtggctctgatgctccacgtggctcaacagttcagcggtatcaacgggattttctactactccacctccatcttccagactgcgggaatctcaaaacccgtgtacgcaaccattggagtcggagccgtgaatatggtgttcaccgccgtttcggtctttctggtcgaaaaggccggccggagatccctcttcctcatcggcatgtcagggatgtttgtctgcgcgatcttcatgagcgtgggcttggtgctgctgaacaaattctcatggatgtcctacgtgtccatgatcgccatcttccttttcgtgtcgttcttcgagatcggccccggaccaattccttggttcatggtggcagaattcttttcccaaggaccgcggccagctgccctggcaattgctgccttctcaaattggacctgcaacttcatcgtcgccctctgcttccagtacattgcagacttctgtggtccatacgtgttctttctgttcgccggagtgctcctggccttcaccctcttcaccttctttaaggtgccggaaactaagggaaaatcctttgaagagatcgcagcagaattccaaaagaagtccggaagcgctcaccgccctaaggcggccgtggagatgaagttcctgggggccaccgagactgtc

SEQ ID NO: 19493 - DNA, 1572 bp, synthetic construct
  misc_feature 1..1572: note = source = /note="Description of Artificial Sequence: Synthetic coding sequence"
  source 1..1572: mol_type = other DNA
atgaccgaagacaaggtgaccggaacgttagtgtttacagtcatcacagccgtcctcggtagctttcaatttggctatgatatcggggtgattaacgcccctcagcaggtgataataagccattacaggcacgtcctgggtgtgccactcgatgaccgcaaggccataaacaactacgtcatcaacagcacggacgagctccccacgatcagttactctatgaatcccaaacccacaccctgggccgaggaggaaactgtcgcagccgcccagctcattacaatgctctggtccctcagtgtgagctcttttgcagtcggtgggatgactgcctctttttttggaggttggcttggcgacacactggggaggatcaaagccatgttagtggcaaatatcctgtccttggtaggggccctgctcatgggcttcagcaagctggggccctcccacatcttaattatcgccgggagaagcatcagcggcctttactgcgggctcatctccggacttgtgcccatgtatatcggtgagattgctcctactgctctgcgaggtgccctggggacatttcatcaactagcaatcgtaacaggcatactgatctctcagatcatcggcctggaatttatcctgggcaactacgatctgtggcatatcctgctcggtctcagcggcgtgagagctatccttcagtcattattgctgttcttctgtccggaaagtccgcgctatctttatatcaagcttgacgaagaggtgaaagccaaacaaagtctgaagagactgagaggctacgatgacgtgacgaaggatatcaatgaaatgagaaaggagagagaggaagcctctagcgaacaaaaggtcagtatcatccagctctttaccaattcaagttatcggcaacccattctggttgccttgatgctgcacgtggctcaacagttttccggcattaatggtatattctattatagcacaagtatatttcagacagctggcatttccaaacctgtgtatgctacaatcggcgtgggtgccgtgaatatggtcttcaccgcagtgtctgtatttctggtggagaaggccggacgtcgctcattgtttttaattggcatgtcagggatgtttgtgtgcgcgatattcatgtccgttggactggtgctgctcaacaaattcagttggatgtcctatgtgagtatgatcgcaatctttctgttcgtgtccttctttgaaataggacctggaccgattccttggttcatggtcgccgagtttttttcccaggggccaagacctgctgctttggctatagcagctttctccaactggacgtgtaatttcatcgtcgccctctgctttcagtacattgccgacttttgtggcccctatgtgtttttcctgttcgcaggggtcctcctcgcctttacactgtttacattttttaaagtgccagaaaccaagggtaagtcctttgaggaaatcgccgcagagttccagaagaagtctggaagtgcacacaggcccaaagcggccgttgaaatgaaattcctgggagctaccgaaactgtg

SEQ ID NO: 19494 - DNA, 1572 bp, synthetic construct
  misc_feature 1..1572: note = source = /note="Description of Artificial Sequence: Synthetic coding sequence"
  source 1..1572: mol_type = other DNA
atgacagaggacaaagttaccggaaccttggtgtttacagtgattacagcagtgctcggctccttccaatttggatatgatataggggtgatcaacgcccctcagcaggtgatcattagccattaccgacacgtgttgggagtccctctggacgatcgcaaagcgatcaataactatgttattaacagtactgatgagttgccgaccatctcctactctatgaaccctaagccaaccccttgggccgaggaggagaccgtcgcagctgctcaactgattactatgctgtggagcctgagcgtgtctagctttgctgtgggcggaatgacagcgagctttttcgggggctggctgggcgacactttaggccgtataaaagctatgcttgtggctaatattctgagcctggttggagcactcctcatggggttcagcaagctcgggcccagccatatacttattattgcagggcgctctatcagtggcctgtactgtggtctgatttccgggttagtgcctatgtatatcggtgagatcgcgcccaccgcgttgagaggcgcgctgggaacattccatcagctggccatcgttaccggcatcctgatatcacagattattgggcttgaatttatcctaggaaattatgacctgtggcacatcctgttgggactctcaggtgtgcgtgcaatcctccagtctttattgctgttcttctgtcctgaatctcccagatatctctacatcaagctggatgaagaggtgaaagctaaacagtcactgaagcgcctgcggggttatgatgatgtaacgaaggacatcaatgagatgcggaaggagcgagaagaagcttcctcggagcagaaggtctccataattcagctcttcaccaactctagctaccgacagcctattttggtcgcattgatgttgcatgtagctcagcagttctccgggatcaacggtattttctactactctacatctatcttccagaccgccggaatcagtaaacctgtttatgctacaattggtgtcggcgccgttaatatggtgtttacagctgtctcggtcttcctggtcgaaaaggcaggacgacgttcgctattcctcatcggcatgagcggaatgttcgtctgcgctatattcatgtccgtgggactggtgctactaaacaagttctcatggatgtcgtacgtgtctatgattgccatcttcttgttcgtgtctttcttcgaaattggcccagggcctataccctggttcatggtggcagaatttttctcacagggtcccaggcccgcggctctggcaatcgccgcttttagcaactggacgtgcaactttatcgtggcactgtgtttccagtacatcgccgacttctgtggtccctacgtgttctttctgttcgcaggcgttctgctggcctttactttgttcacatttttcaaagttcctgagaccaaggggaagagctttgaggaaatcgccgccgaattccagaagaaatccgggtccgctcatcggcctaaagctgccgtggagatgaaattcctcggagctactgagactgtc

SEQ ID NO: 19495 - DNA, 1572 bp, synthetic construct
  misc_feature 1..1572: note = source = /note="Description of Artificial Sequence: Synthetic coding sequence"
  source 1..1572: mol_type = other DNA
atgacggaagataaagtaacgggtacgttagtttttacggttataacggcggttctaggttcgtttcaatttggttatgatataggtgttataaatgcgccgcaacaagtaataatatcgcattatcgacatgtattaggtgtaccgctagatgatcgaaaagcgataaataattatgtaataaattcgacggatgaattaccgacgatatcgtattcgatgaatccgaaaccgacgccgtgggcggaagaagaaacggttgcggcggcgcaactaataacgatgttatggtcgttatcggtatcgtcgtttgcggttggtggtatgacggcgtcgttttttggtggttggttaggtgatacgctaggtcgtataaaagcgatgttagtagcgaatatattatcgttagtaggtgcgttattaatgggtttttcgaaattaggtccgtcgcatatactaataatagcgggtcgttcgatatcgggtttatattgtggtctaatatcgggtttagtaccgatgtatataggtgaaatagcgccgacggcgttacgtggtgcgttaggtacgtttcatcaattagcgatagtaacgggtatattaatatcgcaaataataggtctagaatttatactaggtaattatgatttatggcatatattattaggtctatcgggtgttcgtgcgatattacaatcgctactactatttttttgtccggaatcgccgcgttatctatatataaaactagatgaagaagttaaagcgaaacaatcgctaaaacgtttacgtggttatgatgatgttacgaaagatataaatgaaatgcgaaaagaacgtgaagaagcgtcgtcggaacaaaaagtatcgataatacaattatttacgaattcgtcgtatcgacaaccgatactagttgcgttaatgctacatgtagcgcaacaattttcgggtataaatggtatattttattattcgacgtcgatatttcaaacggcgggtatatcgaaaccggtatatgcgacgataggtgttggtgcggtaaatatggtttttacggcggtttcggtttttctagttgaaaaagcgggtcgacgttcgttatttctaataggtatgtcgggtatgtttgtatgtgcgatatttatgtcggttggtttagttttattaaataaattttcgtggatgtcgtatgtttcgatgatagcgatatttttatttgtttcgttttttgaaataggtccgggtccgataccgtggtttatggtagcggaatttttttcgcaaggtccgcgaccggcggcgctagcgatagcggcgttttcgaattggacgtgtaattttatagttgcgttatgttttcaatatatagcggatttttgtggtccgtatgttttttttctatttgcgggtgtattattagcgtttacgctatttacgttttttaaagtaccggaaacgaaaggtaaatcgtttgaagaaatagcggcggaatttcaaaaaaaatcgggttcggcgcatcgaccgaaagcggcggtagaaatgaaatttttaggtgcgacggaaacggta

SEQ ID NO: 19496 - DNA, 1572 bp, synthetic construct
  misc_feature 1..1572: note = source = /note="Description of Artificial Sequence: Synthetic coding sequence"
  source 1..1572: mol_type = other DNA
atgactgaagataaagtcacaggcaccctggtgttcactgtgatcaccgcggttttgggttcctttcagttcggctacgatattggcgtgatcaacgcgccccagcaggtaattatttctcattaccgccacgtacttggcgtacccttggatgacagaaaggctatcaataattacgtcatcaattccaccgatgaactgcctactatctcatacagcatgaatccaaagccaacaccctgggctgaagaggagacagttgctgcagcccaactgatcacaatgctgtggagcctctccgtgtctagttttgctgttggtggaatgacagcgagcttcttcggaggttggttgggtgacactctgggtaggattaaggcgatgctggtggcgaatatcctgagcctggtgggtgcgctgttgatgggtttttcaaagctgggccctagtcacattctcatcatagccggaaggtctatcagcggactttactgtggactgatatctggtctggtgcccatgtacataggcgagatcgcgccgacagctctcagaggagcattgggaacattccaccagctggctattgttacaggaattctgatctcccagatcatcggactggagttcatcttgggcaactacgacctctggcacatcttgctcggactcagcggtgtcagagccattttgcagagtctgctcctctttttctgtcccgagtcccctagatacttgtacatcaaactggatgaggaagttaaagcaaagcaaagcctgaagagattgcgcggatacgatgatgtgacaaaggacattaacgaaatgcgcaaggaacgcgaagaggcatctagcgagcagaaggtctctatcatccaattgttcactaactcttcctaccgccagcctattttggtagccttgatgctgcacgtggcccagcaattttcaggaattaacggcattttttactactcaacctccatttttcagacggcgggaatctctaagcccgtctacgctacgatcggcgtcggtgcggtgaacatggtgttcactgctgttagtgtattcctggttgaaaaagccggcaggcgctcacttttcctcattggtatgtccggcatgttcgtttgcgcaattttcatgagcgtaggattggtgctgctcaataagttcagctggatgagctacgtcagtatgatcgcgatattcctgttcgtgagtttcttcgagatcggacccggcccgattccgtggttcatggtcgcagaatttttctcacagggcccccgcccggccgcattggcaattgccgctttctctaactggacctgcaatttcattgtagcactctgctttcagtacatcgccgacttttgcggcccttacgtgtttttcttgtttgcaggtgttcttctcgcattcaccttgtttaccttcttcaaagtgcctgagaccaaaggcaagtccttcgaagaaatcgcagctgaattccagaaaaagagcggctccgcccatcgccccaaggccgccgttgagatgaagtttctgggtgccaccgaaaccgtg

SEQ ID NO: 19497 - DNA, 1572 bp, synthetic construct
  misc_feature 1..1572: note = source = /note="Description of Artificial Sequence: Synthetic coding sequence"
  source 1..1572: mol_type = other DNA
atgactgaagacaaagttaccggaactcttgtttttactgtgatcacggcagtgttaggatcttttcagttcggatacgatatcggagtaattaacgcgccacagcaggtcattatttcgcactacagacatgttctgggtgttcctttagatgataggaaggctattaataattacgttattaattcaaccgatgaattgcctactatcagctatagtatgaatcctaaacctaccccgtgggccgaagaagagaccgttgcagctgctcaactgattaccatgctttggagcctttcagtttctagtttcgcagtgggcggtatgactgcaagtttttttggcgggtggctgggtgatacgttggggagaattaaagcaatgttggttgccaacattctttcattggtcggagcccttctcatgggatttagtaagttgggaccctctcatatccttataatcgccggtcgtagtatcagcggactttattgcggtctcataagcgggcttgttcccatgtacattggagaaatcgcgccaacggcactaagaggtgctcttggaacctttcaccagctggcaattgtaactgggattttaatatcgcaaatcatcggacttgaattcattttgggtaattatgatctatggcacattcttcttgggctgtcaggtgttcgagccatactccagagtttgttgctttttttttgcccagagagtccgcgttacctttacatcaaactcgacgaagaggttaaggccaaacagtcattgaaacgattgcgcgggtatgacgacgtcactaaagacattaatgagatgcgtaaggagcgagaagaagcaagcagtgagcagaaggtttcaattatacagttatttacaaactcctcttatcgccaaccaattctagttgcccttatgctacatgttgcacagcagttcagcggtataaatggaattttctactattccacatctatatttcagacggctggtatatcaaaacctgtgtacgctacgataggcgttggtgcagtgaatatggtgtttacagccgtaagcgtttttctcgtggaaaaagcaggtcgccgaagtctgttccttattggaatgtccgggatgttcgtttgcgcaatattcatgagtgtcggcttggttcttcttaataagttctcctggatgagctacgtttccatgattgcgattttcttatttgttagctttttcgaaattgggcctggtccaatcccttggtttatggttgcagagttcttttcacagggaccgcgccccgctgctcttgctattgcagctttctcaaactggacttgcaacttcatcgtagccctttgcttccaatacatcgctgatttctgtggaccatacgtcttctttctctttgcgggagtgttgcttgcctttacattgtttactttttttaaagtccctgaaacaaagggaaaaagctttgaggagattgccgcggaattccaaaagaagtccggaagtgctcataggcccaaagcggcagtggagatgaagtttcttggggctacggaaactgtg

SEQ ID NO: 19498 - DNA, 1572 bp, synthetic construct
  misc_feature 1..1572: note = source = /note="Description of Artificial Sequence: Synthetic coding sequence"
  source 1..1572: mol_type = other DNA
atgactgaggacaaagtgacagggacactggtatttacagtgataacagcggttttgggtagttttcaatttgggtatgacattggggttatcaacgcgccgcagcaggtgatcatttcgcactacagacacgtactcggggtgcccttggatgacaggaaggccataaataactacgtcatcaatagcaccgatgagctgcctacaatctcttacagtatgaaccctaaaccaacgccttgggctgaagaagaaacagtagcagccgcccagctcatcaccatgctctggtccctcagtgtgtcttccttcgcagtaggaggtatgactgccagctttttcggcggatggctgggagatacgcttggacgcatcaaggcgatgctggtggccaacatcctgtctcttgtcggcgccctccttatggggttctccaagctggggccatcccacatcctgataattgcaggacgaagcatttctggactatactgcggcctgatctccggactggtgcctatgtatatcggcgagattgcaccaaccgcccttcggggagcgctgggcaccttccatcagctagctattgtcacaggcatcctcataagtcaaatcatcggcctcgagttcatcttgggcaattatgatttgtggcatatattactgggactgagtggcgttcgagccatccttcagtcactcctgctctttttttgtccggagtcacccaggtatctgtacattaagttggatgaggaggttaaggccaaacagagcctgaaaaggcttaggggttacgacgacgtgacaaaggatattaacgagatgcgaaaggaaagggaagaagcttcttcagagcagaaggtgtcgatcattcaactgttcactaacagttcatatcgacagccaatcttggtggcgctgatgcttcatgtggctcagcagttttctggcataaacggtatcttctactacagcacatcgattttccaaacagccggtatctccaagccggtgtacgcaaccatcggcgtgggcgctgttaacatggtgttcactgctgtctccgtgttccttgtggaaaaggccggtcgcagatcattgtttctcattgggatgtctggcatgtttgtgtgcgctatctttatgtcagttgggctggtgttactgaataagttttcttggatgtcgtacgttagcatgatcgccatctttctgttcgtaagtttttttgaaatcggccctggcccaatcccttggtttatggtagcagaattctttagccagggaccccgacccgctgccttagcaatcgccgcgttcagtaattggacttgtaacttcattgtggcactgtgctttcagtatatcgcagacttttgtggcccctacgtgttcttcctctttgctggcgttctgctggccttcactctattcacatttttcaaggtgcccgagaccaagggcaaatctttcgaggaaatcgcagctgagtttcaaaagaaaagcgggagtgctcaccgcccaaaggccgcggttgaaatgaagttcctcggagccactgaaaccgtg

SEQ ID NO: 19499 - DNA, 1572 bp, synthetic construct
  misc_feature 1..1572: note = source = /note="Description of Artificial Sequence: Synthetic coding sequence"
  source 1..1572: mol_type = other DNA
atgaccgaggataaagtcacaggaactttggttttcaccgtgataacagccgtactggggtctttccagtttgggtatgatatcggggtaattaatgcaccacaacaagtgatcatttcccattatcggcacgtgctcggcgtccccctggatgatagaaaagccatcaataattacgtgattaacagcactgacgagctgcccaccatctcatacagcatgaatccaaagcccactccatgggctgaggaggaaactgtggcagctgcccaactcatcaccatgttgtggtccctgagcgtgagcagcttcgctgttggggggatgaccgcctcttttttcggcggctggttaggagataccctcggccgaatcaaggcaatgcttgtagccaacattctctcgctcgttggtgcgctgctgatgggattcagcaagctgggcccctctcacatcctaatcatagcagggaggtcaatctctggcctgtactgtgggctcattagtggtctggtacctatgtatattggggaaattgctcctaccgcgctgaggggtgcgctgggtacctttcaccaacttgcaatagtgaccggaatcctaatttctcaaattattggcctggagttcatactgggcaattatgatctctggcatatcctgctggggttgtcgggcgttagggccattctacagagcctgttgttattcttctgtcccgagtctcctaggtacctgtacataaagttggacgaggaggttaaggcgaagcaatccctcaaacggctgagaggctatgacgacgtgacaaaggatattaacgaaatgcgaaaagaacgtgaggaggccagttctgagcagaaagtcagtatcatacagttgttcacaaattcttcttacagacaacctatcctcgtcgccctgatgcttcacgtggcacaacagttttccggaatcaatggcattttttactattcaacgtcaatatttcagaccgcaggaatctctaaacccgtgtatgctaccatcggagttggtgcagtgaatatggtttttacagcagtgtctgtattcctcgtcgaaaaagctggccggaggagcctgttcctaattggaatgtctgggatgtttgtctgtgccattttcatgtctgttggattggtcctccttaataagttctcatggatgtcttacgtgagtatgatcgcgatttttctgtttgtttcgtttttcgaaattggacccggtccaattccctggtttatggtggcagaattcttctcacaggggcctaggcccgcagccttagctattgccgctttctccaactggacatgcaactttattgttgccctttgcttccagtatattgccgacttctgcggaccctatgtattttttctttttgctggagtgttgttagcgttcacccttttcactttcttcaaagtgcctgagactaagggtaaatcattcgaggagattgccgctgagtttcagaaaaaaagcggcagcgcccataggccaaaggccgccgtggagatgaagtttctgggagcgacagaaactgtg

SEQ ID NO: 19500 - DNA, 1572 bp, synthetic construct
  misc_feature 1..1572: note = source = /note="Description of Artificial Sequence: Synthetic coding sequence"
  source 1..1572: mol_type = other DNA
atgacagaggataaagtaacaggaacattggtcttcacagtaattaccgcagttcttggaagcttccaatttggctatgatattggcgtgatcaatgctccgcagcaggtaatcatctcccattaccgtcatgtgttgggcgtcccgcttgatgatagaaaagccatcaataattatgttatcaattccacagacgaattaccgacgatcagctattctatgaatccgaaacctactccatgggcagaggaagagacggtcgctgccgcccaattaattacaatgctttggtcccttagtgttagctcgttcgccgtggggggtatgacagcgtcgtttttcggaggatggcttggtgacacactcggacggataaaagcgatgcttgttgcaaatatactgtcattggtcggagccctcctgatggggttctctaaattgggcccatcacatattctgattatagccgggcgctctatctctggattatattgcggactgatttcaggcttagttcccatgtatattggtgaaattgcacctacagctctgagaggtgctctcgggacgtttcatcagttggcaatcgttacaggaatcctgatttcacaaatcattggcctggagtttattctgggaaactacgatctgtggcatattttgttgggcctgtccggagtcagggcgattctgcagtcattgcttttgtttttttgccctgagtctccgagatacttatatataaaacttgatgaggaggtcaaagcaaaacagagccttaaacgattacgaggttatgatgatgtcacaaaagacataaatgagatgagaaaagaaagagaagaagcttcgagtgaacaaaaggtgtcaatcatccaactcttcaccaactcttcttatcgtcagccgattttagttgcattgatgctgcacgttgcgcagcaattttctggtattaacggaatattttattattcaacttctatctttcagactgcagggataagcaaaccggtatatgcaacaattggagtcggcgcagtcaacatggtctttacagcggtctccgtttttcttgtagagaaagctggaagacgctctttatttcttatcggcatgagtggcatgtttgtctgcgccatcttcatgtccgtgggcttagtgttgctcaacaagttcagctggatgtcttatgtgtcaatgatcgctattttcctttttgtttcgttttttgaaatcggacctggtcctatcccatggttcatggtcgccgaatttttttcacaaggtccgcgacctgcggccttggcaatcgcggctttttctaactggacgtgcaactttattgtggcattgtgctttcagtatattgcggatttctgtggcccgtatgtctttttcctctttgcgggcgttctgctggcttttacattgtttacgttttttaaagttccggaaacaaaaggcaaatcttttgaagagattgccgctgaattccagaaaaaaagcggctctgcacatagacctaaagcagcagttgaaatgaagtttttaggcgccaccgagactgtt

SEQ ID NO: 19501 - DNA, 1572 bp, synthetic construct
  misc_feature 1..1572: note = source = /note="Description of Artificial Sequence: Synthetic coding sequence"
  source 1..1572: mol_type = other DNA
atgaccgaagataaggtgacgggcacattggttttcacagtaattacagccgttcttggttcctttcaatttggctatgatataggggttatcaatgcaccccaacaggtgattattagtcactatagacatgtgctgggagttcccctggacgatcgaaaagcaataaacaattatgtgatcaattctaccgacgagttgccgactatttcctactccatgaaccctaaaccgactccgtgggccgaggaggagactgtcgcagccgcacagttgatcaccatgttgtggagtttgagcgtgagcagcttcgctgttggcggaatgactgcgtccttctttggtgggtggctgggagacaccctgggcagaatcaaagcgatgcttgtggcgaacatcttgagcttagtgggagctctcctgatgggattcagtaagttaggtcctagccatattctcatcattgccggccgctctatttccggtctgtactgtggcctgatatccggcctggttcccatgtacatcggcgagatcgctcctaccgctctaagaggtgcacttggtacgttccatcagctggccatcgtcactggcattctgatttcccaaattatcggcctagaattcattctgggcaattacgatctgtggcacatcctccttggtctctctggagttagggcgatcctgcagtcactcctgctgtttttttgtcccgagtcaccccgatatctgtatataaagctggacgaggaggtgaaagccaaacagtcactgaagaggctccgagggtatgacgacgtgacaaaggatattaatgaaatgaggaaggaaagggaagaagctagttctgaacagaaggtaagtatcatacagctcttcaccaactcctcgtacaggcagcccattctggttgctttgatgctgcacgtggcccagcagttcagcggcatcaatggcattttctattatagtacctcaatctttcaaactgcagggatctccaaaccagtatatgccacaattggagttggcgctgtgaacatggtcttcacagcagtatccgtctttttggtggaaaaggcagggagacgaagcctgttcctgatcggcatgtccggaatgttcgtgtgtgcaatattcatgagcgtgggactggtcctattgaacaagttttcttggatgagttacgtttcgatgatagctatcttcctcttcgtgagcttctttgagataggaccggggcccatcccatggttcatggtcgccgagttctttagccaggggcccagacctgccgcattagccatcgctgccttcagcaattggacttgtaacttcatcgttgcactttgtttccagtacattgccgacttttgtggtccctacgtattcttcctttttgcaggcgttctgctggccttcaccctgtttacttttttcaaggtcccggagactaagggcaagtcattcgaggagatcgccgctgaatttcaaaaaaaaagtggctcagctcacagacccaaggcagctgtcgaaatgaagttcctcggagctacagaaacagtg

SEQ ID NO: 19502 - DNA, 1572 bp, synthetic construct
  misc_feature 1..1572: note = source = /note="Description of Artificial Sequence: Synthetic coding sequence"
  source 1..1572: mol_type = other DNA
atgactgaagataaagtaactggaacattagtatttactgttattacggcagtcttaggaagttttcaatttggatatgatattggagttataaatgcaccacaacaagttataatttcacattatagacatgttttaggagtaccattagatgacagaaaagcaatcaataattatgttattaattcaacagatgaacttcctactatatcatatagtatgaaccctaaaccaacaccttgggctgaagaagaaacagttgcagctgcacaacttattacaatgctttggagtttatcagtttctagttttgcagtaggaggaatgactgcatcattcttcggaggttggttaggtgatacacttggaagaataaaagcaatgttagttgctaatattcttagtctagttggtgctcttttaatgggattttcaaaattaggaccaagtcatattcttattattgccggacgttctatttctggattatattgtggtttaatttctggattagttccaatgtatattggagagattgctccaactgctcttagaggagcattaggaactttccatcaactagcaattgttacaggtattttaatttctcaaattattggattagagtttattttaggtaactatgatctttggcatattcttttaggattatcaggagttagagcaattcttcaatcattattattattcttctgtccagaatctccaaggtatttatatattaaacttgatgaagaagttaaagctaaacaaagtctaaaacgtctccgtggatatgacgatgttactaaagatattaatgaaatgagaaaagagagagaagaagcatcttcagaacaaaaagtttcaataattcaattatttacaaatagtagttatagacaaccaattcttgttgctttgatgttgcatgtggctcaacaattttcaggtattaatggaattttctattattcaacatctatttttcaaactgctggaatatcaaaacctgtttatgcaactattggagttggagccgtaaacatggtattcacagctgtatctgtttttttagttgaaaaagcaggaagaagatcattatttttaattggaatgtcaggaatgtttgtttgtgcaatctttatgagtgttggattagttttattaaataaatttagttggatgtcatacgtaagtatgattgctatttttttatttgtttcatttttcgaaattggaccaggtccaattccttggtttatggttgctgaatttttcagtcaaggaccaagaccagccgcacttgctatagcagcattttctaattggacttgtaatttcatagttgctttatgctttcaatatattgcagatttttgcggaccatatgttttttttttatttgctggagtactattagctttcactttgtttacattttttaaagtaccagaaacgaagggaaaatcattcgaagaaattgcagcagaattccaaaaaaaatcaggatcagcacatagacctaaagcagctgttgaaatgaaatttcttggagcaacagaaacagtt

SEQ ID NO: 19503 - DNA, 1572 bp, synthetic construct
  misc_feature 1..1572: note = source = /note="Description of Artificial Sequence: Synthetic coding sequence"
  source 1..1572: mol_type = other DNA
atgactgaagataaagtaacaggaacacttgtgttcactgtcataacagccgtactgggatcctttcagtttggatatgatataggagtaattaacgctccacagcaggtgataatctcccactataggcacgtgctaggagtcccacttgatgatcgaaaagccataaataattatgtcatcaactccactgatgaactgcctactatttcttactcaatgaatcctaaacctacaccatgggccgaagaagaaactgttgctgcagctcagcttatcacaatgctatggtctctctccgtgtcctcttttgcggtgggagggatgactgcttccttttttggaggatggttaggggatactctcggacggatcaaagccatgctggttgctaatatattaagtctagtgggggccctcctcatggggttctccaagctggggccttcccatatactcataatcgcaggacggtccatatcaggactttattgcggactcatatcaggattggtacccatgtatataggagaaatagcccctacagccctccggggagcgcttgggacattccatcagctcgcgatcgttactgggattctaatatcccaaataatcgggcttgagttcatacttgggaactatgatctctggcacatcttactcggactttctggagtaagagcaatactgcagtccctactgctattcttttgtccagaatcaccaaggtatctttatatcaaattggatgaagaagttaaagcaaaacagagtttgaaacggttacgtgggtacgatgatgtaactaaagatattaacgagatgaggaaagaacgggaggaagcatcctctgaacagaaagtgagtataattcagttgtttacgaattcctcatacagacagcccatactggtagctctcatgctacatgttgctcagcagtttagtggaatcaacggaatcttctattattctactagtattttccagacagctgggatttccaaacctgtgtacgcaacaataggagttggagccgttaacatggtgtttactgctgtctctgtgttcctagttgagaaggcagggcggagaagtctgttcctcatcgggatgtctggaatgttcgtctgtgctatatttatgtctgtagggctcgtgctactcaataaattttcctggatgtcctacgtatccatgatagctatcttcctattcgtgtccttttttgaaatagggcctggacccataccttggttcatggtagctgaatttttttcccagggacctagacccgcagccctggcaatagccgcattctccaactggacttgtaactttatcgtggccctttgtttccaatatatagcagatttctgcggaccttatgtcttctttctcttcgccggggtactactagcttttacacttttcactttcttcaaagtccccgaaactaaagggaagagtttcgaggaaattgccgcagaattccagaaaaaaagtggatcagcccataggcccaaagccgcagtagaaatgaagttcttgggagcaacagaaacagta

SEQ ID NO: 19504 - DNA, 1572 bp, synthetic construct
  misc_feature 1..1572: note = source = /note="Description of Artificial Sequence: Synthetic coding sequence"
  source 1..1572: mol_type = other DNA
atgactgaggataaagtgacagggacattggtgtttacggtgattacagccgtgttaggatcattccaattcgggtacgatataggcgttattaacgcacctcagcaagtgattatctcccattaccggcatgtgctgggcgtgcccctggatgacaggaaggccatcaacaactacgtgatcaattcaacagacgagctaccaacaatttcatatagtatgaacccaaagccgacgccatgggcagaggaagaaaccgtggcagctgcacagttgatcactatgctctggtcccttagtgtgagctcgttcgcggtaggtggcatgacagcgtccttctttggggggtggttaggggacaccttgggtcggatcaaggccatgctggtcgccaacattctttctctcgttggtgccctcctcatgggattttctaaactcggcccttcccacattttgataattgccggccgctcaattagcggactgtactgcgggctgataagcgggctggtgcccatgtatatcggcgagatcgccccaaccgcacttagaggggctctaggcacctttcaccagctcgcaattgtgacaggaattttgatctcacaaatcataggactggagttcatcctgggaaattatgacttatggcacatcctcctcggactctctggcgtgagagcgatcctgcagtcgctgctccttttcttttgccctgagagcccacgctacctttacatcaagctagatgaggaagtcaaggcgaagcagtctcttaagaggctgcgggggtatgatgacgtgactaaagacattaacgaaatgcggaaagagagggaagaggcgtctagtgaacagaaggtgagcataattcagctcttcacgaacagttcttacaggcagccaatcctagttgccctgatgctgcacgtggctcagcaatttagcggcataaacggtatcttttattactcaacttcgatattccagacggccggcatcagtaaaccggtatatgccacaattggggtgggcgcagtaaacatggtcttcactgctgtctctgtcttccttgtcgagaaggcgggacgtcgaagcctgtttctgatcggaatgtctgggatgtttgtatgcgccatttttatgtccgtggggctggtcctgctgaacaagttctcttggatgagttatgtcagcatgattgccatttttctctttgtgagctttttcgaaattggcccaggaccaatcccatggtttatggttgcagagttcttttcacagggcccccgccctgccgcactggccatcgcagccttttccaactggacctgtaattttatcgtagctctgtgcttccagtacattgcagatttctgtggcccctatgtgttctttctgttcgctggcgttctgctggccttcacactttttacattctttaaagtgcctgaaacaaagggcaagagctttgaagagatcgccgcagaattccagaagaaaagtggtagtgctcatcgccctaaggcggccgtggaaatgaaattcctcggggcaacagagactgtc

SEQ ID NO: 19505 - DNA, 1572 bp, synthetic construct
  misc_feature 1..1572: note = source = /note="Description of Artificial Sequence: Synthetic coding sequence"
  source 1..1572: mol_type = other DNA
atgaccgaagacaaggtgaccggcactctggttttcacagttatcaccgccgtcctgggatctttccagttcggatatgatattggcgtgatcaacgcgccccagcaggtaatcataagccactatcgacacgtgctcggggtcccactagacgacagaaaggcaataaacaactacgtgattaactctactgacgagctgccaaccatctcgtattcaatgaatcccaagccgacaccctgggcggaggaggaaactgtggctgctgcccaactgataaccatgctctggagtctatctgtctccagctttgcagtagggggtatgacagcttccttctttggaggctggctgggggacactcttggccgcattaaggctatgttggtagcaaacatcttatcattggtcggggctctgctgatgggctttagtaagttaggtccttctcacattctgataattgcaggcagatcaatcagcggactgtattgtgggctgatcagcggtctggtgcctatgtacataggagagatcgcacctacagcactgcgcggggcacttggaacatttcatcagttggccatcgtgactggcattctgatttcccagatcattggccttgaattcatcctagggaactacgacctctggcacatcttgctgggactgtccggagttcgagctatcttgcagtcgctcttgctttttttttgccctgagtccccacgttacctgtatataaagttagacgaagaagttaaggccaagcaaagtttaaaacgattaaggggctatgacgatgtcaccaaggacattaacgagatgcgcaaggagcgggaggaggcaagtagcgagcagaaggtgtctatcatacagctatttacaaactccagttaccgacagcctattctggtggcgctgatgctgcacgtggcccaacaattttccggaattaacggaatattttattattctacctctatcttccagactgccggcattagtaaacccgtgtatgctaccatcggcgtgggagccgttaatatggtatttaccgcagtaagtgtgttcctcgtggagaaggcggggaggaggtcactatttctcattggtatgtctggcatgttcgtatgtgccatttttatgtccgtgggcctggtgctattgaacaagtttagttggatgtcttatgtttctatgattgcaatttttctgtttgtgtcgttctttgaaataggtcccggaccaataccgtggttcatggtggccgagtttttcagtcagggtccccgaccagccgctctggcaatcgcggccttctctaactggacatgcaatttcatagtggctctttgctttcagtatatcgcagatttttgcggcccgtatgtattcttcttattcgccggggtgttgctcgcttttaccctttttaccttcttcaaggtccctgagactaaggggaagagcttcgaggagattgccgcagaattccagaagaaatcagggtccgcccaccgaccaaaggccgcagtggaaatgaaattcttgggagccaccgagacagtt

SEQ ID NO: 19506 - DNA, 1572 bp, synthetic construct
  misc_feature 1..1572: note = source = /note="Description of Artificial Sequence: Synthetic coding sequence"
  source 1..1572: mol_type = other DNA
atgacagaagataaagtgactggcacattggtgttcaccgtgattactgctgtgctcggttcatttcagttcggatacgacatcggcgtgattaatgcaccccagcaggtgattatcagtcattatagacacgtgttgggagtgccactcgatgataggaaggcaataaacaattatgtcattaactccacagatgaattacctacaataagctactctatgaaccctaagcctaccccatgggccgaggaagagaccgtggcagccgcccagctcattactatgctgtggtctctctcagtgtctagttttgcagtgggcgggatgactgcctcattttttggcggctggctgggggacaccctggggcggattaaggccatgctggtcgcaaacattctgtccctcgtgggtgccctcctcatgggctttagcaagctcggaccaagtcacatcctgatcattgccggaagaagtatcagcggtctatactgtggcctgatttcaggcctggtgcccatgtatatcggcgagatcgcacctacggcactacggggtgccctgggtacctttcaccagctcgccattgtgaccggaatactgatctcccaaattataggactggagttcatcctaggtaactacgacctgtggcatatcctgcttggcctttcaggtgtgcgtgccatcctgcaatcgcttcttctgtttttctgtcccgaaagtccccgctatttatacataaagttggatgaagaggtgaaagccaagcaatctctcaagagattacgcggctacgatgatgtcaccaaagacattaacgaaatgcggaaggagcgggaggaggcctccagtgagcagaaggtgtccatcattcagctgttcacaaactcttcctataggcagcccattcttgtcgctttaatgctccacgtcgctcagcagttctccggtataaacggtatcttctactacagcacatcgatcttccagactgccgggatcagcaagccagtctatgctacaatcggagttggcgcagtcaatatggtgttcaccgcagtcagcgtgttcttagtcgaaaaagcagggcgtaggtccctttttttgatcggaatgtcaggaatgtttgtgtgtgctatctttatgtctgtgggtttggtcctcctgaacaagtttagttggatgtcatacgtcagtatgattgcaatttttctatttgtaagcttctttgaaatcggacccggccctattccttggtttatggtcgctgaatttttttcgcagggacctagaccagccgctctagcaatcgcggcctttagcaactggacttgcaattttatcgtcgccttatgcttccagtacattgcagacttctgtggcccgtatgtgttttttctgtttgcaggcgtcttgcttgcgtttaccctcttcacatttttcaaagtcccagagaccaaagggaagtcatttgaagagatcgccgcagaatttcagaagaagtccggtagcgcccacaggccaaaggctgccgttgaaatgaagttcctcggggccaccgagacagtt

SEQ ID NO: 19507 - DNA, 1572 bp, synthetic construct
  misc_feature 1..1572: note = source = /note="Description of Artificial Sequence: Synthetic coding sequence"
  source 1..1572: mol_type = other DNA
atgacagaggacaaggttacaggaaccctggtgttcaccgtaatcaccgcagtactgggcagttttcagttcgggtatgacatcggggtaatcaacgcccctcagcaggtgattatctcacactatcggcatgtgctcggggtcccccttgatgatcggaaggccataaacaactacgtcattaattctacagatgaactacctacaatttcttattctatgaatcccaaacctaccccatgggcggaggaagagacggtggccgccgcccaactgatcacaatgctctggtcactctcggtttcatcattcgccgtcggcggcatgaccgcttcctttttcggaggatggctgggcgatacactgggccgcataaaggcaatgctggtggcgaatatactctcattggtgggcgcactcctgatgggattcagtaagctgggaccctcccacattctcatcattgctgggagaagtatctctggactatattgcgggctgattagcggactagtgcctatgtatataggcgagatcgcaccaactgcactaagaggggccctcggaacctttcatcagctggccatagtaaccggtattctgatctctcagattatcggccttgagtttatcctgggcaactacgatctgtggcacatccttctgggcctgagtggcgtgcgggcaatactgcagagcttgctgctgtttttctgccctgaaagtccacggtatctgtatatcaagctggatgaggaggttaaggccaagcagagcttgaagagattgcgtggctatgatgacgtgaccaaggatattaatgaaatgagaaaggaacgagaggaggcctccagcgaacagaaggtatcaattattcaactctttacgaattcttcttatcggcagccgatcctggtggccttaatgcttcacgtggcacagcagttttccgggattaacggcatcttttattattctacttctattttccagactgccgggatcagcaaacctgtttacgctacaatcggcgtcggcgccgtgaatatggtctttacagccgtgtccgttttcttggtggagaaggctggacgtagaagtctctttctgatcggaatgtccggaatgtttgtttgcgcaatatttatgtctgtgggcctcgttcttctcaacaaattctcctggatgtcgtacgtatctatgatcgccattttcttatttgtttcctttttcgaaattggacctggaccaattccttggtttatggtggccgaatttttttctcaggggccccgcccagctgccctcgcaatagccgcgtttagcaactggacatgtaatttcatcgttgcgctctgtttccaatatattgctgatttctgcggtccgtacgtgtttttcctcttcgctggcgtgctgctagcttttaccctgttcactttttttaaggtgcccgaaacgaaggggaagagtttcgaagagattgctgctgaatttcagaagaaatccggatcggcacaccggccaaaagccgccgtcgagatgaagttcctcggagccaccgaaaccgtt

SEQ ID NO: 19508 - DNA, 1572 bp, synthetic construct
  misc_feature 1..1572: note = source = /note="Description of Artificial Sequence: Synthetic coding sequence"
  source 1..1572: mol_type = other DNA
atgacagaggataaagtgaccggtaccctcgtttttactgtgatcacagccgtacttggctcctttcagtttggctacgacattggggtcattaatgctccccagcaggtcatcatttcacactacaggcacgtgctgggtgtacctctagacgatagaaaagcaattaacaattacgtcattaattcaaccgatgaactccccacaatatcatatagtatgaaccctaagccgacgccctgggcagaggaagaaactgtggccgccgcccagcttattaccatgttgtggagcctgtcagtgtcctccttcgctgttggcgggatgacggctagcttcttcggaggatggctaggggatacactcggacgcatcaaggcgatgcttgtcgcgaatattctgtcgctggtgggtgctctgcttatgggattttccaagctgggaccatctcacattttaataatcgccggaaggtccatttcgggcctttattgcggtctcatctcaggcctggttccaatgtacataggcgagattgcaccaaccgctttgcggggggcactggggacgttccatcagttagcaattgttacggggatcctcatcagccagattatcggtctggagtttatcctcggcaactatgatctgtggcacatcctgctgggattgtccggagtgcgcgccatcctgcagtcactactactcttcttctgcccagagagcccacgctacctgtatattaagttagacgaggaagtgaaggctaaacagtcattgaagcgactgcggggctatgatgatgtgactaaagatattaacgagatgcgcaaggagagagaggaggcttcctccgagcagaaagtctcgatcatacagctgttcacaaactcgagctaccggcagccaattcttgtggcgttgatgttgcatgtagcccaacagttcagcgggatcaatggtatcttctattactctacaagcatcttccaaactgctggaatttccaagccagtatacgccacaatcggagtgggagcagtcaatatggtgtttaccgcagttagtgtatttctggtcgaaaaagctggtcgtcgcagcctcttccttataggcatgtctggaatgtttgtgtgtgcaatattcatgagcgtcggcttggtcctcctgaacaagttcagttggatgtcttacgtcagcatgattgcgatatttttattcgtttctttcttcgagatagggcccggccctataccatggtttatggtggccgagttcttcagtcagggccctcgcccggccgccttagctattgcggcgttttctaactggacatgcaactttatcgttgcactgtgtttccagtatattgccgatttctgtggaccgtacgtctttttcctgtttgctggggtcctgctggcgttcaccttatttacatttttcaaggtaccagaaacgaagggaaaatcattcgaggagattgccgctgagttccaaaaaaagtccggatctgctcacagaccaaaagctgccgtcgagatgaagttcctgggggccactgagacagtg

SEQ ID NO: 19509 - DNA, 1572 bp, synthetic construct
  misc_feature 1..1572: note = source = /note="Description of Artificial Sequence: Synthetic coding sequence"
  source 1..1572: mol_type = other DNA
atgacagaggacaaggtaaccggcactctggtgtttacagtaattaccgccgtccttggttccttccagttcggctatgacatcggcgtcattaacgcgccacagcaggtgatcatttcacattacagacacgtgctgggcgttcctttggatgacaggaaagctatcaataactacgtcatcaactccacggatgagctgcctactatctcctattccatgaatccaaagcccaccccatgggccgaagaagaaaccgtggcagccgcgcaactgattactatgctgtggagtctgagtgtgtcatcattcgccgtggggggaatgaccgcctccttcttcggcgggtggctcggagatacgctgggccgcatcaaggccatgctcgtggccaacatcttatctctggtcggcgctctactcatgggcttctcaaaactcgggccctcccatatacttatcatcgcgggcagatctataagcggactatactgtgggctcattagtggcctggtgccgatgtacatcggggaaatcgcgcccactgccctgaggggggcgctgggcacttttcaccagctggcaattgttaccggtattctcatctctcagattattggcctagaattcatacttgggaattatgacttgtggcacatacttctcggcttgtccggggtgagggcgatattgcaaagcctccttctttttttttgcccggagtcgccccgctacttgtacataaagctggacgaggaagtaaaggctaagcagagcttaaagcggctgagaggatacgatgatgtcaccaaagatatcaacgaaatgcgcaaggagcgggaggaggctagctcagaacagaaggtgagcatcattcagctgttcacaaacagcagttatagacaacctatccttgtagcactgatgctgcatgttgcccaacaattcagcgggatcaatggcattttctattattcaacttccattttccagacagcaggtatttccaagcctgtctacgcaacgatcggtgtgggagctgtaaacatggtgttcacagcagtctccgtattcctggtcgaaaaagctggcagaaggtccctgttccttatcggcatgtctggaatgttcgtgtgcgccatcttcatgtccgtggggctggtgctgctcaacaaattcagttggatgtcctacgtctccatgatagccatttttctgtttgtttctttctttgaaattggcccaggcccaattccctggtttatggtggctgagttcttttcccaggggccaagaccagccgcattggctattgcagcattctcaaattggacctgtaattttattgtcgctctctgttttcaatacattgccgatttctgcgggccctatgtcttcttcctcttcgccggcgtgctcctagcctttaccctcttcacattcttcaaggtaccagagaccaaggggaaatcattcgaggagattgccgcagagttccagaaaaagagcggatccgcgcacagacctaaggcagctgtcgagatgaaattcttgggcgccactgagaccgtc

SEQ ID NO: 19510 - DNA, 1572 bp, synthetic construct
  misc_feature 1..1572: note = source = /note="Description of Artificial Sequence: Synthetic coding sequence"
  source 1..1572: mol_type = other DNA
atgactgaagacaaagtgacagggacattagtatttaccgtgataactgctgtgcttgggtcttttcagtttggctacgatatcggggtgattaatgctccgcagcaggtcatcatatcccattaccgacacgtccttggcgtgccactggatgataggaaggcaattaataactatgtaatcaacagtacagacgaactccctaccatatcctatagcatgaacccgaaacccacaccatgggccgaggaggagaccgtggcagcggctcagcttattacaatgttgtggtccctgtctgtgtcatctttcgcagttggtggtatgactgcttctttctttggcggctggctaggggacactctcggcagaataaaagcgatgttggtggcgaacattctaagtctcgtcggggcgcttctcatgggattctcaaagttggggccttcccacattctgataatcgctgggaggtccatctcagggctctactgtggccttattagcgggctggtgcccatgtatattggagagatcgcacccacagctctgcgtggagccttgggaacattccatcagttagctatcgtaacagggattttgatctcccagatcattgggctagaattcatcctcggcaattatgacctctggcacattctgttgggattgagcggggtgagggctatcctccagagcctgctcctgttcttctgtcccgagtcgcccagatacctctatatcaaacttgacgaggaagtgaaagctaaacagtccctgaagcgacttagaggctatgacgatgtgaccaaagatatcaacgagatgcgcaaagagcgagaagaggcttcttctgagcagaaggtgtcaatcattcagttgtttaccaactcctcttataggcagccaatccttgttgctttaatgctgcatgtggcccaacagttctcaggcattaacggaatcttctactattctaccagtatcttccagaccgccgggatctctaagcctgtgtatgccacaatcggcgtgggtgccgttaacatggtgttcacagctgtgtcagtcttcctggtcgaaaaggctggtcgccgtagcctcttcctgatcggtatgtctggaatgtttgtgtgcgctatttttatgagcgtggggctggtcctactgaacaagttttcctggatgagttacgtgagcatgatcgccattttcctttttgtgagtttttttgaaatagggccggggccaataccctggtttatggtggcagaatttttttctcaggggccccggccagcagccctcgctattgctgcgttttccaactggacgtgcaatttcatcgtggctctatgctttcagtacatcgctgatttctgtggaccgtatgttttctttctgtttgctggcgtgctcctcgccttcactttgttcacgttcttcaaggtgcccgagaccaagggcaagtcatttgaggaaatagccgccgagttccagaagaagtctggctccgcccatagacctaaggctgccgtggaaatgaagtttctcggagctacagagaccgtg

SEQ ID NO: 19511 - DNA, 1572 bp, synthetic construct
  misc_feature 1..1572: note = source = /note="Description of Artificial Sequence: Synthetic coding sequence"
  source 1..1572: mol_type = other DNA
atgacagaggacaaggtgacggggacgctggtgtttaccgtgataactgcggtcctgggttcatttcaatttggctatgatattggtgtgattaatgcccctcagcaggtgattatcagccattatcgccatgttctcggcgtgccactggacgaccgtaaagctatcaataactatgtgatcaatagcaccgatgaactcccaaccatctcctactctatgaaccccaaaccgaccccctgggcagaggaggaaaccgttgccgcagcgcagttgattacgatgctctggtcattgtccgtatccagctttgcggtcggcggcatgacggctagctttttcggcggttggctgggcgataccctgggccgtattaaggcaatgttggtggcgaatatcctgagcttagtgggagcccttttaatggggtttagcaagcttggcccgtcccacatcctgatcatcgccggccgatcaatttctggactgtactgcggtctgatatcgggcttggttccaatgtacatcggcgaaattgccccaaccgcgctgcgtggtgcactgggtacattccaccaactggcaatcgtaactggtattctgatcagccaaataatcggtttggagttcatcttggggaactacgacctgtggcacatcttgctgggcctgagcggagtacgcgccattctgcagtctctgctactgtttttctgtccagaaagcccacgctatctgtacatcaagctcgacgaggaggttaaagccaagcagagcttgaaaagactgaggggatatgatgacgtgaccaaggacataaatgaaatgcgaaaggaacgcgaggaggcgagctccgaacagaaagtttccatcattcagctgttcactaatagctcttatcgtcagccaattctggtagctttgatgctacatgtcgcacagcaattcagcggcatcaatgggatcttctactactcaacctccatttttcagacagctggtatctcaaagccggtttacgcaaccatcggtgttggtgcagtcaatatggtgtttaccgcggtgagcgtcttcctggtagaaaaggctggtcgcagatcattgtttttaatcggaatgtctggcatgttcgtatgcgcaatttttatgagcgttgggctggtcttgttgaataaattcagctggatgagctacgtaagcatgattgctatttttctttttgtgtctttttttgaaatcggtcctggtcccattccctggtttatggttgctgagttttttagtcaaggtccacgcccggcggccctcgcaatcgccgcattcagcaactggacgtgcaactttatcgtagcgttgtgctttcagtatatagccgatttctgcggcccgtacgtcttctttttgttcgcgggtgtgctgttggcctttaccttgttcacgttttttaaggttcccgagacaaaaggaaagtctttcgaggaaatcgcggcggaattccagaagaaaagcggttccgctcaccgtcctaaggccgccgtggaaatgaaatttctcggcgcgacagaaaccgtg

SEQ ID NO: 19512 - DNA, 1572 bp, synthetic construct
  misc_feature 1..1572: note = source = /note="Description of Artificial Sequence: Synthetic coding sequence"
  source 1..1572: mol_type = other DNA
atgacagaggacaaagtcacaggtacgctagtctttaccgtgattaccgcagtgctgggcagctttcagtttgggtatgacattggtgttattaacgcgcctcaacaggtgatcatcagccactatcgtcatgtgttaggagtcccactggacgaccgtaaggccataaacaactatgttatcaactccaccgatgagctgcccactatcagttactccatgaaccccaagcccacaccatgggctgaggaggagaccgtagccgccgcgcagctgattacaatgctctggtccctatctgtgtcttcattcgccgtggggggtatgacggccagcttcttcggcggctggcttggagataccctagggcggatcaaagctatgctggtcgcaaacatcctgtcactggtgggcgcactgctgatgggattttcaaaattgggaccgagtcatattttaatcatcgccggtaggagcatctctggactgtactgcggtctaattagcggtttggttcccatgtacatcggcgaaattgcccctacagcacttcggggtgccctgggtacctttcaccagctagcaattgtcaccggaatcctgatcagccagattatagggctggaattcatcctgggcaactacgacctctggcatattctcctcggcctcagcggagtgcgcgccatactgcagtctcttctgctgtttttctgtcctgaatcccctagatatctgtatatcaagctcgatgaagaggtcaaggcaaagcagtcgctaaagcgacttaggggatacgacgacgttaccaaggatatcaacgaaatgcgtaaggagcgggaagaggcctcgtccgaacaaaaggtctctatcattcagctgtttaccaattcttcatacagacaaccaatcctcgttgccctgatgctgcacgtcgcccaacagttctcagggataaacggcatcttttattactcaacgagcatttttcaaaccgcaggaatatccaagccggtgtatgcgaccatcggcgtgggcgcagttaacatggtctttaccgcagtttcagtgtttttagtagaaaaggctggccgtaggtctctattccttattggtatgtcgggaatgttcgtgtgcgcaatattcatgtctgtgggtttggttctactgaataaattttcctggatgtcctacgtttctatgatcgccatcttcctgtttgtgtccttttttgaaattggtcccggaccaattccctggtttatggtggccgagtttttctcacagggcccacggcctgccgccttggccatcgctgctttttctaattggacttgcaattttatcgtggctctgtgctttcaatatatagctgacttctgcggcccgtacgtcttcttcctcttcgccggcgtgctcctggcatttacactgttcaccttctttaaagtgccagaaacgaaagggaagtcgttcgaagagattgccgccgagttccaaaagaaatccggctctgctcaccggcctaaggctgccgtggagatgaagttcctcggggccactgagactgtc

SEQ ID NO: 19513 - DNA, 1572 bp, synthetic construct
  misc_feature 1..1572: note = source = /note="Description of Artificial Sequence: Synthetic coding sequence"
  source 1..1572: mol_type = other DNA
atgaccgaggataaggttactgggactctcgtctttactgtgataactgccgtactcggatcttttcagtttgggtatgatataggtgtaatcaacgctccgcagcaggtcatcatctcccattataggcacgtgctcggggttcccctggacgataggaaggcaatcaacaattatgttattaactcgaccgatgagctccctaccatttcttactccatgaatcccaagcctacaccatgggccgaggaggaaaccgtggccgccgcccagttgatcacaatgctgtggtcgctgtccgtgtcgtcattcgccgtcggaggcatgacagcatcgtttttcggcggctggcttggcgataccttggggcgcattaaggccatgcttgtggctaacatactgtcactggttggtgcactgcttatgggcttttccaagctagggccaagccacattctaattatagctgggcgcagcatcagcgggctgtattgtggcctaatctctgggcttgtcccaatgtacattggagagatcgcccccactgcgctccgtggcgctctaggaacgttccaccagttggccattgttactggcattttaatcagtcagatcatcggcctggagtttattctcggcaactatgatctgtggcatatcctgctcggattgtccggagtacgcgcgattctgcaatctttgcttcttttcttttgtccagagtcccccaggtacctgtatatcaagctggacgaggaggtcaaggcaaaacagtctcttaagcggcttagggggtatgatgacgtgacaaaagatattaacgagatgcgcaaagagcgggaggaggcctccagcgagcaaaaagttagtataatccagctgttcaccaacagcagctatcgacagccaatactcgtggccctgatgctgcatgtggcacagcagttttcaggcatcaacgggatcttctattacagcacatcaatttttcagaccgctggcatctctaagccagtctatgccacgataggcgtgggtgccgttaatatggttttcactgctgtgtctgtgtttttggtcgagaaggccgggcggcggagtctcttccttatcggtatgtccggcatgttcgtgtgcgcaatattcatgtctgttggattggttctgttgaacaaatttagttggatgtcttacgtatctatgatagccatcttcttatttgtgtctttttttgagataggtccgggacctatcccctggttcatggtggccgagttcttttctcaggggccaaggcctgcggcgttggccattgccgctttcagtaactggacgtgcaatttcatagtcgcactgtgtttccagtatatcgccgatttctgtgggccctacgtgttctttctgtttgccggcgtcttattggcctttacactctttactttcttcaaggtaccagaaaccaagggcaaatcattcgaagagattgccgcagaattccagaagaagagcggctccgcacatcgaccgaaagcagccgtggagatgaaatttcttggtgccacagaaacagtt

SEQ ID NO: 19514 - DNA, 1572 bp, synthetic construct
  misc_feature 1..1572: note = source = /note="Description of Artificial Sequence: Synthetic coding sequence"
  source 1..1572: mol_type = other DNA
atgacagaagacaaggtgacagggacccttgtcttcacagtgatcactgctgtgcttggttccttccagttcggatacgacatcggtgtgattaatgcccctcagcaagtcatcatttcccactatagacacgtacttggcgttccgctcgatgatcgcaaagccataaacaattatgtgattaacagtacggatgagcttcctactatctcttatagtatgaatccgaaacccacaccctgggctgaagaggagacagtggcagccgctcagttgatcaccatgttgtggtccttgagcgtctccagcttcgctgtgggcggaatgaccgcaagtttctttggcggttggctgggcgatacccttggtagaatcaaggccatgctcgtcgctaacatactctcactggtgggggctctcttgatgggatttagtaagctgggcccttctcacatcctcatcattgccggcagaagcattagtggcctttactgtgggcttatatcagggttggtcccaatgtatatcggggaaattgcgccaacagcactgagaggggctctgggcacatttcaccagttggctatagtcactggcattttgatttctcagatcattggactcgagtttatcctcggaaactacgatctctggcacatcctcttgggactttcaggagtgagggctatattgcaatctttgttgctgtttttctgccctgaatccccccggtacctgtatattaaacttgacgaagaggtgaaggccaagcagtctctcaagaggcttcggggctacgatgacgttaccaaggacatcaatgaaatgcggaaggaacgggaggaggcatccagtgaacagaaggtctcaatcatccaactttttactaacagttcctaccgacaacctatcttggtggctctgatgctccacgtggcacagcagttcagtgggataaatggaatcttctattatagtacctctatttttcagaccgctggcatcagcaagcctgtgtacgcgacgatcggtgtgggagcggtcaacatggtgtttacagcagtaagcgtgttcctggtggaaaaggctggccggagatctttgttcctgatcggaatgagcggcatgttcgtgtgcgctatcttcatgtccgttggcttggttctccttaacaagttttcctggatgtcatacgtatccatgattgctatcttcctcttcgttagtttcttcgaaatcggtcctggcccgattccgtggtttatggtggccgagtttttctcccaaggtccccgcccagccgcactggcaatagctgcctttagcaattggacctgcaattttatagtagccctttgtttccagtacattgccgacttctgtggtccgtacgtattttttctgttcgccggtgtactccttgctttcacgctgtttacgttctttaaagtgccggagacgaagggaaagtccttcgaggaaatcgccgctgagttccagaagaagtcaggcagcgcgcataggccaaaagccgccgtggagatgaaatttctcggtgcgacagaaactgta

SEQ ID NO: 19515 - DNA, 1572 bp, synthetic construct
  misc_feature 1..1572: note = source = /note="Description of Artificial Sequence: Synthetic coding sequence"
  source 1..1572: mol_type = other DNA
atgacggaagacaaggttacgggaaccctggtattcacagtgatcacagcagtcctggggagcttccaatttgggtatgacatcggtgtcatcaacgcccctcagcaggtgatcatcagccactaccggcacgtgttgggcgtcccactcgatgacaggaaggctattaacaactacgttattaatagcaccgatgagctccccaccatcagttacagcatgaacccgaagccaacaccctgggccgaggaggaaaccgtggctgcagcacaactcatcacaatgctgtggagcctttccgtctctagcttcgcagtcggaggcatgaccgcatcattcttcggaggctggctgggggacactctgggccgcataaaggctatgctcgttgctaatatccttagtctggttggagcactcctgatgggatttagtaagctgggccccagtcatatcctgattatcgctggaagaagcatcagcgggctgtattgcgggttgatatcgggactggtaccaatgtatatcggagaaatcgccccaaccgcgcttcgcggagcacttggcaccttccaccagctggcaattgtgacaggaatactaatttcacagattatcggcctcgaatttatcctgggaaactacgatttgtggcacatcttgcttggcctttcgggagtccgggccatcctccagagcttactcctcttcttttgtccagaatccccgagatacctctacattaaattggatgaagaagttaaagccaaacagagtctgaaacgcttgcgtggctacgatgacgtgacaaaggacataaatgagatgcgcaaggagagagaagaggcctcaagcgaacagaaggtgagcatcatacagctttttactaatagctcatacagacagccaattcttgtggccctcatgctccatgttgcacaacagtttagtggcatcaacggtattttctactactcaacgagcatcttccaaacagcagggatcagcaagccagtgtacgctaccattggcgtgggcgctgtgaacatggtttttaccgcagtctctgtcttcctagtggaaaaggctgggagaaggagcctgtttctcattggcatgtccggtatgtttgtctgcgccatctttatgtctgtgggcctcgtcctgctcaataaattctcttggatgagctatgtgagcatgattgccatctttctgtttgtttcctttttcgaaatcggccccggtccgataccttggtttatggtggctgagttcttttcacaaggccctagaccagccgcactcgcaatcgctgctttttccaactggacatgtaacttcatcgtcgctctttgctttcagtacatagcagatttctgcggaccttacgtcttctttcttttcgccggagtcctgcttgcattcactctgtttaccttttttaaggtacccgaaacaaagggcaagtcttttgaagaaatcgcagctgagttccaaaagaaatcaggcagtgcccacaggcctaaggctgcggtggagatgaagtttctgggtgccaccgaaaccgta

SEQ ID NO: 19516 - DNA, 1572 bp, synthetic construct
  misc_feature 1..1572: note = source = /note="Description of Artificial Sequence: Synthetic coding sequence"
  source 1..1572: mol_type = other DNA
atgactgaggataaggtcactggcaccctcgtattcaccgtaataacagccgtgttggggtctttccagtttggctatgatataggtgttatcaacgcacctcagcaggttattattagtcactataggcatgtgctaggcgtgcctctggatgataggaaggccatcaacaactatgtgataaattcaactgacgaactgcccacaatttcttactctatgaaccccaagcctaccccctgggctgaggaagagacggtcgccgctgcccaactcatcaccatgttatggtccctgtctgtgtccagcttcgcggttggcggcatgacagcaagttttttcggtggatggctgggcgacaccctgggtcgcattaaagcgatgctggttgcgaatatattgagcttggtcggagcactgttgatggggttcagcaagctgggcccttcacacatcctcatcatagcaggcagatctatttccggactgtactgtggcctgatttctggtctcgtgcccatgtacattggagagatcgcccccaccgcacttaggggcgcactggggacttttcatcagctggcaattgtgacaggaattttaattagccagattatcggcctagaattcattctcggcaattacgacctctggcatattctcctggggctgagcggagtccgcgccatattgcaatctctcctgcttttcttctgccccgaatccccgcggtatctgtatattaaattggatgaggaagtgaaggcgaagcagtccctcaagcggctaaggggttacgacgatgtgaccaaggatatcaacgaaatgcgcaaggaacgcgaggaagcttccagcgaacagaaggtgtccattatccagctcttcaccaactcctcgtataggcaaccaatccttgtggccctgatgctgcacgtggcacagcagttctctggaatcaacggcattttttattattctacatctatctttcaaactgccggaattagcaagccagtttacgccacaattggggtaggagcagtcaatatggtgtttaccgccgtgagcgttttcttggttgagaaggccggtcgacgctccctgtttctcattgggatgtcaggtatgttcgtgtgtgcgatctttatgtcagtggggctggttctactgaataagttctcctggatgtcatatgtgtccatgatcgctatatttctttttgtgagtttcttcgagatcggaccagggcctattccgtggtttatggtcgccgagttcttctcccaagggccaaggcccgccgcgctggcgatagccgcttttagcaactggacttgcaattttatagtggccctgtgctttcagtatatagcagacttttgcgggccctacgtgttttttcttttcgcaggtgtgctgctggcttttacactgttcactttctttaaggtgcccgaaactaaaggcaaatccttcgaggagattgcagccgagtttcaaaagaagtcgggaagcgctcaccgccctaaggctgcggtcgagatgaaatttcttggcgctacggagactgtc

SEQ ID NO: 19517 - DNA, 1572 bp, synthetic construct; identical to SEQ ID NO: 19473
  misc_feature 1..1572: note = source = /note="Description of Artificial Sequence: Synthetic coding sequence"
  source 1..1572: mol_type = other DNA

SEQ ID NO: 19518 - DNA, 1572 bp, synthetic construct
  misc_feature 1..1572: note = source = /note="Description of Artificial Sequence: Synthetic coding sequence"
  source 1..1572: mol_type = other DNA
atgactgaagataaggtgaccggcactttggtctttacagtgatcaccgcggtcttaggcagttttcaattcgggtatgatatcggcgtgattaatgctccccagcaggtgattatctcccattaccgtcatgttttgggggtgcctctggacgatcgaaaggctatcaataactacgtgatcaactctacagacgagttgccaacaatcagctacagtatgaaccccaagcctaccccctgggcggaagaggaaacagtggctgcagctcaattgataaccatgctctggtcactgagtgtttcatcctttgccgttggcgggatgacagccagcttttttggtggatggctgggggatacccttggcaggatcaaagccatgctggtggctaatatcttgtctctggtcggagctttattaatgggattctcgaagctgggtccctcccacattttgatcattgcaggcagaagcatctccggcctgtactgcggattgattagtggcctggtgcctatgtacatcggagaaatagcccctaccgccctgaggggcgctcttggcactttccaccagctcgcgattgtaaccgggatcttaatatcccagatcattggcctggagttcattttgggcaactacgacttgtggcacatcctgctcggcctatcaggcgttagggccatcctgcagagtctgctattgttcttctgtcccgagtccccaaggtatctctacataaagctggatgaggaggttaaggctaaacagagcctgaaaaggctcaggggatacgacgatgtaactaaagatattaatgaaatgcggaaggaacgggaagaagcttccagcgaacagaaagtgagtatcatccagctgttcaccaattcctcttataggcagccaattctcgtcgccctcatgctgcacgtggcccagcagttctctggcatcaatgggatcttttattattccactagcatcttccagacagccggcatcagtaaacctgtttacgcaacaatcggagttggcgcagtgaacatggtgttcactgccgtctccgtctttcttgtagagaaggcgggaagaaggtcactctttcttattggcatgagcggtatgttcgtgtgcgccatattcatgtctgttgggctcgtcttactgaacaagttctcttggatgtcctacgtgtcgatgatcgccatattcctcttcgtatcatttttcgaaataggacccggacccatcccgtggttcatggtggctgaattctttagccaagggcctcgacccgccgctctggcaattgccgccttctccaactggacttgtaattttatagtcgccctctgtttccagtatatcgcagacttctgtggtccatatgtatttttcttgtttgccggggtgctgctggcctttaccctcttcacgttctttaaagtaccggaaaccaaggggaaatccttcgaggagattgctgctgaatttcagaaaaagtcagggtccgctcacaggccaaaagccgccgtggagatgaagttcttgggtgctacagagacggtg

SEQ ID NO: 19519 - DNA, 1572 bp, synthetic construct
  misc_feature 1..1572: note = source = /note="Description of Artificial Sequence: Synthetic coding sequence"
  source 1..1572: mol_type = other DNA
atgacagaagacaaggtgacaggtacactcgtgtttactgttattaccgcagtgctgggctcttttcaattcggatatgacatcggagtgataaacgccccacaacaggtcatcatctcccactaccgccacgtcctcggggtccctctggacgaccgtaaagcgatcaacaactatgtgatcaacagtaccgatgagcttcccactataagctacagcatgaaccccaagccaactccatgggccgaagaggagactgtggccgcagctcagcttattacgatgttgtggtccctgtccgtaagcagctttgctgtgggcggcatgaccgcctcattcttcggtggatggctcggggatacactggggcgaatcaaagccatgctggtcgctaacattctgtcactggtgggcgcgctgctaatgggattttcaaagctcggaccatcgcacatcttgattatagcaggcagatctatatccggcctttactgtgggctcatttctggtctcgtgcctatgtatatcggagagatcgcccccaccgcattgaggggtgctctgggcaccttccaccagctggccatcgtaaccggcatcttgataagccaaatcattgggcttgagtttattctcggaaattatgatctctggcacattctgctgggtttgtccggcgtaagggctatcttgcaaagcttgctattgttcttttgcccagagtcaccacggtatttgtacatcaaactggacgaggaggtcaaagcaaagcaatccttaaaacggctccgaggttacgacgatgtgaccaaggacattaatgaaatgcgcaaggagcgagaggaggctagttccgagcagaaggtctccatcatccagttatttacgaactcatcgtaccgccagcctatcctggtggccctgatgttgcacgtggcccagcagttcagtggcatcaacgggatcttctactattcaaccagcatctttcagactgccgggataagcaaacctgtgtacgccaccatcggcgtgggggctgtgaacatggtgttcacagccgtgtctgtttttctggtggagaaagcgggaaggcgctctcttttcctgatagggatgagtggaatgttcgtctgcgccatcttcatgagtgtgggcttagtgctactgaacaagtttagctggatgtcctacgttagtatgatcgccatttttttgtttgtcagtttttttgagattggccccggtccaattccgtggttcatggtggcagaattcttcagccaggggccccgcccagcagcgctggcgatagctgccttcagcaactggacatgcaactttattgtggccttgtgttttcagtatatcgctgacttctgcggcccctacgtctttttcctctttgctggagttctgctcgcttttaccctcttcaccttttttaaggttcctgagactaaaggaaagagctttgaagagatcgccgccgagttccagaagaaaagcgggagcgctcaccgtcctaaggccgcagtagaaatgaaattcctgggtgcaaccgagactgta

SEQ ID NO: 19520 - DNA, 1572 bp, synthetic construct
  misc_feature 1..1572: note = source = /note="Description of Artificial Sequence: Synthetic coding sequence"
  source 1..1572: mol_type = other DNA
atgaccgaggataaagtgactggtaccctggtatttaccgtgattacagctgtcctgggcagcttccagttcggttatgacatcggggtaattaatgcccctcagcaggttatcataagtcattatcggcacgtgttgggtgtgccactcgatgatcgaaaggctattaataactatgtcattaattccactgacgagctgcctaccatttcatattctatgaaccctaagccaacaccctgggctgaggaggaaactgtagctgcagcccagctgattacgatgctgtggagcctgagtgttagctccttcgcggttggaggaatgacagcctcattcttcggcgggtggctgggggacacgctgggacgcatcaaggccatgctggttgcaaacatcctgagcttggtcggagcactcttgatgggctttagcaagctgggtcctagccacatactgatcatcgccggccggtctatatcagggctctactgtggcctgatttccgggcttgtgccaatgtacattggcgaaatcgccccgacagctctgagaggcgctctcggcacctttcatcagttggctattgtaactggaattctcatttcacagatcatcggactggagttcatcctgggaaactacgatctgtggcacattctgctcgggctgagcggtgtgcgggccattttgcaaagtctgcttctgtttttctgccctgagtcaccccggtacctgtatattaaactggacgaagaggttaaagccaagcagtccctgaagaggttgcgcggatatgacgatgtgaccaaggacattaacgaaatgagaaaggagcgggaagaagccagcagcgagcagaaggtatccattattcaactcttcactaactcttcatatcgccaacccatcctcgtcgccctgatgctgcatgttgcgcagcagttcagcggaatcaacgggattttctactattctacaagcatatttcagaccgcgggcataagcaaaccagtatacgctacgatcggcgtgggtgccgtcaacatggtcttcacagcagtgtccgttttcctcgtggagaaagctggacgacggtctcttttcctgatcgggatgagtggcatgtttgtgtgtgccatcttcatgagcgtgggacttgtcctcctcaataagttcagctggatgtcatatgtctccatgatcgctatcttcctgttcgtcagtttctttgagatcggccccggccctatcccctggtttatggtggctgagtttttttctcagggcccgcgacctgcggcattggcgattgccgcttttagtaattggacctgtaactttattgtggctctgtgtttccaatatatcgccgatttctgcggaccttatgtcttcttcctgtttgccggtgtcctgctggcattcactcttttcacattctttaaagtgcccgagactaaaggcaagtcttttgaggaaatcgccgccgagtttcagaaaaagagtggatcagcccatagacccaaggcagctgtggaaatgaaattcctcggcgccaccgagactgta

SEQ ID NO: 19521 - DNA, 1572 bp, synthetic construct
  misc_feature 1..1572: note = source = /note="Description of Artificial Sequence: Synthetic coding sequence"
  source 1..1572: mol_type = other DNA
atgactgaggataaggtgaccggcacattggtgttcacagtgataacggccgtgctcggatctttccaattcggctatgatatcggagtgatcaacgctccccagcaggtaatcatctcccactacaggcatgttcttggcgtcccgctggacgacagaaaagctatcaacaactacgtgattaactccaccgatgaactgcccacaatcagctatagcatgaatcccaagcctacgccttgggcagaggaggagacggtggcggctgcgcagctcatcacgatgttatggtccctgtctgtgtcctcatttgccgtgggcggtatgaccgcatctttctttggcggttggttgggggatacactagggcgcatcaaagctatgctggtggcaaatatcctgagtctcgtgggggccctgctgatgggcttctcaaagctggggccatcccatatcctgatcatcgcgggcaggagtatcagtggactgtactgcgggctgatctcgggactcgtaccgatgtacatcggggaaatcgcgcccaccgccctgcggggcgcactaggaacctttcaccagctggctattgtaacgggcatcctcattagccagatcatcggcctggaattcatactgggtaattacgatttgtggcatattctgttgggactgagtggcgtgagagccattttacaatctctgttgctgttcttttgccctgaatctccgcggtacctgtatatcaagctggacgaggaggtcaaagcaaagcagtccctcaaacggttacggggatatgatgatgtcactaaggatatcaatgaaatgcgaaaagagcgcgaggaggcgagttctgagcagaaggtttcgattattcagctgtttaccaacagtagctacaggcaaccgatcctggtcgccctgatgctgcacgtggcacagcaattctcaggcattaacggaatcttctactatagtacaagtatctttcagaccgctggtatatccaagcccgtgtacgcgaccattggcgtgggtgcagtgaatatggtgttcaccgcagtgtccgtgttcttggtggagaaggctggtagacgtagcctctttctcatcggcatgagcggaatgttcgtgtgcgctatctttatgtccgtgggactggttctgctcaacaagttttcctggatgtcctacgtctcgatgatcgctatatttttattcgtgagcttttttgagataggacccgggcctatcccctggttcatggtagcagagttcttctctcaaggcccgcgcccagccgctctcgcaatagccgctttcagcaattggacctgtaacttcatcgtggccctgtgctttcagtatatagctgatttttgtggaccatacgtgttctttctgtttgcaggcgtgttgctcgccttcaccctgttcacgttcttcaaggttcccgaaacgaaggggaaatcattcgaggaaattgcagccgagttccagaaaaagagtggatcagcacatcgacctaaagccgcggtggaaatgaaattcttgggagccaccgagaccgtg

SEQ ID NO: 19522 - DNA, 1572 bp, synthetic construct
  misc_feature 1..1572: note = source = /note="Description of Artificial Sequence: Synthetic coding sequence"
  source 1..1572: mol_type = other DNA
atgacagaagacaaagttactggaactctggtcttcaccgttatcactgcagtgctaggatcatttcagtttggatacgatatcggggtcatcaatgctccacagcaagtaatcattagtcactataggcatgtactaggagtaccactcgatgatcgaaaagctattaacaattatgttatcaattcgactgatgagctaccaacaatttcatattccatgaatccgaagcctacaccatgggcggaggaagaaacagtggcagcagctcaacttatcaccatgctctggtcactctctgtcagcagctttgctgtcggtgggatgactgcgagttttttcggaggttggcttggtgatacacttggaagaatcaaagctatgcttgtagcaaatattctatctttggttggagccctcctaatgggattctcaaaactgggaccttcgcatattttaattatagccggaagatcaatctcgggactctactgtggattgatctccggcttagtaccaatgtacattggagagattgcaccgactgcactccgtggcgctttagggacattccatcaattagcaattgttacgggaattttgatttcgcaaattattggtctcgagttcatcctgggaaattatgacctttggcatattttacttggattatctggagtccgagctattttgcaatcactgcttctgttcttttgtcctgaatcaccaagatatctctacattaaacttgatgaagaggttaaggcaaagcaaagtcttaagagacttagaggatatgatgatgtaactaaagatataaacgagatgcgtaaagagagagaggaagctagttcggagcaaaaagtatccatcatacagctgttcacaaattcctcatatcgtcaacctattctagtagcgttgatgcttcatgtggcccagcaattcagtggtattaatggaattttctactactctacttccattttccaaactgccggaatttctaaaccggtttatgccacgattggggttggcgcagtcaatatggttttcacggctgtttcggttttccttgtggaaaaggctggacgcagatcactttttttgattgggatgtctggaatgtttgtttgtgccatttttatgtcagtcggactggtcttgcttaacaagttcagttggatgagttacgtttctatgattgccattttcctttttgtttctttttttgaaattggcccagggccaatcccatggtttatggtggcagagtttttcagtcagggaccccgaccagctgccttagctattgcggctttcagtaactggacatgcaattttatagttgcactctgttttcaatatattgctgatttttgtggaccgtatgtgttcttccttttcgctggtgtgttgttagcattcactctattcaccttctttaaagtgccggaaacaaagggaaagtcgttcgaagagatcgctgctgagttccagaaaaagagcggatcggcacacaggcctaaagctgcggtggagatgaagtttcttggtgctactgaaacagta

SEQ ID NO: 19523 - DNA, 1572 bp, synthetic construct
  misc_feature 1..1572: note = source = /note="Description of Artificial Sequence: Synthetic coding sequence"
  source 1..1572: mol_type = other DNA
atgaccgaggacaaggtcacggggaccttagtgttcaccgtaatcacggccgtgctcggcagctttcagtttgggtacgatattggtgtcatcaatgccccacaacaagtgataatatcacactatagacatgttctgggggtgcccttagacgacagaaaggcaatcaacaactacgttatcaactctaccgacgaactgcctaccatatcgtattccatgaatcctaagcctaccccatgggccgaggaggaaacggtggcagcggcgcaactcattacaatgctgtggagcttgtccgtgtcgagctttgccgttgggggtatgaccgcttcattctttggtggctggttgggtgacaccctcggccgcattaaagcgatgctcgttgctaatatactctcactggtgggagcattacttatgggcttcagcaagctgggcccatctcacatcttgattatcgctggacgttctataagcggactatattgcggactcatatccggccttgtgcccatgtacatcggcgaaatcgctccaactgccctgagaggagcactcgggacattccatcagcttgcaatagtgactggcatccttatctcccagatcattggcctcgagtttatcctgggcaattacgacttgtggcatatcctcctgggactgtcaggggtccgggccatcctgcaatctcttcttctgtttttctgcccagaaagccccaggtacctctacatcaagttggacgaagaggtaaaagcaaagcagagtcttaaacgcctccggggttatgatgatgtaacgaaagatatcaacgagatgcggaaggaacgggaggaggcatcatcagaacagaaagtcagtatcatacaactctttaccaattcatcgtaccgccaacccatactggtggccctgatgctccatgtggcgcagcagttttcagggatcaacggcatcttctattattccacttccatctttcagaccgctggcatttcaaagccagtttatgctaccattggagttggtgctgtcaacatggttttcactgctgtgtctgtctttctggtggagaaagccggcagacggtcgctatttctgatcggcatgtccggaatgtttgtgtgcgctatttttatgtctgtggggctagtgctgctgaataaattctcttggatgtcctacgtgtccatgatagccatttttttatttgtctctttcttcgagataggccctggtcctattccttggtttatggtcgccgagttcttttctcagggacctcggcccgccgctctagccattgcagccttctccaactggacctgcaactttattgtggctctgtgtttccagtacatcgccgacttttgtggcccctatgtgttctttctatttgcaggcgtcctgctggcatttacattattcacattcttcaaggtgcctgagacgaaggggaagagtttcgaggagattgccgctgagttccagaagaagtctggcagcgctcaccggccaaaagccgcggtggagatgaagttcctgggagcaacagagaccgtg

SEQ ID NO: 19524 - DNA, 1287 bp, synthetic construct
  misc_feature 1..1287: note = source = /note="Description of Artificial Sequence: Synthetic coding sequence"
  source 1..1287: mol_type = other DNA
atggccgctcaaggatacggctactacagaaccgtaatcttttctgcaatgtttggtggatattccttgtattactttaatagaaagacattcagttttgtcatgccaagtctcgtggaggaaatacccctggacaaggacgatctgggattcattacgagcagtcagtccgctgcctatgcgatctccaaatttgtgagtggcgtactgagcgaccagatgtccgcccgatggttgttctccagtggactcctcctcgtcggtctggtcaatatatttttcgcgtggagttccactgtccctgtgtttgcggctttgtggtttctgaacgggctggcgcaaggacttggctggcctccctgcggcaaagtgctgcgcaagtggtttgagccaagccagtttgggacttggtgggcaatcttgtccaccagcatgaacctggccgggggactgggtcccatcctggccacaatcctggcgcaatcctatagctggcgaagcacattggcactttcaggcgctctgtgcgtggtggtctctttcctgtgtctgctgctgattcacaatgagcctgccgacgtcggcctgaggaatctcgaccctatgccctctgagggcaagaaaggcagcctcaaagaggagtctaccctgcaggagctgttgttgtctccctatctctgggtgctgtccacaggctatctggtggtatttggcgtgaagacctgctgcacggattggggacagttcttcctgattcaggaaaagggtcagtccgcactggtcggcagcagctacatgagcgcccttgaggtgggcgggctggtcggctccattgcagccggctatcttagcgatagggcaatggccaaggctggcctgagtaactacgggaacccgagacatggcctgttgttgtttatgatggctggcatgaccgtctctatgtacctgttcagggtgaccgtgactagtgatagccctaaactctggattctggtattgggggcagtcttcggattctcatcatacggacctatcgcactgtttggcgtaatcgccaatgagagcgctcccccaaatctgtgcggcacttctcatgcaatcgtaggcctgatggcaaatgtgggcgggtttcttgccgggctgccattcagcactatcgcaaagcactacagctggtctacagctttctgggtcgccgaagtcatttgtgccgctagtaccgccgcttttttcctcctcaggaatatccgaaccaagatgggtagagtctccaaaaaggcagag

SEQ ID NO: 19525 - DNA, 1287 bp, synthetic construct
  misc_feature 1..1287: note = source = /note="Description of Artificial Sequence: Synthetic coding sequence"
  source 1..1287: mol_type = other DNA
atggcagcacagggctatgggtattaccgcacagtgatctttagtgcaatgttcggaggatactccctttattacttcaaccgaaagaccttcagtttcgttatgccgtccctagtcgaagagatacccctggacaaggatgatctagggttcatcaccagctctcagtccgccgcgtatgctatctccaagtttgtgtctggggtgctgtctgatcagatgagtgctagatggctgttcagttctgggttgcttcttgtggggctcgtaaacatcttttttgcctggtctagcacagttcctgtgtttgccgctctgtggttcctcaacggactggcgcagggtttggggtggccaccgtgtggcaaggttctgagaaagtggtttgaaccatcccagttcggcacatggtgggccattttgagcactagtatgaaccttgctggcgggctaggccccatcctggcaactatcttagcacagagttacagttggagatctactttggcattatccggagccctgtgtgtcgtcgtctctttcctatgcctgctcttgatccataacgagcctgccgacgtgggattacggaatcttgacccgatgccttccgagggcaagaaggggtccctaaaggaagagtctacactgcaggaactgctgctcagcccgtatctctgggtactgtcaactggctatctggttgtctttggagtgaagacctgttgcaccgactggggccagttcttcttgatccaagaaaagggtcagagtgctctggttggctccagctacatgtccgctctggaagtgggcgggctcgttggttccattgccgcagggtatctgtccgacagggccatggccaaggctggactatctaattatggtaaccctcggcacggtctgttgctgttcatgatggctggaatgacagttagcatgtatctctttcgggtcactgttacatcggactcgcccaagttatggatcctggtgctaggcgccgtcttcgggttctcatcctatggccctatcgctctttttggcgtgattgctaatgagtccgcacccccaaacctgtgcggcacctcacatgcaatagtcggcttgatggcgaacgtgggcgggtttctcgccgggttgcccttttctactatagctaaacactacagctggtcgacggccttttgggtggccgaagtcatatgcgccgcttctacggctgctttttttttactacgcaatatacgaacgaagatgggcagggtatcaaaaaaggctgag

SEQ ID NO: 19526 - DNA, 1287 bp, synthetic construct
  misc_feature 1..1287: note = source = /note="Description of Artificial Sequence: Synthetic coding sequence"
  source 1..1287: mol_type = other DNA
atggcagcacagggttacggatactaccgtactgtcatctttagcgcaatgtttggaggatactccctgtactactttaaccggaaaactttctcgtttgtgatgccttccctggtggaggaaattcctcttgataaggatgaccttggtttcattacctcttcacagagtgcagcatacgctatcagcaagttcgtgtcaggtgtcctttccgaccagatgagcgccagatggctgttttcctccggcctgcttcttgtcggcctggtcaatatcttttttgcatggtcgtcgaccgtgcctgtgtttgcagcactttggttcctgaacggtttggcgcaaggactcggttggcctccttgcgggaaggtgctcagaaagtggtttgagccgagccagttcggtacctggtgggcaattctctcaacctccatgaacctggctgggggtctgggaccaattctggcaaccattctcgcgcaaagctacagctggcggtcgactctcgcgcttagcggcgccctgtgtgtggttgtgtcgtttctctgcctgctcctcatccacaacgaaccagccgatgtgggtctgcgaaacctggacccaatgccatctgaaggaaagaaggggtccctcaaagaagaaagcactcttcaagaactgcttctcagcccatacttgtgggtgctgagtactggataccttgtggtgttcggtgtcaaaacctgctgtactgattggggccaattctttcttatccaagagaaagggcagtctgcgcttgtgggatcctcctacatgtctgccctcgaggtgggcgggttggtcggatctatcgcggcaggctacctttcagaccgggcaatggccaaggcaggcttgtcgaactatggtaatcccagacacgggctgttgctcttcatgatggccggcatgaccgtttccatgtacctgtttagggtaaccgtgacgtccgattctcctaaactttggattcttgtgctgggagcggtgtttggttttagctcctacggccccatcgcccttttcggagtaatagcaaacgaatccgctcctccaaatctgtgtgggacgtcacatgcaattgtgggtctgatggccaatgtcggaggcttcctggcgggattgcccttttctaccattgccaagcattactcgtggtcgactgcattttgggtcgcagaggtgatatgtgcagccagcaccgcagcattctttctgctgcgtaacattaggactaaaatgggaagagtcagcaagaaggctgaa

SEQ ID NO: 19527 - DNA, 1287 bp, synthetic construct
  misc_feature 1..1287: note = source = /note="Description of Artificial Sequence: Synthetic coding sequence"
  source 1..1287: mol_type = other DNA
atggcagcacaaggctacggctactaccgcactgtgatcttctccgcgatgttcggtgggtacagtctgtactacttcaacagaaaaactttctcgttcgtgatgccttccctcgtggaggagatcccgcttgacaaggacgacctggggttcatcacttccagtcagtccgccgcctacgctatctctaagtttgtgtcaggagtgctgagcgatcaaatgtcggcacgctggttgttcagctcggggctgctgcttgtgggacttgtgaacattttcttcgcatggagctccaccgtcccggtattcgctgccctctggtttctcaacggactggcccaaggactcggatggcccccttgtggaaaggtgctgcgcaagtggttcgagccgtcgcaattcggcacgtggtgggcgatcctgtccacctcgatgaatcttgctggagggctgggaccaatcctcgcgaccatcctcgcacagagctattcttggcgctccaccctggccctgagcggcgccctctgcgtggtggtttctttcctctgcctgctgctcatccacaatgaacctgcggatgtggggctgagaaacttggatcctatgccgtcggagggtaaaaagggatccttgaaagaagaatcaactctgcaagagctcctgctgagcccctacttgtgggtgctgtcgactggctacctcgtcgtattcggagtaaaaacctgttgcactgactggggacagtttttcttgattcaggagaaggggcagtcggcactcgtcggttcgtcttacatgagcgccctggaagtcggaggactggtcggtagcattgcggcgggctatctgtcagatagggcgatggctaaggcagggctctctaattacggcaacccgcgccatggcctcctgttgtttatgatggcaggaatgaccgtgagcatgtacttgttccgggtgaccgttacttcagactcgccgaagctctggatccttgtgctcggtgctgtgttcggatttagctcctacggtccgatcgccctcttcggcgtgatcgccaacgaatcggcgcctcccaacctgtgcgggacgagccatgctatcgtcggtctgatggcaaatgtgggagggtttctggccggtctgccattctcgactatcgcaaagcactactcatggtcaactgccttctgggtggccgaggtgatctgcgccgcaagcaccgcagcgttcttcctgcttcgaaatatccggaccaagatggggcgggtgtccaaaaaggcggag

SEQ ID NO: 19528 - DNA, 1287 bp, synthetic construct
  misc_feature 1..1287: note = source = /note="Description of Artificial Sequence: Synthetic coding sequence"
  source 1..1287: mol_type = other DNA
atggcggcgcaaggttacggatactaccgcactgtgattttcagcgctatgttcgggggatactcactgtactacttcaaccgcaagaccttctcattcgtgatgccctcactggtcgaggaaatcccgcttgacaaggatgatctggggttcatcacctcgtcccagtcagccgcatacgcgatctcgaaattcgtgtccggtgtgctgtccgaccagatgtccgcccgctggctgttcagctccggactgctcttggtgggactggtgaacattttcttcgcctggtcctccaccgtcccggtgttcgcagcactgtggttcctcaacggattggctcagggcctgggttggcccccatgcggaaaggtgctgcgtaagtggttcgagcctagccagttcggcacttggtgggcgatcctttcgacttcgatgaacctggcaggaggactcgggccgatcctggccacgatcttggcgcaatcctactcctggaggtccacgttggcactgagcggagcgctgtgtgtggtggttagcttcctttgtctgctcttgattcacaatgaaccggccgacgtcggtcttagaaacctcgacccaatgccgtccgagggaaagaaaggttccctgaaggaagaatcgaccctgcaagagttgctgttgtcaccatacttgtgggtgctgtcgactggatacctggtcgtgttcggggttaagacttgctgcacggattggggccagttcttcctgatccaggagaaaggccagagcgccctcgtgggctcctcatacatgtcggctcttgaagtgggaggactggtcgggtcgatcgcagcaggctacctgtcagatcgagcaatggccaaagcgggactctcgaattacggaaaccccaggcatgggctcctgttgtttatgatggccggcatgactgtgtcgatgtacctcttccgggtcaccgtgacctccgactcgcccaagctgtggatcctggtgctgggagccgttttcggcttctcctcttacgggcccatcgcgctgttcggcgtgatcgcaaacgaatccgccccgcctaacctgtgcggaacgtcgcacgccatcgtgggactcatggcgaacgtcggtggtttcctggccgggctgccgttctccactatcgccaagcactactcatggtcaactgcgttctgggtcgctgaggttatttgtgcagctagtaccgctgcgttcttcctcttgcgcaatatcagaacgaaaatgggccgggtgagcaagaaggctgag

SEQ ID NO: 19529 - DNA, 1287 bp, synthetic construct
  misc_feature 1..1287: note = source = /note="Description of Artificial Sequence: Synthetic coding sequence"
  source 1..1287: mol_type = other DNA
atggcggcgcagggttatggttactatcgcacggtgattttctccgctatgttcgggggctattcgctctattactttaatagaaagaccttttcgttcgtgatgccgtccctggtggaagaaattccacttgacaaggatgacttaggtttcatcacaagctcccagtcagcagcttacgccatctctaaatttgtctcaggagtactcagcgatcagatgtctgctcggtggctcttctcgagcggactgctgctggtcgggctcgtgaacattttctttgcatggtcaagcactgtgcctgtgtttgcagctctgtggttcctaaacgggctagcacaagggttggggtggccaccttgcgggaaggtgcttcgcaaatggtttgaacccagccagtttggaacgtggtgggccattctgtccacgagtatgaatttagccggcgggctgggtcccattctcgccacgatcttggcacaatcttattcatggagaagcacactggccttatctggggctctgtgtgtggtggtctcctttttgtgcctcctgcttattcataacgaaccggcagacgtgggactgcgcaatttggaccctatgccttcggaggggaagaagggctctctaaaggaggagtccaccctgcaggagcttctgctgtccccatacctttgggtcctcagtactggatacctcgtcgttttcggggttaaaacctgctgtaccgattggggccagttcttcttaatacaggaaaagggtcagagtgcactcgtgggcagttcatatatgagcgcactggaagtggggggtcttgttggaagtatcgccgccggatatcttagcgaccgcgccatggccaaggcaggtctgagtaactacggtaaccctaggcacggcttactgcttttcatgatggctgggatgactgtctccatgtatctcttcagagtaacagtgactagcgattcgcccaagctgtggatcctcgttcttggtgcagtgttcggtttctcctcttatggtccaattgccctgtttggcgtgattgccaacgaaagcgcgcctcctaacctttgtgggacgagccacgctatcgttggtttgatggcgaatgtaggagggtttctggccggactcccgttcagcacaatcgcaaaacactattcatggagcacagctttctgggtggccgaagttatctgtgccgcaagcactgccgcattctttctgcttaggaatatcagaaccaaaatgggaagggtgagtaaaaaggctgag

SEQ ID NO: 19530 - DNA, 1287 bp, synthetic construct
  misc_feature 1..1287: note = source = /note="Description of Artificial Sequence: Synthetic coding sequence"
  source 1..1287: mol_type = other DNA
atggctgcacaggggtacggatactacagaaccgtcatctttagcgcaatgtttggaggttactcactctactactttaatcgaaagaccttttcgtttgtgatgccctcactcgtggaagagattccactggacaaggatgatctgggattcatcacttcctcccaatccgccgcatacgctatttcgaagtttgtgagcggagtgctttctgaccagatgtccgctcggtggctttttagcagcggcctgcttctggtgggattggtcaacatctttttcgcgtggtcaagcactgtcccagtattcgcagctctttggttcctgaacggacttgcacaaggtctgggttggccaccttgcggcaaggtcctcagaaagtggtttgaaccttcccaatttggtacttggtgggccattctttccacgtcaatgaatctggcaggaggcctcggcccaatccttgccactatcctggcacagagctactcatggagaagcaccttggcactttcgggtgccctgtgtgtggtggtttccttcctttgtctgctgctcattcataatgagccagcagacgtcggccttcgaaatcttgatccaatgccatcggaaggaaagaagggttcgctgaaagaagagtcgaccctgcaggaactccttctgtcaccctacctctgggtgctctccaccggttacctggtggtgttcggagtcaaaacgtgctgtaccgattggggtcagtttttcttgatccaagaaaagggccaatccgctcttgtcggttcctcgtacatgtcggcactggaagtgggagggctggtgggttccattgccgcaggatacctgtctgatagagcaatggcgaaggcaggactttcaaactacggtaatcctaggcatgggctccttctgtttatgatggcaggaatgaccgtgagcatgtatctgtttagagtgaccgtgactagcgattccccaaagctgtggatccttgtgcttggagcagtctttggctttagctcctacggtccaattgctctttttggcgtcatagccaacgaatcggcaccgcctaatctttgtggcacgtcgcatgccattgtgggtctgatggccaatgtgggcggattccttgcgggacttccattttccacgatagcaaagcactactcctggtccacggcattttgggtggccgaagtcatatgcgcagcatcgactgcagcattctttctgctgcggaacatcaggacgaagatgggacgggtgtcaaagaaagcggaa

SEQ ID NO: 19531 - DNA, 1287 bp, synthetic construct
  misc_feature 1..1287: note = source = /note="Description of Artificial Sequence: Synthetic coding sequence"
  source 1..1287: mol_type = other DNA
atggctgcgcaaggctacggctactaccgcactgtcatattctccgccatgttcggcggatactcactgtactactttaaccgcaagaccttctcgttcgtgatgccgtcgctggtggaggaaatcccgctggacaaggacgacctgggcttcattacctccagccaaagcgccgcgtacgctatctcgaagtttgtgtctggcgtgctctccgaccagatgagtgcgcgatggctcttttcgtcgggacttctgctcgtcgggctcgtcaacattttcttcgcgtggtcgagcacggtgcctgtctttgcagctctctggttcctgaacggactggcgcagggcctcggatggcctccatgcggtaaggtcctgaggaagtggttcgagccgagccagttcgggacctggtgggcgatcctctcaacctcgatgaatctggctggaggactgggaccgatcctggccaccatacttgctcaatcgtattcatggcggtccactctcgctctgagcggagcgctgtgtgttgtggtcagcttcttgtgtttgttgctgatccataacgaacctgcagacgtgggccttcgcaatctggaccctatgccgtccgaaggtaaaaagggatcgctgaaagaggaaagcaccctgcaggaacttcttctttcgccatacctgtgggtcctcagcaccggttacctggtggtgttcggggtcaagacctgctgcactgattggggacaattctttctcatccaggagaaaggacagtcggcattggtggggtcgtcatacatgagtgccctggaggtcggaggactggttggatcaatcgcggccggatacttgtccgatcgggccatggccaaggccggattgtccaactacggcaatccccggcacggactccttctgttcatgatggccggcatgactgtcagcatgtatctgtttagagtgacggttacttccgattctccgaagctgtggattttggtgctcggagcggtgttcggattctcctcttacggtccaatagcattgttcggtgtgatcgccaatgagtcagctcccccgaacctctgcggtacttcgcacgcgattgtgggacttatggccaatgtgggcggcttcctcgccggcctgccattctcgaccatcgccaaacattactcgtggtcgacggctttttgggtggcagaggtcatctgcgctgcgagcactgccgcatttttcctcttgaggaacatcagaaccaaaatgggccgagtgtctaagaaagctgaa

SEQ ID NO: 19532 - DNA, 1287 bp, synthetic construct
  misc_feature 1..1287: note = source = /note="Description of Artificial Sequence: Synthetic coding sequence"
  source 1..1287: mol_type = other DNA
atggccgcgcaaggctacggatactatcgcaccgtcatcttcagcgcgatgttcggcgggtactccttgtattacttcaataggaaaactttctcgttcgtcatgccttctttggtggaagaaatcccgttggacaaggacgatctgggcttcatcactagctcccagtcagccgcttacgccatcagcaagttcgtgtcgggtgtgctgagcgaccagatgagcgccagatggcttttctcctcgggactccttctggtcggactggtgaatatcttcttcgcctggtcctcaaccgtgccagttttcgctgccctctggtttctcaacggcttggcccaaggactgggctggccaccgtgcggcaaagtcctgcggaaatggtttgagccgtcccaattcggcacttggtgggcgatcctctccacctccatgaacctggcgggtgggctcggcccgattcttgcaactatcctggcccagtcctactcctggcggtcaaccctggccctctctggtgcactgtgtgtggtggtgtcgttcctttgccttttgctgatccacaacgagccggccgatgttggactgagaaacctggaccccatgccatcggagggcaagaaggggtccctgaaagaggaatcgacgctccaggaattgttgcttagtccttacctctgggtcctcagcactggctacctggtcgtctttggggtaaagacttgttgcaccgattggggacagttcttcttgatccaagagaagggacagtcagcactggtcgggtcaagctacatgtcggcgctggaagtcggaggactggtggggtctatcgccgccggttacctttcggaccgcgcgatggccaaggccggactgagcaattacggaaacccgcggcatggactcttgctcttcatgatggcgggaatgactgtgagcatgtacctcttccgcgtcaccgtcacctcggactcgccgaagctctggatcctggtccttggcgcagtgttcggattctcctcgtacggaccgatcgcactgttcggagtgatcgctaatgagagcgcccctccgaatctgtgcgggacttctcatgcaattgtgggactgatggcgaatgtgggaggcttcctggccggcctcccgttctccactatcgctaagcactactcgtggtcaaccgcgttctgggtcgccgaggtgatttgcgcagcctctaccgccgccttcttcctgctgcggaacatccgcactaagatgggccgtgtgtccaagaaagccgaa

SEQ ID NO: 19533 - DNA, 1287 bp, synthetic construct
  misc_feature 1..1287: note = source = /note="Description of Artificial Sequence: Synthetic coding sequence"
  source 1..1287: mol_type = other DNA
atggccgctcagggatatggatattataggacagtcatcttttcagctatgtttggagggtatagtttatactactttaatcggaaaacattctcgttcgtgatgccttctctggttgaagaaatacccctcgacaaagatgatcttggatttatcacttcctctcagtcagctgcatatgcgatctccaaatttgtgtccggagtactttcagatcagatgtctgcaagatggctcttctcctctgggctcttgctcgtcggattggttaacatattcttcgcatggagttcaacagtgcccgtgtttgccgctttatggttcctcaatggattggcccagggactcggatggcctccctgcgggaaagtgttaagaaaatggtttgaaccttcccaattcggaacttggtgggcgatcctatctacatcaatgaaccttgccggggggctcggacccattctggctacaatcctggcacagagttattcatggcgatctacattggccttatcaggagctctttgcgtggtagtgtcctttctctgcctacttctcatacacaatgaacctgcagacgtggggctcagaaatctggacccaatgccaagtgaaggaaaaaaaggatccctgaaagaagaatccacacttcaggaattactgctttctccttatttatgggtgctgtccactggatatctcgtggttttcggagtgaaaacttgctgtacagattgggggcagttctttcttattcaggagaaagggcagagtgcacttgtcggatccagttacatgagtgcactcgaagtagggggactagtggggtccatagccgctggatatctaagtgatagagccatggccaaagctggattgtctaattatgggaatccgcggcatggattgctactcttcatgatggcgggaatgacagtgtctatgtacctgttccgagtgacagttacttctgattctcccaaactctggatactagttctcggggctgttttcggattctcctcttatgggccaattgcccttttcggggtaatagcaaacgaatctgccccccccaatttatgcgggacaagtcacgccattgtcgggctaatggctaacgtgggaggattcctcgctgggctccctttttccacaatcgccaagcattactcttggtctacagctttttgggtggccgaagttatctgtgccgcttcaacagcagctttcttcctcctacggaacattcggacaaagatgggacgggttagtaaaaaagctgag

SEQ ID NO: 19534 - DNA, 1287 bp, synthetic construct
  misc_feature 1..1287: note = source = /note="Description of Artificial Sequence: Synthetic coding sequence"
  source 1..1287: mol_type = other DNA
atggctgctcagggctacggttattatcggacagtgattttcagtgctatgttcggcggttacagcctctactacttcaatcgtaagacctttagtttcgtgatgccatcactggtggaggaaataccactggacaaggacgatctaggatttattacaagttcacagtctgctgcgtacgccatcagtaagtttgtaagcggcgtgttaagtgaccagatgtctgctagatggttgttctcctctggcctgcttctggtgggtttagttaatatattttttgcctggagttcaacagttccggtgttcgctgctctgtggtttctaaatggcctggcccagggtctcggatggccaccctgcggcaaggtcctcaggaaatggtttgagcccagtcagttcggcacctggtgggctatactgtctacaagcatgaacctggccggaggcttgggacctattctggcaaccatcctcgcgcagtcctattcttggcgctccacactggccctttctggagccctctgcgtggtggtgtcttttctgtgtctgctgctgatacacaatgagccagccgacgtcggattgcgcaacctcgatccaatgccatcagaaggaaagaagggaagcttgaaagaggagtctacgctccaggaactgttgcttagcccctatctttgggtcctgtctaccggttacctcgttgtattcggagtgaagacatgttgtactgactggggacaatttttcctgatccaggaaaaaggtcagagcgctttggtgggcagtagctacatgtcggctctggaggtgggcggccttgtgggcagcatcgcagccggctatcttagtgatcgtgccatggctaaggctgggctttcaaactacggcaatccccggcatggtctgctgctctttatgatggccgggatgactgtctctatgtatctgttccgagtaacagtgacgtcggatagcccaaagctgtggattcttgtcctgggcgccgtgtttgggttctcctcttatggaccgattgccctctttggagttatcgcaaacgaatccgccccccccaacctctgcgggacctcacacgcgattgttgggttgatggctaatgtcgggggcttcctggcaggcctcccgttcagcaccattgctaaacactattcctggtccacggctttctgggtcgccgaagttatctgcgcggcttcaacagccgcgttcttcctcctgagaaatatccgaactaagatgggaagggtgtcaaaaaaggccgaa

SEQ ID NO: 19535 - DNA, 1287 bp, synthetic construct
  misc_feature 1..1287: note = source = /note="Description of Artificial Sequence: Synthetic coding sequence"
  source 1..1287: mol_type = other DNA
atggctgcccagggatacggctattatagaacggtgattttctctgcaatgtttggcggatatagtctgtactacttcaataggaagacattctctttcgttatgccatccctcgtggaagaaatcccgcttgataaggacgacttgggattcatcacctcatcccagtcggcggcgtatgctataagcaagttcgtctcaggagtgctctcagatcagatgtccgctcggtggctcttttcctccgggctgttactggtgggacttgtgaatatcttctttgcctggtcctcaactgttcccgtgttcgctgccctgtggtttctgaatgggctggctcagggtttgggctggcccccatgtggaaaggtgctgagaaaatggttcgagcctagtcagttcggaacatggtgggcgattttatctacttctatgaatctggccggaggcttaggaccaatcttggcaactattctggctcaaagctattcatggcggtcaacccttgctctatcaggagccctgtgcgtggtcgtctcctttctttgcctcctgctgatccataatgaacccgcagacgtcggactccgaaatctcgatccgatgccatcagagggtaaaaaagggagtctgaaggaagagtctaccctgcaggagctcctgctgagtccctacttgtgggtgctgagtacaggctacctggtggtgtttggcgttaagacctgttgcactgactggggccagtttttcctcatccaggagaagggacagagcgcgcttgtgggctcgagctacatgtcagccctggaagttggcgggctggtggggagcatcgccgcggggtatctcagtgacagagccatggcaaaggccgggctttcaaattacggtaacccccgccatgggctgcttttgtttatgatggccggaatgaccgtcagtatgtacctgtttcgcgtgaccgttacaagcgactcccccaaattatggattttggtactgggggcagtgtttgggttttcctcatatggtccaattgccctctttggcgtgatcgccaatgagtccgccccaccgaacttgtgcgggacatctcacgcaatcgtggggctgatggcgaacgtcggcggcttcctcgccgggctacctttttctaccattgccaagcattactcatggtctaccgcattttgggtcgcagaagtgatttgcgcggcgagcaccgcagccttctttctactccgcaacatccgtaccaagatgggacgggtatcgaagaaggctgaa

SEQ ID NO: 19536 - DNA, 1287 bp, synthetic construct
  misc_feature 1..1287: note = source = /note="Description of Artificial Sequence: Synthetic coding sequence"
  source 1..1287: mol_type = other DNA
atggcggctcagggatatggctattaccgaactgtgatctttagtgccatgtttggtggctactccctatactactttaaccggaagacttttagctttgtcatgccctctcttgtggaagagattccgctggataaggacgatttagggtttatcacctcaagccagagtgctgcatacgctatttccaagttcgtgagcggcgtgcttagcgaccaaatgtccgcccgatggttattctccagtggacttctgcttgtgggcctggttaacatttttttcgcatggtcgagcacagtacctgtgttcgccgccctgtggttcctgaatgggctggcacagggtcttgggtggcccccttgtggcaaggttttacggaaatggttcgaacccagccaatttggtacctggtgggctattttgagcacctctatgaacctagcgggcgggctagggccgatccttgcaactattctggcccagtcctactcttggaggtcaaccctagctttatccggcgccctgtgcgtggtggtatcctttttatgcctcctgcttatccataacgagccagccgatgtcggacttagaaatctggaccctatgccaagcgaagggaagaagggcagcttaaaagaggagagcactcttcaagagctgctcttgagcccctatctgtgggtgctaagtacaggctatctggtggtattcggcgtgaagacttgctgtacggattggggacaattcttcctgattcaggagaaggggcaatcggcgctggtgggctcctcttatatgtccgccctggaggttgggggcttggtgggctcaatcgccgccgggtatctttccgatagagccatggccaaagccggtctctctaattacggcaaccctcgacacggccttctgctgtttatgatggctggcatgaccgtgtcaatgtacctttttcgggttacagttactagtgattcaccgaaactctggattctagtgctgggcgcagtcttcgggttctcctcctacgggccaatcgcattatttggcgtaatcgcaaatgagagtgcccctcccaacctgtgtggcaccagccatgctattgttgggctcatggcaaatgtcggaggcttcctcgccgggctccccttcagcacaatcgcaaagcactactcttggtctacggccttttgggtggctgaggtgatttgtgctgcttccactgccgccttctttttgcttaggaatatccggaccaagatgggccgtgtttctaaaaaggcagaa

SEQ ID NO: 19537 - DNA, 1287 bp, synthetic construct
  misc_feature 1..1287: note = source = /note="Description of Artificial Sequence: Synthetic coding sequence"
  source 1..1287: mol_type = other DNA
atggcagcccaaggatacgggtactatcgcaccgttattttctccgcaatgtttgggggctactcactctactacttcaaccgcaagaccttctctttcgtgatgccatcccttgtcgaagaaatcccacttgataaggacgatctcggtttcataacgtccagccagtctgctgcctacgccatttccaagtttgtctcgggtgttctcagcgaccaaatgtcggctcggtggctcttctcgtccgggctcctcctcgtcggcttagttaatattttcttcgcgtggagctcgacggtgcccgtcttcgccgccctttggttcttgaacggtttggcgcaaggtcttggatggcccccatgtggaaaggtgttgcggaagtggttcgaacctagtcagtttggcacttggtgggccatcctgagcacttctatgaaccttgccggcggccttggacctattctggcaacgattctggcccagtcatacagttggcgttctaccctggctctctccggtgcgctctgcgtggtcgtgagcttcctctgcctgctcctgatccacaatgagcctgctgatgtgggtctgcgcaacttggatcctatgccttcagaaggtaagaagggtagtctcaaggaagagagcacgcttcaggagctgctgctgtccccttatctctgggtcctgagtacaggttacctggttgtttttggagtcaagacctgctgcaccgactgggggcagttcttcctcatacaggagaagggtcagtccgccttggtgggcagctcgtacatgtccgccttggaggtaggaggtttggtcggctcgatagccgccggttacctgtccgaccgtgctatggctaaggccggtctaagcaattacggtaaccctaggcacggcctccttctgttcatgatggccgggatgactgtttccatgtacctgttccgtgtcaccgtcacatctgactcccctaagctgtggattctggtgctgggcgccgtattcggtttcagcagttacgggcctattgccctgttcggcgtcattgccaacgagtcggcgcccccgaacctgtgtggcacttcgcacgcgattgtcggacttatggcaaacgtcggtggcttccttgctgggttgccgttttcgaccatcgccaaacactactcctggtcgaccgccttctgggttgccgaagtcatctgtgctgcatccactgccgcctttttccttctgcgtaacattcgcaccaagatgggtcgcgtgtccaagaaggctgag

SEQ ID NO: 19538 - DNA, 1287 bp, synthetic construct
  misc_feature 1..1287: note = source = /note="Description of Artificial Sequence: Synthetic coding sequence"
  source 1..1287: mol_type = other DNA
atggcagcccaggggtatggatattaccgtacagtaatcttttcagccatgtttgggggctactctctctactacttcaaccgcaagaccttctcttttgtaatgccgagcctagtggaggagatcccactggataaggacgatctcggattcattacctcatctcagagtgctgcctacgctatctctaagttcgtcagcggagttttgagcgatcagatgtctgcgagatggctgttttccagcgggctgctgctagtgggcctcgtgaacatcttcttcgcatggagctctactgtccctgttttcgctgcattgtggtttctcaacggtttggctcagggattggggtggccaccttgcggcaaggttttgcgcaagtggttcgagccatctcagtttggtacctggtgggccattctttcgacatctatgaatttggctgggggtctggggcctatcctggctaccatcctggctcagtcatactcatggcgatctaccctagccctgtccggggccctgtgcgtagtcgtaagctttttgtgtcttttactcattcacaatgagccagctgacgtcggtctgcggaatctagatccaatgccgtccgaggggaagaaaggatccctgaaggaggaaagcaccctgcaggaactgctcctctccccctatctttgggtcctcagcactggatacctggtggtgtttggggtcaaaacttgctgcaccgattgggggcagttcttcctgatacaagaaaaaggccagtctgccctcgtggggtcttcctatatgagtgccttggaagtcggcggactggtaggtagtattgctgcgggttacctgtccgatcgtgctatggcaaaagccggactcagtaattacggaaaccccaggcatggactactgctgttcatgatggcaggcatgacggtctctatgtacctgttcagggtaacggtaacgtccgactccccaaaactctggatactcgtgctcggagctgtgtttggcttctcctcttatgggccgatcgcattgttcggagtgatcgctaacgaatccgcacctccaaatctgtgtggcacaagtcacgctatcgtgggcctgatggccaacgtggggggattcttggccggactgcccttctctacaattgcaaagcattactcatggagcactgctttctgggtcgccgaggtgatctgtgccgcctccactgctgctttcttcctgctgcggaacatcagaacaaaaatggggagagtgagtaagaaagctgag

SEQ ID NO: 19539 - DNA, 1287 bp, synthetic construct
  misc_feature 1..1287: note = source = /note="Description of Artificial Sequence: Synthetic coding sequence"
  source 1..1287: mol_type = other DNA
atggccgctcagggttacggctactatcgaacagtgatcttctccgcaatgttcggtggttacagcctctattacttcaaccgtaagacgttcagctttgtcatgccatcactcgtggaagagatccctctggacaaggatgacctagggtttattacgtcgtctcagtccgccgcttacgctatcagcaaattcgtctccggcgtgctttcggaccagatgtccgcacgctggctgttctcgtccggactgctcctcgtcgggcttgtgaatatttttttcgcatggtctagcacagtgcccgtttttgccgcactgtggtttttgaacgggttagcccaaggtctgggatggccgccatgcggcaaggtcctgcgcaagtggtttgaaccgagccagtttggaacatggtgggccatactctcaacatccatgaatctggcgggcggactcggcccaattctcgccacaattctggcgcagtcatacagctggagatcaactctggctctctccggagctctgtgcgtggtcgtttccttcctgtgcctgcttctgatccacaacgagccagccgacgttggcctcaggaatttagaccccatgccttctgagggcaaaaagggaagccttaaggaagaaagtactcttcaagagcttcttctctctccctacctttgggtgctcagtacgggctacctggttgtcttcggggtgaagacttgctgcaccgactgggggcagttcttcctaatacaagaaaaagggcaaagtgccctggtgggcagctcttatatgtccgccctcgaagtcggtggattggtcggcagcattgccgcgggctacctttccgatagggctatggcgaaagctggcctgtccaattatggaaatccccgccatggactgttacttttcatgatggctggaatgacagtgtctatgtatctattccgtgtgacggttactagcgacagccccaagttgtggattctagtgctcggggcggtctttggtttcagctcgtatgggcccatcgccctttttggagttatagcgaatgaatctgcccccccaaacctctgcggaacctctcatgctattgtgggtctaatggccaacgtaggagggtttctggcagggctgcctttttcgacgattgctaaacactactcctggagcaccgcattttgggtggctgaggtcatctgtgccgcgtccaccgcggcatttttcctgcttagaaacatccgtactaaaatgggcagggtgagcaaaaaggctgaa

SEQ ID NO: 19540 - DNA, 1287 bp, synthetic construct
  misc_feature 1..1287: note = source = /note="Description of Artificial Sequence: Synthetic coding sequence"
  source 1..1287: mol_type = other DNA
atggcggcacagggctacggttactaccgcactgtgattttctcagccatgtttggaggatactcactgtactactttaaccgaaagacctttagtttcgtcatgccaagcctggtcgaagagattcctctcgacaaggacgatcttggtttcattaccagctctcaatctgcagcctacgcaatctcaaaattcgtctcaggggttctttcggatcagatgtccgcccgctggctttttagctcagggcttcttctcgtgggacttgtcaacatctttttcgcgtggtcatctacggtgcctgtgttcgcagcgttgtggtttttgaacgggctggcacagggactgggctggcccccttgtggaaaggtgctgagaaaatggttcgaaccgtcccagtttggcacctggtgggctattctttcgacgtcaatgaatttggccggtggtcttggtccgatcctcgcaaccattctcgcacaatcatattcatggagatcgaccctcgcactttccggtgcactctgtgtcgtggtgtcgtttctgtgtcttttgttgattcacaatgaaccagcggacgtcgggctgcgaaatttggatcctatgccttccgagggtaagaagggatccctgaaggaagagtcgaccttgcaggagctgctgctttcaccttatctctgggtcctgtccactggctacctggtggtctttggagttaaaacttgttgtactgactggggacaattcttccttattcaggagaaaggtcagtcggcccttgtgggttctagctacatgtcagccctggaggtgggtggtctggttgggtccattgcagcaggatacttgtcggatagagctatggcaaaggcagggctttccaactacggtaatcctcgtcacggtttgctgctgtttatgatggcaggcatgaccgtgtcaatgtacctgttccgagtgactgtcacctcggactccccaaagctgtggatccttgtgcttggagcagtgtttggattttcgagctacgggccaatcgcactgtttggggtgattgcgaacgaatctgcgcctccaaacctgtgcggtacctcccatgcaattgtgggactgatggcaaacgtgggaggattcctggcaggactccccttttcgacgatagcaaagcattactcctggtcgactgctttttgggtggcggaagttatttgcgcagcatccaccgccgccttttttcttctgagaaatatcagaaccaagatgggcagagtgtcgaaaaaggcagaa

SEQ ID NO: 19541 - DNA, 1287 bp, synthetic construct
  misc_feature 1..1287: note = source = /note="Description of Artificial Sequence: Synthetic coding sequence"
  source 1..1287: mol_type = other DNA
atggcagcgcagggatacggatactaccgcaccgtgattttctcagccatgttcggcggctactccctgtactacttcaatcgaaagactttcagcttcgtgatgccgtcgctggtggaggagatcccactggacaaggatgacctcggttttatcacctcttcgcagtcggccgcttacgccatctcgaagttcgtgagcggcgtgctgagcgatcagatgtcggcgcgctggctcttctcgtccggtttgctgctggtagggctcgtgaatatcttcttcgcatggtcgtcgaccgtgccggtctttgctgccctctggtttctgaatggattggcccagggactgggatggccgccttgtggaaaggtgctgcgtaagtggttcgagccgtcacagttcggaacttggtgggccatcctcagcacctcgatgaacctggccggaggactgggcccaatactcgcaaccatcctggcgcagtcgtatagctggaggtccactttggcgctgtctggggcactctgcgtggtggtgtccttcttgtgccttctgcttatccataatgagcccgccgatgtgggacttagaaacctcgatccgatgccgtcggagggaaagaaaggcagtcttaaggaagaatcgaccctgcaggaactccttctgagcccgtacctgtgggtgctgagcacggggtacctcgtcgttttcggggtgaaaacttgctgcaccgactggggacagttcttcctgattcaagagaagggacagtcggcgctggtcggatcctcctacatgtccgcgttggaagtgggagggctcgtgggatccatcgccgccggatacctcagcgaccgggctatggccaaggctgggctgtcaaactacggcaatccgagacacggactgcttctgtttatgatggccggaatgactgtgtcaatgtacttgtttagggtgaccgtgacttctgactcgcccaaactgtggatccttgtgctgggagcagtctttggcttttcttcgtacggacctatcgcactgttcggagtgattgcgaacgaatcggcaccgccgaatctctgcggcacctcgcacgccatcgtggggctcatggctaatgtcggcggatttctcgccggactcccattctcaactattgcaaagcactactcgtggagcaccgcgttctgggtcgcggaggtgatctgcgccgcatccacggccgcgttttttctgctccggaatatcaggactaagatgggacgcgtgtccaaaaaagcggag

SEQ ID NO: 19542 - DNA, 1287 bp, synthetic construct
  misc_feature 1..1287: note = source = /note="Description of Artificial Sequence: Synthetic coding sequence"
  source 1..1287: mol_type = other DNA
atggcagcccaggggtacgggtactatcgcaccgttatttttagcgccatgtttggtggatacagcttatactacttcaatcgcaaaacgttctcattcgtaatgccctctctggttgaggagatccctcttgacaaggatgatttgggcttcatcacttctagccaaagtgccgcctatgccatttccaagttcgtgtccggggtcctgtcagaccagatgagcgctcggtggctttttagcagcgggttactcttggtcggactggtgaacatcttctttgcttggtctagcacggtgcccgtctttgccgccttatggttccttaatggcctagcccagggcctggggtggcccccttgcgggaaagttctgcgcaagtggtttgagccttctcaatttgggacatggtgggccatcctcagtactagtatgaacctggctgggggccttgggcccattctcgccacgattctggcccaaagctatagttggaggtctactctcgcgctgtctggagccttgtgcgtcgtggtgtctttcctctgccttttgttaatccataatgaacctgcggacgtgggcctgagaaacctggatccaatgccctctgagggtaagaaagggtccctaaaggaggaatccactctacaggagctgctgctctccccatacctttgggtactttccaccggctatctggtggtattcggtgtgaagacctgttgcacagattggggccagttcttcctgatccaggaaaaaggccagtcggctctggtcggcagttcttatatgagcgcactggaagtgggcggcctggttggtagtatcgcagccggctacctgtcagatcgtgccatggccaaggccggcctttccaactacgggaatccgcgacatggtctgttgctgttcatgatggcaggaatgacagtctcaatgtacctcttcagggtcaccgtaacaagcgactcacctaaactctggatactcgtgttgggggccgtatttggtttttccagctacggtccaatcgcgttgttcggagtgattgccaacgagtcagccccacctaacctttgcgggaccagccatgcgatcgtgggactaatggcgaacgtcggcggcttcctcgcggggctgccttttagtactatagccaagcattactcatggtctacagcattctgggtcgctgaagtcatttgcgctgcatccactgcggcgttttttcttctcagaaatatcaggaccaagatgggccgcgtcagcaaaaaagcagag

SEQ ID NO: 19543 - DNA, 1287 bp, synthetic construct
  misc_feature 1..1287: note = source = /note="Description of Artificial Sequence: Synthetic coding sequence"
  source 1..1287: mol_type = other DNA
atggcagcacagggctatgggtactaccgcaccgtcatcttttcggcaatgtttggaggttatagcctctattacttcaataggaaaacgttctccttcgtgatgccatcgcttgtggaagagattcctctggataaggatgatctggggttcataacctcgtcgcagtcggcagcttacgccatcagcaagtttgtgtccggagtcctttcggatcagatgtcagcacgctggctgttttcaagcgggctgcttcttgtgggtcttgtgaacatcttttttgcctggtcgtccaccgtgcctgtttttgcggcactttggtttctgaacggactggcgcaaggactgggatggcctccgtgtggtaaggtgctgagaaagtggttcgaacctagccaattcgggacctggtgggcaattctttctacctcgatgaatcttgcgggtgggttgggcccaattctcgcaactattctggcacaatcctactcatggcgctccacgctcgccctttcgggtgcactttgtgtggtggtgtcatttctgtgtctgctcctgatacacaatgaaccggcggatgtcggcctccgcaaccttgacccaatgccaagcgagggtaagaaaggttcactgaaggaggaatctactctgcaggaacttctgctttcaccttacctgtgggtgctgtcgactggatacctggtggtgtttggagtcaagacctgctgtaccgattggggacagttttttctcatccaagagaaaggacagagcgcactcgtcggatcatcatacatgtcagcgctggaagtgggtggcctggtgggatctatcgcagccggatacctgtccgatagagcaatggctaaggcaggattgtccaactacggaaatccaagacatgggctcctgctgtttatgatggcaggaatgaccgtgtccatgtacctttttcgggtcaccgtgacgtcagacagtcctaagctctggattctcgtgcttggggctgtctttggtttctcgtcgtacggtccgattgcattgtttggggtgattgccaacgagagcgcacctcccaatctttgcgggacttcccacgctattgtgggtctgatggcaaatgtgggcggattcctcgcagggctccccttttcgaccattgcaaagcactactcatggtccaccgcattctgggtggcggaagtgatctgtgcagcatcaaccgcagcattctttcttcttagaaacattcggaccaagatgggtcgcgtgtcaaagaaggcagaa

SEQ ID NO: 19544 - DNA, 1287 bp, synthetic construct; identical to SEQ ID NO: 19538
  misc_feature 1..1287: note = source = /note="Description of Artificial Sequence: Synthetic coding sequence"
  source 1..1287: mol_type = other DNA

SEQ ID NO: 19545 - DNA, 1287 bp, synthetic construct
  misc_feature 1..1287: note = source = /note="Description of Artificial Sequence: Synthetic coding sequence"
  source 1..1287: mol_type = other DNA
atggcagcgcagggatacggttactatcgcaccgtgatctttagcgcaatgttcggtggttacagcctgtactactttaatcggaaaaccttctcctttgtgatgccttcccttgtggaagaaattcctctcgataaggacgacctgggcttcataacttcaagccagagcgccgcatacgcaatttctaagtttgtctcaggggtgctttccgatcaaatgagcgcaagatggctgtttagctcaggactgctccttgtcggcttggttaacattttctttgcatggtcgtcgaccgtgccagtgtttgctgcgctctggttccttaatggacttgcacaagggcttggttggcctccctgtggaaaagtactccgaaagtggtttgagcccagtcaatttggaacctggtgggccatcctttctacttccatgaacctggccggtggcctgggaccaatcctcgctacgatactggcgcagagttactcctggcggtccaccctggcactctcgggagcactctgcgtggttgtgtcttttttgtgcctgctgttgattcataacgaacctgccgatgtggggcttagaaaccttgatccgatgccttcggaaggaaagaagggtagccttaaagaggaaagcactctgcaggaacttctgttgagtccatacttgtgggtgctgagcaccggataccttgtggtctttggggtcaagacttgttgcactgattggggacagtttttcttgattcaagagaagggtcaatctgcccttgtcggatctagttacatgtcagcacttgaagtgggcggactcgtgggctctatcgccgcaggatatctttcggatagggcaatggcgaaggctggtctttcaaattacggtaatcctcgacacggactcctgctgtttatgatggcgggcatgactgtgtccatgtacctgttcagagtcaccgtgacctcagactcaccaaaattgtggatcctggtgctgggcgctgtattcggattttcgtcgtacggtcccattgcactgtttggggtgatagccaacgagtcggcaccacctaacctttgtggcacctcgcacgcgattgtgggtctgatggccaacgtcggcggattcttggccgggctgccgttttcaactattgcaaagcattacagctggtccactgccttctgggtcgctgaggtcatctgtgcggcctcgaccgcagcattctttctgctgagaaatatccgcacgaaaatgggccgtgtgtcaaagaaggcagaa

SEQ ID NO: 19546 - DNA, 1287 bp, synthetic construct
  misc_feature 1..1287: note = source = /note="Description of Artificial Sequence: Synthetic coding sequence"
  source 1..1287: mol_type = other DNA
atggcagcgcagggatacggatactaccgcactgtgatcttcagcgcgatgtttggcgggtatagcctgtactacttcaaccggaaaactttcagcttcgtgatgccgtcgctggtggaagagattccactggataaggacgacctgggattcatcacctcatcgcagagcgcagcttacgccataagcaaatttgttagcggagtcctgagcgatcagatgtccgccaggtggctgttctcgtcggggctgcttctggtgggactggtcaatatcttttttgcctggtcctcgactgtccctgtctttgcagcgctttggtttctcaacggcctggcgcaaggccttggttggcccccttgcgggaaggtgttgcgcaagtggtttgaaccatcgcaattcggcacgtggtgggcaatcctctcgaccagcatgaacctggcgggaggtcttgggccgatcctcgccaccatcctggcacagtcgtactcgtggaggtccactctggcgttgagcggggcgctgtgcgtggtggtgagcttcctgtgtttgctgctgatccacaatgagccggcagacgtcggcttgcggaatctcgatccaatgccctctgaaggaaagaagggatccctgaaggaggagtcgactctccaagaactgctgctgtcaccatacctgtgggtcctgtcgacgggctacctggtggtgttcggagtcaagacctgctgcaccgattggggacagttctttctgattcaggaaaagggtcagagcgccctggttggaagctcatacatgtcagctctcgaagtcggaggactcgtcggcagcatcgccgccggatatcttagcgacagagcgatggctaaggctggcctgagcaactacggaaacccccggcacggattgctgcttttcatgatggccggaatgactgtgtccatgtacctgttcagggtcaccgtgacgagcgacagcccgaagctgtggattctcgtgcttggcgccgtgttcggattttccagctacggaccgatcgccctgttcggcgtcattgctaacgaatccgccccgccgaacctgtgcggaacttcgcacgccatcgtgggtctgatggccaacgtgggaggcttcctggcaggactgcccttctccaccatcgccaagcattactcatggtctactgccttctgggtggcagaagtgatctgcgcagcttctactgcagcgtttttcctgcttcggaacattagaactaagatgggacgggtgtcgaagaaggccgaa

SEQ ID NO: 19547 - DNA, 1287 bp, synthetic construct
  misc_feature 1..1287: note = source = /note="Description of Artificial Sequence: Synthetic coding sequence"
  source 1..1287: mol_type = other DNA
atggcagctcaagggtacggctactaccggacggtgatcttctccgccatgttcggtgggtactccctctactacttcaacaggaaaaccttctcattcgtgatgccaagtctggttgaagagatcccgctcgacaaggacgatctgggtttcatcactagctcacagtcggcggcctacgccatctcgaagttcgtctcaggagtgctgtccgatcaaatgtccgcaagatggctgttcagcagcggacttctgctcgtgggcctcgtcaatatcttttttgcctggtcgtcgacggtgcccgtgttcgctgcgctgtggttcctcaacggactcgcccagggcctcggctggcccccatgtggaaaggtcctgcgcaaatggtttgaaccttcgcagtttggtacctggtgggccatcttgtccacctccatgaatctggccgggggactcggcccgatcctggcaaccatcctcgcccagagctacagctggagatcgaccctcgcactgagcggtgcgctgtgtgtggtggtgtcatttctctgcctgctgctgatccacaatgagccagctgatgtggggctccgcaatctcgatcctatgccgtcagaggggaaaaaaggatccctgaaggaggagtcgacccttcaggagctgctgctctcgccgtacctctgggtgctgtccaccggttacttggtggtcttcggcgtgaagacttgctgcaccgattggggacaattctttctgatccaggagaaaggtcaatcggcgcttgtcggctccagctatatgtcggctctggaggtgggaggactggtgggatcaattgccgctggatacctgtccgatcgggccatggccaaggcgggactttccaactacggcaacccgagacatgggctcctgcttttcatgatggcggggatgaccgtctcgatgtacttgtttcgggtgactgtgacctcagattcaccaaagctgtggattctcgtgctcggagcggtgttcggattctccagctatggcccaattgccctgtttggagtgatcgccaacgaaagcgcgcctccgaatctgtgcgggacctcccatgccatcgtgggccttatggctaatgtcggaggattcctcgcaggtcttccgttctccactatcgcaaagcactattcctggtcaactgccttctgggtggcggaggtcatttgcgctgcatcaactgctgcgttcttcctcctgcggaacatccggaccaagatgggtcgcgtgtcgaaaaaggccgag

SEQ ID NO: 19548 - DNA, 1287 bp, synthetic construct
  misc_feature 1..1287: note = source = /note="Description of Artificial Sequence: Synthetic coding sequence"
  source 1..1287: mol_type = other DNA
atggccgcgcaaggatacggttactaccggacggtgattttcagcgccatgtttggtggctacagtctttactactttaacaggaaaactttctcgtttgtgatgccatcgctggtggaagaaataccacttgacaaggacgacctggggtttatcacctcctcgcaatccgccgcatatgcaatttcgaagtttgtttcaggagtcctgtcagaccaaatgtctgccagatggcttttttcctcgggcctgctgcttgtgggtctggtgaacatcttttttgcctggtcaagcaccgtgccagtctttgcggcactctggtttctcaacggccttgctcaaggacttggatggcctccttgcggaaaagtgctccggaagtggtttgagccctctcagtttggtacctggtgggcaattctgtccacgtccatgaacttggcaggaggtctgggcccaatactcgcaaccatcctggcgcaatcgtacagctggagatcgacgctcgcactgtccggagcactctgtgtggtagtctcgttcctgtgtctgctccttattcataacgagccagcagatgtgggcctgaggaacctggatccaatgccttccgaaggaaagaagggctcgctgaaggaggagtcaactctgcaggaactgctcctctcaccgtacctctgggtgctgtcgaccggataccttgtggtgttcggtgtgaaaacctgctgcaccgattggggacagttttttctgattcaagaaaagggccagtcagcacttgtcggctcaagctacatgtccgccctcgaagtgggtggattggtgggtagcatcgcagcaggatacctctcggatagggctatggcaaaggcgggcctgagcaattacggaaatccacgtcatggactgttgctgtttatgatggcagggatgacggtgtccatgtacctgttccgcgtgaccgtcacctctgattcaccaaagctgtggatactggtgctgggggccgttttcggattctcgtcgtacggaccaattgccctgtttggtgtgatcgcaaacgagtccgccccacccaatctgtgtggtacctcacatgcaatcgtgggactgatggcaaacgtgggaggttttctggctggcctccctttttccactatcgcaaaacactactcgtggtcaaccgccttctgggtggcagaggtcatttgtgctgcatctactgcagcgttcttccttttgaggaacatccgcacgaagatgggtcgggtgagcaaaaaggcagaa

SEQ ID NO: 19549 - DNA, 1287 bp, synthetic construct
  misc_feature 1..1287: note = source = /note="Description of Artificial Sequence: Synthetic coding sequence"
  source 1..1287: mol_type = other DNA
atggcagcacaaggatacgggtactaccggaccgttatttttagcgcaatgttcggggggtacagcctctactattttaatagaaaaaccttctcttttgtgatgccgtcacttgtggaagaaattcctctggacaaggacgatctgggttttatcactagctcccagagcgcagcatacgctattagcaagttcgtgagtggggtcctgagcgaccagatgtccgcgcggtggcttttttcgtcgggccttctattggtgggtctagtgaacatcttcttcgcctggagttctactgtgccagtatttgccgccctctggttcctgaatgggcttgctcaaggtctaggatggcctccctgcgggaaagtactgcggaagtggtttgagcccagtcagttcggtacgtggtgggccatactgagtacaagtatgaacttagcgggcggcctgggacctatacttgcaactatcttggcacagtcctactcctggcgaagcactttagctctttccggtgctctgtgcgtagtagtgtctttcctgtgtctgctactgatccacaatgaacctgctgatgtcggactcaggaacttagatccgatgcctagcgaagggaagaaaggtagtctcaaggaagaaagcaccctgcaggagctgctgttaagcccttatttatgggtgctgtccaccgggtatctggtcgtttttggtgtcaagacctgttgtacagactggggccagttttttcttatacaagagaagggtcaatcagctctcgttggttcttcctatatgtctgccctagaggtgggcgggctggtgggatccatcgcagccggctacctgagcgaccgagcaatggctaaggctggactcagcaattatggaaatcctcgccatggcctgctgttgtttatgatggccggtatgaccgtgtccatgtacctcttccgcgtgactgtgacatccgactcaccaaaactctggatcctagtgctcggagctgtgtttggtttctcctcttacggaccaatagccctgtttggcgtgatcgctaatgagagtgcgccgcctaacctctgcgggacctcccacgccattgtgggcctgatggcgaacgtcgggggctttctcgcagggctgccgttttcaaccattgccaagcactacagttggtctaccgcattctgggttgcagaagtcatctgcgccgcttcgactgctgcttttttcttgctacgaaatattaggacaaagatggggcgagttagcaagaaagccgag

SEQ ID NO: 19550 - DNA, 1287 bp, synthetic construct
  misc_feature 1..1287: note = source = /note="Description of Artificial Sequence: Synthetic coding sequence"
  source 1..1287: mol_type = other DNA
atggctgcgcagggttatggctactataggaccgtgatctttagcgcgatgttcggcggctactcattatattatttcaacaggaaaactttcagctttgtgatgcctagcctcgttgaagaaattccactcgacaaagatgacttgggattcatcacctctagccagagcgcagcttacgccatcagcaaatttgtatcaggagttctgtcagaccagatgagcgccagatggttattcagctctggcttgcttctggtgggtctggtgaacatcttcttcgcttggtccagcactgtgcccgtgttcgccgcgctttggtttcttaatggattagcacaagggttgggctggcccccttgtggaaaagtgttgaggaaatggtttgagccaagtcagtttggtacatggtgggccatactgtcaacaagcatgaacctggccggaggcctggggcctatcctggccacaatactggcacagagttatagctggcggtctactctggctctgtccggagctctatgtgtcgtggtctcctttttatgccttctccttatccataatgaacccgcagatgtaggcttacgtaatttggatcctatgcccagcgagggtaagaaggggtccctgaaggaggaaagcaccctgcaggaattgctcctcagtccatatctgtgggtgctgagcactggctacctggttgtgttcggagtgaaaacctgctgtactgattggggtcagttttttttaatacaggagaaggggcagtccgccctcgtgggatcctcttacatgtctgccctggaagtcggcggcttggttggcagcatcgctgctggttatttgtcagaccgtgcgatggcaaaggccggactgagcaactacggaaaccctagacatgggttactgttgtttatgatggcgggaatgaccgtctctatgtacctcttccgagtgacagtaactagcgattcaccaaaactgtggatcttggtgttaggagccgtgttcggcttttcgtcatatggccctattgccctcttcggagtaatagctaatgagtccgctccccctaatttgtgcggtacttcccacgctatcgtggggctaatggctaacgtgggaggcttccttgctggattgccttttagcacgatcgccaaacattattcgtggagtacagcattctgggtggcggaggtgatctgtgctgcttccactgccgcctttttcctgttgcggaatataaggaccaaaatgggaagggtgagcaagaaagctgag

SEQ ID NO: 19551 - DNA, 1287 bp, synthetic construct
  misc_feature 1..1287: note = source = /note="Description of Artificial Sequence: Synthetic coding sequence"
  source 1..1287: mol_type = other DNA
atggcagctcagggatatggatactaccgaactgtgattttttctgccatgttcggcgggtactctctttactattttaaccgcaagacatttagttttgttatgccatccctggtagaagagattccactcgacaaggacgatctgggtttcattacatcatcccagagtgcagcatacgctatatcaaagtttgtgtccggtgtgctttccgatcaaatgagcgctaggtggctgttttcaagtgggctgctcctggtgggcctcgtcaatattttttttgcttggtcttccaccgtgcctgttttcgctgctctgtggttcctaaacgggttggctcagggtctggggtggcctccctgcggtaaggtcttacgaaagtggtttgaaccttctcagttcgggacttggtgggctatcttgagcacttccatgaacctggctggcggcctgggtcctatactagctaccatactggcccagagttatagttggaggtcaaccctcgctctgagcggagccctatgtgtggttgtgagctttctgtgtctgctgctgattcacaatgaacccgctgatgtaggcctgcgaaacctggatcctatgccgtctgaagggaagaaggggagcctaaaggaagagagcaccctgcaggaactcttactatcaccatacctctgggtgctgtctaccggttatctggtggtgttcggcgtgaagacctgttgtaccgactggggccagttttttctaatccaggaaaaggggcagtctgccctggtgggctctagctacatgtctgccctggaggtgggcggattggtgggcagcatcgccgctgggtacttgtcagatagggctatggccaaggctgggctgtccaactatggcaatcctagacatggcctgctgctgttcatgatggcagggatgacagtcagcatgtacttattccgggtgactgtgacaagcgactcccctaaactctggatactggttctgggcgcagttttcggtttttccagctacgggcctatcgctctgttcggcgttattgccaacgaatccgcaccacctaacctgtgcgggacctcccacgctatcgttgggttaatggccaatgtaggaggcttcctggccggtctacctttcagtacaattgccaaacactacagttggagtaccgctttttgggttgcagaggtcatatgcgccgccagtaccgcagctttttttttactacggaatattagaaccaaaatggggcgggtgtctaagaaagcagag

SEQ ID NO: 19552 - DNA, 1287 bp, synthetic construct
  misc_feature 1..1287: note = source = /note="Description of Artificial Sequence: Synthetic coding sequence"
  source 1..1287: mol_type = other DNA
atggccgcacagggttacgggtactaccgcaccgtgatcttcagcgccatgttcggcggatactccttgtactacttcaaccggaaaaccttctcgttcgtcatgccgtcgcttgtggaagagatcccgctcgacaaggatgacctgggcttcatcacctcctcccagtcggcggcatacgcgatctcgaagttcgtttcaggtgttctgtcggatcaaatgtcggcgcgatggctgttctcgtccggacttctgctggtcggactggttaacatctttttcgcatggtcatcaacggtgccggtgttcgcggcattgtggttcctcaatggactggcacaggggctgggatggccgccatgcggaaaagtgctgcggaagtggttcgaacctagccaattcggaacctggtgggccatcctctccaccagcatgaacctcgcaggtggcttggggcccatcctggccactatcctggctcaatcctactcctggcggtcgaccctggcgctgtcgggcgccctttgtgtcgtggtttcatttctgtgcctcctgctgatccataatgagccggccgatgtgggactccggaacctggacccgatgccgagcgagggaaagaagggaagcctgaaggaagaaagcaccctgcaggaactgctcctgtctccgtacttgtgggtgctgagcactgggtatcttgtggtgtttggcgttaaaacctgctgtactgattggggacagttctttctgatccaggaaaaggggcaatcggcactcgtgggttccagctacatgagcgcactcgaggtgggcggacttgtcgggtccatcgccgcgggataccttagcgacagggctatggccaaggcgggactgtccaactacggaaatccacgccacggactgctcctgttcatgatggccggaatgacggtgtcgatgtacttgtttagagtgactgtgacctcggactcaccgaagctctggatcctggtcctcggagccgttttcggattctctagctacggaccaatcgcgctgtttggcgtgatagccaacgaaagcgcaccgccgaacctgtgcgggacctcccatgcgatcgtcggactcatggccaacgtgggaggattccttgcagggctcccattctctaccatcgctaagcactactcgtggagcaccgcgttttgggtcgctgaggtgatttgcgccgcttcaacggctgctttctttctgctccgcaacatccggaccaaaatgggacgagtgagcaaaaaagcggag

SEQ ID NO: 19553 - DNA, 1287 bp, synthetic construct
  misc_feature 1..1287: note = source = /note="Description of Artificial Sequence: Synthetic coding sequence"
  source 1..1287: mol_type = other DNA
atggccgctcaggggtacggctactaccgcacagtgatttttagcgctatgtttggtggatatagtctgtactactttaacagaaaaactttcagttttgtgatgccctcacttgtggaagaaatacctctggataaagacgatcttggtttcattacctcctcgcagtctgcggcttacgcgatatcaaaatttgttagcggcgttctaagcgatcagatgagtgcccggtggctgttcagttccgggttgcttcttgtgggtctggtgaatatcttttttgcctggtctagcacagtgccggtctttgcagctctgtggtttttgaacgggttggcacaaggactgggttggcccccatgcggcaaggtcttgaggaaatggtttgaaccatcacagttcggaacatggtgggccattttgtcaacatccatgaatctggcgggcggcctgggtcccatcttagctaccattctcgcacagtcttactcctggcgatctaccctggccttgagtggagctttatgcgtcgtggtctccttcctctgtctcttgctgatccacaatgagcccgctgatgtagggctgcgtaatcttgatcccatgccctcagaagggaaaaagggctccctcaaggaagagagtacactccaggaactgctgctctcaccgtatctgtgggtgttatcgaccggctatctcgtggtctttggtgtgaagacatgttgcaccgactggggacaatttttcttgatccaggagaaggggcagtccgcattggtgggatccagttacatgtccgctctcgaggtgggagggttggtggggagcattgcagccgggtacctgtcggatcgcgccatggccaaagccggattatctaactacggcaatccaaggcacggccttctgctgtttatgatggcggggatgactgtatctatgtatctgttccgggtcaccgttacatccgacagccctaagctctggatccttgtactgggagcggtttttggattcagctcgtatggccctattgctctgtttggggtcatagcaaacgaaagcgcaccaccaaacctttgtgggacaagtcacgccatagtcggtctgatggctaatgtggggggctttctggccggcttgccattcagcactatcgctaagcactactcctggagtacagcattttgggtcgcagaagtaatctgcgctgccagtactgccgcattcttcctgttgaggaatattcgaacaaagatgggcagggtgtcaaaaaaggccgaa

SEQ ID NO: 19554 - DNA, 1287 bp, synthetic construct
  misc_feature 1..1287: note = source = /note="Description of Artificial Sequence: Synthetic coding sequence"
  source 1..1287: mol_type = other DNA
atggctgctcagggatacggttattatcgtactgtcattttctcagctatgtttggaggatactctttgtattatttcaataggaaaacgttctcatttgttatgccatctcttgtggaagaaattccattagataaggacgatctgggattcattacctcttcacagagtgcagcttatgcgatcagtaaatttgtttctggtgttctttctgatcagatgtccgcacgctggctcttcagttcaggtttactgttggttggcttggtgaatatcttctttgcctggtcgtcaactgtccctgtattcgcagcactgtggtttttgaacggacttgctcaaggtttgggatggccaccatgtggaaaagttctgcgaaaatggtttgagccgtcacagtttggaacgtggtgggcaatcctttccacgtcgatgaacctagcgggaggacttggaccaatcctagctacaatacttgcccaatcttactcatggcgctcaacattagcacttagcggtgcactctgcgtcgttgtcagttttttatgcctgttactcatacataacgaaccggccgatgttggattgcgtaaccttgatccaatgccttccgaaggtaagaaaggttcattaaaagaggaatccacattgcaagagctacttctatccccatacctttgggttctctcgacaggataccttgttgtattcggagttaaaacttgttgtacggactggggacaattcttcttaatacaagagaagggtcaatcagccctcgtaggatcgtcttatatgtctgcccttgaagtaggaggactggttggctcaatagcagcaggatatctcagtgacagagctatggcaaaggcgggactgtctaattacggaaatccacgtcatggtttactgctgttcatgatggctggaatgacagtttctatgtacttatttcgtgttaccgtcacatcagatagtccgaagctctggatattggtccttggagctgtatttggcttctcttcttacggaccaattgcattattcggagtcattgctaacgagtctgcacccccgaatctctgcggaacatctcatgcaattgtggggctaatggctaatgttggaggattcttggcaggtcttcccttttcaacgattgcaaaacattattcttggtccactgcattttgggttgcagaggtaatttgcgcggcaagtactgcagcattctttctcttgcgtaacatcaggacaaagatgggccgtgtctcaaagaaagccgaa

SEQ ID NO: 19555 - DNA, 1287 bp, synthetic construct
  misc_feature 1..1287: note = source = /note="Description of Artificial Sequence: Synthetic coding sequence"
  source 1..1287: mol_type = other DNA
atggcagcacagggttacggctactaccgcactgtaattttcagcgccatgttcggtgggtactcgctctactatttcaatagaaagaccttttctttcgtgatgccttctctggttgaggagatccccctcgacaaggatgatctggggttcatcacctcctcccaaagcgccgcctacgctatctctaaatttgtgagcggagttctcagcgaccaaatgtcagctaggtggctgttttcttccggactcctcctggtggggctagtgaacatcttctttgcttggagtagtaccgtgcctgtgttcgcagctctgtggttcctgaacggtctggctcagggcctggggtggcccccatgtggcaaggttctgcgaaaatggttcgagccaagtcagtttggtacctggtgggccatcttgtcgacgagcatgaatcttgccgggggtttgggtcctattctagccacaatcttggctcagagctactcctggagaagtactcttgccctgtcaggagccctgtgtgtggtggtgtcgtttctgtgtcttctcctcatccacaacgagcctgctgacgtgggactacgcaatttggaccctatgcctagtgaggggaagaaggggagcctgaaggaggagagtacattgcaagaactactgctcagtccctacttgtgggtattaagcaccggctacctcgtggtgtttggcgttaaaacttgctgcactgactgggggcagttcttcttaatacaggagaaagggcagtccgcactcgtaggaagcagttacatgtccgctttagaagtgggagggctagtgggcagcattgctgccggctatctatcagatagggcgatggccaaagccggacttagcaattacgggaatcccaggcatggtctgctactgtttatgatggcaggaatgaccgtgagcatgtacctattcagagtgactgtcacatctgattcgcccaagctatggatcctggtgctgggcgcggttttcgggttttctagttatgggcctattgcgctgtttggagtcatcgccaatgagtcagcccctcctaacctttgcggtacatctcatgcaatcgtgggtttaatggctaacgtgggtggcttccttgctggcctgccctttagcactatagctaagcattactcttggagtaccgctttctgggtggctgaggtgatttgtgcagcgtccacagccgcattcttcctccttcggaacattaggaccaagatgggcagggtatcaaagaaggcagag

SEQ ID NO: 19556 - DNA, 1287 bp, synthetic construct
  misc_feature 1..1287: note = source = /note="Description of Artificial Sequence: Synthetic coding sequence"
  source 1..1287: mol_type = other DNA
atggccgcacagggatacggatactaccggactgtgatcttttcggcaatgttcggaggatactcgctctattacttcaataggaaaacctttagctttgtgatgccgtccctggtggaggagatccctctcgataaggatgacctcgggttcataacttccagccaatcagcggcatacgcaatctcgaagttcgtgtccggagtgctgagcgatcagatgtccgcccgttggctgttttcaagcggactcctcctggtgggactcgtgaacatcttcttcgcctggtcaagcaccgtgccggtctttgcggcactgtggttcctcaatggcctggcgcaaggtttgggctggccgccgtgtggaaaggtgctcaggaaatggttcgagccttcccaattcggaacctggtgggccatcttgtccaccagcatgaatctggccggagggctcggcccaatcctcgcgacgattttggcgcagtcttactcgtggcgctccaccctggccctgtctggcgcactctgcgtggtggtgtcctttctgtgcctgctcctcatccataacgagcctgcggacgtcggactcagaaacctggatccaatgccttcggagggaaagaagggaagcctgaaggaggaatcgactctccaggaactgttgctctccccgtatctttgggtcctgtccacgggatacttggtggtctttggagtgaaaacttgctgcactgactgggggcaattcttccttatccaagaaaagggccagtccgcccttgtcggatcaagctacatgagcgcactggaggtgggaggacttgtggggagtatcgcggctggatatctttcagaccgcgcgatggccaaggccggactctcgaactacggaaacccgagacacggtctgttgctgttcatgatggcggggatgaccgtgtcaatgtatctgtttagagtcaccgtgacttccgactcgccaaagctctggatcctcgtgctgggagcggtgttcggcttttcatcctatggaccgatcgcgctgttcggggtgatcgctaacgagtccgcacctcctaatctgtgcggcacctcgcatgctattgttggcctcatggcaaacgtgggaggatttcttgcgggactgcccttctccactatcgccaagcattactcgtggtcgactgcgttctgggtggccgaagtcatttgcgccgcctcaaccgccgcgttcttcctgctgagaaatatccggacgaaaatgggccgcgtgtcgaaaaaggccgaa

SEQ ID NO: 19557 - DNA, 1287 bp, synthetic construct
  misc_feature 1..1287: note = source = /note="Description of Artificial Sequence: Synthetic coding sequence"
  source 1..1287: mol_type = other DNA
atggcagcacaaggctacggatattatagaactgtgatctttagcgccatgttcggtggctacagtctgtattatttcaataggaagaccttctctttcgttatgccaagcctggtcgaggagatcccattggataaggatgatctcggcttcattaccagctcccagtccgctgcttatgccatctcaaaattcgtaagcggcgtcctttcagaccagatgtccgctagatggctgttctcctctggtctgctcctcgttggcctggtcaacatattcttcgcttggtcttccacggtacctgttttcgccgccctctggttcttgaatggtcttgcccagggtttgggctggccaccatgcggcaaggtgctgaggaaatggttcgagccatctcaattcggcacctggtgggccatcctctccacgtctatgaacctcgctggtggactgggccctattctcgccacaattttggcacagtcttactcatggagaagcaccttggctcttagcggcgccctgtgcgtggttgtgtctttcttgtgtcttctgttgatacataacgagccagctgacgttggtttgagaaacctcgatcccatgccatcagaaggaaaaaaaggtagtttgaaggaggaatcaacactgcaggagttgttgctctctccatatctttgggtgttgtctactggatacctggtggtatttggcgtcaagacatgctgcaccgattggggccaattcttcctgattcaggagaaaggacagtcagcactggtgggcagtagctatatgagtgccctggaggtcggcggcctggtcggcagtatagcagctggctatttgagtgatagggctatggccaaggctggactctccaactacggcaacccgaggcatggcttgctgttgttcatgatggctggaatgactgtctctatgtacctgttcagagtgaccgtgaccagcgactcccccaagctctggattctcgtcctcggagcggtgttcggtttttcatcatatggaccgattgcattgtttggcgtaatcgcaaatgaatcagccccgccaaacctttgcggtacatctcacgctattgtgggcctcatggcgaacgtgggaggcttcctggccggcctcccattctcaactatcgccaagcactactcttggagtacggccttctgggtggctgaggtcatatgcgcagcgagcactgcggctttcttcctgctgaggaacattagaacaaaaatgggtagagtgtccaagaaagccgag

SEQ ID NO: 19558 - DNA, 1287 bp, synthetic construct
  misc_feature 1..1287: note = source = /note="Description of Artificial Sequence: Synthetic coding sequence"
  source 1..1287: mol_type = other DNA
atggcagcacagggatacggatattaccggaccgtcatcttctcagcaatgtttggtggatactccctttactactttaaccgaaagactttctcatttgtcatgccttcgctcgtcgaggaaattccacttgacaaggacgatcttggtttcattacctcctcgcaatccgcggcatacgcaatttcaaagttcgtgtccggagtgctcagcgatcagatgtcggcacgatggctgttttcgtccggactgctgctggtcggtcttgtgaatatctttttcgcctggtcgtccaccgtgcctgtgtttgcagccctttggttcctcaatggacttgctcaaggattgggatggcccccatgtggtaaagtgctgcgaaagtggtttgaaccctcacagtttggtacctggtgggcaattctgtcaaccagcatgaacctggcgggagggctgggacctatcctggcaactattctcgcacagtcgtactcgtggagatcgacgctcgcactgtccggagctctgtgtgtcgtggtgtcgtttctgtgtcttttgcttatccataacgagccagcagatgtgggacttcggaacctcgacccaatgccatcagaaggcaagaagggctcacttaaggaggagtcaaccctgcaagaactgcttctgtcaccctacctctgggtgttgtctactggatacctggtggtgtttggagtcaaaacctgttgtactgattgggggcagttcttccttatccaagaaaaaggccagtcggcactcgtgggatcgtcgtacatgtctgcactggaggtgggcgggctggtcggctcaattgctgcaggctaccttagcgatcgtgcaatggcaaaggcggggctttcaaactacggtaaccctcgccatggtctgcttctgtttatgatggcaggtatgactgtgagcatgtacctgttccgcgtcaccgtgacctccgactccccaaaactttggatcctggtgctcggagcagtgtttgggttttcgtcgtacggacctatcgcactgtttggcgtcattgcgaacgagtccgcacctccgaatctgtgtggcacctcccacgccattgtgggactgatggcaaacgtggggggatttcttgcgggtttgcctttcagcaccattgcaaagcactactcgtggtcgacggccttttgggtggctgaagtgatctgtgcggcgagcactgcagcgttcttcctcctccggaacattaggaccaagatgggccgggtgtccaagaaagcagaa

SEQ ID NO: 19559 - DNA, 1287 bp, synthetic construct
  misc_feature 1..1287: note = source = /note="Description of Artificial Sequence: Synthetic coding sequence"
  source 1..1287: mol_type = other DNA
atggctgcacagggctatggatactataggaccgtaatcttcagcgccatgttcggcggatatagcttatactatttcaacaggaagacgttctctttcgtgatgccatccctagtggaggaaatccctttggataaggacgatcttggcttcataacaagtagtcagtctgccgcatatgccattagcaagttcgtgagcggcgtgctgagcgaccagatgagcgcaaggtggctcttttcgtccggattgctgctcgtgggactggtgaacattttcttcgcttggtcctctaccgtgcctgtgttcgccgccctgtggttcctgaacggactcgctcaggggctgggctggcccccttgtggcaaagtcctgcggaagtggtttgagccatcccagtttggtacctggtgggcaattctgtcaacatctatgaacctggctggaggactggggcctattctggcaaccattctggctcagtcatactcctggagaagtacactggcattatccggggctctttgtgtagtggtgtccttcctctgcctcctgctgatacacaatgaaccagcagatgtgggcttgcgaaacttggatccgatgccctcagagggcaagaaaggatcccttaaagaagagtccaccctgcaggaactgcttctgagcccatatctgtgggtgcttagtactggatacctcgtggtgttcggggtcaagacctgctgcaccgactggggccagttcttcctcatccaggagaaaggacaaagtgccctcgtgggcagcagctacatgagtgctttggaggttggaggcctcgtgggctccattgccgccgggtacctgtcagatcgcgctatggccaaagccggactaagcaactatggcaacccccgccatgggctgcttctgttcatgatggccggcatgactgtgtccatgtatcttttccgcgtcacagtaacctcagatagtcctaagctgtggatcctggtgctcggcgccgttttcggcttctcctcctatggaccgatcgctctgttcggcgtgatcgctaatgagtcagcaccaccaaacctgtgcgggacctcccacgcgatcgtcggactcatggcaaacgtcggaggttttttggccggccttccgttctctacaatcgcgaagcattatagctggagcacggccttctgggtggcggaggtgatttgcgcagcctccactgcagcgttctttcttctgcgaaacatacggaccaagatggggcgcgttagcaaaaaggctgaa

SEQ ID NO: 19560 - DNA, 1287 bp, synthetic construct
  misc_feature 1..1287: note = source = /note="Description of Artificial Sequence: Synthetic coding sequence"
  source 1..1287: mol_type = other DNA
atggccgcacaaggctacggatactacagaaccgtgattttctctgcgatgttcggggggtacagcctctactactttaaccgaaaaactttctcatttgtgatgccttcacttgtggaagaaattcccctggataaggacgatcttggttttatcacttcctcgcagtccgcagcttatgcaattagcaagtttgtctcgggcgtcctcagtgatcagatgtcggctcggtggctgttctccagcggtttgttgcttgtggggcttgtgaacatattcttcgcatggtcctctaccgtgcctgtctttgcagcattgtggtttctgaacggacttgcccagggattgggttggccaccatgtggtaaagtgctgcggaaatggtttgagccttcacaattcggaacttggtgggcaattctgtcgacctcgatgaaccttgccggaggactgggaccgatcctggctactattcttgcacaatcatactcttggagaagcacgctggcactttctggagccctttgcgtggtggtgtcatttttgtgtctcttgctcattcacaatgagcccgccgacgtcggactgcgcaaccttgatcccatgccgtcagaggggaaaaagggatcgcttaaggaggaatcgacccttcaggaactgctcctttcgccctacctttgggtcctcagtacgggatatttggtggtgttcggtgttaagacttgctgtactgattgggggcaattctttctgattcaagaaaaggggcagagcgcgctggtggggagctcctacatgtcggcactcgaggtggggggactcgtgggttccatcgccgccggctacctttcggaccgagcaatggcgaaggcaggacttagcaactacgggaacccacggcatggccttcttcttttcatgatggcgggaatgactgtgagcatgtacctgttccgggtcaccgtcacgtccgattcgccaaaactgtggatactcgtgttgggcgcagttttcggattttcatcctatggacctatcgccttgttcggagtcattgctaatgaatcggcaccacctaatctctgcggcacgtcacacgcgattgtgggactgatggcaaatgtgggaggttttcttgcaggcctgcccttttccaccatagcaaagcattactcctggtcaactgcattctgggtggcggaagtcatctgcgccgcctccactgccgccttttttctcctgcgcaatatccggaccaagatggggcgagtgtcgaaaaaggcagag

SEQ ID NO: 19561 - DNA, 1287 bp, synthetic construct
  misc_feature 1..1287: note = source = /note="Description of Artificial Sequence: Synthetic coding sequence"
  source 1..1287: mol_type = other DNA
atggcggcgcaaggatacggctattacaggactgttatattcagtgccatgtttggagggtactcattgtattactttaacagaaaaacattctcttttgtcatgccctcactagtagaagaaatacctctggataaagacgatttgggattcataacatcctcccaatccgccgcctatgccattagcaagttcgtgagcggcgtcctctccgaccaaatgtctgcgaggtggcttttctcatcaggtctgctgctggttgggctcgtgaacattttctttgcctggtcaagcactgttccagtgttcgcagctctatggttccttaacgggctggcccagggcctgggatggcctccctgcggcaaggtactgaggaaatggtttgaaccatcccaatttggaacctggtgggccatccttagtactagtatgaacctggctggcgggctcgggccaatcctggctaccatactggcccagagttactcctggcgatctacattagccctttccggggcgttgtgcgttgttgtgtcatttctttgcctactcctgatccataacgaacctgcagacgtgggcttacgaaatctggaccctatgccgtctgaggggaagaagggaagcctgaaggaggagtctacactgcaggagctcttactttctccttacctctgggtcctgtccactggatatctggtggttttcggtgtgaaaacttgctgtactgactggggccagtttttcctcatacaagagaaaggccagagtgccctggtcgggtcctcctatatgtcagcactggaggtcgggggactcgtcggatcaatcgctgctggatacttgagcgaccgcgcaatggcaaaggcagggctgagtaattatggcaacccacggcacggacttctcctgttcatgatggctggcatgacagtgtccatgtacctttttcgtgtcactgtgactagcgactctcccaaactatggatcctggtgcttggagccgtgttcggcttttccagctacggccccatcgctctgtttggcgtgatcgcgaatgagtctgcacctccaaacctgtgtgggacaagtcatgcaattgtgggtctgatggcaaatgtaggtggctttctcgcaggactgcccttctctactatcgccaaacattactcctggtcgaccgctttttgggtagccgaggttatctgcgcggcatctactgccgcattctttctcctacgtaacatacggaccaagatgggccgcgtgtctaagaaagccgag

SEQ ID NO: 19562 - DNA, 1287 bp, synthetic construct
  misc_feature 1..1287: note = source = /note="Description of Artificial Sequence: Synthetic coding sequence"
  source 1..1287: mol_type = other DNA
atggccgcccaggggtacgggtactaccggaccgtgattttctccgccatgttcggcgggtacagtctgtactactttaatcgtaagacattcagtttcgtgatgccctctctagtggaggaaatccctctcgataaagacgacctgggtttcatcacaagcagccagtccgcagcctatgccatttcgaagttcgtgtctggcgtgctcagcgaccagatgagtgccaggtggttgtttagttcaggcttgctattggtggggctggtgaacattttcttcgcttggtcttctactgttcctgtgttcgccgctctctggttcttgaatggtctggcgcagggtctgggctggcccccatgtggtaaggtcctccgaaaatggttcgaaccctcgcagttcgggacttggtgggcgatcctgagcacatcgatgaatctagccggagggttaggaccaatactggctactatacttgctcaatcctacagctggcggtctacgctggccctgagcggtgcattgtgcgtcgtggttagcttcctctgtctgctactcattcacaacgaacccgctgatgtggggctcagaaacctagaccccatgccttctgaagggaagaaaggatctctcaaggaggagtccacactgcaggaattgctcttatctccgtacctttgggttctcagtaccggctacctcgtggtgtttggagtcaagacgtgttgtaccgattggggacagttcttcctcatccaagagaagggccagtctgcattagtcggctcgagttatatgtcagcactcgaagtaggcgggctggtcgggtcaattgctgcaggctacctgtcagaccgggctatggcgaaagccggattaagtaactatgggaatcctagacatggactcctgctcttcatgatggcaggcatgactgtatccatgtacctctttagagttacggtcacgtctgattcacccaagctttggatcctcgtgctaggggccgtcttcggattttcctcatacggacctatagccttgtttggagtgatcgcaaacgagtcagcccctccaaatctgtgtggcacctcacatgctattgtagggttaatggccaatgttggcgggttcttagccggcttgcccttttcaactatagcgaagcattactcctggtcaacagccttttgggtcgccgaggtaatatgcgcggctagtacagccgcctttttcttgctgcggaacatacgcaccaagatgggccgagtctcaaaaaaggccgag

SEQ ID NO: 19563 - DNA, 1287 bp, synthetic construct
  misc_feature 1..1287: note = source = /note="Description of Artificial Sequence: Synthetic coding sequence"
  source 1..1287: mol_type = other DNA
atggccgctcagggatacggatactacaggactgtcatattctcagccatgttcggggggtatagtctttattatttcaatcggaaaacattctcctttgttatgccatcactcgttgaagagatacctttagataaagatgatctggggtttatcacaagttctcagtctgctgcttatgctatatccaaattcgtttcgggagtactgtctgatcagatgtcagcaagatggcttttttcgagtggacttcttctggtgggacttgtgaacatcttttttgcatggtcttctacagtacccgttttcgctgctctttggtttctcaatgggctagcacaggggcttggatggccaccctgtggaaaagtgctcaggaaatggttcgagccctctcagttcgggacatggtgggcgatcctctccacatcaatgaatctagcaggggggctcgggccaatactcgccactatccttgcccagagttactcttggaggtccacacttgcattatctggggctctttgcgtggtggtgtcttttctgtgcttacttcttatacacaacgaacctgccgatgtagggctgagaaatctcgatccaatgccctccgaagggaaaaaggggtctctgaaagaagaatccacactgcaggaattactcctgtccccctatctttgggtgctttctacaggatatctagtggtattcggagttaaaacttgctgtacagattggggacagttcttcttaatccaggaaaaagggcagagtgcactagtgggatcttcatatatgtcagctctcgaagtgggaggacttgtgggatccatcgccgcaggatatctttcagatcgagcaatggccaaagctgggctttcaaactatgggaatcccaggcatgggcttcttcttttcatgatggcaggaatgactgtatccatgtatctattcagagtaactgtaacttctgattctcctaaactttggatactggtcctgggggctgtttttgggttttcctcatacgggcctattgcccttttcggagtaatcgccaacgaatcggcccccccaaacctctgcggaacttctcatgcaattgtggggttgatggccaacgtcggaggattcctcgcagggcttcctttctctacaatcgcaaagcactattcttggtctactgccttctgggtggccgaagtcatctgtgctgcatccactgctgcatttttcctactcaggaacatccgaacaaaaatggggagagtatcaaagaaagctgaa

SEQ ID NO: 19564 - DNA, 1287 bp, synthetic construct
  misc_feature 1..1287: note = source = /note="Description of Artificial Sequence: Synthetic coding sequence"
  source 1..1287: mol_type = other DNA
atggccgcgcagggttacggctattatcgcaccgtgatcttctcggccatgttcggaggctacagcctctactactttaatcggaaaaccttctcattcgtgatgccttcccttgtggaagaaatcccgctggacaaggacgatctcggtttcatcacgtcatcccaaagcgcggcttacgcaatatcgaagttcgtgtcgggtgtgttgtcggatcaaatgtcggcccgctggttgttctcctcgggactgctcctggtgggactcgtgaatatctttttcgcctggtcctcgactgttccagtgttcgctgcgctgtggttccttaatggcctggcccaggggctgggctggcctccatgcggaaaggtgctgagaaagtggtttgaaccgtcgcaattcggcacctggtgggcaatcctctcgacctccatgaacctggcgggcggactgggtccgatcctggcaactatcctggcgcagtcctactcctggcgctcaaccttggccctgtcgggagctctgtgtgttgtggtcagcttcctgtgcttgctgctgattcataatgagccagccgatgtgggtctgcgaaacctggacccaatgccgtcagaaggtaaaaagggatcgctgaaggaggaatccacgttgcaggaactcctcctgtcaccttatctgtgggtcctgtcaactggatacctcgtggttttcggggttaagacgtgctgcaccgactggggacagttcttcctgatccaagagaagggccagtccgccctggtggggtcatcctacatgagcgcactcgaggtgggaggccttgtgggcagcatcgcagccggctacctgtccgaccgggcaatggccaaagctggactctcaaactacggaaatccgaggcacggactgctgcttttcatgatggcggggatgaccgtgtcaatgtacctctttcgggtcaccgtcactagcgactcgccgaaactctggattcttgtcttgggggcagtttttggattcagctcctacgggccaatcgccctgtttggcgtgattgccaacgaatcggctccccccaacttgtgtggaacctcgcacgcaatagtgggactgatggccaacgtgggaggctttctcgccgggttgccattttcgactatcgctaagcattactcctggtcgactgcattttgggtcgcggaagtcatctgtgcagcatcaactgcggccttcttcctcttgcggaacatccgcaccaaaatgggacgcgtgtcaaaaaaggcggag

SEQ ID NO: 19565 - DNA, 1287 bp, synthetic construct
  misc_feature 1..1287: note = source = /note="Description of Artificial Sequence: Synthetic coding sequence"
  source 1..1287: mol_type = other DNA
atggccgcacagggctatggttactatcggacagtgatattttccgccatgttcgggggatactctctttactatttcaatcggaaaactttttcattcgtgatgcctagcttggtagaagaaattccactggataaggatgacctcgggttcatcactagttcacagtcggccgcttatgcaatctcaaaatttgtcagcggggtgttatctgatcagatgagcgctcgctggctgttttcctcgggcctgctgcttgtcgggctagtcaacattttttttgcctggtcttcaacagtgccggtctttgccgcactctggttcttgaacgggttggcacagggactgggctggcctccctgtgggaaggtgctcagaaagtggttcgaaccatcccagttcggcacttggtgggccatacttagtacatccatgaaccttgccggaggactcggaccaattctcgccaccatccttgcgcaatcttacagctggcgctccacactggcgcttagcggggcactgtgtgtggttgtgtcattcctttgcctcctgctgatccataatgaacctgctgatgtagggttgagaaacttagatcctatgccaagcgaagggaaaaagggctcactgaaggaagagtcaacactacaggagctgctcctgagcccatatctgtgggtcctgtcgacagggtacctggtggtgttcggggtgaaaacctgctgcaccgattggggacagtttttcctaatccaggaaaagggacagtctgcgctcgtgggatcttcctacatgtcggcactcgaggtgggcggtctggtcggttccatagccgccggctatctgagcgaccgggccatggccaaggctggactgtcaaattacggcaatcccaggcacggactgcttctgttcatgatggcgggaatgactgtcagtatgtacctctttagagtgacagtcacttccgattctcctaagctgtggattctggtgctgggcgctgtttttggattctcttcctatgggccaattgcactgttcggcgtgattgcaaatgagtccgccccacctaacctctgtgggacaagtcacgccatcgtgggacttatggccaacgttggcggcttcctagcaggcctgcccttctcaacgattgctaagcactactcgtggagtacagctttttgggtcgccgaagtgatctgtgccgccagtaccgcagccttcttcctcctgaggaatatccgcactaagatgggaagagtgagcaaaaaagcagag

SEQ ID NO: 19566 - DNA, 1287 bp, synthetic construct
  misc_feature 1..1287: note = source = /note="Description of Artificial Sequence: Synthetic coding sequence"
  source 1..1287: mol_type = other DNA
atggccgcacagggatacggctactatcgcaccgtgatcttcagtgccatgttcggggggtactcactgtactactttaacaggaaaacttttagctttgtgatgcctagcctcgtggaggaaatcccgctcgacaaggacgatctcggattcattacgtcgtcccagtccgctgcatacgctatctcaaaattcgtctcaggtgtgctgtcggatcagatgagcgcacgctggctgttcagctcggggctgttgctggttggattggtgaacatctttttcgcctggtcgtccaccgtccctgtgtttgcagccctgtggtttttgaacggactggctcagggactgggctggcctccgtgcggaaaggtgctgagaaagtggttcgagccgagccagtttggaacctggtgggcgatcctgtcgaccagtatgaacctcgcaggaggactgggcccgatactggccaccatccttgctcagtcgtactcatggcgatcaaccctcgccctctcaggagcactttgcgtggtggtgagcttcttgtgccttctcttgatccacaacgagcctgcagatgtcgggttgagaaacctggatccgatgccgagcgaaggaaagaagggttccctgaaggaggagtctaccttgcaagaattgctgttgtcgccctacctgtgggtcctttccacggggtacttggtggtgttcggtgtaaagacctgctgtactgactgggggcagtttttcctcatccaagagaaaggacagtcagccctggtgggcagctcgtacatgtcggccctggaagtcggaggactcgtgggatccattgcagcgggctacctgtcagaccgcgctatggcaaaggcaggcctctcgaattacggcaatcctcgccatgggttgctcctgttcatgatggcaggcatgaccgtgtccatgtatttgttccgggtcactgtgacctctgacagcccgaagctgtggatcctggtgcttggtgcggtgttcgggttcagctcttacggaccaatcgcactcttcggcgtgatcgctaatgaaagcgcaccaccaaacctgtgtggaacttcccacgccattgtgggcctgatggccaacgttggtggctttctggcgggattgcctttctccaccattgcgaagcattattcctggtccaccgccttttgggtggcggaagtgatctgcgccgcgtcgactgcggctttcttcctcctgagaaatatccggacgaaaatgggccgggtatcgaaaaaggcagaa

SEQ ID NO: 19567 - DNA, 1287 bp, synthetic construct
  misc_feature 1..1287: note = source = /note="Description of Artificial Sequence: Synthetic coding sequence"
  source 1..1287: mol_type = other DNA
atggccgcccaagggtatggttactacagaaccgttatcttctccgccatgtttggggggtatagcctgtactactttaatcgtaagactttctccttcgtaatgccttcacttgttgaggagatccctctggacaaggatgacctaggattcataacaagcagtcagtctgctgcctatgcaattagtaaattcgtgagcggagtgcttagtgaccagatgtccgctcggtggctgttttcgtcgggcttgttgctggttgggcttgtgaatatcttcttcgcatggtcatctacagtacctgtgttcgccgctctgtggtttctgaacggacttgctcagggactgggctggccgccatgcggaaaagtcttacgaaagtggtttgaaccctcgcagttcgggacatggtgggctattctttccacgtccatgaatctcgctggcggactgggtcctattctggccaccattctggcacagagctattcttggcggtctacactggccttatccggagccctatgcgttgtagtgtcattcctgtgtctcctattaatccataacgaacccgcagatgtgggcctcagaaatcttgacccaatgcctagtgaaggaaaaaagggaagcctcaaagaagaaagcaccctgcaggaacttctcttgtctccatacttgtgggtgctttctaccggatatctcgtcgtgtttggcgtcaaaacatgctgtaccgattgggggcagttcttccttatccaggaaaaaggacagagtgctcttgtaggttccagctacatgtctgccctcgaagttggcgggctcgtaggttcaatagctgccggctaccttagcgacagagccatggccaaggccggactatccaactacggcaatcctcggcatggactgctgctattcatgatggccgggatgacagtgagtatgtaccttttccgggtcactgtaacctccgatagccccaagctctggatcctggtgctgggagccgtgtttggattttcctcttatggtccgatcgcgttgttcggagtcattgccaatgaaagcgctccacctaacctgtgcggtaccagccacgcaatcgtaggattgatggctaacgtggggggattcctggccgggctgccattcagcaccatcgcaaaacactactcgtggtccactgccttctgggtagctgaggtcatttgtgccgctagtactgccgccttttttttactgagaaatattcggacaaagatgggtagggtgagcaaaaaggcagag

SEQ ID NO: 19568 - DNA, 1287 bp, synthetic construct
  misc_feature 1..1287: note = source = /note="Description of Artificial Sequence: Synthetic coding sequence"
  source 1..1287: mol_type = other DNA
atggccgcccagggttacggttactaccgcaccgttatattcagcgctatgttcggaggatattcgctgtactacttcaacaggaagactttcagctttgtgatgcctagcctcgtagaggagattcccctcgataaagatgatctcgggttcattacaagttcgcagagtgccgcttatgccatttcaaaattcgtgtctggtgtactgtcagaccagatgagtgctcggtggttgttctcctcggggttgttactggttggtctagtcaacatcttttttgcatggtcctcaaccgtaccagtattcgccgccctttggttccttaatggcctggcccaaggccttggttggcccccttgtgggaaggtccttaggaaatggttcgaaccctcccagttcgggacttggtgggccattctgtctaccagcatgaacctcgcaggtgggctgggtcccatcctggccaccatactggcccagtcttactcttggcgttctacacttgcactttctggagctctctgcgttgttgtgtccttcctgtgtctgctgctaatccataacgagccagccgacgtaggcctccgcaatctggacccgatgccgtctgagggtaaaaagggctcactgaaagaggagagcactctgcaggaactgctcctgtccccatatctgtgggtcttaagtacaggatacctggttgtctttggcgtgaaaacctgttgtacagattggggacagttcttcctgatccaggagaagggccagagcgcgttagtagggagtagctacatgagcgctctcgaggtggggggacttgtgggcagcattgctgcgggctacctgagcgatcgcgctatggccaaagccggcctcagtaactacggcaaccccaggcatggcttgctgctcttcatgatggctggcatgacagtatccatgtacctcttcagggtgaccgtgacttccgattctccaaagttgtggatactggtcttgggagccgtgttcggtttctcttcatatggccccatcgcactgtttggtgtgatcgctaatgaatccgctccacctaatctgtgtggcacttcacacgctatcgtggggctgatggctaatgtcggcggcttccttgcagggcttcccttttccaccatcgctaagcactatagttggagcacagctttttgggtagctgaagtgatatgtgctgcctctactgccgctttcttcctgttacgcaacattaggactaagatgggacgggtgtccaagaaggctgaa

SEQ ID NO: 19569 - DNA, 1287 bp, synthetic construct
  misc_feature 1..1287: note = source = /note="Description of Artificial Sequence: Synthetic coding sequence"
  source 1..1287: mol_type = other DNA
atggcggcccagggctacggatactaccgcactgtcattttctcggctatgttcgggggatattcgctgtattacttcaaccgcaagacttttagctttgtgatgcccagcctcgtggaggaaataccgctcgacaaagacgacctggggttcatcacgtcgagccaaagcgctgcatacgctatcagcaaattcgtgagcggggtgctctccgatcaaatgagcgccagatggctgttctcaagcggactcctgctggtcggtttggtgaacatcttctttgcttggtcgtccaccgttccagtgttcgccgccctttggttcctgaacggcctggcacaggggctcggatggccaccgtgtggaaaggtacttcggaaatggtttgaaccctcccagtttggtacttggtgggccatcctttcaacctcaatgaacctggcaggaggactgggtcctatcctggcgactattctggcacagtcctactcctggcgctccaccctcgccttgtcgggggcgctctgtgtggtcgtgtcgtttctgtgcctgctgctgatccacaatgaaccagccgatgtgggactccggaatctggaccctatgccatcagaaggaaagaagggatcgctcaaggaggagtccacccttcaagaactcttgctgtcgccgtacctctgggtgctgtctaccggctacctggtcgtgttcggagtcaagacctgctgcaccgattggggccaattcttcctgatccaggagaagggccagtctgcactggtgggttcctcatacatgagtgcccttgaggtcggaggattggtgggctccatcgcggcgggatacctctcggacagggctatggccaaggcgggactgtcgaactacggcaacccgcgccacggtctgctgctcttcatgatggcggggatgactgtcagcatgtacctcttcagagtgaccgtcacttcggattcacctaagttgtggatcctggtcctgggcgccgtgtttggattctcatcctacggtccgatcgccctcttcggagttatcgccaacgaaagcgccccaccgaacttgtgcggaacctcccatgccatcgtgggacttatggcaaatgtggggggcttcctcgcgggactgccgttctccactattgctaaacattactcatggagcactgcattttgggtggcggaagtgatctgcgcggcttcgaccgccgccttcttcctgctgcggaatatccgaacgaaaatgggccgggtgtcgaagaaggcagag

SEQ ID NO: 19570 - DNA, 1287 bp, synthetic construct
  misc_feature 1..1287: note = source = /note="Description of Artificial Sequence: Synthetic coding sequence"
  source 1..1287: mol_type = other DNA
atggccgctcagggctacggatactataggacagttatcttcagcgctatgtttggtggatactcactgtactattttaatcgaaaaacgttctcattcgtaatgccctctctggtagaggagattccactcgataaagacgatttaggatttatcacctcatcacaatctgccgcctacgccatctccaaattcgtgtcgggagtcctctccgaccagatgtccgcgcggtggctgttttcttctggtttgttgctggttgggctggtaaacattttcttcgcctggtctagtacggttccggtgttcgccgccctctggttccttaacgggctggctcagggcttgggatggccgccatgcgggaaggtcctgcgcaagtggtttgagcccagccaatttggcacgtggtgggctatcctaagcacttcaatgaatctcgccggaggccttggacctatactcgctacaattctcgcacagagctactcctggaggagtaccttagcgctatctggggccttgtgtgtagtggtatccttcttgtgccttctcctcatccataacgaaccagccgacgtcgggttacggaatctggaccccatgccttctgagggaaagaagggttctctaaaagaggaatcaacacttcaagagctcctactttctccctacctctgggtgctatccaccgggtatctggtcgtgtttggggtgaagacctgttgcaccgactggggtcaattcttcttaattcaagaaaagggtcagtcagccctggtaggttccagctacatgtctgctctggaggttgggggcctcgtaggttctatagctgctggctatctgtccgatcgagccatggccaaagccggactcagcaactatggaaacccaagacatgggctgttattgttcatgatggccggcatgaccgtctccatgtatctcttcagagtgacggtgacctccgatagccccaaactgtggatattagtgctaggagcggtttttggattttcatcctacgggccaatcgcattgtttggggtgatcgctaacgagtctgcccctcctaacttgtgcgggacatcccatgcgattgtgggattaatggccaacgtgggaggatttttggctgggctgcctttcagcacaattgctaaacattactcatggagcaccgctttctgggtcgcagaggttatatgcgcggcctctacggcagctttcttcctactccgtaacattaggacaaagatgggtcgagtgtcaaagaaggcggag

SEQ ID NO: 19571 - DNA, 1287 bp, synthetic construct
  misc_feature 1..1287: note = source = /note="Description of Artificial Sequence: Synthetic coding sequence"
  source 1..1287: mol_type = other DNA
atggcagcacaaggatacggatactaccgcaccgtgattttctcggccatgttcggcgggtactcgctttactacttcaaccgcaagactttctcgtttgttatgccctccctggtggaagaaatacctctggacaaagatgatctgggctttatcacttcgtcccaatcggctgcgtacgctatctccaaatttgtctcgggagtcttgtccgaccaaatgtcggcaagatggctgttttcaagcgggcttttgctggtcggattggtgaacattttctttgcctggtcgtcgaccgtgcctgtctttgcagccctctggttcctcaacggtcttgctcaaggcctcggttggcctccctgtggtaaagttctccgaaaatggtttgagccttcgcaatttggaacctggtgggcaattctctcaactagcatgaaccttgccggaggactgggacctatccttgcgaccattcttgcacagtcatactcatggagatcaaccttggcgcttagcggcgcactgtgcgtggtggtgtcgtttctgtgtctgctcctgatccataacgagcctgcggatgtgggactgcgtaaccttgaccccatgccatccgagggtaaaaagggttcgctcaaggaggagagcactctccaagaactcttgctgagcccttacctttgggtgctgtccacgggttaccttgtggtgtttggagtcaagacgtgttgtactgattgggggcagttttttctgattcaagagaaaggccagtcggcactcgtcgggagctcttacatgtcggccctcgaagtggggggactcgtggggagcattgcagccggttacctgtcggacagggcgatggctaaggccggtcttagcaattacgggaatcctagacatggccttctgcttttcatgatggcaggcatgactgtttccatgtacctctttagggtcacggtgacttcggattcgcctaagctgtggattctcgtcctcggagcagtgtttgggttctcttcgtacggaccgattgcactcttcggtgtaattgccaacgagagcgctccaccaaacctttgtgggactagccatgcaatcgttggcctcatggccaatgtgggagggtttctggcagggctgcctttctcgaccatagccaagcattactcgtggtccaccgcgttttgggtggcagaggtgatatgcgcagcatcgacggcagcatttttcctccttcggaatatcaggaccaagatgggacgagtctcaaaaaaggccgaa

SEQ ID NO: 19572 - DNA, 1287 bp, synthetic construct
  misc_feature 1..1287: note = source = /note="Description of Artificial Sequence: Synthetic coding sequence"
  source 1..1287: mol_type = other DNA
atggcagcccaaggctatggctactaccggacggttatcttctcggcaatgttcggaggttattcactgtattatttcaaccgcaaaacattctctttcgttatgccgagcctcgtcgaggaaatccctctcgataaggatgatctgggctttattacgtcgtcccaaagcgccgcgtacgcaatttcgaagttcgtgtccggcgtgttgagcgaccaaatgagcgctcgttggctcttttcctctggactgcttctggtcggcttggtgaatatcttttttgcatggagctcgaccgtacctgtgtttgcagcactgtggtttctgaatggtcttgcgcaaggactgggttggcccccgtgcggaaaagtgctgcgtaagtggtttgaaccctcccagttcggcacctggtgggcaatcctgagcacttcaatgaacctggcaggcggcctcggtccaattctagccacgatcctggctcaaagctatagttggcgtagcaccctcgccctctcaggcgctctgtgtgtggtggtgtcgtttctatgtttgctgctaattcataatgagcccgccgatgtcggcctaaggaatcttgatcccatgccttcagagggaaagaagggaagcttgaaagaggaatctactttgcaggagttgctgctgtcaccatacctctgggtacttagtaccggatacctcgtggtttttggagtcaaaacctgctgcacagattggggccagttctttttgatacaagaaaaaggccagtcggcactggtcggatcctcatacatgagcgccttagaagtcggtggccttgtgggtagtatagccgctggatatctgtccgacagggcaatggctaaggccggactgtccaactatggaaacccgagacacggattgttgctgttcatgatggccgggatgaccgtgtcgatgtatctattccgcgtgacggtgacgtccgattcacccaaactttggattttagttctgggcgccgtgttcggcttttcgtcatacggcccgattgcactgtttggcgtcattgctaatgaaagcgcgccaccaaacctatgcggaaccagccacgccattgtgggactcatggccaatgtcggcggcttcctggccggattgcccttttctaccatcgctaagcattactcatggagtacagcattttgggttgccgaggtaatctgcgccgcctccacggctgctttcttcttattaaggaacatcaggactaagatgggcagagtgagcaaaaaggcggaa

SEQ ID NO: 19573 - DNA, 1287 bp, synthetic construct
  misc_feature 1..1287: note = source = /note="Description of Artificial Sequence: Synthetic coding sequence"
  source 1..1287: mol_type = other DNA
atggcggctcagggttatggttattatcgtacggtaatcttcagcgcaatgttcggaggttatagcctttactatttcaaccgcaaaacctttagtttcgtcatgccaagtctcgtggaggagatacccttggacaaggacgatctgggattcatcaccagttcccagtctgccgcttatgcgatttccaaattcgtaagcggtgttctaagcgaccaaatgtctgccaggtggttgttctcctctggtcttctcctagttggtcttgtcaacatcttctttgcatggagctccaccgttccagttttcgcagctctttggttcctcaatggcttggctcagggtctcgggtggcccccctgcggtaaagtgctacgcaagtggtttgagccttctcagtttggcacctggtgggctatactgtcgacatcgatgaacctggcaggtggcttggggccaattctagccactatcctggcccaatcgtactcgtggcgaagtacgctggctctgagtggcgctctgtgtgtggttgtctccttcctttgcttgcttctaatacataatgagccggccgacgtcggtctaaggaacctggatccaatgccttcggaaggcaagaaaggcagcctcaaagaagagagtactctgcaggagctgcttttgagtccttacctttgggttctgtccactggttacttggtcgttttcggcgtgaaaacctgctgcaccgactgggggcaatttttcctaattcaagagaagggccaaagtgcactggttgggtcctcatatatgtccgcccttgaggtcgggggcctagtggggagtatcgcagctggctacctttccgacagggcgatggcaaaggccggtctctcgaactacggtaatcctcgtcacggcctgttacttttcatgatggctgggatgacagtcagcatgtatcttttcagagtcaccgtcactagtgatagtccaaagctgtggattttggtgctaggtgcggtgttcggttttagtagctatggcccaattgcgctttttggggttatcgctaacgaatctgcgcctccgaacctatgtggtacgagtcacgccatcgtgggattgatggcgaatgtgggtggtttcctggccggcttgcctttttcaactatcgctaagcattattcttggagcactgcattttgggtcgccgaggtcatctgcgccgcatcgacggcggcttttttcctcctccgtaacattcgaacgaagatgggtcgggtctccaagaaagcagag

SEQ ID NO: 19574 - DNA, 1287 bp, synthetic construct
  misc_feature 1..1287: note = source = /note="Description of Artificial Sequence: Synthetic coding sequence"
  source 1..1287: mol_type = other DNA
atggccgctcaagggtacggctattaccggactgtcatcttctcagcgatgttcggcggctatagcctgtactacttcaaccgaaaaacgttctccttcgttatgcccagcttagtagaggagataccactagacaaggacgaccttggttttatcacgtcttctcagagcgcggcttacgctatctcaaaattcgtatcgggtgtcctgtccgaccagatgtcagctcggtggctatttagctctgggcttctcctggttggactggttaatatcttttttgcttggagctcgaccgtccccgtctttgcggctctgtggttcctaaacggactagcccagggtctgggctggccaccttgtgggaaagtcttgaggaaatggttcgaaccttctcaatttggaacatggtgggcaattctgtccaccagtatgaacttggccgggggtttgggacccatcctcgcaactattctggcccagtcctactcctggaggtccacgctagcactgtctggagcgctgtgcgtcgtggtgagcttcttgtgcttgttgctgatccacaatgagcctgccgacgtcggcctgcgaaacctcgatcccatgccatccgaaggaaaaaaggggtcactgaaggaagagtctactctgcaagagctgttgctgtctccgtatctgtgggttctgtcaacaggctacctggtagtgtttggggtgaagacctgttgtactgattggggccagttcttcctgatccaggagaaggggcagtcagctctggtgggtagttcctacatgagcgcccttgaggtgggtggactggtgggcagtatcgccgcaggctatctgtcagaccgggcaatggccaaggcgggcctctctaattatggaaaccccaggcacggactgctcctgttcatgatggcaggaatgacggtctctatgtacttgttcagagtgaccgtgacaagtgattccccaaaactctggatcctggtgctgggggctgtgtttggtttttcatcatatggccctattgccctgttcggagtgatcgctaatgagtccgccccacccaatctctgtggaacaagccatgctatcgtgggcctcatggcaaatgtgggaggattcctcgccggcctgcccttctcaacaattgctaagcattatagttggtcaactgccttttgggtggccgaagttatttgcgccgccagcactgcagcctttttcttactgcgtaacattagaactaaaatgggaagggtctctaaaaaggcagag

SEQ ID NO: 19575 - DNA, 1287 bp, synthetic construct
  misc_feature 1..1287: note = source = /note="Description of Artificial Sequence: Synthetic coding sequence"
  source 1..1287: mol_type = other DNA
atggccgctcagggatacggatattaccggacagtcattttctccgcgatgttcggaggatattctctgtattatttcaatcggaaaactttcagttttgttatgcccagcctagtggaggaaattccgttggacaaagatgatcttggctttatcacctccagccagtctgccgcctacgctatctccaaatttgtgagcggggttctttctgatcaaatgagcgctcggtggttgttctcgtcaggactgctgctcgtgggtcttgtgaacatatttttcgcctggtccagtacagtccccgtgtttgccgcgctgtggttcctcaatggattagcccagggacttggctggcccccatgtgggaaagtgctgcgaaaatggtttgagccaagtcagtttggaacttggtgggcgatcttgagcacctcaatgaatttggcaggcgggctcggcccgatcttggcgacgattctggcacaatcctattcgtggcgtagtactctggcactgtccggcgctttgtgtgtggtggtgtcttttctctgcttgttgcttatacacaacgaacccgctgacgtaggcctccggaacctcgaccccatgcccagcgaaggcaagaaaggaagcctaaaggaggagtcaacattgcaggagctcctgctcagtccgtacttatgggtccttagtactgggtatctggtggtgtttggtgtcaaaacttgttgtaccgattggggacagtttttcctgatccaggagaaaggccagtctgcgcttgtcgggtccagctatatgagtgccctggaagtcgggggtctggtcgggagcatcgccgccggctacttgtcagaccgcgccatggcgaaggcaggcttatccaattatggcaacccccgtcatggactgttgctgttcatgatggccggaatgacagtgtctatgtatttgtttagggtgacagtaaccagcgattctccaaaactgtggatcctcgtactcggtgccgtttttggattttccagttatgggcccattgcactttttggcgtcattgcaaatgaatccgcaccacctaatctttgcggtaccagccatgcaatcgtgggtttgatggcaaatgtgggtgggtttcttgctgggctgccattttcaacgattgccaagcactattcttggtctacagctttttgggtggcagaggtaatttgcgccgcgagtacagcagctttttttctgctgcgcaatatccgaacaaaaatggggagagttagcaaaaaggccgaa

SEQ ID NO: 19576 - DNA, 1287 bp, synthetic construct
  misc_feature 1..1287: note = source = /note="Description of Artificial Sequence: Synthetic coding sequence"
  source 1..1287: mol_type = other DNA
atggcggcgcaaggttatggttattatcgaacggtaatattttcggcgatgtttggtggttattcgctatattattttaatcgaaaaacgttttcgtttgtaatgccgtcgttagtagaagaaataccgttagataaagatgatctaggttttataacgtcgtcgcaatcggcggcgtatgcgatatcgaaatttgtatcgggtgtattatcggatcaaatgtcggcgcgttggctattttcgtcgggtctactattagttggtttagttaatatattttttgcgtggtcgtcgacggtaccggtatttgcggcgctatggtttctaaatggtctagcgcaaggtttaggttggccgccgtgtggtaaagtactacgtaaatggtttgaaccgtcgcaatttggtacgtggtgggcgatactatcgacgtcgatgaatttagcgggtggtttaggtccgatactagcgacgatactagcgcaatcgtattcgtggcgatcgacgctagcgttatcgggtgcgctatgtgttgttgtatcgtttttatgtctactactaatacataatgaaccggcggatgttggtctacgtaatctagatccgatgccgtcggaaggtaaaaaaggttcgctaaaagaagaatcgacgttacaagaattactactatcgccgtatttatgggttttatcgacgggttatttagtagtttttggtgttaaaacgtgttgtacggattggggtcaattttttctaatacaagaaaaaggtcaatcggcgctagtaggttcgtcgtatatgtcggcgctagaagtaggtggtttagttggttcgatagcggcgggttatctatcggatcgagcgatggcgaaagcgggtttatcgaattatggtaatccgcgacatggtttattactatttatgatggcgggtatgacggtatcgatgtatctatttcgtgttacggttacgtcggattcgccgaaactatggatattagtattaggtgcggtatttggtttttcgtcgtatggtccgatagcgttatttggtgttatagcgaatgaatcggcgccgccgaatttatgtggtacgtcgcatgcgatagttggtctaatggcgaatgtaggtggttttttagcgggtctaccgttttcgacgatagcgaaacattattcgtggtcgacggcgttttgggtagcggaagttatatgtgcggcgtcgacggcggcgttttttttattacgaaatatacgtacgaaaatgggtcgtgtttcgaaaaaagcggaa

SEQ ID NO: 19577 - DNA, 1287 bp, synthetic construct
  misc_feature 1..1287: note = source = /note="Description of Artificial Sequence: Synthetic coding sequence"
  source 1..1287: mol_type = other DNA
atggctgcccagggatacgggtattatcgcactgtgattttttccgcaatgttcggcggctattccctgtactattttaatagaaagaccttcagcttcgtgatgccttcactggttgaggagattcctctggacaaggatgacctgggctttattactagctcgcaatctgctgcttatgccatctcaaaatttgtctcaggagtgctaagcgaccagatgagtgcccgctggctattcagcagcgggctcctgctggtgggtttggtgaacatttttttcgcctggtcatccacggtgcctgtttttgccgctctgtggttcttaaatgggttagctcaggggctcggatggcctccttgtggtaaggttctgagaaagtggttcgagcctagtcagtttggtacatggtgggccatcctatccacaagcatgaatcttgcaggcggactcggccccatactggcaaccatccttgcccagtcctattcctggagatcaacccttgccctgtcgggcgctctctgcgtggttgtgtctttcttgtgtctgcttctgatccacaacgagccggcggatgttggtcttagaaatctagatccaatgccttctgaagggaaaaagggctcactgaaggaagaatctactttgcaggaactcctgttgagtccatatctgtgggtcctaagcactgggtacctcgtggttttcggggtaaaaacgtgctgcaccgactggggccagttttttctaatccaggaaaagggacagtcagccttggtcgggtcctcttacatgagcgccttagaggtaggtggccttgttgggtccatcgcagcgggctacctttcggacagagctatggccaaggcagggctgtccaactacggcaacccccggcatgggctgctgttattcatgatggcaggtatgacggtctccatgtacttgttccgagtcaccgtcacttctgatagcccaaagctttggattctggtgttaggagccgttttcggcttcagctcatatggaccgatcgcattgtttggagtcatcgccaatgaatctgctccccctaatttgtgcgggacctctcacgcaatcgtgggcctgatggccaatgttggcggattcctagctggccttcctttctcaacaatcgccaaacactactcttggtccactgcgttctgggtggccgaagtcatctgcgcagcatctactgctgcgttcttccttctgcggaatatccgcacaaagatgggccgagtttcaaagaaggccgag

SEQ ID NO: 19578 - DNA, 1287 bp, synthetic construct
  misc_feature 1..1287: note = source = /note="Description of Artificial Sequence: Synthetic coding sequence"
  source 1..1287: mol_type = other DNA
atggcagcacagggttatgggtattatcgaacagtaatctttagcgctatgttcggaggctactctctttactactttaataggaagactttctccttcgtgatgcccagccttgtagaggagattcctcttgataaggatgacttggggttcattacttcctcccaatccgccgcgtatgccatcagcaagtttgtgtctggagtgctctccgaccagatgtctgcaagatggctcttttcttcaggtctcctcctggttgggctggttaacattttcttcgcctggtcttctacagtgccagtgttcgccgcgctgtggtttctcaatggccttgctcagggtttaggttggcccccttgtggaaaggttttgagaaagtggttcgagccgagccagtttgggacatggtgggcgatactgtcaacctcaatgaacttggcagggggcttgggcccgattttggccactatcctggcccaatcgtacagttggcggtccacccttgcactcagcggcgcgttgtgcgtggtggtctctttcctttgtcttctgctaatacataacgaaccagccgacgtagggctccggaatctcgaccccatgccctcagagggtaaaaaggggagcctgaaggaagagtccacacttcaggaattgttgctgtcgccatatctgtgggtcctaagcacaggctacctggtagtgttcggggtcaaaacgtgttgtaccgactgggggcaattcttcctgatacaagagaaaggtcagagcgcgctcgtaggaagttcatatatgtcagccctcgaagtgggcgggctggtgggctctatcgccgccgggtacctaagcgacagagctatggctaaagcaggactgagtaattacggtaatccccgccacgggctgctcctgttcatgatggccggtatgaccgtgtccatgtatctatttagagtgacagtcacttccgattccccaaagctgtggatccttgtgctgggggccgtcttcggcttttcctcctacgggccgatcgctctctttggagttatagcaaacgaaagtgctccacctaacctgtgcgggacatcgcacgccatcgtggggctaatggccaacgttggcggttttctcgccggactcccattttcgacgatcgcaaagcactatagctggtccacagccttctgggtggctgaggtgatctgtgccgcgtcaacagcggccttcttcctgctgaggaacataagaacaaaaatgggccgggtgagcaagaaggctgag

SEQ ID NO: 19579 - DNA, 1287 bp, synthetic construct
  misc_feature 1..1287: note = source = /note="Description of Artificial Sequence: Synthetic coding sequence"
  source 1..1287: mol_type = other DNA
atggctgctcaaggatatggatattatcgaacagttattttctctgctatgtttggtggatattcactttattattttaatagaaaaacatttagttttgttatgccatcattagttgaagaaattccacttgataaagatgatttaggtttcattacaagttctcaaagtgcagcttatgctatttcaaaatttgtcagtggagtacttagtgatcaaatgagtgctagatggttatttagttcaggacttcttttggtggggcttgttaatatattctttgcatggtcttctactgttccagtttttgcagcattatggtttcttaatggattagcacaaggattagggtggccaccttgtggaaaggttctaagaaaatggtttgaaccatctcaatttggaacttggtgggcaattctttcaacgtcaatgaatttagcaggagggttaggtccaattcttgcaacaattttagctcaaagttacagttggagatcaacacttgcattatctggagctttatgtgttgttgtttcgtttttatgtcttttacttattcataatgaaccagcagatgttggattaagaaatttagacccaatgccatcagaaggaaaaaaaggatctttaaaagaagaatctactcttcaagaacttttattaagtccatacttatgggtcttatcaactggatatttagtagtttttggagttaaaacttgttgtacagattggggtcaatttttccttattcaagaaaaaggtcaatctgcattagttggatctagttatatgagtgctcttgaagttggaggacttgttggatcaattgcagctggttatcttagtgatagagcaatggcaaaagcaggactttcaaattatggtaatccaagacatggactattattatttatgatggcaggtatgacagtttctatgtatctttttagagtaacagttacttctgattcaccaaaattatggattcttgttttaggagcagtttttggattcagtagttatggaccaattgcactttttggagtaatagcaaatgagagtgcacctccaaatctatgtggtacttcgcatgcaattgttggtttaatggctaatgttggaggatttttagcaggacttccattttcaacaatcgcaaaacattattcatggtctactgctttctgggttgcagaagttatttgtgctgcatcaactgcagctttttttttattaagaaatattagaactaaaatgggacgagtatcaaaaaaagcagaa

SEQ ID NO: 19580 - DNA, 1287 bp, synthetic construct
  misc_feature 1..1287: note = source = /note="Description of Artificial Sequence: Synthetic coding sequence"
  source 1..1287: mol_type = other DNA
atggcagctcagggctacggatattacaggactgttatcttttctgctatgttcggaggctacagcctctactatttcaaccgtaaaacattctctttcgtgatgccaagcctcgtcgaagagattcctctggataaggacgacctgggcttcatcaccagtagccagtcggctgcatatgccatttctaaatttgtatctggagtcctgtccgatcaaatgtcagcaaggtggctcttctcctcaggcctgctgctggtggggcttgtcaacattttctttgcctggtcgtctaccgttcctgtcttcgcggctctgtggtttctgaacggcctggctcagggcctggggtggcccccatgtggtaaggtcctgcgcaaatggttcgagccgtcccagttcggaacgtggtgggccatcctgagcacatctatgaacctggcgggcggtttgggaccaattctggccactatcctcgcgcagtcctactcatggagaagtaccttggccctgagtggcgcactgtgcgtcgtcgtgtcattcctgtgtttgttactgattcacaatgagccagccgatgtggggctgcggaacctggatccaatgccgagtgaagggaaaaagggctcccttaaagaggaatccaccttgcaagagttactgttgtcaccgtatctgtgggtcctaagcactggttacctggtggtttttggggtgaagacatgctgcactgactggggtcaattcttcctaatccaggagaaagggcagtcagcgctggttggatctagttacatgtcggctttggaggtgggaggtttggtgggtagcattgccgccggctatctgtcagacagggcaatggcaaaggctggtctgtccaactacgggaatcctcggcatggcctccttctattcatgatggctgggatgacagtgagcatgtatctgttcagggttactgtgaccagcgactctcccaaactatggatcctcgtcctgggggcggtgttcgggttctcgtcatacggaccaatagcattgttcggcgtgatcgccaatgagtctgctccgcccaatttgtgtggcacaagccacgccatcgttgggctgatggcgaatgtaggaggcttcctagcaggactgcccttcagcacgattgccaaacactattcatggagtaccgcattctgggtggctgaagtgatctgcgccgcctccaccgccgcctttttccttctcaggaacatacgcaccaaaatggggcgcgtgagtaagaaagccgag

SEQ ID NO: 19581 - DNA, 1287 bp, synthetic construct
  misc_feature 1..1287: note = source = /note="Description of Artificial Sequence: Synthetic coding sequence"
  source 1..1287: mol_type = other DNA
atggcagcacagggatacggatattaccgcacagtaatattttcagccatgtttggcgggtactcactttattactttaatagaaaaacctttagttttgtgatgccctccctggttgaagagatccccctcgataaggacgacctgggcttcatcacttcttcccaatctgccgcctacgccatctcaaagttcgtgtctggcgtcctgtctgatcagatgtcagctcggtggcttttctcatcagggctcctgcttgtgggtctggtgaatatctttttcgcttggagttccaccgtccccgtgttcgctgctttgtggttcctcaatggcctcgcgcagggacttgggtggccgccctgcgggaaagttttgagaaagtggttcgaacctagccagtttggtacctggtgggcgattctgtctacctcaatgaatctggctggcggtctcggccccatcctggccacaatcctggctcagtcatatagctggagatctactttggctctcagcggtgcactgtgtgtggtggtctctttcttgtgcttgctcctgatccacaatgagccggccgacgttggtctgcgcaatctggacccgatgccttccgagggtaagaaaggctcactcaaggaggaatctaccctgcaagaattgctgttgagcccttatctgtgggtgctcagcacaggctacctcgtcgtgttcggagttaagacctgctgtaccgattggggtcagttttttctcatccaggaaaagggccaatctgctctggtggggagctcctatatgagcgcccttgaagtgggcggactcgtggggtccatagctgctggttacctttccgatcgagccatggcgaaagcggggctgagcaactacggaaacccacggcacggactgctgctgtttatgatggctgggatgactgtgagtatgtatctgttcagagtgacagtgacgtcagacagcccaaagctgtggatcctggttctgggtgcggttttcggcttttcttcttatggcccaattgcccttttcggagttatcgccaacgaatcagcccccccgaatctgtgcggaacctcccatgcgattgtggggctcatggccaacgtcggcggatttctggccgggctgcccttctctaccatagctaaacactattcctggagtacagccttctgggtcgcggaagtcatatgcgccgcatctacggccgccttcttcctgttgaggaacattagaactaaaatggggagagtatccaagaaagctgaa

SEQ ID NO: 19582 - DNA, 1287 bp, synthetic construct
  misc_feature 1..1287: note = source = /note="Description of Artificial Sequence: Synthetic coding sequence"
  source 1..1287: mol_type = other DNA
atggctgcccagggttacggctactataggacggtaatcttctctgccatgtttggcggatactcattatattacttcaatagaaagaccttcagctttgttatgccgtccttggtggaggaaattcctttggataaagacgatcttgggttcatcacctcatcacagtctgccgcttatgcgatcagtaaatttgtgagcggggtgttgagcgatcagatgtcagctcgctggctgttttcctctggcctgttgttggtgggcctggtgaacatattttttgcctggtccagcacggtccccgtgtttgccgctctttggtttctgaacggactggctcaggggttggggtggcctccctgcggtaaggtattgcgcaaatggtttgagccatcccagttcggaacttggtgggccattttgagtactagcatgaatcttgccggggggctgggccccattctggctacaattttagcacagtcatattcctggagatctacattggccttatctggagcactttgtgtcgttgttagctttctatgcttactgctgatccacaatgagcctgccgacgtggggttgaggaacctggatccaatgccttctgaaggtaaaaagggatctctgaaagaggagagtacacttcaagaactgttgttgtcaccgtacctgtgggtcctctccacgggctatctcgtagttttcggagtaaaaacgtgctgcactgattggggtcaatttttcctaatccaggagaaggggcagtcagctctggttggctctagttatatgagcgccctggaggtgggcgggctggtgggcagcattgccgcaggatatctgtccgatagagccatggccaaagctggcctgtctaactatggcaatccccgccatggcttactgcttttcatgatggccggcatgactgtgagcatgtacctcttcagagtcaccgtaacgtccgactcaccgaaactctggatcctcgtgttgggagctgtgtttggcttttctagttacggaccaattgccctcttcggtgtgatcgcaaatgaaagcgctccgccgaacctgtgcggaactagtcacgccatcgttgggctaatggcgaatgtcggtggattccttgcaggcctcccctttagtactatagctaagcactatagctggagcactgccttctgggttgccgaggtgatctgtgccgccagcactgccgctttcttcctgctcaggaatattagaacaaagatgggacgcgtgtctaaaaaagccgag

SEQ ID NO: 19583 - DNA, 1287 bp, synthetic construct
  misc_feature 1..1287: note = source = /note="Description of Artificial Sequence: Synthetic coding sequence"
  source 1..1287: mol_type = other DNA
atggcggcacagggttacggctactacaggactgtgatcttttccgcaatgtttggaggttactcactttactacttcaacaggaaaactttcagctttgttatgccaagcctggtggaagaaattcctcttgataaggatgatctgggattcatcaccagctcgcagtcggcagcatacgctatcagcaaatttgtctccggcgtgctgtcagatcagatgtccgcccgctggctttttagctcaggactccttctggtaggactcgtcaacatcttttttgcatggtcctcgaccgtcccagtgttcgcagcactgtggtttttgaacggactggcacagggactgggctggcctccttgtggtaaggtgcttagaaaatggtttgagccatcgcaatttggtacctggtgggccattctgagcacctcgatgaatcttgccggcggtctgggcccgatactcgctactatcctggcgcagagctacagttggagatccacccttgccctttcaggtgcactttgcgtggtggtgtctttcctttgtctcctcctgatccacaacgagcccgcagatgtgggactgagaaacttggatccaatgccctccgaaggcaagaagggatcgctgaaggaggaatccactctgcaggagctgctgctgtccccatacctgtgggtgctctcgactggatacctcgtcgtttttggagttaagacttgctgtaccgattggggtcaattctttttgattcaagaaaaaggacaaagcgctctggtcggcagctcctacatgtcggcactggaggtcggaggtcttgtgggcagcatcgcagcaggatatctctccgaccgagcaatggcaaaggctggactttcaaactacgggaacccacgtcatgggctgttgctctttatgatggcaggaatgactgtgagcatgtacctcttccgcgtgactgtcactagcgattcaccaaagttgtggattctcgtgctcggtgccgtctttggtttttcgagctacggaccaattgcactttttggcgtgatcgcaaacgagtctgcaccacctaatctgtgcggaacgtcccacgcaattgtggggctcatggcaaacgtgggaggattcctggccggactgcctttcagcaccattgcgaagcattactcatggtccaccgcattctgggtggcagaggtgatatgtgccgcatccactgcggcgttcttcctgctgcggaatatcagaaccaaaatgggtagggtgtccaagaaggcagag

SEQ ID NO: 19584 - DNA, 1287 bp, synthetic construct
  misc_feature 1..1287: note = source = /note="Description of Artificial Sequence: Synthetic coding sequence"
  source 1..1287: mol_type = other DNA
atggccgctcaaggctatggttattatagaactgtaatctttagcgcaatgtttggtggatacagtctatattattttaacaggaagacgttctcttttgtgatgccctcactggtcgaggagatccctcttgacaaagatgatctgggttttataacttcctcacagtcagctgcatatgccatatctaaatttgtgagtggcgtactgtccgaccagatgtcagctcgatggttgttcagtagcggtctcttgcttgtggggctagttaacattttcttcgcttggagctctacagtccccgtgttcgccgcgctctggttcctgaatggtctggctcagggactggggtggcccccttgcggcaaagtgcttaggaagtggttcgaaccatcccagtttgggacttggtgggcgatcctcagcacctctatgaacctcgcagggggactgggccccatactggcgaccattttagcacagtcctatagctggcgaagcacactggcgctatctggagctctgtgcgtggtcgtcagctttctgtgccttttgctgatccacaatgagccagcagatgtcggcttgcgtaatctcgaccctatgcccagcgagggcaagaagggctcattgaaagaagaaagtacactgcaggaactgttgctgtctccgtacctctgggtactcagtacaggttatctggttgttttcggtgtgaagacgtgctgcactgactgggggcagttctttctgattcaagagaagggacagtctgcactggtagggtcttcctacatgagcgcccttgaagtcggcggactggtgggctctattgcggcgggttacctctcggaccgggccatggctaaagccgggctgtctaactacggaaaccccagacatggcttgttattattcatgatggccgggatgaccgtttctatgtatctgtttcgggtgacagtgacttccgattctccaaagctgtggatcttagtcctgggcgctgtcttcggattttcaagctacggacccattgcactgttcggagtcatcgctaatgaaagcgctccacccaacctgtgtgggacgtctcatgcgatcgtcggccttatggccaatgtaggcggattccttgccggcttgccattcagcactattgctaagcattactcttggtccacagccttctgggtcgcggaagtgatttgtgctgcaagtacagcagccttttttctgctccgtaacatccgcacgaagatgggccgggtatcaaagaaggccgaa

SEQ ID NO: 19585 - DNA, 1287 bp, synthetic construct
  misc_feature 1..1287: note = source = /note="Description of Artificial Sequence: Synthetic coding sequence"
  source 1..1287: mol_type = other DNA
atggctgcccagggctacggatattaccgcaccgtgatcttttcagcaatgttcggaggatactccctctactactttaaccgtaagactttttcgttcgttatgccatcgcttgtggaagaaataccactcgataaggacgacctgggattcatcactagctcccagtcggccgcatacgccatctcgaagttcgtgtcgggggtgctgtcagatcagatgtcggcgcgctggttgttctcatcgggattgctgctcgtcggtctggtcaatatcttcttcgcgtggtcatccaccgtgcccgtgttcgcagccctctggttcctcaatggactggctcagggtctgggttggccgccgtgtggaaaggtgctgcgcaagtggttcgagccctcccaattcggtacttggtgggcaatcttgagcactagcatgaacctggccggcggactgggaccaatcctggccaccatcctggcccagagctatagttggagatcaaccttggcgttgtcgggtgccctttgcgtggtggtgtcgttcctgtgtctgctgcttatccacaacgaacctgcagatgtgggactgagaaatctggatccgatgccgtccgaaggtaagaaaggatccctgaaggaagaatcaactctgcaggagctgctgctctcgccatacctgtgggtgctttctacggggtacctggtggtgttcggagtaaagacctgctgcactgactggggacagttttttctgattcaagagaaaggtcagtcagccttggttggttcgtcgtatatgtccgctctcgaagtgggaggactcgtcggtagcatcgcggctgggtacctctcagaccgcgcaatggcaaaggctggcctgagcaactacgggaacccaagacacggtctgctgctgtttatgatggccggtatgaccgtctcaatgtacctcttcagagtgactgtcacttcagattctccgaaactctggattctcgtgctgggagctgtattcggattttcctcgtatgggcctattgctcttttcggcgtcatcgccaacgagagcgcgccgcctaatctttgcggcacctcacatgccatcgtgggcctgatggctaacgtcggcggattcctcgccggacttccgttctccactatcgccaagcactactcgtggagcaccgctttctgggtcgccgaagtcatctgtgccgcgagcactgccgccttctttctgctgaggaacatcagaaccaagatgggacgggtgtcaaagaaagccgag

SEQ ID NO: 19586 - DNA, 1287 bp, synthetic construct
  misc_feature 1..1287: note = source = /note="Description of Artificial Sequence: Synthetic coding sequence"
  source 1..1287: mol_type = other DNA
atggcagcccagggttatggatactacaggacagttatattcagtgctatgtttggaggatacagcctctactacttcaatcgaaaaacatttagctttgttatgccgagtttagtcgaggagatcccgcttgacaaagatgatctcggatttattacaagtagccagtcagctgcttatgctatctccaaatttgtcagcggggttctgtctgatcagatgagcgctagatggttgttctccagcggactcctgttggtgggcctcgtcaacatcttcttcgcgtggtcttccacagtgccggtattcgcagcgctgtggtttctgaatgggctggcccaaggactcggttggcctccctgtggcaaggtgctccgcaaatggttcgagccttctcagttcggaacatggtgggccattctgagcacctctatgaatttggcgggggggctcggccccatactggcgaccatcctggcccagtcgtactcatggcggagcactttggcattgtcgggggcactgtgtgtggtggtttctttcctctgtctccttctgatccacaacgagcctgcggacgtggggttgcgaaatctcgacccgatgccatcagaggggaaaaagggatctttgaaggaggagtctacgctgcaggagctgctgctgagcccctatctctgggtgttgtctacaggttatctggtagtatttggcgttaagacctgctgcactgattgggggcagttctttctcattcaggagaaaggtcagagtgctctggttggtagtagctatatgtcagcactggaggtggggggcctcgtagggtccattgcagccggatatctgagcgacagagcgatggcaaaggccggactgagcaattacggcaatcctaggcatggcttattgctctttatgatggccgggatgaccgtgtccatgtatctttttagagtcaccgttacctctgattccccaaaactttggatcctggtcctcggggccgtatttgggttctcaagttacggtcccatcgccctttttggtgttattgccaatgagtccgcccctcccaatctgtgcggtacatcccacgcaatcgtgggtctgatggccaacgtcggggggtttctggctggcctgcctttctcgacaatcgccaaacattatagctggtcaacagccttctgggttgctgaagtaatttgtgctgcaagtactgcagccttctttctactaagaaacatccgcactaagatgggtcgcgtgagcaaaaaagcagag

SEQ ID NO: 19587 - DNA, 1287 bp, synthetic construct
  misc_feature 1..1287: note = source = /note="Description of Artificial Sequence: Synthetic coding sequence"
  source 1..1287: mol_type = other DNA
atggccgctcagggatacggatactaccggaccgtgattttctcggctatgttcggaggctactcgttgtactacttcaatcgcaagactttctcattcgtgatgccaagcctcgtggaagaaatcccactcgacaaggacgacctcggattcattacttcctcgcagtccgcggcttacgcgatctcgaaattcgtgtccggtgtgctctccgaccagatgtcggcccgctggctgttctcatcaggcctgctcctcgtgggactcgtcaatatcttcttcgcatggtcgagcactgtgccggtctttgcagccctgtggttcctgaacggactggcccagggtctgggatggcctccttgcggaaaagtgctcaggaaatggtttgaaccgtcccagttcggcacttggtgggctatcttgtctacctcaatgaacctggcaggcggcctgggcccaattctcgccaccatcctggcgcagtcctacagctggcggtcgaccctcgccctgtcaggtgccttgtgtgtcgtggtgagcttcctttgcttgttgctgattcataacgagccagcagacgtgggactgcggaacctggacccaatgccttccgaaggaaagaaaggaagtcttaaagaggagtcgaccctgcaagaactcctgctgtcgccatatctctgggtgctctcgacgggctacctcgtggtgttcggggtaaagacttgctgcaccgactggggacaattcttcttgatacaagaaaagggacagtccgcgctggtgggctcgagctacatgtccgccctcgaggtgggcggcctggtcggctccatcgcggcaggatacctgtccgaccgcgccatggccaaggccggactgagcaattacggcaacccaagacatggattgctgctcttcatgatggccggcatgaccgtttcgatgtacctgttccgcgtcaccgtgacctccgattcgccaaagctgtggatcttggtgctcggggctgtctttggcttctcgtcctacggcccgatcgctcttttcggagtcattgccaacgagtccgcgcctccgaatctgtgcggcacctcacacgccatcgtgggactcatggcgaatgtgggcggattcttggcgggtctgccgttcagcactatcgcgaagcattactcttggtcaactgccttctgggtagctgaagtcatctgtgccgcatcgactgccgcctttttcctcctgagaaatatccggacgaagatgggaagagtcagcaagaaggcggaa

SEQ ID NO: 19588 - DNA, 1287 bp, synthetic construct
  misc_feature 1..1287: note = source = /note="Description of Artificial Sequence: Synthetic coding sequence"
  source 1..1287: mol_type = other DNA
atggcagcacaaggatacggatactacaggaccgtcattttctcagcaatgttcggagggtactcgctttactacttcaaccggaaaactttttcctttgtgatgccctccctggtggaggagatccctcttgataaggatgacctggggttcatcacgtcgagccagtccgctgcatacgccatttccaagtttgtctcgggcgtgctgtcggatcaaatgtccgcaagatggcttttttcgtcgggtctgcttttggtcggacttgtgaacattttcttcgcatggtccagcactgtgcctgtgttcgccgcattgtggtttctcaatggtcttgcccaaggcttgggctggccaccttgtggtaaggtccttcgcaaatggttcgagccttcacagtttggtacctggtgggcaatcctttccacttctatgaacctggcagggggactcggtccgattctcgcgaccattttggcgcagtcgtacagctggcgcagcactctggcactgtcaggagcactttgtgtggtggtgtcctttctttgtctgctgttgatccataacgaacccgcggatgtgggacttcgaaatctggacccaatgccctcggaaggaaaaaagggatcactcaaagaggaatccacgttgcaggagctgcttctgtcgccttacttgtgggtcctctcgaccgggtatctcgtggtgtttggtgtcaagacctgttgtaccgattggggccaattcttcctgattcaggagaaagggcaatccgcgcttgtgggctctagctacatgagcgcactggaggtgggcggtctggtcggttccattgcagctgggtacctctcggatcgcgcgatggcaaaggcggggctgtcgaactacggtaatccaagacatggccttctgctgtttatgatggccgggatgaccgtcagcatgtacctcttccgtgttactgtcacctcagactcccctaagctgtggattctcgtgcttggagcagtgtttggtttttcctcgtacggtcctatcgccctgttcggcgtgattgccaacgaatccgcacccccaaacctttgcggaacctcgcatgcaatcgtcggcctgatggccaatgtcggtggctttctcgctggcctcccattttcgacgatcgcaaagcactacagctggtccaccgcattctgggtggccgaggtcatttgtgctgcctcaaccgcagccttctttctgcttcgcaatatacgaactaagatgggtcgggtgtcaaaaaaggccgaa

SEQ ID NO: 19589 - DNA, 1287 bp, synthetic construct
  misc_feature 1..1287: note = source = /note="Description of Artificial Sequence: Synthetic coding sequence"
  source 1..1287: mol_type = other DNA
atggccgcacagggctacgggtactaccggaccgtcatatttagcgcaatgtttggcggctattctctatactatttcaacagaaaaacgttttcctttgttatgccttcattggtagaagaaattcctttagacaaagacgatttggggtttataacttcgtcacaatctgccgcttatgccatctccaaattcgtttctggcgtcctgagcgatcagatgagtgcaaggtggctgttcagctcggggttattgcttgtgggcctggtgaacatctttttcgcctggtccagtaccgtcccagtcttcgcggccctttggttcttaaatgggctggcacagggattgggatggcccccctgtgggaaggttctgcgaaagtggttcgaaccatcccagttcggcacatggtgggccatcttgagcactagcatgaacctggcaggcggactcgggcccatactggcaaccattctggcccagtcctatagctggcggtcaaccctggcactctctggcgcactgtgcgtcgtggtaagcttcttgtgtctccttctaatccataacgagccagctgatgtcggcttaaggaacctcgatcccatgccgagtgaaggtaaaaagggatcgctgaaggaagaatcaaccctgcaggaactgttactgagcccttacctgtgggtcctttctaccggctacctagtcgtgttcggggtcaagacctgctgcacagactggggccagtttttccttatccaggaaaaagggcaaagcgcccttgtgggaagctcctacatgtccgccttagaggttggagggttggttggcagtatcgcagcgggttatctatcagaccgggctatggcaaaggctggcctgtccaattatgggaaccccaggcatgggctgcttctctttatgatggcaggtatgaccgttagcatgtatctgttccgagttacggtgacgagcgacagtccgaagctctggatcctcgtgctcggtgccgttttcggattctcatcctatggccctattgctctattcggggtcatcgctaacgagtccgcgccccccaacctgtgcggcacatcccacgctatcgtcggcctgatggcaaacgtagggggatttctggcgggtttaccatttagtacaattgccaagcactactcctggtccactgcgttttgggtggcggaggtaatctgtgctgcatccacggcagccttctttctgctccggaacatccgaacaaaaatgggtcgagtgtccaagaaggcagag

SEQ ID NO: 19590 - DNA, 1287 bp, synthetic construct
  misc_feature 1..1287: note = source = /note="Description of Artificial Sequence: Synthetic coding sequence"
  source 1..1287: mol_type = other DNA
atggccgctcagggctatggctattaccggacagtcatcttctcagcgatgtttggaggttacagcctctattacttcaatcggaagactttctcatttgtgatgccttctctcgtcgaggaaatcccgctggataaagatgatttagggtttattacatctagtcaatctgccgcttacgccatctccaagtttgtctctggagtgttatcagatcagatgtctgcgagatggctgttctcttcaggcctcctcttggtagggttggtgaacatcttcttcgcctggagcagcactgtgcccgtgtttgccgccttgtggtttttgaacggcctcgcacagggactgggttggccaccatgcgggaaggtcttgcggaagtggttcgagccttcccaattcggaacttggtgggctatcttgagcacctccatgaacctcgctggaggcctagggccaattctggcgacaatactggcacagagctattcctggcgcagcactttagccttgtccggcgctttgtgcgtggtcgtgagttttctttgtttacttcttatccacaacgagccagcagacgtgggcctacgtaacctcgatcccatgccctcagagggcaagaaaggttctctcaaggaagagtccactctacaggaacttttattatccccttacctgtgggtgctgagtaccgggtacctagtcgtgtttggcgtgaagacctgctgcactgattgggggcagttctttctgattcaggaaaaaggacagagtgcacttgtgggcagctcctatatgagtgccttagaggtcggcgggttggtcggctcaattgccgctgggtatctctcggacagagctatggccaaggctgggctaagcaactacggcaatcccagacatggcctgctgctgtttatgatggctggaatgacagtgagtatgtacctcttcagggtgaccgtcacatcagactcgcccaagctttggatactggtgcttggagctgtgttcggattttcatcctatggccccatcgccctgttcggggtcatcgcaaacgagtctgctccccctaacctgtgtggcaccagtcatgctattgtgggcttaatggccaatgtgggcggatttctggcgggcctgcccttcagtaccatcgcgaaacattactcttggtccaccgccttctgggtggcagaggttatttgtgccgccagtacagccgctttttttcttttgcgcaacatccggaccaaaatgggccgtgtgtctaagaaggctgag

SEQ ID NO: 19591 - DNA, 1287 bp, synthetic construct
  misc_feature 1..1287: note = source = /note="Description of Artificial Sequence: Synthetic coding sequence"
  source 1..1287: mol_type = other DNA
atggctgcccagggatatggatattataggaccgttatttttagcgctatgttcggcggttattcactatactattttaacaggaaaactttctcgtttgttatgccatctttggttgaggaaattcctctggataaggatgacctcggtttcatcacctcatcccagagcgcagcgtacgccatatccaaatttgtatctggggtcctgtccgatcaaatgtcggctagatggcttttcagctccggtttgctattagtggggttagtgaatatcttctttgcttggtcatctactgtcccggtttttgctgctttatggttcttgaacggactcgctcagggcctgggttggcccccatgcggaaaagtgttgcgcaaatggttcgagcctagccaatttggaacctggtgggctatactgagcacttcaatgaacctagcaggtgggctcggacccattctggccaccattcttgctcagtcttactcatggaggtcaactcttgcgttgtctggagctctctgtgtcgtcgtctcatttctatgtcttctgttaattcataacgagcccgctgatgtcggtcttaggaatcttgatccaatgccatctgaagggaagaagggctccctcaaggaagagtccacgcttcaagagctcctcctgagcccctatctttgggtcctgagtacaggctacttggtggttttcggtgttaagacttgttgtacagactggggacaatttttccttattcaagaaaaaggacagagtgctttggtgggatcttcatacatgtctgccctggaggttggtggccttgttgggtctatagctgctgggtacttatcagatagagcaatggctaaagcaggcttgtcaaattatggtaatccaaggcatggacttcttttgttcatgatggctggtatgacagtctcaatgtatttgtttagagtgacagttacctcagatagtccaaaattgtggattctagttctcggcgctgtgttcggtttttcatcatatggccctatagctttgtttggtgtcatagctaacgaatccgctccacctaatttatgtggaacgagtcacgccatagtaggtctgatggcaaatgttggtggtttcctcgcaggtctacccttctcgacgattgcaaaacattactcgtggtctacggccttctgggtggccgaagttatctgtgcagctagcacagctgccttcttcctgttgagaaatattagaaccaaaatggggcgtgtttctaagaaggctgaa

SEQ ID NO: 19592 - DNA, 1287 bp, synthetic construct
  misc_feature 1..1287: note = source = /note="Description of Artificial Sequence: Synthetic coding sequence"
  source 1..1287: mol_type = other DNA
atggcggcccagggatatggctactaccggactgtgattttcagtgcaatgttcggcggctactcgctttactatttcaatcgtaagacttttagcttcgtcatgcccagcttggtggaagaaatcccattggacaaagacgacttgggtttcattacgtcatcccagagcgcggcctacgcaatttcgaagtttgtgtccggtgtgctctcagatcaaatgagcgcaaggtggctgttttcttcgggacttctgctggtgggtctggtcaacatctttttcgcgtggtcgtccactgtcccggtgtttgctgcgctttggttccttaacggacttgcacaagggctcggctggcccccttgcggtaaagtgcttcgaaagtggttcgaaccctcccaatttgggacttggtgggctattctctcgacctctatgaaccttgccggaggtcttggtcctatcctggcaactattctcgcgcagagctacagctggagaagcaccctggctctttcgggtgcactgtgtgtggtggtttcgttcctttgtcttttgcttatccataacgagccagccgatgtcggactgaggaacttggatccaatgccctccgagggaaaaaaggggagccttaaggaggaatcaacccttcaggagctgctgcttagcccctacctctgggtgcttagcactggttacttggtggtgtttggtgtgaaaacttgttgcaccgactggggtcagttttttctcattcaggaaaaaggccaatcggctcttgtcggctcatcgtacatgtccgcactggaggtgggaggcttggtgggaagcattgcagcaggatacctttcggatcgcgcaatggcaaaggcaggtctgtcgaattacggaaatccacgccacggactgctgctgttcatgatggctggaatgactgtgtcgatgtatctgtttagggtgaccgtcacttccgattcacccaaactctggattctggttcttggggcagtgtttggattctcctcatacggaccgatcgccctctttggggtgatcgctaacgagtcggcgcctcctaatctgtgtggaaccagccatgcaattgtggggctcatggccaatgtgggaggatttctggcagggcttccgtttagcacgattgcaaaacattactcatggtccactgccttttgggtcgcagaggtgatctgtgccgcgtccactgcagcgtttttccttctccgaaacatccgcaccaagatgggacgagtctccaagaaagcagag

SEQ ID NO: 19593 - DNA, 1287 bp, synthetic construct
  misc_feature 1..1287: note = source = /note="Description of Artificial Sequence: Synthetic coding sequence"
  source 1..1287: mol_type = other DNA
atggccgcccaaggatacggctactacaggactgtcatcttctcagcaatgtttgggggttactcgctgtactatttcaacaggaaaactttctccttcgtgatgccgtccctggtggaagaaatccctctcgacaaggacgatctgggttttatcacttcatcccagtccgccgcatacgcaatctcgaaattcgtttccggagtgctgtccgaccagatgtcagcgcgctggctgttttcgtccggtctgttgctggtggggctggtgaacattttcttcgcctggtcatcaaccgtgcctgtgttcgccgcgctgtggttcctgaacggactggctcagggccttgggtggccgccatgtggaaaggtcctcaggaagtggttcgagccgtcgcaattcgggacctggtgggccatcctctccacttccatgaacctcgcagggggactgggcccaattctcgcgaccatcctggcacaaagctactcttggcgttcgactctggccctgtcgggagcactgtgcgtggtcgtgtcgttcctgtgcctccttctgattcataatgagccggccgatgtgggacttaggaacctggacccaatgccgtccgagggtaaaaagggttcgctgaaggaagagtcgaccctgcaggaactgcttctgagcccgtacctctgggtcctgagcactggatacctcgtggtgttcggggtcaagacgtgctgcaccgactggggacaattcttcctgatccaggagaaaggacagtcagccctggtcggttcgtcgtacatgagcgccctcgaggtcggaggcttggtggggagcatcgcagccggatacctgtccgatagagcgatggctaaggcggggctcagcaactacggcaacccacgacacgggctgctgcttttcatgatggcaggaatgaccgtgagcatgtacctgttcagagtcacggtgaccagcgacagccctaagctgtggatcctcgtcctgggagccgtctttgggttctcaagctacgggccgatcgccctgttcggggttatcgcaaatgagtcggccccacccaacctctgcggcactagccatgccatcgtgggactcatggcaaacgtgggcggctttttggccggccttcctttctcgaccatcgccaagcattactcatggtcaaccgcattctgggttgcagaagtgatctgcgctgcctccaccgccgcgttctttctgctccggaacatccgcacgaagatgggccgcgtgagcaagaaggcggag

SEQ ID NO: 19594 - DNA, 1287 bp, synthetic construct
  misc_feature 1..1287: note = source = /note="Description of Artificial Sequence: Synthetic coding sequence"
  source 1..1287: mol_type = other DNA
atggccgcacaaggatacggttactacaggaccgtcattttcagcgcgatgttcgggggatactcattgtactactttaacagaaagacctttagcttcgtcatgccttcgcttgtggaagagattccacttgacaaggatgatcttgggttcattactagctcacagtccgcggcttatgcaattagcaagttcgtgagcggcgtgctctcggaccagatgtcggcccgctggctcttctcctcaggattgcttctggtgggccttgtgaatatcttcttcgcgtggtcgtcgactgtgccagtgttcgctgctctctggtttctcaacggactcgcgcagggacttgggtggccaccttgcggaaaagtgctgaggaaatggtttgagccatcgcaatttggaacctggtgggcaatcctgtcaacctccatgaatcttgcaggaggacttggacccatcctggcaactattttggcgcagtcgtactcctggcgctccactcttgctctgagcggggccctgtgtgtggtggtgtccttcctctgccttcttcttattcacaacgaaccagcagatgtgggactgagaaatttggaccctatgccatcggaaggaaagaagggttcccttaaggaagagtccaccctgcaggaacttctgttgagcccttacctgtgggtgctcagcaccggttacctcgtggtatttggagtcaaaacctgttgtaccgactggggtcagttttttcttatccaggaaaagggacaatcggccctggtcggttcctcttacatgtccgcactggaagtcggcggactggtgggctccatcgccgcgggttatctgtcagatcgggcaatggctaaggctggcctgtccaactacggaaacccccgacacggtctgctcctgttcatgatggcaggaatgactgtctcgatgtacctcttcagagtcactgtgacttcagactccccaaaactttggatcctggtcctcggagcagtgttcggcttttcctcatacggaccgattgcactgttcggggtgattgcaaatgagtccgcccctccaaacctgtgtggaaccagccacgcaatcgtcggactgatggcaaacgtgggaggattccttgcagggctgcctttttccaccattgcaaaacattactcctggtcgactgcattttgggtggccgaggtgatctgtgccgcttctactgcagcattcttcctgctcagaaacattagaaccaagatgggtcgtgttagcaagaaggccgag

SEQ ID NO: 19595 - DNA, 1287 bp, synthetic construct
  misc_feature 1..1287: note = source = /note="Description of Artificial Sequence: Synthetic coding sequence"
  source 1..1287: mol_type = other DNA
atggcagcacaggggtacggttattacagaactgtgatcttcagcgctatgttcggaggctacagcctctactacttcaatcggaaaaccttttcctttgtcatgccgtcgttggtggaggaaatcccgcttgataaggatgaccttggctttatcaccagctcccagtccgccgcctacgcaatctccaaattcgtgtcaggagttctttcagatcagatgtcagcgcgctggctgttttcatcgggattgctcctggtgggccttgtgaacatattcttcgcctggtcctcgactgtgccggttttcgcggctctctggttcttgaacgggttggcccagggactgggctggccaccctgcggcaaagtgctgcgcaagtggttcgaacctagccagttcggtacctggtgggcgattctgtcgacctcgatgaatctcgctgggggcctcgggccgatcctcgcaaccatcctcgcccagtcctactcatggagatccacgctcgccctgtcgggagccctgtgcgtggtggtgagcttcctgtgcctgctgttgatccataatgagccagccgacgtcggactgcgcaacttggaccctatgccgtcagaagggaaaaagggatcattgaaggaagaatcgacgttgcaagagctgctgttgtcaccttacttgtgggttctttcgactggttacttggtggtctttggcgtcaagacttgctgcaccgattggggtcaattcttcctgatccaggaaaaaggccaatctgccctggtgggcagctcttacatgagcgccctcgaggtcggcggattggtgggatcaatcgcggccggatacctgtccgaccgggcgatggcgaaggcgggactctcgaactatggaaacccccgccacgggctgctcctgttcatgatggccggaatgactgtgagcatgtatctcttccgagtgaccgtcacctcagacagcccgaagctgtggattctcgtcctcggagcagtctttggcttctcatcatatggaccgatcgctctttttggtgtgatcgctaacgaatcggccccacctaacttgtgtggtacctcccacgcgattgtgggactcatggccaatgtgggcggattcctggctggcctgcctttctccactatcgccaagcactactcatggtccaccgcgttctgggtcgcagaagtgatctgtgcagcgtcaactgctgccttctttctccttcggaacatccggactaagatgggcagggtcagcaagaaggcagag

SEQ ID NO: 19596 - DNA, 1287 bp, synthetic construct
  misc_feature 1..1287: note = source = /note="Description of Artificial Sequence: Synthetic coding sequence"
  source 1..1287: mol_type = other DNA
atggctgcgcagggctacggttattatcgcactgtgatttttagcgcaatgttcggcggttatagcctctactacttcaacaggaagaccttctccttcgtgatgccaagcttggtcgaggagatccccttggataaggatgatctgggatttataactagctcccagtccgcggcatacgcaatcagcaaatttgtcagcggtgtcctgagcgatcagatgagcgcgcgctggctctttagcagcggtctgttgttggtgggcctcgttaacatcttctttgcatggagctccaccgtgccggtattcgctgctctctggtttttgaacggtctggcgcagggtctgggttggccaccgtgcgggaaagttctgcggaagtggttcgagccgtctcaatttggcacgtggtgggctatcctcagcacaagcatgaacctggccggaggtcttggtccgatcttggcaacaatattggcgcagagctacagttggcgttccactttggcactgagcggtgccctgtgcgtggtggtttccttcctgtgcttactgctcatccataacgagcctgcggatgtcgggttgagaaatctggaccctatgcctagcgaaggtaagaagggtagcctgaaagaggagtctactttgcaggagctgctcctgagcccttatctttgggtgttgagcaccggttacctggtggtgttcggagtgaagacttgctgtacggattggggtcagttttttttgatccaagagaaaggccagtccgccctggtgggctccagctacatgagcgcccttgaggtgggcggcctggtgggcagtatagcggctgggtacctgtctgaccgcgcgatggcgaaggctgggttgagcaattatggtaaccctcgccacggtttgctcctctttatgatggccggcatgacggtcagcatgtatctctttcgggtgactgttacctccgacagccccaagctgtggattttggtcctgggcgctgtgtttggattctcgagctacggccctattgctctgtttggggtcatcgccaacgaatctgctccacctaatctgtgcggtactagccacgctattgtggggctgatggcgaatgttggcggctttctcgcaggtctgccgttcagcacaattgccaaacactacagctggtccaccgccttctgggtcgcagaggtcatctgcgcggcgtccaccgcggcgttctttctgctgcggaatattagaaccaaaatgggacgcgttagtaagaaggcagag

SEQ ID NO: 19597 - DNA, 1287 bp, synthetic construct
  misc_feature 1..1287: note = source = /note="Description of Artificial Sequence: Synthetic coding sequence"
  source 1..1287: mol_type = other DNA
atggccgcccaaggctacggatactacagaaccgtgatcttctccgccatgtttggtggatactcgctgtactactttaacagaaaaactttctcgtttgtcatgccttccctggtggaagaaatcccactggacaaggatgatctgggctttatcaccagctcgcaatcggctgcatacgcaatttctaagtttgtgtctggagtcctgtccgaccaaatgagcgccaggtggctgttttcctccggactcctgttggtgggtctggtgaatatcttctttgcatggtcgtcgaccgtccccgtgtttgcggcactgtggttccttaacgggctcgctcaggggctgggttggccaccctgtggaaaagtgctccgaaagtggtttgaaccttcgcagtttggaacctggtgggcaattctgtccacttcgatgaatcttgccggcggacttggtccaatcctcgcaactatactggcgcagtcatactcgtggagatcgacccttgccctgtcgggggcactgtgtgtcgtcgtctcgttcctctgtctgctcctcattcacaacgaaccagctgacgtgggacttagaaacctggaccctatgccaagcgaaggaaagaagggaagtcttaaggaggagtcgacccttcaggaacttttgctcagcccatacctctgggtgctgtcgacgggatacctggttgtctttggagttaagacctgctgcaccgattgggggcagttttttctgatccaagaaaagggacaatccgcacttgtcggttcctcatacatgtcagcactggaggtgggaggcctggtcggctccatagcagcaggttacctctccgatcgcgcaatggcgaaggcaggcctgtccaactatggaaatccaaggcatgggctgctcctgtttatgatggctggcatgactgtcagcatgtacctttttagagtgactgtgacgtccgactcccctaagctgtggatcctggtgctcggtgcagtgtttggcttttcctcctacggtcctattgcactgttcggtgtgattgctaacgaatccgcccctcccaatctgtgtggcacctcccatgcaatcgtgggccttatggcgaatgtcggcggatttctggcaggactgccattttccactattgctaagcattactcatggtccactgcgttctgggtggcagaagtcatttgcgcagctagcactgcggctttctttcttctgagaaacatcagaacgaaaatgggacgggtgtcgaaaaaggcagag

SEQ ID NO: 19598 - DNA, 1287 bp, synthetic construct
  misc_feature 1..1287: note = source = /note="Description of Artificial Sequence: Synthetic coding sequence"
  source 1..1287: mol_type = other DNA
atggctgcccaagggtatgggtactatagaactgtgatcttctcagctatgtttgggggctacagtctctactactttaataggaagacctttagcttcgtgatgccatcattagtggaagaaattcccctggataaggatgacctgggctttattacatcatcacagagcgccgcctacgccatttcaaagttcgtctccggcgtcctgtccgaccagatgagcgcccggtggctgttctcctcaggacttctcctggtaggcttggtaaatatcttcttcgcctggtcttctactgttccggtctttgctgctctttggtttctgaacggattggcacaagggttaggttggccaccctgcgggaaggttctacgtaagtggttcgaacctagtcagttcggcacgtggtgggccattctcagcacctctatgaatctggcaggtggcctgggcccaatattagctaccatccttgcccagtcgtatagctggaggtctacattggcgctgtcgggagctctgtgtgtggtcgtcagctttctgtgtttgctgctaattcacaacgagcccgctgacgtcgggcttaggaatctggatcctatgccttccgagggtaaaaaggggtcgctgaaggaagaaagtacactgcaggagttgctgcttagcccctacctttgggtcctcagcaccggttacctggtggtcttcggcgtcaagacgtgctgcactgactggggacagttcttcctcatacaggagaaggggcagtcagctttggtaggttcatcctacatgtcggcgctggaagtagggggattggtgggttcaattgctgcgggatacctatccgatcgagcaatggcaaaggctggcctgtccaattatggcaacccacggcatgggttgttattgttcatgatggcaggcatgacagtgtcaatgtacctcttccgagtgaccgttaccagtgactcaccaaagttatggattctagtgctgggggccgtgttcggcttttcctcttatgggcccatcgccctgtttggcgttatcgccaatgaatctgcacctcctaatctctgcggcacctcccacgccatcgtaggattgatggccaatgtgggcggctttcttgcaggtctaccattctcgaccattgccaaacactattcttggagtaccgccttttgggtggctgaggttatctgcgccgcaagtacagcggctttttttcttcttcgaaacatacgaactaagatggggcgtgtgtccaagaaagctgaa

SEQ ID NO: 19599 - DNA, 1287 bp, synthetic construct
  misc_feature 1..1287: note = source = /note="Description of Artificial Sequence: Synthetic coding sequence"
  source 1..1287: mol_type = other DNA
atggccgcccagggatacgggtactaccggaccgtcatcttctccgcgatgtttggtggatatagcctgtactacttcaatcgaaaaactttcagcttcgtgatgccttcgctcgtggaggagatcccgctcgacaaggacgacttgggattcatcacctcatcgcaatcggccgcgtacgctatctcaaagtttgtgagcggcgtgctgtccgaccagatgtccgcacgctggctgttttcctcaggtctgctgctggtgggactggtgaacatcttcttcgcctggtcgtcaactgtgcctgtgttcgcggctctctggtttcttaacggtctggcacagggccttggatggccgccatgcggaaaggtgctcagaaagtggttcgaaccttctcagttcggcacttggtgggccatcttgagcacctccatgaacctggccgggggactgggacctatcctggcaaccatcctggctcaatcgtacagctggcggagcactctggccctctcgggcgccttgtgcgtcgtcgtctccttcctctgcttgctgcttatccacaacgagcccgctgacgtgggactgagaaacctggatcctatgccgtcagagggaaaaaagggctcgttgaaggaagagagcaccctgcaagaactgctgctttcaccatacctctgggtgctgagcactggatacctcgtggttttcggagtgaaaacgtgctgtactgattggggacagttcttcctgattcaagagaaaggccaatcggcgctggtgggtagctcgtacatgtcagcacttgaggtgggtgggctcgtcggaagcatcgcagcggggtacttgtccgatagggcgatggccaaggcaggactctcgaattatgggaacccgaggcacggcctccttctgttcatgatggccggaatgactgtttcaatgtacctgtttcgcgtgactgttacctccgattcgccgaagctgtggatcctcgtcctgggagcagtgttcggttttagctcatacggaccaatcgccctgtttggagtgatcgccaacgagtcggctccgccgaatctgtgcggcactagccatgcgatcgtgggactgatggccaacgtcggtgggttcctggccggactgccgttctcgaccatcgcaaaacactacagctggtcaaccgctttctgggtggctgaggtgatttgtgccgcgtccactgcagctttctttttgctgcggaacatccgcacgaagatgggaagagtgtcgaagaaggctgaa

SEQ ID NO: 19600 - DNA, 1287 bp, synthetic construct
  misc_feature 1..1287: note = source = /note="Description of Artificial Sequence: Synthetic coding sequence"
  source 1..1287: mol_type = other DNA
atggccgcacaggggtacggttactaccggacggtcattttctcggcgatgtttggcggatacagcctgtactatttcaacaggaaaaccttctccttcgtgatgccgtcactcgtggaagaaattcccctggacaaagacgacctgggatttatcacctcctcacagtcggctgcatacgccatctccaagttcgtctccggtgtgctttccgaccaaatgtcggcccgctggctcttctcttcgggactcctgctggtgggcctggtcaacatcttcttcgcatggtcaagcactgtgccggtgttcgccgccctgtggtttctcaacggactcgcgcaaggactcggttggcccccgtgcggaaaagtgctgcgcaagtggtttgagccaagccagttcggcacctggtgggccatactctcgactagcatgaatctcgctggaggacttggaccgatcctggccactattctggcccaatcctattcctggcgcagcactctggcgctgtcgggagccctttgcgtggtggtgagcttcctctgcctgctgcttatccacaacgaaccggccgatgtgggactgagaaacctcgacccaatgccctccgaaggaaagaagggatctttgaaggaggagtcaactctgcaggaactcttgttgtccccatacctctgggtactgagcaccggctacctggttgtgtttggagtcaagacttgttgcactgactgggggcagttttttctgatccaagaaaagggacagtccgcgctggttggttcatcatacatgtccgcgctggaagtgggaggcctcgtcggtagcatcgccgctggatacctctcggatcgcgccatggctaaggccggactgtcaaactacggtaatccacgccatggactcctgttgttcatgatggccggcatgactgtgtcgatgtatctgttcagagtgaccgtgacctcggactcgcctaagctgtggattctcgtcctcggagctgtctttggattcagctcctacggacccattgctttgtttggggtaatcgccaacgaatcggcgccaccgaatctctgtgggaccagccatgcgatcgtgggtttgatggctaacgtgggcggattcctggcgggactgccattttcgaccatcgccaaacactactcctggagcaccgccttttgggtcgccgaagtgatctgtgcggcgtccaccgcagcgttctttctgctccggaacatcaggaccaagatgggaagagtgtcgaagaaggccgag

SEQ ID NO: 19601 - DNA, 1287 bp, synthetic construct
  misc_feature 1..1287: note = source = /note="Description of Artificial Sequence: Synthetic coding sequence"
  source 1..1287: mol_type = other DNA
atggccgcgcaggggtacggctactaccggaccgtcatcttttccgcaatgtttggaggatactccttgtactacttcaaccgaaaaactttctcattcgtgatgccgtcgttggtggaggaaattccactggataaggacgacctgggcttcataacttcatcgcaatccgcagcatatgccatttcaaagttcgtgtcgggggtgttgtccgatcaaatgtccgccagatggctgttctctagcggcttgctcctggttggcctggttaacattttctttgcgtggagctcaaccgtcccagtctttgccgctttgtggttcctgaatgggctcgcacagggacttgggtggcccccttgcggtaaggttctcagaaagtggtttgaaccctcgcaatttgggacttggtgggctatcctcagcacgagcatgaatctggcaggcggtctgggacctatactcgcgactatccttgcccaaagctactcatggaggtcaacgttggccctgtcgggggcactttgcgttgtggtcagctttctctgtcttttgcttattcataacgagcctgccgatgtcgggcttcggaaccttgatcctatgccaagcgaaggcaagaagggatcgctgaaagaggaatcgacgctgcaggagctgctgctctcaccttatctttgggtgctttcgactggttacttggtggtgttcggagtgaaaacctgttgtaccgattggggacagttttttctgatacaggaaaagggtcaaagcgcgctcgtcggttcgtcctacatgtctgccctcgaagtcggaggtctggtgggaagcattgcggcggggtacctgtcagaccgcgcaatggcaaaagcaggactttcgaattacggaaatcctcgtcacgggcttcttttgtttatgatggcagggatgaccgtctctatgtacctttttcgcgtgactgttaccagcgactcgccaaagctctggatcctggtgcttggtgcagtgtttggattttcgtcctatgggccaattgccctgtttggtgtgattgcaaacgaatccgcacccccgaacttgtgtggaacttcccacgcgatcgtcggcctcatggcaaacgtgggcggtttcctggcaggactgccattttcgaccattgcaaagcattactcgtggtccaccgccttctgggtggcagaagtgatttgcgcagcctccaccgccgcgttctttctgctccggaatatccgaacgaaaatgggaagagtcagcaaaaaggcagag

SEQ ID NO: 19602 - DNA, 1287 bp, synthetic construct
  misc_feature 1..1287: note = source = /note="Description of Artificial Sequence: Synthetic coding sequence"
  source 1..1287: mol_type = other DNA
atggccgcccagggctacggctactacagaacagtcatctttagcgctatgttcggtggctactcactgtattatttcaatcgcaagaccttttcatttgtgatgccaagtctggtcgaagagatacctctggacaaagatgacctgggctttattacatcttcccagagtgctgcctacgctattagtaagtttgtgtcaggcgtcctctcagatcagatgtcagctagatggttgtttagctcaggcctccttcttgtgggacttgtaaacattttctttgcttggagctcaactgtcccagtcttcgcagcgctgtggtttcttaatggtctggcacagggccttggctggcccccgtgtggaaaagtcctgaggaaatggtttgaaccttctcagtttggcacctggtgggcaatcctgagcacttccatgaacctggctggggggctgggaccaatcctcgccacaatccttgcacagtcttacagctggagatctacactggcactctctggcgctttatgcgttgtggtgtcctttctctgtctcctgctgattcacaacgaacccgcagacgtggggctgaggaatctggatcctatgccaagcgagggaaaaaagggcagcctgaaggaagaatccacactgcaagagctcttgttgagcccctacctctgggtgttgagtacgggctatcttgtcgtttttggagtaaaaacctgttgtaccgactgggggcagttctttctcattcaggagaaagggcaatctgcgcttgtgggctccagctatatgagtgctctggaagtgggaggcctggtgggttcgatcgcagctgggtatttgagtgaccgcgcaatggccaaagccggcctttctaactacggcaaccccaggcacggccttctgctgttcatgatggctggaatgacagtctccatgtacttgttcagagtaacagttaccagcgattctcctaaactttggatccttgtgcttggagccgtatttggcttttcttcttatgggcccattgctctgtttggagtcattgcaaatgaaagcgccccaccaaacctttgtggaacgagccatgcgatagtgggcctgatggcaaacgtgggtggatttctggccgggctgcctttcagtactatcgctaaacactacagttggtcaacggccttttgggtcgctgaggtaatatgtgctgcatccaccgcggctttcttccttcttcggaatataagaacaaagatgggaagagtcagtaaaaaggctgaa

SEQ ID NO: 19603 - DNA, 1287 bp, synthetic construct
  misc_feature 1..1287: note = source = /note="Description of Artificial Sequence: Synthetic coding sequence"
  source 1..1287: mol_type = other DNA
atggctgcgcagggttatggctattaccgaacagtcattttttctgcaatgttcggaggctattccctttactactttaataggaaaacattcagctttgtcatgccgtcattagtggaagaaatccctttagacaaagatgatctcgggttcataacatcttctcaatctgcagcgtatgcaatctccaaatttgtttcaggcgttttgtctgatcagatgtctgcaaggtggctcttttcgagcggactgttactggtggggttagtgaatatttttttcgcttggtcatcaactgtcccggtgtttgctgctctttggtttcttaacggactcgcacaagggttaggatggccgccgtgtggaaaagttcttagaaaatggttcgaaccgtctcaatttggcacgtggtgggcgatcttgtcaaccagcatgaacctagcgggtgggttggggccgattctcgctacgattttagctcaaagctactcctggcgatcaacactggccttatcgggagcactgtgcgttgtcgtttccttcttatgcttgctattaatacataatgaaccggccgatgtgggacttcgtaacctcgacccaatgccttcagaaggcaaaaaaggctctttaaaagaagagagcaccctacaggaattgttactttctccttatctttgggttttatccacgggttacttggtcgtgtttggggtaaaaacatgctgtacagattggggccagtttttccttatccaagaaaaagggcaatctgctctcgttggatcgagctatatgtctgctcttgaagtgggcggtcttgttggttcgatagccgcgggatacttaagcgatcgggctatggcaaaggctggtctgtcaaattatggtaacccacggcatggacttttactttttatgatggcaggtatgaccgtatcgatgtatctatttcgcgtgacggtaacgagcgacagtcctaaattgtggatcctcgttttgggcgcagtttttggtttttccagctacggtccaatcgcactttttggtgtgattgccaatgaatctgctccaccgaacctctgtggaacgtcccatgcgattgtgggacttatggcgaacgtggggggcttcctcgccggcttaccgtttagcacaatcgccaaacattatagctggtcaacggccttttgggtggcagaagtaatctgcgctgcatctacagctgcgttttttctgctccgcaatatcagaacaaaaatgggacgcgtctctaaaaaagctgaa

SEQ ID NO: 19604 - DNA, 1287 bp, synthetic construct
  misc_feature 1..1287: note = source = /note="Description of Artificial Sequence: Synthetic coding sequence"
  source 1..1287: mol_type = other DNA
atggctgcccagggatacggttactaccggaccgttatctttagtgccatgtttggggggtattccctgtactatttcaatcgcaagactttctcgttcgtgatgccatccctggtcgaagaaattcctctcgataaggatgatctcggattcatcactagctctcagtccgcggcgtacgcaattagcaagttcgtgtccggcgtgctgtccgatcagatgagcgcaagatggctgttctcctcggggttgctgttggtcggactggtgaacatctttttcgcttggtcgtcgaccgtccctgttttcgccgccctctggtttcttaacggactggcgcagggactgggatggccaccgtgcgggaaagtcctccgtaagtggttcgaaccttcacagttcggcacctggtgggctatcctctcaacctcaatgaacctggccgggggactggggcccatcctggcgacgatcctcgcccaatcgtacagctggagaagcactctcgcactctctggagcgctgtgcgtcgttgtgtcctttctgtgcctgttgctgatccataatgagccagccgatgtgggactccgaaacttggaccctatgccgtcggaaggaaagaaaggctcgcttaaggaggagtcaacccttcaggaactgctgctttccccatacctctgggttctgtccaccggttacctcgtggtattcggagtaaaaacgtgttgcacggactgggggcaattcttcttgatccaagagaagggacagtcggcactcgtcggctcctcatacatgtcggctctggaggtgggaggcttggtgggaagcatcgctgcgggctatctgtcggaccgggccatggccaaagccgggcttagcaactacggcaatccccggcatggtctgctcctgttcatgatggcgggtatgactgtctcaatgtacctgttccgcgtcactgtgacctcagactccccaaagttgtggatcctcgtgctgggcgccgtgtttggtttttcctcctacggtccgatcgcactgttcggggtgatcgctaacgagagcgcccctccgaacctctgcgggacttcgcacgcgattgtgggactgatggcgaacgtgggcggatttctggctggcctgccattctcgaccatcgcgaagcactactcgtggtccaccgccttctgggtggccgaggtgatctgcgccgcctccaccgccgctttcttcctgctgcgcaacattaggactaaaatgggaagagtctccaagaaggccgaa

SEQ ID NO: 19605 - DNA, 1287 bp, synthetic construct
  misc_feature 1..1287: note = source = /note="Description of Artificial Sequence: Synthetic coding sequence"
  source 1..1287: mol_type = other DNA
atggccgctcagggctacggctactatcgcacagtgatattttccgctatgtttggaggatattcactgtattatttcaatcgcaaaacattctcatttgtgatgccttcactcgtagaggaaatcccactggataaagatgacctcggctttatcacctcctcacaatccgctgcctacgccatatctaagtttgtcagtggcgtactttctgaccaaatgtccgctaggtggctcttctcctcagggctgctgctagtggggcttgtcaacattttcttcgcctggagtagtaccgtgcccgtatttgccgctctttggtttctcaatgggctggcccaggggcttgggtggcctccgtgcggcaaggtgctccgcaagtggttcgaacctagtcagttcgggacctggtgggccattttgtcaaccagcatgaatcttgctggaggattaggccccatcctggcgacaattttagcccagtcctatagttggaggagcactctggccctgagtggcgctctgtgtgttgttgtttccttcctgtgcttgctgctcatccataacgagccagctgatgttggactgcgtaacctggaccccatgccttctgaggggaagaagggaagcctgaaagaggaatcaacactgcaggagctgcttctgtctccgtacctgtgggtgttaagtacaggttacctagtggtcttcggtgtgaagacctgttgtactgattggggacagttcttcctgatccaggagaaaggtcagtctgcgctcgtgggatcctcctatatgagcgctctggaagtcggaggcctggtgggctctattgccgcggggtatctcagtgaccgggctatggcgaaggcgggactgagtaattacggtaatccccggcacgggttactcttatttatgatggctgggatgacggtgagcatgtacttgttccgggtcactgtaacctcagacagtcctaagctgtggatactagtgctcggagcagtgttcgggttctcttcatacggcccaattgcattgttcggagtcatcgcgaatgaaagcgcacctccgaacctgtgtggaacctcccatgccatcgtcggactcatggcgaacgtgggcggctttctcgccgggctgcctttcagtaccattgccaagcactactcttggagtaccgcattttgggtggccgaggtgatttgtgcagcttctacggctgccttcttcctattgaggaacattcggaccaaaatgggcagggtttcgaagaaagcagag

SEQ ID NO: 19606 - DNA, 1287 bp, synthetic construct
  misc_feature 1..1287: note = source = /note="Description of Artificial Sequence: Synthetic coding sequence"
  source 1..1287: mol_type = other DNA
atggctgcacaaggttacggctattacaggacggtcatcttttccgccatgttcggagggtacagcctgtactacttcaatcgcaaaaccttctccttcgtgatgcccagccttgtggaagaaatcccgcttgataaggatgatcttggtttcatcacttcctcgcagtccgccgcatacgccataagcaaatttgtctcaggtgtgcttagcgaccaaatgtctgcgcggtggcttttcagctcggggctgttgctcgtgggcttggtgaacatctttttcgcatggtcctctaccgttccggtgttcgcagcactttggtttcttaatggactggcccaaggcctcgggtggcctccgtgcggtaaggtgttgagaaagtggtttgaaccttcacagtttggaacttggtgggcaattctgagtacttctatgaacttggcaggtggccttggcccaattctggcgactatactggcccagtcgtactcatggcgaagcacgcttgcgctcagcggagccttgtgcgtggtggtcagcttcctgtgcctgctccttattcataatgagccggcagatgttggattgagaaacttggaccccatgccatcggagggcaagaagggctcactgaaagaggaatcaacccttcaagagcttctcctgagcccttacctgtgggtcctctctaccggatacctggtggtgtttggagtgaaaacttgctgtaccgattgggggcaattctttctgattcaggaaaaaggacagtccgctctggtgggtagcagctacatgagcgcccttgaggtcggaggcctggtcggatcgatcgccgcaggatacctgtccgaccgggccatggcgaaagcgggtctgagcaattatggtaacccacggcacggacttcttctctttatgatggcgggaatgactgtgtcaatgtaccttttccgagtcaccgtcacgtctgactcccctaaactgtggatcctggtccttggggcagttttcggattttcgtcctatggacccatcgccctgtttggagtcattgccaacgaatccgcaccaccaaacctctgtggaacctcccacgccattgtcggactgatggctaacgtgggaggctttctcgcgggtctgccattttcgaccattgcgaagcattactcctggtcaaccgcattttgggtggcggaagtcatctgtgcagcttccactgcggcatttttcctgcttaggaacattagaaccaagatgggccgtgtgagtaaaaaggccgaa

SEQ ID NO: 19607 - DNA, 1287 bp, synthetic construct
  misc_feature 1..1287: note = source = /note="Description of Artificial Sequence: Synthetic coding sequence"
  source 1..1287: mol_type = other DNA
atggcagcacagggatacgggtattacagaaccgtgatcttctccgcaatgtttggcggctacagcctttactactttaaccgaaaaaccttttcctttgtcatgccttcgctggtggaagagattccactcgacaaggatgatctcggatttatcacctccagccagtcggccgcatacgcgatctccaaatttgtgtccggagtgctctctgaccaaatgtcggcaaggtggctgttctcgagcggtctgctgctcgtgggactggtgaacatcttttttgcctggtcctccactgtgcccgtgttcgcagctctttggttcctcaacggtttggcacagggtctggggtggccaccatgcgggaaggtgctgcggaagtggtttgagcctagccagttcggtacttggtgggcgatcctgtcgaccagcatgaatctcgcagggggccttgggccaatccttgcgactatacttgcacaatcgtactcatggagatccacccttgcactgtccggtgcattgtgtgtggtcgtcagttttctgtgtctgttgcttattcataatgaaccagcagacgtcggtctgcggaatctcgatcctatgccatccgagggaaagaagggatcattgaaggaagaatccactcttcaagaactgcttctctcaccttacctttgggtgctttcaactgggtaccttgtggtgttcggcgtcaaaacttgctgcaccgattggggtcagttttttctgattcaggagaagggacaatccgcactcgttggatcctcgtacatgtcagccctggaggtgggaggtttggtcggatccatcgcggccggttacctgtccgatagagcaatggccaaggcggggctctctaactacggcaatccccggcatggactgctgctgttcatgatggccggtatgaccgtgagcatgtacctttttagagttactgtgacgagcgatagcccaaagctctggatcctcgtcctcggagcagtgttcgggttctcgtcgtacggacctattgcactgttcggagtcatcgccaatgagtccgctcctccaaacttgtgcggtaccagccatgcaatcgtgggtctgatggcaaacgtcggggggtttctggccggtctgccttttagcactatcgcaaaacattactcctggtccacggccttttgggtcgcagaagtcatttgtgccgcttcaactgctgcgttttttcttcttcgaaacattcggactaagatgggtcgggtgagcaaaaaagcagaa

SEQ ID NO: 19608 - DNA, 1287 bp, synthetic construct
  misc_feature 1..1287: note = source = /note="Description of Artificial Sequence: Synthetic coding sequence"
  source 1..1287: mol_type = other DNA
atggcagcccagggatatgggtactacaggaccgtgatatttagtgccatgttcgggggttatagtttatattactttaatcgaaaaacattctcatttgtcatgccctccctagtagaagaaatacccctggataaagacgaccttggattcatcaccagtagtcagtctgcggcctacgctattagcaagtttgtcagcggtgtgctgtctgatcagatgagcgcacggtggcttttctcaagtggcctcctgctggttggtctggttaacattttcttcgcctggagttcaactgtccctgtgttcgccgcactctggtttctgaacggcctggcacagggactgggctggcctccatgtggcaaggtgctgcgcaagtggtttgagccatcccagtttgggacctggtgggcaatattgagcacctctatgaacctggccggtggcctgggccccattctggcgaccatacttgcccagtcctattcctggagatcgacactggccctgagcggagctctgtgcgtcgtcgtatccttcctgtgtctcctgcttatacataatgaacctgccgatgtggggctgagaaatctggatccgatgcccagcgagggcaagaagggcagcttaaaggaagagtcaacactacaggagcttttgttgtccccctatttgtgggtgctgagcacggggtacctcgttgtctttggcgtgaagacctgttgcactgactggggccagtttttcctaattcaggagaaaggccagtcagctcttgtaggctcatcctacatgtccgcactcgaagttggaggccttgtggggagcatcgctgctggatacctctccgatcgcgcgatggccaaagccggactttcgaactacggcaaccctagacacggtctcctgctcttcatgatggcaggcatgacagtgtcgatgtatctgttccgtgtgaccgttacaagtgacagccctaaactctggatccttgtgcttggcgccgtgtttgggttctcctcctacggtcccatcgcacttttcggtgttattgccaacgagtcagcaccaccaaacctctgtgggacgtcccatgcaattgttggcctgatggctaacgttggcggttttctggccgggctacccttctccactattgccaagcactatagctggagcacggctttttgggtggctgaggtaatatgcgcagccagcacagccgccttctttttgctgcgcaatattaggacaaaaatgggccgggttagtaaaaaggctgaa

SEQ ID NO: 19609 - DNA, 1287 bp, synthetic construct
  misc_feature 1..1287: note = source = /note="Description of Artificial Sequence: Synthetic coding sequence"
  source 1..1287: mol_type = other DNA
atggcagctcagggttacggctactaccgtaccgttattttttcagctatgttcggaggttactctctgtactacttcaatcgcaagaccttctctttcgttatgccatccttggttgaagaaattcctctcgataaggatgacctcggctttattacatcttcccagagtgccgcttacgctatttcaaaattcgtcagcggagtgctgtcagaccaaatgtcagctaggtggctgttcagtagcggactcctcctggtaggcctcgtgaacattttcttcgcctggtccagcactgtccctgtcttcgctgcattgtggtttctgaatggcttggctcagggcttgggctggccaccttgcggcaaagtgttgaggaagtggttcgagcccagccagtttggcacttggtgggctatcctctccacctctatgaatctggcaggaggccttggacccatcctggcaacaatcttggcccagagctatagttggcgctccactcttgccctgagtggcgctctctgcgtagtggtaagcttcctctgcttgctcctgatccacaatgagcctgcagacgttggactgaggaatctcgacccaatgccaagtgagggtaagaagggttccctgaaggaagagtctacacttcaggagctgcttctttctccttacctgtgggttctctccactggttaccttgtagtgttcggtgtgaagacctgctgcaccgactggggccaattctttctgatccaggagaagggacagagcgctctggtaggatcttcctatatgtctgccctggaagttggaggtctcgtcggatcaattgccgctggctatctgtctgatcgtgctatggccaaggccggtctgagtaactatggtaaccccaggcacggtctgctgctctttatgatggccggcatgacagtatctatgtacctcttcagagtcactgtgacatcagacagccccaagttgtggatactcgtgctgggtgctgtctttggattttcctcttacggaccaatagccttgttcggcgttatcgccaatgagtctgccccccctaacctttgcggaacatcccacgcaatcgtaggtttgatggccaacgtaggcggtttcctcgctggtctcccattctctactatcgcaaaacattacagttggtcaacagcattctgggtggctgaagtgatctgtgctgctagcaccgccgctttcttcctgctgcgcaacatcagaaccaaaatgggccgtgtgtccaagaaagctgaa

SEQ ID NO: 19610 - DNA, 1287 bp, synthetic construct
  misc_feature 1..1287: note = source = /note="Description of Artificial Sequence: Synthetic coding sequence"
  source 1..1287: mol_type = other DNA
atggctgcgcagggctatgggtactaccgcaccgtgatattttccgccatgtttggtggatattccctctactactttaaccgcaaaactttctcatttgtgatgcctagcctggtcgaggagattcctttggataaagacgatctgggtttcatcacttccagccaatccgccgcttatgcgatcagtaaattcgtgtctggagtgctctctgaccaaatgtccgcgagatggctcttcagttcaggtctgctcctggtgggcctcgtcaacattttctttgcttggtcctccacagtgccggttttcgctgcattgtggtttctgaatgggctggcccaggggttgggatggcctccctgcggaaaggtcctgcgcaaatggttcgaaccttcacaatttggcacttggtgggccatcctgtctacttccatgaatcttgccgggggtctggggcccattttggctacaatcctcgcccagagctactcctggaggtctacattggcactgagcggagcattgtgtgtcgtggtaagtttcctgtgcttgctcctcatccataacgaaccagcggatgtgggcctcagaaatttggaccccatgccatccgaaggcaagaaaggatctctcaaggaggagtccaccctgcaggaattgctgctgagtccttatctgtgggtgctgagtactgggtaccttgtggttttcggggtcaaaacttgttgtacagactggggacagttcttcctgatccaggagaaggggcagtccgccttggtaggcagctcttacatgtccgcacttgaagtcggtggtctggtcggctccattgcagcgggttaccttagtgatcgggctatggcaaaggccggtttgtctaactacggaaatcctaggcacggattgctgttgtttatgatggcagggatgaccgtttctatgtacctgtttcgcgtgacagttacatccgacagccccaaactgtggatactggtcctgggcgcggtctttgggttctctagttatggccccatagcactgttcggggtcattgccaatgagagcgcccctccaaatttgtgcggcacttcccacgcgatcgtcggcctgatggctaatgtggggggattcctggccggcttgcccttttctactattgccaaacattactcatggagtaccgcattctgggttgctgaggtgatctgcgcggcttcaaccgcagccttcttcctgcttcgaaatatccgcacaaagatggggcgggtgtcaaaaaaggctgag

SEQ ID NO: 19611 - DNA, 2082 bp, synthetic construct
  misc_feature 1..2082: note = source = /note="Description of Artificial Sequence: Synthetic coding sequence"
  source 1..2082: mol_type = other DNA
atgacttttggtcagtccaaactttataggtcggaggattacgggaagaacttcaaggacattaccgacctcattaacaacactttcatccgaactgagtttggtatggctattggcccagaaaactccggtaaagtggtccttactgcagaagtgtcaggaggatcccgcggcggccggatttttcggtcgtcagattttgcaaagaattttgtgcaaactgatcttcccttccatccactcactcagatgatgtattcccctcaaaactcggactaccttctggccctttccaccgaaaatggtttgtgggtttcaaaaaactttggaggaaagtgggaagaaattcataaggcagtctgcctggcaaaatgggggtcggacaacaccatctttttcactacgtatgcgaatggctcttgtaccgatctgggagctcttgagctttggcgtactagcgaccttggaaaatcatttaagaccataggtgtgaagatttactccttcggactgggcgggcgcttcctgtttgcatcagtcatggcggataaggatactacgcgcaggatccatgtctcaaccgatcaaggcgatacttggtcgatggcacaacttccctcggtcggacaggagcagttttactccatactcgcagcgaatgacgacatggtgtttatgcatgtcgatgaaccgggagacactgggtttggtaccattttcacctcggacgatcgcggtattgtgtactcaaagtcgcttgatcggcacttgtacaccacgaccggtggagaaactgatttcaccaacgtgacttcactgagaggagtctacatcacgtccgtgctgtcagaagataattccatccaaaccatgattacttttgaccaaggtggacgatggacccaccttcggaaacccgaaaactccgagtgcgatgcaactgccaagaacaagaacgaatgtagcctgcacatccacgcatcatactcgatttcgcaaaagctgaatgtgccaatggccccgctttcagaacccaacgcagtgggtattgtgatagcacacggatcggtcggtgatgcgatttcagtcatggtgcctgatgtgtacatcagcgatgacggggggtactcatggaccaaaatgcttgagggtcctcattactacaccattttggattccggcggaatcatagtcgcaatcgaacactcctcaaggccgattaatgtgataaagttctccactgatgaggggcaatgctggcagacctacacttttacccgtgaccctatttactttaccggactggcatcggagccgggtgccaggtcgatgaatatctccatttggggattcaccgaatcgtttctcacgtcgcagtgggtcagctacacgatagactttaaggatatcctcgaacgcaattgcgaggaaaaagactacaccatctggctcgcacattccaccgatccggaagattacgaggacggatgtatcctgggctacaaggagcagtttctgaggctgcgaaagagctccgtctgtcaaaacggaagggattacgtggtcaccaaacaaccctcaatctgtctttgctctctggaagatttcctctgcgattttggctattacagaccagaaaacgatagcaagtgtgtcgagcaacctgagcttaagggtcatgacttggagttttgtctttacggcagagaagagcacctgacgaccaacgggtaccgcaagatccctggcgataagtgtcagggaggggtgaaccctgtgcgggaggtgaaggatctgaaaaagaaatgtacctcgaactttctctccccggagaagcagaattcgaagtccaattccgtgcctatcattctcgctattgtgggactgatgctggtgaccgtggtggctggtgtgcttattgtgaagaaatacgtctgtgggggaagattcctcgtccatcgatacagcgtgcttcaacagcatgcagaagccaacggtgtggacggcgtcgatgccctcgatacggcatcccatactaataagtcaggttaccatgacgactctgacgaggatcttcttgaa

SEQ ID NO: 19612 - DNA, 2082 bp, synthetic construct
  misc_feature 1..2082: note = source = /note="Description of Artificial Sequence: Synthetic coding sequence"
  source 1..2082: mol_type = other DNA
atgaccttcggtcagtccaagctgtatcgctccgaggattacggtaagaacttcaaggatatcaccgacctgattaacaatacattcattaggacagagttcggtatggcaatcggccctgagaactcaggcaaagtggtgctcacagctgaagtcagtggcggttcaagaggcggccgcattttccgttccagtgatttcgccaagaacttcgtccagaccgatctcccctttcaccctctcacccagatgatgtatagtccccaaaactccgattacctcctcgctcttagcaccgagaacggcctgtgggtgagcaagaacttcggtggaaagtgggaggagatacataaggctgtctgcttggccaaatggggtagtgacaatactatctttttcaccacatacgcaaatggaagttgtactgacctgggcgctctggaactttggcgcactagcgatctgggtaaatccttcaagaccatcggcgtgaagatctattcatttggtcttggaggtagattcctttttgcttcagttatggcagataaggataccactagaaggatccacgtaagcaccgaccagggcgatacctggagcatggcccaattgccttctgtgggacaggaacagttttacagcatcctggcagcaaacgacgacatggtgttcatgcatgtggacgaaccaggagataccggtttcggaactatattcacctcagacgacaggggtatcgtctactccaagtcactcgatagacacctctataccaccaccggtggtgagacagactttaccaatgtgacatcactgcgtggcgtgtatatcacttctgtgctgtctgaggataattccattcaaaccatgattaccttcgaccagggcggcaggtggacccatctgcgcaagcccgagaactccgagtgcgatgcaactgctaagaacaagaacgagtgttctcttcatatacacgctagttacagcattagtcaaaaactgaatgtcccaatggcccctctgtccgaaccaaatgccgtgggtattgtgattgcccacggttctgttggcgacgctataagcgtcatggtccctgacgtctacattagcgatgacggcggctacagttggactaagatgctcgagggcccacattattacacaattcttgattctggtggtattattgtggccattgagcactcaagcagaccaatcaatgtgataaagttttctacagatgagggccaatgctggcagacttacactttcactcgcgatccaatatactttactggactggcttcagaaccaggtgctcgttctatgaatatttccatttggggcttcaccgagtccttcttgaccagccaatgggttagctacactattgacttcaaagatatcctcgaacgcaactgcgaggagaaggactatactatctggctcgcccacagtaccgatccagaggattatgaagacggatgcatcctgggttacaaagagcagttcctcagactgcgcaagtcatccgtgtgtcagaacggcagagactacgttgtcacaaaacagcccagcatctgcctgtgctccttggaagatttcctgtgtgatttcggatactacaggcctgagaacgacagcaagtgcgtagaacagcccgaactcaaaggtcacgacctcgaattctgcttgtacggacgcgaagagcacttgactacaaatggttaccgtaagattccaggtgataagtgtcagggaggtgtcaatccagtgagagaggttaaggaccttaaaaagaagtgtacatctaacttcctcagccctgagaagcagaacagcaagtctaatagcgtgcccatcatcctcgcaatcgtgggacttatgttggtgaccgtcgttgccggcgttcttattgttaaaaaatacgtgtgtggcggccgttttctggtccacaggtacagcgtgttgcaacagcacgccgaggccaacggagtggatggcgtggacgctctcgatactgctagccatacaaacaagagcggctatcacgacgattctgacgaagatctcttggaa

SEQ ID NO: 19613 - DNA, 2082 bp, synthetic construct
  misc_feature 1..2082: note = source = /note="Description of Artificial Sequence: Synthetic coding sequence"
  source 1..2082: mol_type = other DNA
atgacgttcgggcaatcgaagctgtatagatccgaggactacggcaagaacttcaaggatatcaccgacctgatcaacaacaccttcatccgcactgaattcggaatggctatcggaccggaaaactcgggaaaggtggtccttactgccgaggtcagtggcggatctcggggaggaagaattttccgctcctccgatttcgccaaaaacttcgtgcagacggacctgccgttccaccccctgacccagatgatgtactcgccccaaaattcagactacctcttggcgctctcaactgagaatggtttgtgggtcagcaaaaacttcggcggaaagtgggaggaaattcataaagccgtgtgtctcgctaagtggggttcagacaacaccatctttttcactacctacgccaatggctcatgtaccgacctcggagcactcgaactttggcgcacctcggatctcggaaagagcttcaagactatcggggtgaagatatactcattcggactgggaggaagattcctcttcgcatctgtgatggcagataaggacactacgcgcaggatccacgtctcaacggatcagggcgacacgtggtccatggcacagctgccgtccgtgggacaggaacagttttactcgatcctggcggccaacgacgatatggtgttcatgcacgtggatgaaccgggggataccggcttcggaacgatcttcacttcggacgatcggggaatcgtgtactccaagtcactcgaccggcacctctacaccaccaccggcggtgaaactgactttactaatgtgacctcccttagaggtgtctacatcacgagcgtcctctcagaagataactcgatccagaccatgatcaccttcgatcagggaggtcgctggacgcatttgcggaagccagaaaacagcgagtgcgacgctaccgccaagaacaaaaatgagtgctcgctccacattcacgcttcctactccatctctcaaaagctgaatgtgcctatggctccgctcagtgagccgaacgccgtggggatcgtgatcgcgcacggctcagtgggagacgctatctccgtgatggtgccagacgtgtacatctcggacgatggcggttactcgtggaccaaaatgctggagggaccgcactactacactatcctggactccggagggatcatcgtggccatcgaacattcgagccggccgatcaatgtgattaagttctccaccgacgagggacagtgctggcagacctacaccttcaccagagatccgatctactttaccggactcgccagtgaaccaggcgcgcggtccatgaatatcagcatctggggattcactgagagcttcctgacttcacagtgggtgtcgtacaccattgacttcaaagatatcttggagagaaattgcgaagagaaggattacaccatttggctggcgcacagcaccgatcccgaagattacgaagatggctgcatcctgggatacaaggagcagttcctccgcctgcggaagtcctcggtctgtcaaaatggccgggactacgtggtgactaaacagccaagcatctgcctttgctcgctggaagatttcctgtgcgactttggatactaccgcccggagaacgacagcaagtgcgtcgagcaaccggaactcaagggacatgatctcgagttctgcttgtacggacgcgaggagcatcttactactaacggataccgcaagattccaggggacaagtgtcagggaggagtgaacccggtgagagaggtgaaagacctgaaaaagaagtgtactagcaattttctgtcgccagagaagcagaactcaaagtccaactcagtgccgatcatcctcgccatcgtcggacttatgctggtcactgtcgtggcaggcgtgctgatcgtgaagaaatatgtttgcggcggccgctttctggtccaccgctactcggtgctgcagcaacacgcagaagccaatggagtggacggagtcgatgccctggataccgcctctcacaccaataagtcgggttaccatgatgactccgatgaggacctgctggag

SEQ ID NO: 19614 - DNA, 2082 bp, synthetic construct
  misc_feature 1..2082: note = source = /note="Description of Artificial Sequence: Synthetic coding sequence"
  source 1..2082: mol_type = other DNA
atgacttttggacagtcgaaactctaccgtagcgaggactatgggaagaactttaaagatatcaccgatttaattaacaacactttcattcgtactgagttcgggatggccattggacccgaaaactccgggaaggtggtgctcacagccgaggttagtgggggcagtcgaggtggtcgcatctttcgttcctcggactttgccaagaatttcgttcagactgatctccctttccaccccctaacacagatgatgtattcacctcagaactcagactacctgttggcgctgagcaccgaaaacggtctctgggtctctaaaaatttcggagggaaatgggaagaaattcataaggcggtttgtctggcaaaatggggctctgacaacactatcttcttcactacatacgccaatggaagctgtaccgatctgggagccttagaattatggagaacctcagatttaggcaagtctttcaagacgattggggttaagatctactcattcgggctcgggggccgcttcctgttcgcttccgtcatggctgataaggacactacgcggagaatccacgttagcaccgaccagggcgacacctggtctatggctcagttgccgtctgtaggccaagagcaattctattctatacttgccgcaaacgacgacatggtgtttatgcatgtggatgagccgggggacactggtttcggaaccattttcacgagcgacgatagggggatcgtgtattctaaaagtttggacagacacttgtatactacaaccggtggtgagactgactttacaaatgtgacatctctcagaggagtttatattacttccgtgctctcagaagacaactctatacagacgatgattacttttgaccagggtggtcgttggacccatctgagaaaacctgagaatagcgaatgtgatgccaccgccaaaaacaaaaacgaatgctctctgcacattcacgcgagctattcaatctcccagaagctgaatgtgcccatggctcctctttcggagcctaatgccgtaggtatcgtgattgctcatggtagcgttggagatgcgatatcagttatggtccccgatgtgtatatcagcgacgatggaggctattcctggacgaagatgttggagggcccacactattataccattctggattcaggcggtattatagtggcgatcgagcactcttcacgccccattaacgtaatcaagttcagtaccgatgaaggccaatgttggcagacatacacctttaccagggaccccatctattttaccggccttgcatctgaacccggcgctagatccatgaacatctcaatctggggttttacagagtcatttctgacttcacagtgggtgtcgtatacaatcgatttcaaggatatccttgagcgaaattgcgaggagaaggactatactatttggctggctcacagtaccgacccggaagactatgaggatggatgtatcctgggctataaggagcagtttcttcgcctcagaaaaagttccgtttgccagaatggcagagactacgttgttacgaaacagcccagtatctgcttgtgcagcctggaggacttcctctgcgatttcgggtactataggcccgaaaatgactccaagtgtgtggaacaacccgagctaaaaggccacgacctcgagttctgcctgtatggtcgggaagagcacctcacaaccaatggctatagaaaaatccccggggacaagtgtcagggtggcgtgaatcccgtgcgggaggtaaaggacctcaagaagaagtgcacgagtaactttctaagtcctgagaagcaaaattccaagtctaacagcgttcccataatcctcgctattgtggggctgatgctggtgacagtcgtggcgggtgtcctcatagtgaaaaagtacgtctgtggcggacgctttcttgtgcataggtattcggtcctccagcagcacgcagaggcaaatggcgtggatggcgttgacgcgctagacacagcatcacacacgaataagagtggataccacgatgatagtgatgaagatctcttggaa

SEQ ID NO: 19615 - DNA, 2082 bp, synthetic construct
  misc_feature 1..2082: note = source = /note="Description of Artificial Sequence: Synthetic coding sequence"
  source 1..2082: mol_type = other DNA
atgacctttggacagtcgaaactttatagatcggaagattatggaaaaaacttcaaagacatcactgacctcattaacaacaccttcatccgcactgagttcggaatggccatcggaccagagaattcaggaaaggtcgtactgactgcggaagtgtctggcggatcaagagggggacgcatcttcaggtcgtccgatttcgctaagaacttcgttcagactgatctgccgttccatcctcttacgcagatgatgtactcaccgcagaactcggattaccttctggccctgtccaccgaaaacgggttgtgggtgtctaaaaacttcggaggcaagtgggaagaaattcacaaggccgtgtgcctcgcgaagtggggctccgataacaccattttctttaccacttacgcaaacggatcctgcactgacctgggggccctggagctgtggcggacttcggatctggggaagtcgttcaaaacgatcggcgtgaagatttacagctttggactgggcgggcgcttcctgttcgctagcgtcatggcagacaaggataccaccaggcgcatccatgtatcaactgaccagggggacacgtggtcaatggcgcaacttccgtcggtgggacaagaacagttctattcgattctcgcagcaaacgacgatatggtgtttatgcacgtggacgaacctggcgatacgggcttcggcaccatcttcacctcagacgaccgaggaatcgtgtactccaagtccctggatcgtcacctttacactactaccggtggtgaaactgactttaccaatgtgacgtccctccgcggagtgtacatcaccagtgtcctgtctgaggataattcgatccagaccatgatcacctttgatcagggaggtcgctggacccacctgagaaagccggaaaactcagaatgtgacgctaccgccaagaataagaacgaatgctcgttgcacatccacgcgtcttacagtatctcccagaaactcaacgtcccaatggcaccactcagcgaacctaacgccgtgggaatcgtgatagctcatggctcagtgggcgacgccatctcagtgatggtccccgatgtctacatcagcgacgatggtggttatagttggactaagatgcttgagggaccgcattactacactattctggactccggcggaatcatcgtggcgatcgaacactcttcccgaccgatcaatgtgataaagttctccaccgacgaaggccagtgctggcaaacctacactttcactagggacccgatttactttactggtttggcctctgagccaggagcaagatcgatgaatatctcgatctggggattcactgaatccttcctgacctcgcagtgggtgagctacactatcgatttcaaggacatcttggaacggaactgcgaagagaaggattacactatctggctggcgcactccacggacccggaggattacgaagatggctgcattctggggtacaaggaacaattcctgagactccgcaaatccagcgtctgccaaaatgggcgggactacgtggtcaccaagcagccaagcatctgtctctgcagcctcgaggactttttgtgcgacttcggatactaccgccccgagaacgactcaaagtgcgtcgaacaaccagaactgaagggacatgacttggagttctgcttgtacggaagagaagagcacctcaccaccaacggataccggaagatcccgggcgacaaatgccagggaggagtgaacccggtgcgcgaggtgaaggacctgaaaaagaaatgtaccagcaacttcctctcacccgagaaacaaaattccaaatcgaattcggtccctatcatcttggctatcgtcggtctgatgctggttaccgtggtggccggggtgctgatcgtaaagaagtacgtgtgtggaggccggtttctcgtccatagatacagcgtgttgcaacagcacgccgaggcgaatggggttgatggtgtggacgccctcgatactgcaagccataccaataagtcagggtaccacgatgactcggacgaggaccttctggaa

SEQ ID NO: 19616 - DNA, 2082 bp, synthetic construct
  misc_feature 1..2082: note = source = /note="Description of Artificial Sequence: Synthetic coding sequence"
  source 1..2082: mol_type = other DNA
atgacttttggacaatcaaagctctacaggtctgaagactacgggaaaaatttcaaagatatcaccgacctgattaacaatacatttataaggaccgagttcggcatggccatcggccccgagaattctggtaaggtggttcttacagcggaagtgtctggtggttcgcgtggaggacggatttttcggtcctcagacttcgctaaaaacttcgtacagaccgacttacctttccatccacttacacagatgatgtacagcccccagaattccgactacctgctagccctcagtacagagaatggcctgtgggtgtccaagaacttcgggggtaagtgggaagagatacataaggccgtttgtttagccaagtggggatccgataacacgatcttttttacaacatacgcaaacggatcttgcaccgacttaggcgcccttgagctctggcggacatccgacttgggtaagagcttcaaaaccattggtgtcaaaatttactcttttggactaggaggccggttcctgttcgctagcgtgatggccgacaaagatacgacgagacgtatccacgtgagcaccgatcaaggggacacatggtcgatggcacaactgcccagcgttggccaagagcaattttacagcatcctggccgctaacgacgatatggtcttcatgcacgtggacgagcctggtgacaccggatttggaaccatattcacttccgacgacagagggatcgtttactccaagagcctagatagacacctatacacgaccactggcggtgaaaccgattttactaatgtgacaagcctcagaggtgtgtacatcacttccgttttgtctgaagacaactcgatccagacaatgataacatttgatcaggggggccgctggacccatcttcgaaagccggagaattctgagtgcgatgctactgcaaagaataagaatgagtgctccctccatatccatgcaagctactctattagtcagaagctgaacgttcctatggcccctctgtctgagccgaacgccgtggggatcgtcattgcccacggttctgtcggtgacgccatatcagtcatggtcccagacgtatatatcagtgatgatggcggatatagctggacaaagatgctggaggggccgcattattacaccatcctggactctggggggataatcgtggcaattgaacactccagccgcccgattaatgttataaagttcagtaccgacgagggccagtgctggcagacctacaccttcacccgcgatcctatttactttactgggttggcatcagagccaggggcacgttctatgaacataagcatatgggggttcacggaatcctttcttacttctcagtgggtcagctacaccattgactttaaggatattctagaaagaaattgcgaagagaaagattacacaatctggttggcacactccaccgatcccgaggattacgaagatgggtgcatactggggtataaggagcagtttcttcggcttcgaaagagctctgtgtgccagaatggccgcgactacgttgtaaccaagcagcccagcatttgcctgtgcagtctagaggattttctctgtgacttcgggtattaccggcctgagaacgactcaaagtgtgtcgaacaacccgaactgaaaggccacgatctggaattttgcctttatggccgtgaggaacacctgaccacgaatgggtacagaaaaatccctggagataaatgccaagggggggtaaatccggtccgagaggtcaaggatctgaagaagaaatgcaccagcaactttttgagtcctgagaaacagaactccaaaagcaactcggttcctattattcttgcaatcgtcgggctcatgctggtgaccgtagttgcaggggtgttgattgtgaagaagtacgtatgtggggggcgctttttagtacacagatactctgtactacagcagcacgctgaggccaacggcgttgacggagtggacgccctggataccgcctcccatactaacaagagtggctaccatgacgactcagatgaggatctgcttgaa

SEQ ID NO: 19617 - DNA, 2082 bp, synthetic construct
  misc_feature 1..2082: note = source = /note="Description of Artificial Sequence: Synthetic coding sequence"
  source 1..2082: mol_type = other DNA
atgacgtttggccagtcgaaattgtacagaagcgaagattacggcaaaaatttcaaagatatcactgatttaatcaataatacttttattagaaccgagtttgggatggcaattgggccggaaaatagtggcaaggttgtgttgacagcggaagtctctggagggtctaggggaggaaggatcttcagaagctctgatttcgcaaagaattttgtacagacggacttaccctttcacccgctcacacaaatgatgtacagtccccaaaattccgactatctcctggcactcagcacggagaacggcctctgggtcagtaaaaatttcgggggcaaatgggaggagatccacaaggcagtgtgtctcgccaaatgggggtccgacaacacaatttttttcaccacctacgcaaacgggtcttgtaccgacttgggcgctctggagctctggcggactagcgatcttggaaagagctttaagacaatcggcgtcaaaatctattccttcggtctggggggccggttcctgttcgcttcagtgatggctgacaaggacacgacccgccgcattcacgtcagcacggatcagggagatacctggtccatggcccagctaccttctgtcggccaagagcagttctactctatcctggccgcgaacgacgacatggtcttcatgcacgtcgacgagcccggtgacactggctttggcacaatattcacaagcgacgatcggggaattgtgtattccaagagcctcgacagacatctatacactacgaccggaggagagaccgattttacaaatgttacatctctacgtggagtctatatcacgagtgtgttgagtgaggataattcaattcagaccatgatcacctttgatcagggtggaagatggacccatctgcgcaaaccggagaacagcgagtgtgacgcaacagctaaaaacaagaacgaatgtagtctccacatacatgctagttacagtatcagtcagaaattgaacgtgcctatggcccccctgagcgaaccaaatgcagtgggcatcgtgattgcgcacggaagtgttggagacgctatttcagtgatggttcctgacgtctacatctctgatgatgggggctactcttggacgaagatgctggaaggcccgcattactacacaattctggactctggtggtatcatcgtggctatagagcattcttctcggcccattaacgtcattaaatttagcaccgatgagggacagtgttggcagacctatactttcacaagggaccctatttactttaccggattggcctctgagccgggagctaggtcaatgaatatcagcatctggggttttacagagtcgtttctgacgtcacaatgggtctcatatacaatcgattttaaagatatcctggaaagaaactgtgaagagaaagattatacaatctggcttgcgcactcgacagaccctgaagattatgaagatgggtgtatactcgggtataaggaacagttcctgcgtctccggaagtcaagtgtgtgtcagaacggaagggactatgtcgtgacgaagcagcctagcatctgcttatgctctttggaagactttctgtgcgacttcggatactatcggccggagaacgattctaagtgtgtagaacagcccgagctgaaggggcacgacctggagttctgcttatatggccgcgaggagcatttaacaacaaatggttaccggaaaatccccggggataagtgccaaggaggagtcaatccagtgcgcgaggtgaaggacctgaaaaaaaagtgtactagcaattttctgtctcccgaaaaacagaacagtaaaagcaactccgtacccattatccttgcgattgtggggttaatgctcgtaaccgtcgtggccggcgtgctgatcgtcaaaaaatatgtatgcggcggccggtttctagtgcatcggtactcagttttacagcagcacgccgaggcaaatggcgttgacggagtcgatgcactggatacagcctctcacaccaataaatccgggtatcatgacgactctgacgaagatctgctggag

SEQ ID NO: 19618 - DNA, 2082 bp, synthetic construct
  misc_feature 1..2082: note = source = /note="Description of Artificial Sequence: Synthetic coding sequence"
  source 1..2082: mol_type = other DNA
atgaccttcggacagtcgaagctgtaccgctccgaggactatggaaaaaacttcaaggatatcaccgacctgatcaacaatactttcatccgcactgaatttggtatggccattggcccggaaaactctggtaaggtggtgctcaccgccgaagtctcgggcggctcgcgcggaggaaggatcttcaggagctcggacttcgccaagaacttcgtgcagactgacctgccgttccacccactcactcagatgatgtactcgccgcaaaattcggattatctgctggcgttgtcaaccgaaaacggactgtgggtgagcaagaactttggcggtaagtgggaggaaatccacaaggctgtgtgtttggccaagtggggaagcgataacaccatcttctttaccacttacgcaaacggaagctgcactgacctcggagctctggaactgtggcgcacttcggacctcggcaagtccttcaaaaccattggagtgaagatttacagctttggtctgggtggacggttcctctttgcctcggtgatggccgacaaagataccacccggcgcatccacgtctcaaccgaccagggggatacgtggtctatggctcaactgccctctgtggggcaggagcaattctactctatcctggcagcgaatgacgatatggtctttatgcatgtggatgaacctggtgacactggattcggaactattttcacttcagacgacagagggatcgtgtactcgaaaagcctggatcgccacttgtatactactactgggggcgaaactgactttaccaacgtcacctcgttgcgcggagtgtacatcacgtccgtgctgtcggaggacaactccatccagacgatgatcacgttcgatcagggtggccgctggactcatcttcggaagcccgagaactccgagtgcgacgccactgctaagaacaaaaacgaatgttccttgcatatccacgcctcgtattcaatcagccagaagttgaatgtgcctatggcaccgctttcagaaccgaacgctgttggcatcgtgatcgcccacggctctgtcggggatgcaatctccgttatggtgccagatgtgtacatcagcgatgatggaggttactcttggaccaaaatgctggagggaccacattactacactatcctggacagcgggggcatcattgtcgcaatcgaacactcgtcgcggcctatcaacgttatcaagttctctacggacgaaggtcaatgttggcagacctacaccttcacgcgcgacccaatttacttcaccggactggcaagcgaacctggagcaagatcaatgaacatctcgatctggggcttcaccgaatcgtttctgacctcccagtgggtcagctacactatcgatttcaaagatatcttggagagaaactgtgaggaaaaagactacaccatctggttggcccattcgactgatccggaggactacgaggacggatgtatcctgggatataaggaacagttcctccgcctgagaaaaagctcagtgtgccaaaacggaagagactacgtcgttaccaagcaaccgagcatctgcttgtgctcgctcgaggacttcctctgcgactttggatactaccgacccgagaatgattccaagtgcgtcgagcagccggaactgaagggccatgacctggaattctgcctgtacggtcgtgaggaacatctgacgaccaacggatacaggaagatcccaggagataagtgccaaggaggcgtgaacccggtccgcgaggtgaaggacctgaaaaagaagtgtacttcgaatttcctcagcccagaaaagcaaaactcgaaatcgaactcggttccaatcatcctggctatcgtgggcctgatgcttgtgaccgtggtcgccggggtgctgattgtgaagaagtacgtgtgcggcggacgctttttggtgcacaggtactccgtccttcagcagcacgccgaggcgaatggggtagatggagtcgacgctctcgacaccgcaagccacaccaacaaaagcgggtaccacgacgactccgacgaggacctcctggaa

SEQ ID NO: 19619 - DNA, 2082 bp, synthetic construct
  misc_feature 1..2082: note = source = /note="Description of Artificial Sequence: Synthetic coding sequence"
  source 1..2082: mol_type = other DNA
atgacctttggccaatccaagttgtaccgcagtgaagattatggcaagaatttcaaggacatcacagacctcataaacaacaccttcatacggaccgagtttggcatggccatcgggcctgagaactccgggaaagtggtgctcaccgcagaggttagcggaggcagtcgaggaggacgcatcttcaggtcctccgatttcgccaaaaactttgtccaaacggacctcccttttcacccactgacgcagatgatgtacagtccgcaaaactcagattacttgctcgccctttccacagagaatggcctatgggtctccaagaatttcggcgggaaatgggaagaaatccataaggctgtttgcctggctaagtggggtagtgataacacaatcttctttactacatatgccaatggtagctgtaccgacctaggcgcactggaactttggaggacaagtgatctgggaaaatcgttcaagactattggagtcaagatctattcattcggcctgggcggccgtttcctgttcgcatcagtcatggcggataaggatacaactagacggatacacgtcagtactgaccagggtgacacctggagcatggctcagttaccatcagtcggccaggaacagttctactcgattctcgctgcaaacgacgacatggtctttatgcatgtcgatgaaccaggtgacaccggattcggcaccatttttacctctgatgaccgcggtattgtttactccaagtcacttgaccgacacctttacactacgactggtggagagacagacttcaccaacgtaacctcactacgcggagtttacatcacatccgtgctatctgaggacaattccatccagacgatgattacttttgatcaaggtggcagatggactcatctgcgtaagccagagaactctgagtgtgatgccaccgcaaagaataagaatgagtgctcactccatatccatgctagctatagcatctcccagaaactcaatgttcctatggccccattatccgagcccaatgctgtcgggatagtcattgcacacggctcagtgggcgatgcaataagcgtcatggtgcccgatgtctatatctcagatgacggcggatacagctggaccaagatgttagagggacctcactattatacaattctcgatagcggtggaatcatcgtggccatcgaacacagtagtcggccaatcaatgtcatcaaattcagtacagatgaaggccagtgctggcagacctatacattcaccagggatccgatatacttcacaggtctggcgtctgagccaggcgcaaggtcaatgaatatcagcatttgggggttcaccgagtcatttttgacttcacaatgggtcagctatacaattgattttaaagatattctcgaaaggaattgcgaagaaaaggattacactatttggctggcccactctaccgaccccgaggactacgaggatggttgtattctcggttataaagaacagtttctcagattaaggaagtcttctgtgtgtcagaatggccgcgactacgtcgtcacaaaacagccttctatttgcctctgctccttagaggatttcctttgcgatttcggctactacaggcctgaaaatgatagtaagtgtgttgagcagcctgaactaaaggggcacgacctggagttttgcttatacgggagggaggagcaccttaccacaaacggctaccggaagatccctggcgacaaatgccaggggggagtgaaccccgtgagggaggtgaaagatcttaagaagaagtgtacaagtaacttcctctctccagagaaacagaattcaaagagtaactccgtccccattatcctggccatcgtagggctgatgttggttaccgtagttgctggagtgctgattgttaagaagtatgtgtgcggggggagattcctggtgcatagatacagcgtacttcagcagcatgccgaggccaacggggtggatggcgtggatgctcttgatacagcgagccacacgaacaagtctggataccatgacgacagtgatgaggatctccttgaa

SEQ ID NO: 19620 - DNA, 2082 bp, synthetic construct
  misc_feature 1..2082: note = source = /note="Description of Artificial Sequence: Synthetic coding sequence"
  source 1..2082: mol_type = other DNA
atgactttcggacaatcgaaactttatagaagcgaggattacggcaagaactttaaggacatcaccgatctgatcaataacaccttcatccgcaccgaattcggaatggcaatcggaccggaaaactccggcaaagttgtgctgaccgccgaagtgtccgggggtagccggggcggaaggatttttcgctcgtcagacttcgccaagaattttgtccagactgatctcccttttcatccactgactcaaatgatgtactccccgcaaaacagcgactacctgctcgcactgtccactgagaatggcctgtgggtgtccaagaatttcggaggaaagtgggaagagatccataaggccgtgtgcctggcaaagtggggctcggacaatacgattttcttcaccacctacgcgaacggatcatgcaccgacttgggcgccctggaactgtggcgcacctctgacctggggaagagctttaagactatcggggttaagatatactctttcggcctgggagggcgattcctcttcgcttccgtgatggcggataaggacactactcggcggatccatgtcagcactgaccaaggggatacttggtcaatggcacagctcccgtccgtcggccaagagcaattctactcgatcctggcagcgaacgatgatatggtgttcatgcacgtggatgagcctggggataccggattcggtacgatctttacctcggatgaccggggcatagtgtactccaagtccctcgaccgtcacctgtacaccactacgggaggagaaaccgatttcaccaacgtgaccagcctccgcggagtgtacatcacgagcgtcctcagcgaggataactccatccaaaccatgattactttcgaccagggcgggcgctggactcatttgagaaagcctgagaactctgaatgtgacgcgactgccaagaacaagaatgaatgttccctgcacatccatgcttcctactcaatcagtcagaagctgaacgtgccgatggcgccgctgagcgagccgaacgcagttggtatcgtcattgctcacggctcggtcggagacgcaattagcgtcatggtcccagacgtctacatctcagacgacgggggatactcatggaccaagatgttggaaggaccgcattactacactatcctggactccggaggcatcattgtggctatcgaacacagctccagacccatcaacgtcatcaagttctcaactgatgaaggccagtgttggcagacctacactttcacccgggacccgatctatttcaccggactggcctcggagccgggggcacggtcgatgaatatctcaatctgggggttcactgagtcattcctgactagccaatgggtgtcgtacactatcgatttcaaagacatcctcgagcggaactgtgaagaaaaggattacactatctggctggcccacagcaccgatccagaggactacgaggacggctgcattctgggttacaaggaacagtttttgcgcttgcgcaagagttccgtctgccagaacggaagagactacgtggtcactaagcagccctcgatttgcctttgctcgcttgaagatttcttgtgtgatttcgggtactaccgccctgaaaacgactctaagtgcgtcgagcagccagaactgaagggacacgacttggagttctgtctgtatggacgagaggaacacctgactaccaatggataccgcaagatcccgggagacaaatgccagggaggtgtgaacccagtgcgcgaagtgaaagatctgaaaaagaagtgtacctcgaacttcctgtcaccggagaagcagaattcaaaatccaattcagtgccaatcatactggctatcgtcggtctgatgctggtgactgtcgtggcaggggtcctcatcgtgaaaaagtacgtgtgcggtggacgtttcctcgtgcaccggtactcagtcctgcagcagcatgcagaggccaatggcgtcgatggcgttgatgccctcgacaccgcgtcacataccaacaaatccgggtaccacgacgacagcgacgaggacctgctcgag

SEQ ID NO: 19621 - DNA, 2082 bp, synthetic construct
  misc_feature 1..2082: note = source = /note="Description of Artificial Sequence: Synthetic coding sequence"
  source 1..2082: mol_type = other DNA
atgaccttcggccaatccaagctgtacaggtccgaagattacggtaagaatttcaaggacatcacggacctgatcaacaataccttcatcagaactgagtttggcatggctatcggcccggagaactcaggaaaggtggtgctgaccgcggaagtctcgggcggctcccgcggtggacgcatctttcggtcgagcgattttgccaagaactttgtgcagactgatctgcccttccaccctctgacccagatgatgtactccccgcagaattcggattatctcctcgctctgtcgaccgagaatggcctctgggtgtcaaagaacttcggaggaaagtgggaggaaatccataaggcggtgtgtctcgccaagtggggtagcgataacactatcttcttcaccacttacgcaaacggtagctgcaccgatttgggcgcactcgagttgtggcgcaccagcgacctcggcaagtcgttcaaaaccatcggagtgaagatctattcgtttggtcttggtgggaggttcctcttcgcctccgtgatggctgataaggacaccacccggcggatccacgtctccaccgaccagggcgacacttggtcgatggcacaactcccgtcggtgggacaggagcaattctacagcattctcgccgcgaacgatgatatggtctttatgcacgtggatgaaccgggagatactggatttggcacgattttcacttccgatgaccgtgggatcgtgtacagcaaaagccttgaccgccatctctacaccaccactggaggcgagactgatttcactaacgtgacctccctgcgcggcgtgtacatcacctcagtgctctccgaagataatagcatccaaactatgattacctttgaccagggaggccggtggacccaccttcggaaaccagaaaacagtgaatgtgatgccactgcaaagaacaagaatgaatgctccctccatatccatgcgtcgtactccatctcgcaaaaactcaatgtgccgatggcccccctctccgagccgaacgcggtgggaattgtgatcgctcacggatcagtgggggatgccatatccgtcatggtgccagatgtgtacatctccgatgatggagggtactcgtggacgaagatgctcgagggtccgcactattacaccattctggactcgggagggataatcgtcgccatcgaacatagcagccggcctataaacgtgatcaagttctcgaccgacgagggacagtgctggcagacctatacgttcactcgcgaccctatttacttcaccggactggcctcggaacctggagcgaggtcaatgaatatctcgatttgggggttcactgaatcctttctcacctcgcagtgggtgtcctatacgatcgacttcaaagatatcctcgagcgcaattgcgaggaaaaggattacaccatctggctcgcacacagtaccgaccctgaggactacgaggacggatgcatcttgggttacaaggaacagttcttgagactgcgcaaaagcagcgtctgccaaaacggaagagactacgtggtcactaagcagccgtcaatctgcctgtgttccctggaagatttcctttgcgatttcggatactacagacctgagaacgattccaagtgcgtcgagcagccagagttgaagggacacgacctcgaattctgcctgtacggtcgcgaagagcacctcaccactaacggttaccgcaagatcccgggtgacaagtgtcaggggggcgtcaaccccgtgagagaagtcaaggacctgaaaaagaagtgcaccagcaacttcctttcacctgaaaagcagaactcgaaaagcaactctgtgccgattatcctggcgatcgtgggcctcatgttggtgaccgtggtggctggagtgctgatcgtcaaaaagtacgtgtgcggcggaagattccttgttcaccggtactccgtgctgcaacagcacgctgaagcaaacggagtggacggagtggatgccctcgataccgcttcacacaccaataagagcggataccatgacgactccgacgaagatctgttggaa

SEQ ID NO: 19622 - DNA, 2082 bp, synthetic construct
  misc_feature 1..2082: note = source = /note="Description of Artificial Sequence: Synthetic coding sequence"
  source 1..2082: mol_type = other DNA
atgacttttggacagtccaagctgtacagatcggaggactacggaaagaatttcaaagatattactgacctgatcaataacaccttcatccgcactgaatttggcatggcgatcggacccgaaaattcgggcaaggtggtgttgaccgccgaggtcagcggaggaagtcgcggcggacggatcttccgcagctcagacttcgcgaaaaactttgtgcagactgacctgccgttccacccactcacgcaaatgatgtactcgccccagaattcagactacttgctggcactctcaactgaaaacggactttgggtgtcaaagaacttcggaggaaagtgggaggaaatccataaagccgtgtgcctcgcgaaatggggatcggacaatactatcttctttaccacctacgctaacggctcatgcaccgaccttggagcccttgaactgtggcgcacttcagacttgggaaagtcgttcaaaactataggagtgaagatttactcctttggactggggggacggttcctgtttgcttccgtcatggccgacaaggataccaccaggcgcatccacgtctcaaccgaccagggcgacacctggagcatggcgcaactcccgtcggtgggacaagagcagttttacagcatcctggccgcaaacgacgatatggtgtttatgcatgtggatgagcctggagacaccggtttcggcactatcttcacgtcggatgatcggggaatcgtgtactcaaagagtttggaccggcatctgtacacgaccactggcggggagactgatttcacgaatgtgactagcctgcgcggtgtctacattactagcgtgctgtcggaagataactccattcagacgatgatcactttcgaccaaggaggaaggtggacccatctgcggaaacctgaaaactccgaatgcgatgcaaccgctaagaacaagaatgaatgctccctccacatccacgcgagctactcgatcagccaaaagctgaacgtcccgatggcgccgctgtccgagccgaacgccgtcggaatcgtgattgcgcacggctcggtcggagacgcaatttccgtcatggtgccagacgtgtacatctccgatgacggcggatactcgtggacgaaaatgctggagggtccacattactacaccattctcgatagcggggggataatcgtggccatcgaacattcatccaggccgatcaacgtgatcaagttctcgactgacgaagggcagtgctggcagacttacactttcacccgcgatccgatctactttactggactggcgtccgagccaggagcgagatcgatgaatatctcgatttggggtttcaccgaatcattcctgacctcccagtgggtgagctacaccattgacttcaaggatatcctcgaacgcaactgtgaggaaaaagactacaccatttggctcgcccactcaactgatccagaagattacgaggacggatgcattcttggatacaaggaacaattcctccgccttcggaagtccagcgtctgccagaacgggagggattacgtggtgactaagcaaccgtccatctgtctctgctcccttgaggatttcctctgcgactttggctactacagaccggaaaacgactcaaaatgtgtggaacaaccagaactgaagggccacgacctggagttttgcctgtacggacgggaagaacacctgaccaccaacggctaccgcaagatcccaggcgacaaatgtcagggcggggttaaccctgtgagagaggtcaaagacctcaaaaagaagtgcaccagcaatttcctctcgcccgagaaacagaatagcaaatccaattcagtcccgattatcctggcgatcgtgggcctgatgctggtcactgtggtggctggcgtgctgatcgtgaaaaagtacgtctgtggcggaagattcctggtgcatcgctactcagtcttgcaacaacatgcggaggccaacggcgtggatggcgtcgacgcgttggacacggcatcccataccaacaagtcgggctaccacgacgactcagatgaggacttgctggag

SEQ ID NO: 19623 - DNA, 2082 bp, synthetic construct
  misc_feature 1..2082: note = source = /note="Description of Artificial Sequence: Synthetic coding sequence"
  source 1..2082: mol_type = other DNA
atgaccttcggtcagtccaaattatatagatctgaagactatggcaagaacttcaaggatattactgaccttattaataacacttttatcaggactgagttcggcatggctatcggtcccgagaatagtggcaaggtcgttttgacggcggaggtgtcaggcgggtcgaggggaggacggattttccggagcagtgatttcgctaaaaattttgtccaaactgatctgcccttccacccactaacgcagatgatgtactcaccccaaaattccgattacttattggccttgtcaacagaaaacggcctctgggtatccaaaaatttcggcggtaagtgggaggagattcataaggctgtatgcctggcgaagtggggctccgataacaccattttcttcacaacctacgccaacggctcatgtactgatctgggagctctggaactctggagaacatctgatcttggtaaatcttttaagactattggtgtcaaaatttattcttttgggctcggcggccggtttttgtttgcttccgttatggccgataaagataccacccgccggatacacgtaagtaccgaccagggggatacgtggagtatggcgcagctgccaagtgttggtcaggaacaattctactcaatcctggctgcgaacgacgacatggtgtttatgcacgtcgatgagcctggggacacgggtttcggcactatctttactagcgatgatcgcgggattgtatactccaaatccttggacaggcacctttacacaacaactggcggagaaactgatttcactaatgttactagcttgcggggggtatatataaccagcgtcctgtctgaggataattccatacagaccatgatcacgttcgaccaaggaggaagatggactcatctgaggaagccggagaattctgaatgcgacgcgacggctaagaacaagaacgagtgctccctgcatattcacgcatcttacagtatctcacagaagttgaacgtgccaatggcccctctgtcagaacctaacgcagtggggatcgtcattgcccatggttctgtcggggatgccattagcgtcatggtccctgacgtgtatataagcgatgatggagggtattcatggacgaagatgctggaaggacctcactactataccattctggactcaggtgggatcatcgtggctattgagcactcatctcgccccattaatgtcatcaagttctcgaccgacgaaggccagtgctggcagacatacaccttcacacgcgatcccatctatttcaccggccttgcctctgaacctggtgccaggtctatgaatatatccatctggggctttaccgagagtttcctcacatcgcaatgggtgtcttatacaatagactttaaggatatactggaacgcaattgtgaagaaaaagactacactatatggttggcgcactccactgaccctgaggactacgaggatggatgtatccttggatacaaggagcagttcctgagactccgcaagagctccgtgtgccagaacgggagagactatgtcgtgactaaacagccctctatatgcttgtgctctctggaggatttcctttgtgattttggttattacaggccagaaaacgattcaaagtgtgttgaacaacctgaactcaagggtcatgatctagaattctgcttgtatggaagagaagagcatttgacaacgaatggctaccggaaaataccaggtgataagtgtcaaggcggagttaatccagtacgagaagttaaagatctcaaaaagaagtgtacgtcaaatttcctgagcccggagaagcagaactcgaaatcaaattcagttcccataattcttgctatcgtcggcttaatgttagttactgtcgtggcgggcgttctgattgtgaaaaagtatgtgtgtggaggaagatttctcgtgcatcggtatagcgtgctacagcagcacgcagaggctaatggcgtcgacggagtggacgctctagacactgcgagtcataccaacaaatccggataccatgatgatagcgacgaggacctgttggag

SEQ ID NO: 19624 - DNA, 2082 bp, synthetic construct
  misc_feature 1..2082: note = source = /note="Description of Artificial Sequence: Synthetic coding sequence"
  source 1..2082: mol_type = other DNA
atgacttttggccagagcaaattgtatcgatccgaggattacggcaagaactttaaggacatcacggatcttattaacaacactttcattagaactgaattcgggatggcgataggtccagagaactctggtaaggtggtactcaccgccgaggtcagcggagggagccgcggaggcaggatcttccgctcgagtgacttcgcaaagaattttgtgcagactgacctcccctttcaccctcttacgcagatgatgtacagtccccaaaactctgattacctgttggccctgtccacagaaaacggtttatgggtgagcaagaattttggagggaaatgggaagagatccacaaggcagtctgcctggctaagtggggatccgataataccatcttcttcacgacatatgccaacggctcttgcaccgacctgggagcactagagctctggagaaccagcgacctgggcaagtcctttaagaccattggggtgaagatttactctttcggtttggggggacgatttctcttcgcctccgtcatggcggataaagacaccacccgccgcatccatgtgagcacagatcagggagatacttggagcatggcccagctgccctccgtcgggcaggagcagttttattcgatccttgctgctaacgatgacatggtttttatgcatgttgacgagccgggagatacggggttcggtactatcttcacaagcgacgatcgaggcatcgtgtacagcaagagcctggatagacatttgtatacgacgactggaggagaaacagatttcactaatgtaacatccctgagaggcgtgtatatcaccagtgtgctgtcagaagacaacagcatccagaccatgatcacctttgaccagggcggacgctggactcacctccggaagcccgaaaatagcgagtgtgacgcaacagccaaaaacaagaatgaatgttctctgcatatccatgctagttattccatatcccagaagttgaatgtgccaatggctccgcttagtgagcccaacgcagtgggcattgtgatagctcacggcagcgtaggggacgccatttccgttatggttccggatgtctacatatccgatgacggtgggtactcatggaccaagatgctcgaagggccccactactacacaatactggacagcggcggaataattgtggccatcgaacattcttcaaggcctatcaatgtcatcaagttctctacggacgagggccagtgctggcagacttacacctttacccgtgacccaatctacttcaccggcctggccagcgagcccggggcccgatctatgaatatctctatatggggtttcaccgagagttttctcacctcgcagtgggtctcctacaccatcgacttcaaggacattttagagaggaactgtgaagagaaggattacacaatatggttggcacactctacagatccggaggattacgaggatgggtgcatactgggttacaaagaacagttcctgagactccggaagtcctctgtctgtcaaaatggcagggattatgtagtgaccaagcagccttcaatctgtctgtgttctctggaagactttttgtgcgattttgggtattacagaccggagaacgacagcaaatgtgtggaacagcctgaactaaagggacacgatctcgagttctgcctgtacggcagagaagagcacttgaccaccaatgggtaccgaaagatccccggagataaatgccaagggggcgtaaatccggtccgcgaggttaaggacctgaagaagaagtgcacctctaatttcttgagccccgaaaagcagaattctaagtcaaactccgtgccgataatcttggccattgtcggactgatgttggtcacagttgtcgcaggtgtcttgatcgtgaagaaatacgtctgtggaggacggtttcttgtgcatcgttactcggtgctccagcagcacgcagaggctaatggggtggatggagtggatgcccttgatacagcttcccatacaaataaaagtggctaccatgatgactccgatgaggatctgttggag

SEQ ID NO: 19625 - DNA, 2082 bp, synthetic construct
  misc_feature 1..2082: note = source = /note="Description of Artificial Sequence: Synthetic coding sequence"
  source 1..2082: mol_type = other DNA
atgacatttggccagagtaagctgtacaggagtgaagactacggtaagaactttaaggatataactgacctcatcaacaatactttcatcagaactgagttcgggatggcgatcgggccagagaactctggcaaggtggtgttgaccgctgaggtgtccgggggcagcaggggcggacgaatctttcgttctagcgattttgccaagaattttgtgcagactgacctgccattccatcccctgacacagatgatgtactccccacagaacagcgactatttacttgcactgtcaaccgagaacggcctgtgggttagtaagaacttcggcgggaaatgggaagagatccacaaggcagtatgcctggccaaatggggttccgataatactatcttttttaccacatatgccaatggttcctgcactgatctgggagcactggaattatggcggactagtgatctgggtaaatcctttaagactatcggagtgaaaatttattcctttggccttggcggtcgtttcctcttcgcatctgtcatggccgacaaagatacaactcggcgcatacacgtttcaactgaccagggggacacctggtcaatggcacagctgcctagcgtggggcaagagcagttttattcgatcctcgctgccaacgatgatatggtatttatgcatgtggatgagcctggcgatactgggtttggcaccatatttaccagcgatgatagaggtattgtgtactccaagtcattggaccgtcacctgtataccaccactggaggggaaaccgactttaccaacgtgacatcgctcagaggggtgtatattacaagcgtactgtctgaggacaactccattcagaccatgatcactttcgaccagggtgggagatggacccatctgagaaagcctgagaacagtgagtgtgatgccaccgcaaaaaataaaaacgaatgttccctgcatatacacgcgtcctattctatctctcagaagttaaacgtgcccatggcaccactgtcggagcctaacgcagtcggaatagttatcgctcacggaagtgttggcgacgcaatcagcgtgatggtacccgacgtctatatttccgacgatggcggctattcttggacaaagatgttggaagggccacactattataccatcctggactctggcgggatcatagtggccattgagcactcttcacgcccaattaatgtgatcaaattcagcactgatgagggccagtgttggcagacatacacatttacacgtgatccaatttacttcaccggattggcttcagagccgggagccaggtcaatgaatatcagtatttgggggttcacggaatctttccttacgtcacagtgggtaagttatactatcgatttcaaagatattctggaacggaactgtgaagagaaggattatactatctggcttgcccacagtacagatccggaggattacgaagatggttgcatcctgggttataaggagcagttcttgcgcctgagaaagagttcggtgtgccagaatggaagagattacgtggtcactaagcagcccagcatatgtctgtgttccctcgaggactttctgtgcgactttggctattaccgccccgagaatgattctaaatgtgtagaacagcccgaattaaagggacatgatctggagttctgtttatacgggagagaggagcacctgacgactaatgggtacaggaaaattcctggggataaatgccagggcggagtgaacccggtccgggaagtcaaagacttaaaaaaaaagtgtacatctaacttcctctcgcccgaaaaacagaacagcaagtcaaattccgtccccattatcctggcaattgtgggtctcatgctggtgaccgtagtggccggtgtccttatcgtgaagaagtatgtctgcggggggcgatttttagtacatcggtattccgttttgcagcagcacgccgaggcaaatggcgtcgacggcgtggacgctcttgataccgcctcccatacgaacaaaagtggataccacgacgacagcgacgaagatctgttagaa

SEQ ID NO: 19626 - DNA, 2082 bp, synthetic construct
  misc_feature 1..2082: note = source = /note="Description of Artificial Sequence: Synthetic coding sequence"
  source 1..2082: mol_type = other DNA
atgaccttcggacagtcgaaactctacagatcagaggactatggcaaaaacttcaaggatataaccgatctgattaacaatactttcatccggaccgagttcggaatggccattggaccggagaactccggaaaggtcgtgctgactgccgaagtctcgggaggcagcagaggcgggcgcatcttcagatcgtccgacttcgctaagaatttcgtgcagaccgatctcccttttcacccactcacccaaatgatgtactcgccgcaaaacagcgactacctcctggcactgagcactgagaacggactgtgggtgagcaagaatttcgggggaaagtgggaagaaattcacaaagcggtgtgcctggcgaagtggggctccgacaatactatcttctttacgacctacgcgaacggatcgtgtaccgacctgggggcgctcgaactgtggcgcacctcggatcttggcaagagcttcaagaccatcggcgtgaaaatctactcgtttggacttggaggcagattcttgtttgcctctgtgatggctgataaagatactacccgcagaatccacgtctccactgaccagggagatacgtggagcatggcacagctgccgagcgtggggcaggaacagttctactccatcctcgcagctaacgacgatatggtgttcatgcacgtggacgaaccgggagacactggatttggaaccatcttcacttcagatgaccgcggaattgtgtattcaaagtcactggatagacacctctacaccaccaccggcggggaaactgatttcactaatgtgacctcattgcggggggtgtacatcactagcgtcctctcagaagataactcaatccagactatgatcactttcgatcaaggaggacggtggacccacctcagaaaacccgagaacagcgagtgtgacgctaccgcaaagaacaagaacgaatgttcattgcacatccacgcctcatactcgatctcgcagaagctcaacgtgcctatggccccactgtcggaaccaaacgctgtcggcatcgttatcgcacatggaagcgtgggagatgccatctctgtgatggtccccgacgtctacatctccgacgacggaggatacagctggaccaagatgctggaaggaccgcattactacaccattcttgactcaggagggatcattgtggccatcgagcattcgagccggccaataaacgtcattaagttctcaactgatgaggggcagtgctggcaaacttacactttcactcgcgacccgatctacttcactggactcgccagcgaacctggcgcgcgcagcatgaacatctcgatttggggtttcaccgaatcgttcctgaccagccaatgggtgtcgtacacgatcgatttcaaagatattctggagcgcaactgcgaagagaaagactacacgatctggctcgcacactccaccgacccggaagattacgaagatggatgcatcctcgggtacaaagaacaatttcttcggctccgcaagtcgtcagtgtgccagaatggacgcgactacgtcgtgacgaaacagcccagcatctgtctttgctcgctggaggacttcctgtgcgacttcggatactaccgtccggagaatgattcgaagtgtgtggagcaaccggaactgaaaggccatgatttggagttctgcctctacggacgggaggagcacctgacgacgaacggttaccggaaaatcccaggcgacaaatgccaaggtggagtcaacccagtcagagaagtcaaagatctgaagaagaagtgtactagcaacttcctgtccccagagaagcaaaatagcaaatctaactccgtgcccatcatcctggcaatcgtgggtctgatgcttgtcaccgtggtcgccggggtgctgatagtgaagaagtacgtgtgcggaggtcggttccttgtgcatcgatactccgtcctgcaacagcatgcggaagcgaacggcgtggacggcgttgatgccttggataccgcctcacacaccaataagtccgggtaccatgacgactccgatgaagatttgttggaa

SEQ ID NO: 19627 - DNA, 2082 bp, synthetic construct
  misc_feature 1..2082: note = source = /note="Description of Artificial Sequence: Synthetic coding sequence"
  source 1..2082: mol_type = other DNA
atgacctttgggcagtccaagctataccggtccgaagactatggcaaaaacttcaaggacattaccgatctcattaacaatacctttattcggacggaattcggaatggccatcggacctgaaaattcagggaaagtggtgttgaccgccgaagtgtctggaggctctagaggcgggcgcatcttcaggtcttccgacttcgccaagaacttcgtgcaaacagatctcccctttcaccccctaactcagatgatgtatagccctcagaacagcgattatctactcgcgctctccacagagaatgggttatgggtgtctaaaaattttggggggaaatgggaggagattcacaaggccgtatgtctggcgaaatgggggtctgacaatacaatattcttcacaacctatgccaatggctcttgcacagatctcggggcactcgaactgtggaggacaagtgatcttggcaagagcttcaagacaataggagtcaagatttattcttttgggctgggcgggaggtttctgttcgccagcgttatggctgacaaagatacaacacgccgaatccacgtgtccaccgaccagggcgatacttggagcatggctcagctgccgtctgtgggacaagaacagttttattcaatcctggctgccaatgatgatatggtgtttatgcatgtggacgagccaggcgacacaggtttcgggactatctttacatctgatgatcgcggaattgtgtatagtaagagtctggatagacacctgtatacaactaccggaggcgaaaccgacttcacgaacgtgacgtccttgagaggagtttacataacaagcgtcctgtcggaggacaatagtattcagactatgattacctttgaccagggcggcagatggacccacctccgcaaaccagagaattcagagtgcgatgcaacagccaaaaacaaaaacgagtgcagtctgcacattcacgcgagctactcaattagccagaagttaaatgtgcctatggctcccctgtcagagcctaacgccgtgggcattgttattgcccacgggagtgtgggggatgctatcagtgtaatggtgcccgatgtatatatcagcgacgacggtgggtactcttggacaaaaatgttagaggggccacattactacactattctcgattccggggggataattgttgcgatcgagcactccagcagacccataaacgtgatcaagttcagcaccgatgagggacagtgctggcagacctacactttcactcgggatcccatctattttacaggactcgcaagtgaacccggtgccaggagcatgaatatctccatctgggggtttactgagtcattcctcaccagtcaatgggttagttatactatagactttaaggacatcttggaaagaaactgcgaggagaaagactatacaatctggctcgcccatagtactgatccagaagactatgaggatgggtgcatacttgggtacaaggagcagttccttagactcaggaagagctctgtgtgccagaacggcagggactatgtggtaacaaagcagccgtcaatctgtctatgttccctggaggactttctctgtgactttgggtactataggcccgagaatgattctaagtgcgtggaacagcctgagcttaagggtcatgatctggaattttgcctctatgggcgggaggagcatttaacaacaaatggatatcgcaagatcccgggagataagtgccagggtggcgtgaaccccgtccgcgaggttaaagacctaaagaagaaatgtacctctaactttttgtcccccgagaaacaaaatagtaagtcaaactcagtgcccatcatcctggcaattgtgggattaatgttggtgacggtggtggccggcgtcctgattgtgaagaagtacgtgtgcggcggccgttttctcgtacacaggtatagtgtgctgcagcagcacgccgaagcgaatggtgtggacggcgtcgatgcactggacacagcttcacacaccaacaagagtgggtaccacgatgattcagacgaagacttgctagaa

SEQ ID NO: 19628 - DNA, 2082 bp, synthetic construct
  misc_feature 1..2082: note = source = /note="Description of Artificial Sequence: Synthetic coding sequence"
  source 1..2082: mol_type = other DNA
atgaccttcggacaatccaagctgtacaggtccgaggactatggaaaaaactttaaagacatcacggatcttatcaacaacacctttatcagaactgaattcggcatggccattggtccagaaaattccggaaaggttgtccttactgccgaagtctcgggaggatcgcgcggcggccggatttttcgctccagcgatttcgcaaagaactttgtgcaaaccgatctgccttttcacccgctgactcaaatgatgtactcccctcagaattcggattacctgctcgcattgtccactgaaaatggattgtgggtgtccaagaactttggcggaaagtgggaagaaatccataaagccgtctgcttggccaaatgggggagcgataacactattttctttactacttacgcaaatggttcgtgtaccgacctgggtgccctcgagctctggagaacttcggatctgggaaagtcgttcaaaaccatcggcgtcaagatttactcatttggacttggaggacgatttctttttgcgtcggtcatggccgataaggatactactagaagaatccatgtgtcaaccgatcaaggtgatacttggtcaatggcacagctgccgtcagttggtcaggagcagttttactcgatcctcgcagccaacgatgatatggtgttcatgcatgtggatgagccaggcgatactggtttcggcaccatctttacttcggatgatagaggaattgtgtattctaaaagccttgataggcatctgtacacgactactggtggcgagactgacttcacgaatgtgacttccctccggggcgtctatatcacttccgttctgtcggaggacaacagcatccaaaccatgattaccttcgaccaaggcggcagatggacgcaccttcgcaaaccggagaactccgaatgcgatgcaactgcaaagaataagaacgagtgtagcctgcatatccacgcctcctactccatttcccagaaactcaacgtgcccatggcgccgctgtcagagcccaacgcagtgggtatcgtgattgcacatggttcggtgggcgatgcaatttcagtgatggtcccagacgtttacatctcagacgatggaggttactcctggaccaagatgcttgaagggccacattactacactatacttgattcgggaggaattatcgtggccattgagcattcgagcagacctatcaacgtgattaagttttccaccgatgaaggccaatgttggcaaacctacactttcacccgcgaccctatttactttactggtctggcatccgaacctggcgcaagatctatgaatatcagcatatgggggttcaccgagagcttccttacctcacaatgggtaagctacactatcgatttcaaggatatactggaacgcaattgtgaggaaaaagactatactatatggctggcacactcaaccgatccagaagattacgaggatggatgcatccttggatacaaagagcagttcctgcgactgcgcaagtcgtccgtctgtcagaatggcagggactacgtggtgaccaagcaaccctccatctgtctttgttccctcgaagattttctctgtgactttgggtactaccgtcctgaaaacgattccaagtgtgtggagcaacccgaactgaagggacatgatcttgaattctgcctgtacggtagagaagaacatctcactactaatggatatcgcaaaatccctggggataagtgccaaggcggcgtgaatcctgtgcgagaagttaaagatcttaagaaaaagtgcaccagcaactttctttcccctgagaagcagaactcaaaaagcaacagcgtgcctatcattctggcaatagtcggactgatgctggtgaccgtcgtggctggagtcttgatagtgaaaaagtacgtgtgtggaggacggtttctcgtgcacagatattccgtgctgcagcagcacgctgaagcaaatggagtcgacggagtggatgcacttgatacggcgtcgcataccaacaagtccggctaccatgatgactccgacgaagatctgcttgaa

SEQ ID NO: 19629 - DNA, 2082 bp, synthetic construct
  misc_feature 1..2082: note = source = /note="Description of Artificial Sequence: Synthetic coding sequence"
  source 1..2082: mol_type = other DNA
atgacctttggccagtcaaagctttaccgaagcgaggactacggtaagaacttcaaagatattaccgatttgatcaataacactttcatcagaacggagttcggtatggccattgggcctgagaactctggcaaagttgttcttactgccgaagtctctggtggttcgcgaggcggtcggattttccggtcaagcgactttgcgaagaacttcgttcaaactgacctgccgtttcatccccttacacagatgatgtactcccctcaaaactctgattacctgctcgctctctctaccgaaaatgggttatgggtgtccaagaacttcggaggtaaatgggaggagatccacaaggccgtctgcctcgcaaagtggggctcggacaatacaattttctttactacttacgccaatggctcctgcactgatctgggcgctctagagctttggcggacctcagaccttggcaaatcatttaagactataggcgtcaaaatttactcttttggtctaggaggacggttcctgttcgcatcagttatggctgataaggacaccacgagacggatacatgtgtcgaccgaccaaggcgatacttggagtatggcccagttaccctcggtcggccaggagcagttttatagtattctggcagccaacgatgatatggtttttatgcatgttgatgagcccggagacactggcttcggtacgatcttcacgagtgacgatcgggggattgtctattcaaaatccttggaccgacatctctatactacaactggtggtgaaaccgatttcaccaatgttacatcacttcggggtgtatatatcacctccgtcctttcggaagacaactccattcagacgatgatcacatttgaccaagggggccgttggacgcatctacgtaagcctgaaaacagcgaatgcgacgcaaccgccaagaacaagaatgagtgttccctgcacattcatgcgtcctactcaatatcacaaaaactcaatgtgccaatggccccgctaagtgagcctaatgccgtagggatagtcatagcccacggatccgtcggggatgcgatttctgtaatggtcccggatgtttatatctccgacgacggaggttactcctggacaaagatgctagaagggccacattactatacgatcttagattctggcgggattatcgtggcgatagaacactcctcgcgtcctattaatgttataaagttttcgaccgacgaaggacaatgttggcagacttatacctttacaagagaccctatctatttcacgggtctggcttctgagcccggtgcacgcagcatgaatatcagtatttgggggttcactgagagtttcttgacaagccaatgggtttcgtacaccatagatttcaaagacatccttgaacgcaattgtgaagagaaagattataccatctggttggctcatagtacagaccctgaggattacgaagatgggtgtatactcggttacaaggagcaatttttgcgattgcgtaagtcctctgtgtgtcagaacggacgcgactatgtggtaaccaagcaaccgagcatatgcctttgttctttggaagacttcttgtgtgattttggttattatcgccccgaaaacgactcaaaatgcgtggagcagcctgagttgaagggacacgacttagaattctgcctttatggacgtgaagaacacttgacaacaaacggctaccgaaagatccccggcgacaagtgccaaggcggagtcaacccagtgcgcgaggtgaaggatttgaagaaaaagtgcacctcgaacttcctctctcccgaaaagcagaactcgaaatcgaactccgtacccattatcctggccatcgttggcctcatgctggtcactgtcgttgcaggtgtactgattgtgaagaagtacgtctgcggcggccgctttctcgtccatcgctacagcgtgctccagcagcatgctgaggcgaacggtgttgacggtgtcgatgccctggacactgcctctcataccaacaagagcggataccatgacgacagtgacgaggacctgttagag

SEQ ID NO: 19630 - DNA, 2082 bp, synthetic construct
  misc_feature 1..2082: note = source = /note="Description of Artificial Sequence: Synthetic coding sequence"
  source 1..2082: mol_type = other DNA
atgacattcggtcagtcaaaactgtatcgatctgaagattatggcaaaaattttaaggacatcactgacctgataaacaacacttttatcaggacagaattcgggatggccatcgggccagaaaattcgggcaaagtggtcttaaccgcagaggtgtccggaggttcaagaggcgggcgcatatttagaagctccgactttgcaaaaaatttcgtgcaaactgatctgccctttcaccccctgacccagatgatgtactccccccagaattcggattacctgttggctttgtccacagagaacggactgtgggtctcgaagaactttggcggcaaatgggaggaaatccacaaggccgtgtgtctggccaaatggggtagtgacaacacaatttttttcactacgtatgcaaatggaagctgcacagacttgggggccctagagctgtggagaacaagtgacttggggaaatccttcaaaactattggcgtgaaaatctattctttcggactgggtggtcgatttctcttcgcaagtgtaatggctgacaaggataccaccagacggatccacgtcagcacagaccagggagacacttggagcatggcccagcttccatccgtgggtcaggagcaattttatagtatcttagccgccaacgatgacatggtctttatgcacgttgacgaacccggcgatacagggttcggaactatattcactagtgacgaccgtggcattgtgtactcgaaaagcttggatcgacatctgtatacaaccaccggcggcgaaacggattttacaaatgtcacttccctccgaggagtatacataacctctgtgctgagcgaggataactccattcaaacaatgattacttttgatcagggaggccgttggacccatctccgcaagccagagaactccgagtgcgacgccactgcaaaaaacaaaaatgaatgctcgctacatattcacgcgagctattcaatctcccagaaactcaacgtgccaatggcacctctgtctgagcccaatgctgtaggcatcgtcattgcacatgggtccgtgggcgacgcaatatcggtgatggtacctgacgtatacatcagcgacgacggaggctatagctggaccaagatgctagagggcccgcattattacacgatcttagattctggggggattatcgtcgctatcgagcacagcagtaggccaataaatgtcataaaattttctactgatgaaggccagtgctggcagacctacaccttcacaagggaccccatctacttcacagggctggccagcgaacctggcgctcgaagcatgaatatttcaatctgggggtttaccgaaagttttctgacttctcagtgggtgtcatataccatcgattttaaggacattttggagcgtaattgcgaggagaaggactataccatctggctggctcacagtactgatcccgaggactatgaggacggttgtatccttggatacaaagaacagtttctgcgcctgaggaagtcctcagtttgccaaaacggcagagactatgtggttaccaaacagccctccatatgtctctgctccctggaagactttttgtgcgattttggctattataggccagagaatgatagcaaatgcgttgagcaaccagaactcaagggccacgatttggagttctgcctttacggaagggaggaacaccttactacaaacgggtaccggaaaatcccaggcgataaatgccagggaggagtgaatccagtgcgagaagtgaaggacctgaaaaaaaagtgcacctcaaattttctcagtcccgagaagcagaactcaaagagcaattccgttcccattatcctcgctattgtggggttgatgcttgtcacagtggtcgccggtgtgctgattgtgaaaaaatatgtgtgcggaggcagatttctcgttcatagatactccgtgttgcagcagcatgccgaggcaaacggtgtggatggagtggacgccctggacacagctagtcataccaataagagcgggtaccacgatgattctgacgaggaccttcttgag

SEQ ID NO: 19631 - DNA, 2082 bp, synthetic construct
  misc_feature 1..2082: note = source = /note="Description of Artificial Sequence: Synthetic coding sequence"
  source 1..2082: mol_type = other DNA
atgaccttcggacagtctaaactataccggagtgaggactacggaaagaacttcaaagacattacggatctcattaacaatacattcattagaacggagtttggaatggccatagggccggaaaactccggaaaagtcgtactgactgcagaggtgtccggtgggtcacgcggtggcaggatctttcgaagcagcgacttcgctaaaaatttcgtgcaaactgacctgcccttccatccactgactcagatgatgtacagcccgcagaattccgactacttgctggcattgagtacggaaaacggattatgggtttcaaaaaactttggaggcaagtgggaagaaatccataaagccgtatgtctagcaaaatggggcagtgacaacaccattttctttacaacctatgcaaacggatcctgcacagacctaggcgccctggaactttggcggaccagtgacctggggaagagtttcaaaaccattggggttaaaatctactctttcggactgggcggcaggtttctttttgccagcgtaatggccgacaaggacacaacccgcagaattcacgtgagcaccgatcagggtgacacctggtccatggcgcaacttccctccgttggtcaagaacagttttacagtattctggccgcaaatgacgatatggtgtttatgcatgtggatgaaccaggcgacactggtttcgggaccatattcacgtcagacgaccgggggatcgtttactctaagagtctggacagacacctgtatactacaactggcggcgaaactgactttacaaatgtaacaagtctccggggcgtctatatcaccagtgtgctgtccgaagacaattccatccagaccatgattacgttcgatcagggcggcagatggacccacctgaggaagcctgagaatagtgaatgtgatgctaccgctaaaaataaaaatgagtgtagtctgcacattcacgcatcttatagcattagccagaagcttaacgtgccaatggcacccctatcagagccgaacgctgtgggaatcgtgatcgctcacggttcagtgggggatgcaataagcgtgatggtgccggacgtctatatatccgacgacgggggatattcctggactaagatgctcgaaggtccccactactacacgatcctggacagcggtggcataatagttgccattgaacacagctcccgcccgataaatgttatcaaattttctaccgacgagggccaatgttggcagacgtacactttcacaagggatcctatttacttcacgggcctcgcctctgagcccggggcgaggagcatgaatatcagcatctgggggtttactgaaagctttcttacctcacagtgggtgtcatacaccattgactttaaagatattttggaacgcaactgcgaggagaaggattacacgatctggctggcccacagtacggaccccgaggactacgaggatggctgtatcctgggatataaggagcagttcctaagactgagaaagagctccgtgtgccaaaatgggcgagactatgtggttaccaagcagccatctatctgtttgtgctccctagaggatttcctctgtgactttggctactaccggcctgaaaatgattctaaatgtgtggaacagcccgaattaaaaggtcacgacctcgagttctgtctgtacggcagggaggagcaccttacaacaaatggatacagaaaaataccaggcgacaagtgccagggaggggtcaatccagtgcgggaggtgaaggatttaaagaagaaatgcacaagcaacttcctaagccccgaaaagcaaaattccaagtcgaattccgtgccaataattttggccatcgtaggactgatgctggttaccgtggtggcgggtgtgcttatcgtgaagaagtatgtttgcggcggacgtttcctagtgcatcgctactctgtcttgcagcagcacgctgaggcaaatggcgtggacggggtggatgcattggacactgcctcccatacgaacaagtccggctaccatgacgactccgacgaagatctgctggag

SEQ ID NO: 19632 - DNA, 2082 bp, synthetic construct
  misc_feature 1..2082: note = source = /note="Description of Artificial Sequence: Synthetic coding sequence"
  source 1..2082: mol_type = other DNA
atgacctttggacaatcgaagctctataggtccgaggactacggtaaaaactttaaagatatcactgatcttatcaataacactttcattagaaccgagtttggaatggccattggtcctgaaaacagcggtaaagtggtgcttactgcagaagtgtccggtggctcgcggggtggacggatatttcgttcatcggattttgcgaagaactttgtgcagactgatctcccttttcatccactgactcaaatgatgtactcacctcaaaactcagactacctgctggcactgtcgaccgaaaacggactgtgggtgagcaaaaactttggcgggaaatgggaagaaatccataaagcagtgtgtcttgcaaagtggggttccgacaacactatctttttcaccacgtacgcaaacgggtcctgcaccgacctcggcgcacttgagctctggaggacctctgatcttggaaagtcgtttaagaccatcggtgtgaagatctactccttcggactcgggggaagattcctctttgcaagcgtcatggccgataaggataccactcgacgtatccatgtctcaaccgatcaaggggatacgtggtccatggcacaacttccgtccgtgggtcaggagcagttttactccattctcgcagctaacgacgatatggttttcatgcacgtggatgagcctggggatactggattcggaaccattttcacttcagacgatcgcggaatcgtgtattctaagagccttgatagacacttgtacactaccaccggcggcgaaacggacttcactaatgtgacctcacttcgcggagtctacataacctctgtcctgagcgaagataacagcattcagaccatgatcacctttgatcaagggggacgttggactcatctgagaaagcccgaaaactccgagtgtgatgccacggcgaaaaacaagaatgaatgttccctccatattcacgcctcctactcaatctcccaaaagctgaacgtgcctatggcacctctgtcagaacctaatgcagtgggtattgtgatcgcacacgggtcggtaggtgacgctatatcagtcatggtgcctgacgtgtacattagtgatgatggaggatactcttggaccaaaatgctcgagggcccacattactacactatacttgactccggaggaatcattgtcgccatcgaacattcaagcagacctatcaatgtgattaagttttcgaccgacgaagggcaatgttggcagacttacactttcacccgtgacccaatttactttaccggtcttgcatcagagccaggagcaagaagcatgaacatatcaatttgggggtttactgagtcctttctgacctcacaatgggtgagctacacgattgatttcaaggatatcctggagaggaactgcgaggaaaaggactatactatttggctggcacactcaaccgatcctgaagattacgaagatggctgtattctcggttacaaggagcagtttctccgcctcagaaagtcatccgtctgccagaacggacgggactacgtggtgactaagcaaccctccatttgtctgtgctcgctcgaggattttctttgtgatttcggctattacaggcctgaaaacgactcgaaatgtgtcgagcaacctgaacttaagggacatgacctggaattttgcctttacggacgggaggagcatctgacgactaacggttaccggaaaattcctggagataagtgccaaggtggagtcaacccggtcagagaagttaaggacttgaagaaaaagtgtacttcaaacttcctgtcacctgaaaagcagaactccaaatcgaacagcgtgcctattatcctggccatcgtgggacttatgctcgttactgtggttgcaggtgtgctgattgtgaagaaatacgtgtgtggcgggagattcctggtccacagatactccgtcctgcaacagcacgcagaagcgaacggagtggatggtgtcgacgcactggataccgcatcgcatacgaataagtccggataccacgatgattcagacgaagatcttctggag

SEQ ID NO: 19633 - DNA, 2082 bp, synthetic construct
  misc_feature 1..2082: note = source = /note="Description of Artificial Sequence: Synthetic coding sequence"
  source 1..2082: mol_type = other DNA
atgacattcggtcaaagcaaactttatcggtctgaagattacggaaaaaacttcaaggacatcaccgacttaattaataatacattcattaggacagaatttggaatggctatcgggcccgaaaattctggcaaggttgtcttgacggcagaggtttcagggggatctcggggtggacgcatcttcagaagtagtgacttcgctaagaatttcgtgcagactgaccttccctttcacccactgacgcaaatgatgtattctccacaaaattctgattacctcttggccttgagcactgaaaatggactatgggtttccaaaaattttggtggaaaatgggaagaaattcataaagccgtttgcttggctaaatggggctctgacaacacaatattcttcaccacttatgcaaatggctcatgcactgatttaggagcccttgagttatggcgaacaagcgacttggggaaatcgtttaagacaattggagtgaaaatttacagcttcgggttgggaggaaggttcttgttcgcttcagttatggctgataaagacacaactaggaggatacatgtctctacagatcaaggagacacttggtccatggctcaacttccatcagtcgggcaagagcaattttactcaattttagcggccaatgacgatatggtctttatgcatgtggatgagccaggtgatactggtttcgggaccatattcacctcagatgatagaggaatagtatactcaaagtcgttggatagacacctttacacgactactggaggggaaactgattttaccaatgttacgagcttaagaggtgtgtacattactagcgtgttgtctgaagataatagtattcagaccatgatcacatttgaccagggtggtaggtggactcaccttaggaagccagaaaattcagaatgtgatgcaaccgcgaagaacaagaatgagtgttctttgcatatacatgcctcctattctatcagccaaaagttaaatgttccgatggctcctcttagcgaacctaatgctgtcggtattgttattgctcatggttcagtgggggacgctatttcggtaatggttcctgatgtatatatttctgatgatggcggatacagctggaccaaaatgttggaaggcccccattattacacaattctggactcgggtgggattattgtcgcaattgaacacagctcgagaccaatcaacgtgattaagttctccacggatgagggtcagtgctggcagacatacacatttactagagaccccatctattttactggcctagcaagtgagccgggtgctagatcaatgaatatttctatctggggttttacagagagtttcctaactagtcaatgggtgtcgtatacgattgattttaaggatatattggaaagaaactgtgaagaaaaggattacacaatttggttggctcacagcactgatccagaagattacgaggacggttgcattttggggtacaaagaacagtttttgaggcttaggaagagctctgtctgtcagaacgggagggattacgtggttactaagcagccgtccatatgtttatgttccttagaggattttctttgtgactttggctattatcgtccagagaatgatagcaagtgcgtggaacaaccagagttgaagggacatgatctggaattctgcttgtacggaagagaggaacatctaaccacgaacggatataggaagattcccggcgataagtgccaaggaggcgtaaatcctgtgagagaggtcaaggacctaaagaaaaaatgcactagcaacttcttaagccccgagaagcagaacagcaaatctaattccgttccgatcatattagctattgtcgggcttatgttggtaaccgtagtggccggcgttcttatcgtcaagaagtatgtgtgcgggggaaggttccttgttcataggtatagcgtattgcaacagcatgctgaagctaatggagttgatggtgttgacgcacttgatactgcctcacataccaacaagtctgggtaccatgacgactctgatgaagatctacttgaa

SEQ ID NO: 19634 - DNA, 2082 bp, synthetic construct
  misc_feature 1..2082: note = source = /note="Description of Artificial Sequence: Synthetic coding sequence"
  source 1..2082: mol_type = other DNA
atgacgttcggacaatccaaactgtatagatcggaggattacggcaaaaactttaaggacatcaccgacctgatcaataacaccttcatccgcaccgagtttggaatggctatcggaccagaaaactccggtaaggtggttctcactgctgaggtgagcggcgggtcccgcggagggcgcatcttccgctcatcggacttcgcaaaaaactttgtgcagaccgacctgcctttccatccgctcacgcagatgatgtacagcccccagaactccgactacctgctcgcactctccacggaaaatgggctgtgggtgtccaaaaacttcggaggaaagtgggaagaaatccataaggcggtgtgccttgcaaaatggggctccgacaacactatctttttcactacctacgccaacggatcatgcactgatctcggggcactggaactgtggaggacctcagatttgggtaagtcgttcaagactattggagtgaagatctactcgttcggcctgggcgggcgctttttgttcgcctccgtgatggccgataaggatactactagacggatccacgtgtcgacggatcaaggggacacctggtcgatggcgcagctgccttccgttggtcaggaacagttctactcgatcctcgcagcgaacgatgatatggttttcatgcacgtcgacgaaccgggagatactgggtttggtaccatcttcacctcggatgaccggggaatcgtgtactcaaagagtctcgacaggcacctgtacaccactacgggcggagagactgacttcactaatgtgactagccttcgcggagtgtacatcactagcgtgctgagcgaggacaactcaatccaaaccatgattaccttcgatcaaggaggccggtggacccatctcaggaagccggaaaattccgaatgtgatgcgaccgccaaaaacaaaaacgagtgctcgctgcacattcacgcgtcctactccatcagccaaaagttgaatgtcccgatggcgcctctgtcagaacccaacgcggtggggatcgtgatcgcacacggatcagtgggcgacgccatctccgtgatggtgccggatgtgtacatctcggatgacgggggatacagctggactaagatgctggaggggccacactactacactattctggactcgggagggattatcgtggcgatcgagcactcctcgcgcccgattaacgttatcaagttttcaactgacgaaggacagtgttggcaaacctacactttcacccgggatccgatctacttcaccggcctcgcgagcgagcctggagcacgctcgatgaatatcagcatttgggggttcactgaatccttcctcacttcccagtgggtgtcgtacactatcgacttcaaagatattctggaaagaaactgcgaagagaaagactacactatctggctcgctcatagcactgatccagaagattatgaagatggatgcatccttggatacaaggagcagttcctccgcctgcgcaaaagctcggtgtgtcagaatggacgggactacgtcgtcaccaagcagccgtcaatctgcttgtgttcactcgaggattttctgtgcgatttcggatactacagaccggaaaatgactcgaaatgcgtcgaacagcccgaactgaagggacatgatttggaattttgcctgtacgggcgcgaagaacatctgaccacgaacggctacagaaaaatccctggcgacaaatgccagggaggtgttaacccagtgcgggaggtgaaggatctgaagaagaagtgcacctcgaacttcctgtctccggagaagcagaattccaaatctaacagcgtgccaatcatcctggcgatcgtgggccttatgctggtgactgtcgtggccggtgtcctgattgtgaagaagtacgtgtgcggggggcggtttctcgtgcaccgctactcagtcctccaacagcatgcagaagcgaatggagtggatggagtcgacgcccttgataccgcctcgcacacgaacaaatccggataccacgacgattcagacgaggatctgcttgag

SEQ ID NO: 19635 - DNA, 2082 bp, synthetic construct
  misc_feature 1..2082: note = source = /note="Description of Artificial Sequence: Synthetic coding sequence"
  source 1..2082: mol_type = other DNA
atgacctttggccaaagcaagttgtaccggagtgaggattatggaaagaacttcaaagatatcaccgatcttataaataacaccttcatcaggaccgaattcggcatggccataggtcccgagaactctggcaaggtcgtcctgacagctgaggttagcggtggctctcgcggcgggcgcatctttaggagttccgactttgccaagaactttgtgcagaccgatctacctttccatcctctaacccagatgatgtattcaccccaaaacagcgattacttacttgccctctcaaccgagaacggactgtgggtctccaagaattttggaggaaagtgggaggagatccacaaagcggtgtgcttagcaaaatggggatctgataacaccatattctttacaacatacgccaatggcagttgtacagacctgggagcactggagttgtggagaacttctgatctgggcaagtccttcaagaccatcggcgtgaaaatctactcttttgggttgggcggcagatttctcttcgccagcgttatggctgataaagatactaccaggcgcattcacgtgtctacagatcaaggggatacttggtcgatggctcaacttccaagcgtgggccaagaacagttctacagcatactggccgctaatgacgacatggtgtttatgcacgtggacgagcccggagatacaggattcgggacgatttttacctccgacgatcgcggcattgtgtacagcaaatctcttgacaggcacctgtacacaaccacaggaggagagaccgatttcaccaatgttaccagtctgcgcggcgtctacatcacatccgtgttaagcgaagacaactcaattcagaccatgataacttttgaccaaggaggcaggtggacccatctgagaaagccagaaaatagcgaatgtgatgctaccgctaagaataaaaacgaatgctccttgcacatccacgcttcctactcaatcagccaaaagctgaatgtgcctatggctcctctgtctgaaccaaacgctgttggcatcgtcatcgcacacggaagcgtgggcgatgcaatcagcgtaatggtgcccgatgtgtatatctccgacgatggaggatactcctggactaaaatgctggagggacctcactactacaccatactcgacagcggaggcattatcgtcgccatcgagcacagcagcagaccaatcaacgtgatcaagtttagcaccgatgaaggtcaatgttggcaaacctatactttcactcgcgatcctatctatttcactggcttggcttccgaaccaggcgcacggtctatgaacattagtatttggggctttacagagagttttctgacgagccagtgggtaagttacaccatagacttcaaagacatcctagagagaaactgcgaagaaaaggactatacaatttggctcgcccacagtactgaccctgaggactacgaagacggctgtatcctgggctataaggaacagtttctgcgcttgagaaaaagtagcgtttgccagaacggacgggactacgtagttaccaaacaaccatcgatctgcctgtgtagcctggaggacttcctctgtgactttggctattacagacctgagaacgacagcaagtgtgtggagcagccagaattgaagggtcatgacctggagttttgcctctacggcagagaagaacacctcacaaccaacggatatcgcaaaatacctggcgacaagtgccaaggcggagttaacccggtgcgcgaagtgaaagatctcaaaaaaaaatgtacctcgaactttctgtcccccgagaaacagaacagcaaatccaactccgtgccaattatccttgctattgtgggcttgatgctggtcacagtggtggccggcgtgctcatagtcaagaaatacgtgtgcggagggaggttcctggttcacagatacagcgtgctgcaacagcatgccgaagccaacggagttgatggcgttgatgcactcgacaccgcaagtcacacaaacaaatcaggttatcacgatgacagcgacgaagaccttctcgag

SEQ ID NO: 19636 - DNA, 2082 bp, synthetic construct
  misc_feature 1..2082: note = source = /note="Description of Artificial Sequence: Synthetic coding sequence"
  source 1..2082: mol_type = other DNA
atgacattcggccagtctaagctgtacaggtccgaggactacggaaagaattttaaggacatcacagatctgattaataacacctttatccggaccgagtttggcatggcaataggacccgaaaatagtggcaaggtggtgctcactgccgaggtatccggcggctcccgcggaggccgtatcttccgtagtagtgacttcgctaagaatttcgtccagacggacttgccatttcatccgcttacacagatgatgtactctccgcagaactccgactacttgctggcgctcagtacagaaaacggtctttgggtgagtaagaacttcggagggaaatgggaagaaattcataaggctgtgtgtttagctaagtggggcagtgacaatacaattttttttaccacctatgccaacggaagctgcaccgaccttggagctttagagctctggagaacctccgatttgggaaaatcttttaaaaccatcggagttaagatctatagttttgggcttggcgggaggtttctgttcgcatcagtgatggccgataaggacactaccaggcggattcacgtgagcaccgatcagggtgacacctggtcaatggcccagttgccttcagttgggcaagaacagttctacagcattctggcagcgaacgatgatatggtcttcatgcacgtcgacgagcctggtgatacaggctttggaactatattcacttctgatgaccgtggtatcgtatattcaaagtccctggaccggcatctatataccaccaccggcggtgaaactgattttacaaacgtgacctccctgcgcggggtgtatataacttccgtgctcagtgaggacaactcaatccagacaatgatcacctttgatcaaggtggacggtggacgcacctgcggaaacctgagaacagtgagtgtgacgctacggctaagaacaagaacgagtgctccttacacatccatgcttcatatagcattagtcagaaactgaacgtacctatggcccccctgtctgaacctaacgcggtaggaattgttatcgcccacgggagtgtcggcgatgcgataagtgtcatggtccctgacgtgtatatatccgacgatggggggtactcttggactaagatgcttgaaggaccacattactatacgattctggactccggtggaatcatcgtggcaatcgagcatagcagtagaccaatcaacgtgataaagttctcgaccgacgagggtcagtgctggcagacttacactttcacccgtgatcccatatattttacagggctggcatccgagcctggagcccggtcaatgaacataagtatttggggtttcactgaatcatttttaacgtcccagtgggttagctacacaattgattttaaagacattttggagaggaattgtgaggaaaaggactacacaatttggctggcacattccaccgaccccgaggactatgaggatggctgtatcctcggatataaagaacaatttctgcgactacggaaaagcagcgtgtgtcaaaacggaagagactacgtggtaacaaaacagccatctatatgcctgtgctctttagaggatttcttgtgtgacttcggatattatcgacctgagaacgacagcaaatgcgtggagcagccagaactcaagggacatgacctggagttttgtctctatgggcgtgaagagcatctcacaacgaatgggtatcggaaaattcctggcgataagtgccaggggggagtcaatccagtgagggaagtgaaggacttaaaaaaaaaatgtacaagtaactttctgagtccagagaagcagaactcgaagtccaattcggtgcccattattcttgccattgtgggcttgatgttggtgacagtcgttgctggagtacttatcgtgaagaagtatgtctgcggaggtcgtttcctggtgcaccgatactccgtgcttcagcagcacgcggaagccaatggcgttgatggtgtcgatgctctcgacactgccagccacaccaataaatccgggtatcacgacgactccgacgaggacctactggaa

SEQ ID NO: 19637 - DNA, 2082 bp, synthetic construct
  misc_feature 1..2082: note = source = /note="Description of Artificial Sequence: Synthetic coding sequence"
  source 1..2082: mol_type = other DNA
atgactttcggccagtctaagctgtatagaagtgaggactatggaaaaaatttcaaggacattacggacttaatcaacaataccttcattcgcaccgagttcggtatggccatcggacctgagaattccggtaaagtggtcctgacagccgaagtgtctggaggcagccgcgggggcaggatctttaggtcttctgatttcgctaagaatttcgttcagacagatttaccttttcatccgcttacccagatgatgtattctccccagaactccgattacctactcgcgctgtctacagagaacggactgtgggtgagcaagaattttggggggaagtgggaggagatccacaaggctgtctgcctggccaaatggggatctgacaacaccattttcttcactacatacgccaacgggagctgcaccgaccttggtgccctcgagctttggcgcaccagtgacctgggtaagagttttaagacaataggggtgaagatttacagctttggacttggcggcaggttcttgttcgccagcgtgatggcggataaagatactacgagacgaattcacgtcagtacagatcaaggggatacgtggtccatggcccagctcccttccgttggtcaggaacagttctactccatccttgcagcaaacgatgacatggtgttcatgcatgttgacgaacctggcgacacaggatttggcacaatctttacttccgatgaccgcggaatagtgtactcgaagagcctcgaccgacatctgtataccactacaggaggggagaccgatttcactaacgtgaccagcctcaggggtgtgtatatcacgagcgtcctgagtgaggacaattctattcaaactatgatcacgtttgaccaggggggaagatggacgcacctgcgaaagcctgaaaatagcgaatgtgacgcaacagccaaaaacaagaacgagtgtagtctgcacatccacgcctcctatagtatatcccagaaactgaatgtgccaatggctcctctatcagagccaaacgccgtgggaattgtgattgctcatggaagcgtaggggacgccatttccgttatggtgcctgatgtgtacatttctgacgacggaggatactcatggacaaagatgctcgaggggccccactattatacaatccttgattctggaggtatcattgttgccatagagcactcaagtaggcccattaatgtcataaagttttctacagacgagggccagtgttggcagacgtacacatttacccgcgatcccatttatttcaccggcctggcctctgagcctggggcgagatccatgaatattagtatttggggattcacagagagcttcttgaccagtcagtgggtgtcatatacaatagacttcaaggatatattggagcgcaactgcgaggagaaggactataccatctggctggcgcactccactgaccccgaagattacgaagacgggtgtatcctggggtataaggagcaattcctgcgtctgcgtaaatcctccgtctgccagaatggtagggattacgtggtgacaaagcagccttcgatctgcctctgcagtctggaggattttctatgcgactttgggtactaccgccccgagaatgattctaaatgcgtcgagcaaccagaactcaaggggcacgatctcgaattttgcctgtatgggcgcgaagaacacttaaccaccaatggctatcgaaaaatccccggagataagtgccagggaggcgtaaatcccgtcagggaagtcaaggacttgaagaaaaaatgcacatcaaattttctttctccagaaaaacagaattcgaagagcaactctgtgcctattatcctagccatcgtggggctcatgctggtcaccgtcgttgccggcgtgctgatcgtgaaaaagtacgtatgcggaggccgctttctcgtccatcggtactcggtgctgcagcaacacgcggaggctaatggagtggacggagtcgacgcgttggataccgcaagccacaccaacaagtccggatatcacgacgattccgacgaagatctgctcgag

SEQ ID NO: 19638 - DNA, 2082 bp, synthetic construct
  misc_feature 1..2082: note = source = /note="Description of Artificial Sequence: Synthetic coding sequence"
  source 1..2082: mol_type = other DNA
atgactttcggacaatccaagctgtataggagcgaagattacggcaagaactttaaggatatcactgatcttatcaacaataccttcatccgaaccgagtttggtatggccatcggtccggaaaattcgggaaaagttgtgctgactgcggaggtgtccggcggctcgcgcggaggacgcatcttccggtcgtcagacttcgccaagaacttcgtccagaccgacctgcccttccatccactcactcagatgatgtatagcccacagaattctgactacctgctcgcactctcaacggagaacggtttgtgggttagcaaaaactttggaggcaagtgggaagaaattcataaggcggtgtgcctggccaaatggggatcggacaacacgatcttcttcaccacttatgccaacgggagctgtacggacctgggtgctctcgagctttggcgcacttcagacctcggaaagtcgttcaagactatcggggtgaagatctactcgtttggcttgggaggccggttcctctttgcgtcggttatggccgacaaagataccactagaaggatacatgtgagcacggaccaaggagatacctggagcatggcccagctgccatctgtcggacaggaacaattctacagcatcttggcggcaaacgacgatatggtgttcatgcatgtcgatgaaccgggagatactggatttggcaccatctttacgagcgatgaccgcggcatcgtgtactcgaaatcacttgatcgccacctgtacaccactactggtggagaaactgacttcacgaacgtgactagcctgcgcggtgtgtacattacctccgtgctctcagaggacaactccatccaaacgatgatcacttttgaccagggaggacggtggacccacctgcgcaaaccagaaaacagcgagtgtgacgccaccgcgaaaaacaagaacgaatgctcactgcacatccacgcttcgtactcaatctcgcaaaaactgaacgtccctatggctccgctgtcagagcctaatgcggtgggaattgtcatcgctcatgggagcgtgggggacgcgatcagcgtgatggtgcctgacgtgtacatctccgacgatgggggatactcctggaccaagatgcttgaggggccgcattactatacgatcttggactcgggcgggattatcgtggcaattgagcactcatcgcggcctatcaacgtcattaagttctcgaccgatgagggccaatgctggcagacctacacctttactcgtgacccgatctacttcactggtctggcttccgaaccgggagccagatccatgaacatttcaatatggggcttcaccgagtcgttcctgactagccagtgggtgtcgtacaccatcgacttcaaggacatcctcgaacggaattgcgaggagaaagattatactatctggctggcgcacagcactgatccggaagattacgaagatgggtgcatcttggggtacaaggaacagttccttagactcaggaagtcatccgtgtgtcagaatggacgcgactacgtggttaccaagcaaccctcaatttgcctttgctctctggaggacttcctgtgcgacttcggatactaccggccggagaatgactcgaaatgcgtggaacaaccggagctgaagggacacgacctcgagttttgtctgtacggacgcgaggaacacctgaccacgaacggataccgtaagattccgggggataagtgccagggcggcgtgaatccggtccgcgaagtcaaggatctcaagaagaagtgtacgagcaattttctgtcgccagaaaagcaaaatagcaaatccaatagcgtcccaatcatcctggcgatcgtcggcctgatgctggtgactgtggttgctggagtgttgatcgtcaagaagtacgtgtgcggaggacggttcttggtgcaccgctactcggtgctccagcagcatgctgaagccaacggggtggatggagtcgacgcgctggacaccgcctctcacactaataagtccggataccacgacgactccgatgaagatctgctggaa

SEQ ID NO: 19639 - DNA, 2082 bp, synthetic construct
  misc_feature 1..2082: note = source = /note="Description of Artificial Sequence: Synthetic coding sequence"
  source 1..2082: mol_type = other DNA
atgacctttggccagagcaagctgtatagatcagaggattacggaaaaaactttaaggacattactgaccttattaacaacaccttcatccggaccgagttcggcatggcgattgggcccgaaaattctggtaaggtggtgcttacggccgaggtttctggtgggagcagaggcggtagaatcttcaggagcagcgatttcgctaagaacttcgttcagactgacctgccatttcacccgttgactcagatgatgtactcaccacaaaattccgactatttacttgccttgagcaccgaaaatggcttgtgggtgtcgaagaacttcgggggcaaatgggaggaaatacacaaggcggtgtgcttggctaaatggggcagcgataatacaatcttcttcactacctacgccaatgggtcgtgtaccgatctcggcgcactcgaactatggcgtacatcagacctggggaaatctttcaagacaatcggggttaagatctactctttcgggctgggaggcaggtttctatttgcatcggtcatggcagataaggataccaccaggcggatccatgtgagcaccgatcagggggatacatggagcatggcccagctcccgtctgtgggtcaggaacagttctactcaatcctggcagccaatgatgatatggtttttatgcacgttgacgaacccggggataccggtttcggaacgatctttacctccgacgaccgagggatagtgtatagcaaatctctggacagacacctttataccactactggcggagagacagactttacaaatgtcacctctcttcgaggcgtctacataacgtcagttttatcagaagacaattccatccaaactatgatcaccttcgatcagggggggcgatggacccacctccggaagcccgagaattccgaatgtgacgcaacggccaaaaacaaaaatgagtgcagcttgcacatacatgcgtcgtactctatttcacagaagttaaatgttccgatggctcctttgtccgagccaaatgccgtgggaattgttatcgcccacggttcggtgggggatgcaatatctgtaatggtccctgacgtgtatatttccgatgatggaggctattcttggacgaagatgctggagggcccccactactacacaattctcgattcgggaggaatcattgtggccatcgagcactcctcacgcccaattaatgtgatcaaattcagcactgacgaagggcagtgttggcagacctatacctttacgagggatcccatttactttacgggactggcctccgagccaggagcgcggagcatgaacatttcgatatggggttttacagaatccttcctcacctctcagtgggtctcttacacgatcgattttaaggatatcctcgagcgtaactgtgaggagaaggattatactatctggttggcccacagcaccgaccccgaagactatgaagacgggtgcattcttgggtataaggaacaattcctgcgcttgagaaagtcatctgtatgccagaacggcagggactacgtcgtcaccaagcagccctccatctgcctgtgttcactggaagactttctctgcgacttcggttactacaggcccgagaacgactcaaaatgcgtggagcagcctgagctgaagggccacgatctcgagttttgcctctatgggagggaggaacacctgaccaccaatgggtataggaagatccccggagacaagtgccagggcggtgttaacccagttcgcgaggtgaaagaccttaagaaaaagtgtacctccaactttctgagtcccgaaaagcaaaacagtaaatcaaatagcgtaccaatcatactggctatcgtgggtctcatgctggtgaccgtcgtggctggtgtgttaatcgttaagaaatacgtttgcgggggccggttcctagtccatcgctactcggtgttacaacaacatgctgaagccaacggcgttgatggcgtagatgccctggacactgcttcccacactaataagtcagggtaccacgatgattcggacgaagaccttctggag

SEQ ID NO: 19640 - DNA, 2082 bp, synthetic construct
  misc_feature 1..2082: note = source = /note="Description of Artificial Sequence: Synthetic coding sequence"
  source 1..2082: mol_type = other DNA
atgacctttgggcagtcaaagctgtaccggtccgaagattatgggaagaactttaaggacataaccgatttgataaacaatacgttcatccgtacggagttcggcatggccattggtcccgaaaactcgggaaaagtcgtgctgactgctgaggtttcaggaggttcgcgcggaggcaggatatttcggtcgtccgacttcgcgaagaactttgtccagactgatctccctttccatcctctgacccagatgatgtactcccctcaaaatagcgattacctgcttgccctttcgacggaaaatggtctgtgggtgtcaaagaactttggcgggaaatgggaagagatccataaagcagtgtgtcttgcgaaatgggggagcgataacactattttctttactacttatgcgaatggctcgtgcacggacctgggtgcccttgaactgtggagaacctctgatcttggtaaatcttttaagaccattggggtgaaaatctattccttcggccttggaggcagatttctctttgcttccgtgatggcagacaaggacactacccggagaatccacgtgtccaccgatcaaggtgacacgtggagcatggcccaacttcctagcgtgggtcaagaacagttctattctattctggctgcaaacgacgatatggtgttcatgcatgtcgacgagccaggagatacgggattcggaaccatctttacctccgatgacaggggaatagtgtactcaaagtcattggaccgccacctctacactaccactggcggtgaaaccgattttaccaacgtcacctcgcttagaggtgtgtacattacttcagtcctttcggaagataactcgatccaaaccatgattacttttgatcaaggagggcgctggacccatcttaggaagccagaaaactcggaatgtgacgcaaccgcaaagaacaagaatgagtgttccctgcacatccatgcaagctattcgatctcgcaaaaactgaacgtgcctatggcacctcttagcgagccgaatgcggtcggtatagttattgctcacggttccgtcggagatgccatttcggtgatggtgcctgatgtgtacatatcggacgatggtgggtacagctggaccaagatgctcgaaggaccacattactacaccatacttgactccggaggtatcattgtggcgatcgaacactcttctcgtccgataaacgtgattaagttctcgactgatgaagggcagtgctggcagacgtacacttttactagagatccaatttactttactggcctggcatcagaacctggagcacggagcatgaatatcagcatctggggattcactgagtcgtttctgaccagccaatgggtttcatacactatcgacttcaaggatattctcgaaagaaactgtgaggagaaagattacactatttggttggcccattcgaccgatccggaggactacgaggatggatgcattcttgggtacaaagaacagttcctgcggcttaggaagtcctcagtctgtcaaaacggacgggattacgtggtgaccaagcaaccatccatctgcctgtgttcgctcgaggactttctttgtgactttggatactaccgaccggaaaatgattcgaagtgtgtcgaacaaccggagctcaagggccatgaccttgagttctgtctgtacggacgagaggaacaccttactaccaatggctacagaaagatccctggtgacaaatgccagggcggtgtcaaccccgtgagggaagtgaaagatctcaagaagaagtgtacttccaattttctgagcccagagaagcaaaacagcaagtcaaattctgtgccgataattcttgcgattgtcggtctgatgctggtgactgtggtggcgggcgtgctcattgtgaaaaagtacgtgtgcggaggacgctttctcgtgcatcggtacagcgttctccagcagcatgccgaagcaaacggggtggatggcgtcgatgcactggacaccgcatcccacacgaacaaaagcgggtaccacgacgattcggatgaagatttgctcgaa

SEQ ID NO: 19641 - DNA, 2082 bp, synthetic construct
  misc_feature 1..2082: note = source = /note="Description of Artificial Sequence: Synthetic coding sequence"
  source 1..2082: mol_type = other DNA
atgacgttcggccaatctaagttgtataggtccgaagattatggcaaaaactttaaggatattaccgatctcattaacaacaccttcatccgcacagagtttggaatggccattggtccagagaacagcggaaaggtggttctgaccgcagaagttagcggtgggagtaggggcggaaggatcttcagatctagcgatttcgcaaaaaattttgttcaaactgatctgccgttccatccactgacgcaaatgatgtatagcccacaaaactccgattatcttctggcactctctaccgagaacggattgtgggtctccaaaaacttcggtggaaaatgggaggaaatccacaaagccgtgtgtttggctaagtggggcagtgacaacactatattttttacaacttacgctaatggctcctgcaccgatctcggagccctagaattatggcgcacgtcagacctgggtaaaagcttcaaaaccatcggcgtgaaaatatactcattcggactgggcgggaggtttctcttcgcgagcgtcatggccgacaaagatacaacacgccgaatccatgtctctaccgatcaaggcgacacctggagcatggctcagctgccttctgtgggccaagagcaattctatagcatcctggccgctaatgacgatatggttttcatgcacgtcgacgagcccggagacacgggatttggcactatcttcacctccgatgaccgcggcatcgtttattctaagagtctggataggcatctgtacaccacaactggaggcgagaccgacttcacaaatgtcacctctctgcgcggagtgtatatcacttctgtcctgtccgaggataattctatccagacgatgattaccttcgatcagggcgggaggtggacccaccttagaaaaccggagaattctgaatgcgatgcgaccgcaaagaacaagaatgagtgttctctccacatccacgctagctacagcataagccagaagctgaacgtgccaatggctcccctgtcagaacctaacgctgtcggaatcgtcatcgctcacggatccgtgggcgatgccatctccgttatggttcctgatgtttacatcagcgacgatggaggctacagttggactaagatgctggaggggcctcactactatactatccttgattcaggtggaatcatagtcgccatcgaacattcttctcgccctatcaacgtgataaagtttagtacagacgaaggccagtgctggcaaacatatacctttactcgggacccaatctactttactggtctggctagcgagcctggagcgaggtcaatgaacattagcatctggggctttacagagtcttttctgacgtcacaatgggtctcttacactatcgatttcaaggatatcctcgaacgcaactgtgaggagaaagattataccatatggctcgctcacagcaccgacccagaggactatgaggacggctgcattcttggctacaaagaacaattcctgaggctcagaaagtccagcgtatgtcagaacggccgcgattatgtcgtaaccaaacagccatcaatttgcctgtgttctctggaagactttttgtgtgacttcggatattaccgacccgagaacgacagtaagtgtgttgagcagccagagctcaaaggacatgatttggaattctgtctctatggcagggaagagcacctgacaaccaacgggtacagaaagatccctggcgacaagtgtcagggaggcgtcaaccctgtacgggaagtcaaggaccttaaaaagaagtgcaccagcaactttttgtcacctgagaagcagaatagtaagagtaacagcgtaccgattatccttgctatcgtgggtctgatgcttgtgacggtggttgcaggcgtcttgatagtcaaaaaatacgtatgcggtggcaggtttctcgtgcataggtattcagtgcttcaacagcatgcagaggcaaacggagtggacggtgtcgatgctctggacaccgcaagccacaccaacaagagcggttaccatgatgatagcgacgaagatcttctcgaa

SEQ ID NO: 19642 - DNA, 2082 bp, synthetic construct
  misc_feature 1..2082: note = source = /note="Description of Artificial Sequence: Synthetic coding sequence"
  source 1..2082: mol_type = other DNA
atgaccttcggccagtccaagctctaccgctcggaagattacggaaagaactttaaggacattactgacctgattaacaacactttcattcgcactgaattcggcatggcgatcgggcctgaaaatagcggaaaggtggtgctgactgccgaagtttcggggggctcaagaggaggacgtatctttaggagttcagacttcgctaagaactttgtgcagaccgacctccccttccatccgctcactcaaatgatgtactcgccgcagaattcggactacctcctcgccctgtcgaccgaaaatggactctgggtgtccaagaattttggcggaaagtgggaggaaatccacaaggcggtctgtctggcaaagtggggatccgacaacactatcttcttcactacctatgccaatggatcatgcactgatctcggagcccttgagttgtggcgtacctccgacctgggcaaatcgttcaagactatcggagtcaagatctattcattcggcctgggcggtcggttcctgttcgcctcggtgatggcggacaaagacaccactagacggatccacgtgtccaccgatcagggtgacacgtggtcaatggcgcaattgccttcggttggccaggagcaattctatagcattctcgctgccaacgatgatatggtgttcatgcatgtcgatgagcccggcgacacgggctttggaaccattttcacctcggatgataggggaatcgtgtactcgaagagccttgataggcacctctacaccaccaccggtggagagactgactttaccaacgtgacctcactccggggagtctacattaccagcgtgctctcggaggacaattcgattcaaactatgatcaccttcgaccaaggcggtcggtggactcacttgcgcaagccggaaaacagcgaatgcgatgccactgctaagaacaagaacgaatgttcgctccacatccacgcgtcgtactctatttcccagaagctgaatgtgccgatggcgccgctttccgaaccaaatgccgtgggaattgtgatcgctcacggatcggtaggagacgccatctcagtgatggtgccggacgtgtacatctcagacgacggcggctattcatggactaaaatgctcgagggacctcattactacaccattctggattcgggcggcatcatcgtggcaatcgaacattcatcccgcccaatcaacgtcattaagttctccaccgacgagggacagtgctggcagacgtacactttcacccgggacccgatttacttcaccggactggcgtcggaaccaggcgcccgctccatgaacatctcgatctgggggtttaccgaatcatttctcaccagccagtgggtgtcctacaccatcgactttaaagatatactcgaacgcaactgcgaggagaaggattacactatctggctcgcacattccactgacccagaggactacgaggacggatgcatcctgggatacaaagagcaattcctgcggctcaggaaaagtagcgtgtgccaaaatggacgagactacgtggtgaccaaacaaccgagcatctgcctgtgctcgctcgaggatttcctgtgtgacttcggatactaccgacccgagaacgattccaagtgtgtggaacagccggaactgaagggccacgatcttgagttttgcctctacggacgagaagagcaccttaccaccaacgggtacaggaagatccctggagataagtgccaaggaggcgtcaatccggtgcgcgaggtcaaagatctgaaaaagaagtgcacctcaaacttcctgtctccagaaaagcagaactctaaaagcaacagtgttccgatcatcctggcgattgtgggcctcatgctggtcaccgtggtggccggtgtccttatcgtcaagaagtacgtgtgtggagggagattccttgtgcaccgctacagcgtgttgcagcaacatgccgaagcgaacggagtcgacggtgtggacgccctcgacactgcgagccacactaacaagtccggataccatgacgattcggacgaggatcttctggaa

SEQ ID NO: 19643 - DNA, 2082 bp, synthetic construct
  misc_feature 1..2082: note = source = /note="Description of Artificial Sequence: Synthetic coding sequence"
  source 1..2082: mol_type = other DNA
atgaccttcggacagagcaagctgtaccggtccgaggattacggaaagaactttaaagacatcactgatctgatcaacaacacgttcatccgcaccgaattcggcatggctatcggacccgagaacagcggtaaggtcgtgcttacggcagaggtttccgggggttcgcggggaggccggatctttagatcgagcgattttgcgaagaacttcgtgcaaactgacctcccgttccatccactgacccagatgatgtactccccgcagaactccgattatctgcttgccctgtccacggaaaacggcctctgggtgagcaaaaactttgggggcaagtgggaggagatccacaaagcggtgtgccttgcgaaatggggatccgacaacaccatctttttcaccacttacgcgaacgggtcatgcactgacctcggagcgctggaactgtggcgcaccagcgatctgggtaaatcattcaaaaccatcggagtgaagatctactcgttcggactgggaggaagattccttttcgcgtccgtgatggctgataaggacaccactcgcagaatccatgtgtcgactgaccagggcgatacctggtcgatggcccaactcccatcagtggggcaggagcagttctacagcatcctggcagccaatgacgacatggtgtttatgcatgtcgacgaacctggcgacactgggttcgggaccatcttcacctcagacgatcgcggaatcgtgtacagcaagtcgcttgaccggcatctctacactaccaccggaggcgaaaccgacttcactaatgtgacctcgctgcgcggtgtctacatcacttcggtcttgtccgaggataactcgatccaaactatgatcacctttgaccaaggaggacggtggacccatctgcggaagccggagaacagcgaatgcgacgcaactgcaaagaacaagaacgaatgtagcctgcacatccatgcctcgtactctattagccagaagctgaacgttccgatggccccgctgtccgagccgaatgccgtgggcattgtgattgcacatggcagcgtcggagacgcgatcagcgtcatggtgccggacgtgtacatcagcgatgacggcggatacagctggactaagatgctcgaagggccgcattactacactatcctggattcagggggaatcattgtggcaatcgagcacagcagccgccccatcaatgtcatcaagttttccaccgatgagggacagtgctggcagacttatactttcacccgcgaccccatctacttcacgggccttgcctcagaaccaggagcccggtcgatgaatatctcgatctggggattcactgaatcgtttctgacctcccagtgggtgtcatacaccatcgactttaaggatatcctggaacggaattgcgaagagaaggattacactatctggctcgcgcacagcaccgatcctgaggattacgaggatggctgtatcctcggatacaaggaacaatttctccggctgcgcaagtccagcgtgtgccagaacgggcgggactacgtcgtgactaagcagccgtcgatctgcctgtgttcattggaggacttcctgtgcgatttcggctactacagaccggaaaacgactccaaatgcgtcgaacagcctgaactcaaaggacacgacctggaattctgcctctacggacgcgaggagcacctgactactaacggctaccgcaaaatcccaggcgataagtgtcagggcggtgtgaatccggtcagggaagttaaagatctcaaaaagaagtgtacctcaaacttcctctcgcccgagaagcagaattccaagtcgaacagcgttccgatcatcctcgcaattgtggggctcatgctcgtgactgtcgtggcgggtgtgttgatcgtcaagaagtacgtgtgcggaggacggttcctggtgcatcgatactcagtcctgcagcagcatgctgaagctaacggcgtggacggggtcgacgctctcgataccgcgtcgcacaccaacaaatcggggtaccacgatgactccgacgaggatctgctggag

SEQ ID NO: 19644 - DNA, 2082 bp, synthetic construct
  misc_feature 1..2082: note = source = /note="Description of Artificial Sequence: Synthetic coding sequence"
  source 1..2082: mol_type = other DNA
atgacctttggtcaatccaaattatacagatcggaggactacgggaagaactttaaagatattaccgacctgatcaacaacacgtttattcgcactgaatttggcatggccattggcccggaaaactccggcaaagtggtgctgacggcagaagtgtcaggggggagtagaggaggcagaatttttagatcaagcgacttcgcgaaaaacttcgtgcagaccgatctcccctttcatccactgacgcagatgatgtactcgccacagaattccgactacctgctggctctgtcaacagaaaacggcctatgggtcagcaagaatttcggcggtaagtgggaagagatccacaaagctgtctgtctcgccaagtggggctcagataacacgatttttttcactacctacgccaacgggtcctgtacggacctaggcgccctcgagctctggagaacatccgacttgggaaaaagcttcaagacaataggcgttaaaatatactcttttggcctgggaggaaggttcctgttcgcaagcgtgatggctgataaggatactacacggcggattcatgtatcaaccgatcagggcgacacttggtcgatggcacaacttccaagcgtaggccaggaacaattctacagtattctcgcggctaatgatgacatggtttttatgcatgttgatgagcccggagatactggattcggcactatctttacatctgatgaccggggaattgtctactcaaagtccctggatcgtcacctgtacaccacaaccggaggagagaccgatttcacaaacgttacgtctctccggggtgtgtacatcacgtctgtactcagtgaagataactccattcaaactatgattacatttgaccagggtggaagatggacccatctgcgtaagcctgagaactccgagtgtgatgccaccgccaaaaataaaaatgagtgcagtcttcatattcacgcttcctactcaatctctcagaagctgaatgtcccaatggcccccctgtccgagccgaacgcagttggaatagtgattgcacacgggtccgtgggggacgcgataagtgttatggtccctgacgtctatatatctgacgacggcggctacagctggacgaaaatgcttgagggcccccactactataccatcctggattctgggggcatcatcgttgccatagaacactctagtcggcccataaacgtgatcaagtttagtacagacgaaggacagtgttggcagacttatacgtttaccagagatcccatctatttcacaggcctggccagtgaaccaggagcacggtccatgaacatatccatctggggctttactgaatcctttctgacatcccagtgggtctcctatacgatcgactttaaggatatacttgagcggaactgcgaggaaaaggattataccatttggttggcccactctacagatccggaggattatgaggacggctgcatactgggctataaggaacaattcttgaggctccggaagtcatcggtgtgccagaacgggagagactatgtagtgacaaagcagccaagcatttgtctttgctccctggaagatttcctttgcgatttcggttattataggcctgaaaacgatagtaagtgcgtggagcagcccgaactcaaaggccacgatctagaattctgcttgtatggcagagaagagcacctgaccaccaacggatacaggaagatccccggcgacaagtgccaaggtggcgttaatcctgttagagaagtcaaagatctcaagaagaagtgtacatcaaactttctgtcccccgagaaacagaattcaaagtcaaatagcgttccaatcatactagctattgtgggcctgatgctggtgacagttgtggcgggggtgttaattgtgaaaaagtacgtgtgcgggggtcggttcttagtgcaccggtactcagttctgcagcagcacgctgaagcaaatggcgtagatggagtggacgctctcgatactgcatcccatactaacaagtcaggataccacgacgacagcgacgaggatctcctggag

SEQ ID NO: 19645 - DNA, 2082 bp, synthetic construct
  misc_feature 1..2082: note = source = /note="Description of Artificial Sequence: Synthetic coding sequence"
  source 1..2082: mol_type = other DNA
atgactttcggccaatctaagctttaccggagcgaggactacggtaaaaacttcaaggacattacagatctgattaacaataccttcataagaaccgagtttggtatggctatcggccctgagaactcaggtaaagttgtgcttactgccgaggtgtcaggcggaagtcgcggcggtaggatcttccggtcttcagattttgctaagaatttcgtgcaaacggacctccctttccaccctctcacacagatgatgtacagcccccagaatagtgattatcttctggcgctgtccacagagaatggcctgtgggtgagcaagaacttcgggggcaagtgggaggaaatccacaaagcggtctgcctggctaagtggggaagtgacaacaccatcttcttcacaacttacgccaatgggtcctgcaccgacctgggcgctctggaactgtggcggacctcagacttgggaaagtctttcaaaacaattggagtaaagatttactcttttgggctcggcggcagattcctgttcgcgagtgttatggcggacaaagacaccactcgccgcattcatgtaagcacggaccaaggcgatacatggagcatggcacagcttccctcagtgggtcaagagcagttctactccattctggcagccaacgacgacatggtgttcatgcatgttgatgagcccggcgacacgggatttggaacaattttcacttctgacgaccgcggaattgtgtattctaaatcacttgataggcacctttacacaaccacaggaggggaaacggacttcactaacgttacttccctgcggggagtatacatcacctcagtgctttccgaagacaattccatacagaccatgatcaccttcgatcaggggggcagatggacccacctgagaaaacctgaaaactctgaatgcgatgctaccgcaaaaaacaagaacgagtgtagcctgcatatccacgcgtcttactctataagtcagaaactcaatgtgcctatggctcccctgagcgagccaaacgcggtgggaatcgtcattgcgcatggaagcgtgggcgacgctatatccgtgatggttccggacgtgtacatctccgatgacggagggtactcctggacaaagatgctggaaggccctcattattatacgattttggatagcggcggaattatagttgctatcgaacacagttcccgccctataaacgtgatcaagttctccacagatgaaggacagtgctggcaaacatacacattcaccagagatcctatctatttcaccgggttggcatctgagcccggtgcgagaagtatgaacattagtatatggggcttcactgagtccttccttacaagccagtgggtgtcatacacaatcgacttcaaagacatcctggagaggaactgtgaggagaaggattacactatctggctggctcattctaccgaccccgaagattatgaagacgggtgtattctgggctacaaagagcagttcctcaggctgaggaaatcaagtgtgtgtcaaaatggacgagattacgtggttacgaagcaaccatccatctgtttgtgctccttggaggacttcctctgcgattttggttactatcggcccgagaacgattccaaatgcgtggaacaacctgagcttaaagggcacgacctggagttttgcctgtacggcagggaagagcatctgaccacgaatgggtacaggaagatccccggcgacaagtgtcagggtggggtaaaccctgtgagggaggtgaaagatctgaaaaaaaagtgcacatctaatttcctgtcaccagagaagcagaatagcaagtccaactccgtgccaattatactggctatcgtgggcctcatgctggtgaccgtggtggccggagtccttatagttaaaaagtatgtgtgcggcggaagattcctcgtgcataggtattccgtgctgcaacagcacgctgaagccaatggcgtcgatggtgtcgacgctctggacaccgctagccacaccaacaagagcggatatcatgatgacagcgatgaggatctgctggaa

SEQ ID NO: 19646 - DNA, 2082 bp, synthetic construct
  misc_feature 1..2082: note = source = /note="Description of Artificial Sequence: Synthetic coding sequence"
  source 1..2082: mol_type = other DNA
atgactttcggccagtcaaaattgtacagatcggaggactatgggaagaatttcaaggacattaccgatctgatcaacaacacttttatcagaaccgagttcgggatggcaattggtccagaaaattcgggtaaggtggtccttaccgcagaagtctcgggcggaagccgaggtgggaggatctttaggtcctcagattttgctaagaatttcgtccagaccgacctcccttttcaccctttgacccaaatgatgtacagccctcagaactcggattacctcctggctctgtcgaccgaaaacgggctgtgggtgtccaagaattttgggggtaagtgggaggagatacataaggcggtctgtcttgcaaaatggggcagcgataatactattttctttacgacttacgccaatggatcatgcaccgatctcggcgcactcgagttgtggagaaccagcgatcttggtaagtccttcaagaccattggagtcaagatctactcgtttggacttggaggaaggtttctctttgcaagcgtcatggcggacaaagatactactagaaggattcatgtctcaactgatcaaggagatacctggtcgatggcgcagctgccttcagtaggtcaagaacaattctactccattctggccgcaaacgatgatatggtgtttatgcatgtggatgagccaggtgataccgggttcggtactattttcacgagcgacgaccgtggaatcgtgtactcgaagtcgttggataggcacctttacaccaccaccggaggtgaaaccgactttactaacgtgacctcactccgtggtgtctacattacctctgtgctttcggaagataattcgattcagactatgataacttttgatcagggaggacgctggactcatctgagaaagcctgagaattcggaatgtgatgcgaccgccaaaaacaaaaacgaatgctcccttcatatacatgcatcatacagcatttcgcagaaactgaacgtgcctatggcgcccctgtccgagcctaatgccgtgggaatagtgatcgcacatggatctgtcggagatgccatttctgtgatggtgccggacgtttacatctcggacgacggaggctactcttggaccaaaatgttggaaggaccccattactacaccatccttgattcgggtggtattatcgtggctatcgagcactcctcgcggccaatcaatgttatcaagttttcaaccgacgaaggtcaatgttggcaaacctacacttttaccagagatcccatatacttcactgggcttgcatccgagcctggagccagaagcatgaacatttccatttggggatttactgagtcttttcttacgtcccagtgggtgagttacaccattgatttcaaagatattcttgaaagaaattgcgaagaaaaggattatactatctggctcgcacactcgaccgaccctgaggactacgaggacggatgtattctggggtacaaggaacaattccttcgcctgcggaagtcaagcgtgtgtcagaatgggcgtgactatgtggtaactaagcaaccatcaatctgtctgtgctcactggaagattttctttgcgacttcggatactacagacctgagaacgattccaagtgtgtggaacaacccgaattgaagggtcacgacctggaattttgcctgtacggtcgcgaagagcaccttaccactaacggataccgaaagattccaggagacaaatgtcagggtggagtgaacccggtgcgggaagtgaaggatcttaagaagaagtgtacttccaactttctgagtcctgaaaagcaaaattcaaaatcgaactcagtgcctatcatcctggcaattgtcggattgatgctcgtgaccgtcgtcgctggagttctgatagtcaagaagtacgtgtgtggaggcagatttctggtgcatagatactctgtgctgcagcaacacgcagaggctaacggggtggacggtgtggatgcccttgatactgccagtcatactaataagagcggataccatgatgattcagatgaggacctgttggag

SEQ ID NO: 19647 - DNA, 2082 bp, synthetic construct
  misc_feature 1..2082: note = source = /note="Description of Artificial Sequence: Synthetic coding sequence"
  source 1..2082: mol_type = other DNA
atgacctttgggcagagcaaactttaccgctccgaagattacggcaagaacttcaaggatatcactgacctgattaacaataccttcataagaactgaatttggtatggccattgggcctgagaattccggcaaggtcgtgcttactgcggaagtgtccggcggatcccgaggtggcaggattttcagatcctccgattttgccaagaactttgtgcaaacggaccttccattccatcctctgactcagatgatgtactcgccccaaaattctgattacctcctggctctttccactgagaacggcctttgggtgagcaaaaactttggaggtaaatgggaggaaatccataaggcagtgtgtctcgcaaagtggggaagcgataacacgatctttttcaccacttatgcgaacggatcgtgtactgatctgggtgcactcgaactgtggcggacttcagaccttgggaagtcctttaagaccatcggtgtgaagatttactcatttgggcttgggggaagatttctgtttgcctcagtcatggcggacaaagatactaccagacgtatccatgtgtcaacggatcagggtgatacgtggtcgatggcccaacttccttccgtgggtcaagaacagttttactccatactggccgcgaatgacgatatggtgtttatgcacgtggacgaacctggggacactggcttcgggactattttcacttcggatgaccgtgggattgtttacagcaagtccttggatcgacacttgtacactaccaccggcggagaaacggactttactaacgtcacctcgctgagaggcgtgtacatcacttccgtgctgtcagaagataactcaatccagactatgattacttttgatcagggtggacgctggacccatttgcggaaacctgaaaactcggaatgtgatgccaccgccaagaacaaaaatgaatgctcacttcatattcatgcgagctatagcatatcccagaaacttaatgtgcccatggcaccactttcggaaccaaatgcagtcggaatagttattgcgcacggatcagtgggagatgcgatatctgtgatggtcccagatgtgtacatctcagacgacggaggttactcctggaccaaaatgctcgaaggaccacattactacacgatcctggacagcggtgggatcattgtggcaatagagcactcgagccgtccgatcaacgtcatcaagtttagcaccgatgaaggacaatgttggcaaacttacaccttcactcgcgatccaatttactttactggattggcatcggaacctggcgcacggagcatgaatatctcaatttggggatttaccgaatccttccttacttctcagtgggtgtcctacaccatcgatttcaaggacattttggaacggaactgtgaagaaaaggattacactatatggttggcccattccacggatcctgaggactacgaggacgggtgtattttgggctacaaggagcagtttctcaggctgcggaagagctccgtctgccagaatggtagggattacgtggtcactaagcaaccttcgatttgcctttgtagccttgaagattttctttgtgatttcggctactacagacctgaaaatgattcaaagtgtgtcgagcaacctgaacttaagggacatgacctcgaattttgcctttatggaagagaggagcatctcactactaatggctatagaaagattccgggcgataagtgccagggcggggtgaacccagtgagagaggtgaaagatttgaaaaagaagtgtacttccaactttctctccccagagaagcaaaacagcaagtcgaactccgtgccgattatcctcgcaattgtgggattgatgcttgtgactgtggtggccggtgtccttattgtgaagaaatacgtgtgtgggggacggtttctggtccatcgttactcggtcctgcaacaacacgccgaagctaatggcgttgatggagttgatgcgctggataccgcatcgcacacgaacaagagcggttaccatgatgattctgatgaagatcttctggag

SEQ ID NO: 19648 - DNA, 2082 bp, synthetic construct
  misc_feature 1..2082: note = source = /note="Description of Artificial Sequence: Synthetic coding sequence"
  source 1..2082: mol_type = other DNA
atgacgtttggtcaaagcaaactttatcgttcggaagattatggtaaaaactttaaagatatcacagatttaattaataacacatttattcgtacggaattcgggatggcgattggacccgagaattcaggcaaagtagtattaacagcggaggtctctggaggttctcggggaggtcgcatttttaggtcgtctgactttgctaaaaattttgtgcagaccgacttaccgttccatccgttgacgcagatgatgtattccccacaaaacagcgattatttgttagcattatctactgaaaacggattatgggtatcaaagaactttggtggtaaatgggaggaaattcataaagccgtttgtcttgctaaatgggggtctgataacacaattttcttcacgacatacgctaacggttcttgtacggacctcggagctctggaactttggagaacgtcggatttgggtaaaagcttcaaaacgattggagttaaaatctattcattcggtctggggggccgcttcctgtttgccagcgtgatggcggataaggatacaacgagaaggattcatgtctcgacggatcaaggagatacatggtctatggcccagttgccgagcgtcggtcaggaacaattttactcaatattagctgctaatgatgatatggtttttatgcatgtagacgaaccgggagacacaggctttggcacaatttttacaagcgatgatcgagggattgtttattcaaagtcactggaccgccatctttatacaacgacgggcggagaaacagattttacaaacgtgacaagcttaagaggagtctatattacaagcgtactttctgaagacaatagcatccagacgatgattacatttgaccaggggggtcgttggacacacttgagaaaaccagaaaacagcgagtgcgacgccacggctaaaaacaaaaatgaatgctcactccacattcatgcgtcttattctatttcgcagaaattaaatgtacctatggccccattaagtgaaccgaatgccgttgggattgttattgcccatggatctgtgggagacgcaatttctgttatggttccagatgtatatatttctgacgacggaggctatagctggaccaagatgttagaaggaccgcattactatacgattcttgacagtggcggcataatcgttgctattgaacactccagccgtccgatcaacgttattaaatttagcacagatgaggggcaatgttggcaaacttatacttttacacgcgatcctatttattttacgggcctggcctccgagcctggagcacgttctatgaacattagcatttggggatttacggaatcctttttaacatctcaatgggtttcatacacaatcgactttaaagacatcttagagcgtaattgtgaagaaaaagattatacaatctggctggcgcattcaacggatccggaagattacgaggatggctgtattcttgggtacaaagagcagtttttgagacttaggaaatcttctgtctgtcagaacggtagagactacgtagtcacgaagcagccgtcaatctgtctttgttccctcgaagattttctttgtgacttcggctattatcgtcccgaaaatgattctaaatgcgtggaacagccggaacttaaaggccatgatttagaattttgcctttacggccgggaggaacacttgaccactaacggttataggaaaatccctggcgataagtgccagggcggagtgaatccggtacgtgaagtaaaagatcttaaaaaaaagtgtacgtctaacttccttagtccggaaaaacagaactccaaaagcaactctgtacctataatcttagctatagtgggcctgatgcttgttacggttgtcgccggggtcttgatcgtaaagaaatatgtttgcggaggacgttttttagtacatcggtattccgtcttacaacaacatgcggaagctaacggagtggacggtgttgacgcgttagatactgcctcccatactaataaatctggttaccatgatgactcagatgaagacttactggag

SEQ ID NO: 19649 - DNA, 2082 bp, synthetic construct
  misc_feature 1..2082: note = source = /note="Description of Artificial Sequence: Synthetic coding sequence"
  source 1..2082: mol_type = other DNA
atgactttcggccagagcaaactctacagaagcgaggactatggaaagaactttaaggacatcactgacctgattaacaacaccttcatccgcaccgaattcggcatggctatcggaccagagaattcgggaaaggtggtgctgactgctgaagtgtcaggcggatcgcggggaggccggatcttccgttcgtcagatttcgcaaagaatttcgtgcagaccgacctcccctttcatccgctgactcaaatgatgtactcgcctcaaaacagcgattacctgttggcattgtcaaccgagaacggcctctgggtgtcaaaaaacttcggagggaagtgggaagagattcataaagctgtgtgcctggccaaatggggttccgacaacaccatcttcttcactacttatgctaatggcagctgcactgatttgggggcactcgagctgtggagaacttccgatctgggcaaatcgtttaagaccatcggagtgaaaatctactcattcgggctgggtggaaggttcctctttgcttcggtgatggccgacaaggacacgacccgccggattcatgtgtcgaccgatcaaggtgacacctggtcgatggcacagcttccaagtgtcggacaggaacagttttactcaattctggccgcgaacgacgacatggtattcatgcacgtggatgagccaggcgacaccggcttcggaacgattttcacgtcagacgacaggggtatcgtgtacagcaagtccctggatcgccacctttacacgaccaccggcggggaaaccgacttcactaatgtcacttcactgcgcggcgtgtacataacctccgttttgtccgaagataattcaatccagaccatgatcaccttcgatcaaggcggcaggtggacgcacctccgcaaaccagagaactcggaatgtgatgcaactgccaagaataagaacgaatgttccctgcacatccatgccagctactctatctctcagaagctcaacgtgccgatggccccgctgagcgaacctaatgcagtgggaatcgttatcgcacacggtagtgtgggagatgccatctccgtgatggtcccagacgtctacatctctgatgacggtggctattcctggaccaagatgcttgaggggccgcactactacaccatcctcgactcgggagggatcatcgtggcaatcgaacactcctcgcggccgataaacgtgatcaaattctccacggacgagggacagtgctggcaaacttacacctttactcgagatcctatctactttaccggactcgcaagcgaaccgggggcgcgttcgatgaacatctcgatttggggcttcactgaatcatttctcacttcgcagtgggtttcttacactattgacttcaaggacatcctggagcgcaactgcgaggagaaggactacacgatttggctcgcccacagcaccgaccccgaggactacgaagatgggtgcatcctcggatacaaagaacagttccttaggctccgaaaaagctctgtctgtcaaaacggcagagattacgtggtgactaagcagccgagtatctgcctgtgctccctcgaagattttctgtgcgacttcggatactaccgcccggaaaacgatagcaagtgcgtggaacaacctgaattgaagggacacgatctggagttctgcctgtacggtcgggaggaacatctgaccactaatggttatcgcaaaatccctggagacaaatgccaaggaggtgtgaaccctgtcagagaagtgaaggacctcaagaagaagtgtacctcgaatttcttgtcccccgaaaagcagaactccaagagcaattccgtccccatcattctggccatcgtgggactgatgctcgtcactgtcgtggcgggggtcctgatagtgaaaaagtacgtgtgcggaggacggttcctggtacacagatactccgtgctgcagcagcatgcagaagcgaatggagtcgacggggtcgacgcccttgacacggcttcccatactaacaagagcggataccatgatgatagcgatgaggacctgctggag

SEQ ID NO: 19650 - DNA, 2082 bp, synthetic construct
  misc_feature 1..2082: note = source = /note="Description of Artificial Sequence: Synthetic coding sequence"
  source 1..2082: mol_type = other DNA
atgacgtttggccagtcaaagctctataggagcgaagattacggcaaaaattttaaggatattaccgatctgattaacaataccttcatcaggaccgaattcggaatggcaattggtccagaaaacagtggcaaggtggtattgaccgcagaggtgagcggaggctcccgcggcggccgcatcttccgcagctccgacttcgcaaagaatttcgttcaaaccgacctcccttttcatccactgacacagatgatgtactcaccgcagaacagtgactacctcctcgccctgagcactgagaacggcctgtgggtttctaagaacttcggtggcaagtgggaagaaattcacaaagccgtttgcctcgccaagtggggatccgacaacaccatcttcttcacaacctatgccaacggaagctgcacagatctcggcgcactcgaactttggagaacaagcgacttgggcaagagttttaagacaattggagtaaagatctactcctttggcctgggaggtcgctttcttttcgcttccgtaatggctgacaaggatactacacgcagaatccacgtcagtacagaccagggcgacacatggagcatggcccagctgccgagcgtgggtcaggaacaattctactccattctggctgccaatgatgatatggtttttatgcacgtggacgagccgggtgacaccggtttcggcacaatttttacctctgacgacaggggcatagtctatagcaaatctcttgaccgccacctctacactaccacgggaggtgagacagactttacaaacgtaacgtccctgcgcggagtgtatatcacatccgtcctctctgaggacaattccattcaaaccatgataacatttgaccaaggaggtcgctggacacatcttaggaaaccagagaacagcgaatgcgacgcaaccgctaagaacaagaacgagtgttcactccatattcatgcttcctacagcatctctcaaaaattgaacgttcccatggccccattgtctgagccgaacgccgtgggcatcgtgatcgctcacggctcagttggagacgctatctcagttatggtccccgacgtatacatatcagacgacggaggttatagctggacaaagatgctggagggcccccactactacaccatcctggacagcggcggtattatcgtggccatcgagcactcttcaagacctattaatgtcattaaattcagcactgacgagggccagtgctggcagacgtatacattcactagggatcccatctactttactggactcgccagcgagccgggcgcaagatcaatgaacatctctatttggggattcacagagtctttcctcaccagtcagtgggtgtcatacaccatagactttaaagacatcctcgagagaaactgcgaagagaaagactacaccatctggttggcccattcaactgacccggaggactacgaggatggttgtattctgggatacaaggaacagttcctcaggctcagaaagtcaagtgtatgccagaacggcagggattatgtcgtcactaagcagccctctatttgtctgtgttccctggaggactttctctgcgattttggctattacaggccagaaaacgatagcaagtgcgtggagcaacctgagcttaagggccacgaccttgagttttgtctctacggtagagaggaacatctgaccactaatggatacaggaagattccaggcgataagtgtcagggaggtgtaaaccccgtaagggaagtaaaggacctgaagaaaaaatgcacttcaaactttctgtcccccgagaaacagaactctaagagtaactccgttccaatcattctggccatcgtcggtctgatgctggtgaccgtggtggccggagtattgattgttaagaagtacgtatgtggcggtcgcttcctggtacacaggtattcagtgttgcagcagcacgctgaggcgaatggcgtcgacggtgtggacgcacttgacactgcaagccacacgaataagtctggataccatgacgattctgacgaggatctcttggag

SEQ ID NO: 19651 - DNA, 2082 bp, synthetic construct
  misc_feature 1..2082: note = source = /note="Description of Artificial Sequence: Synthetic coding sequence"
  source 1..2082: mol_type = other DNA
atgacctttggtcaatccaagttgtacagaagcgaagattacggtaagaactttaaagacattaccgaccttatcaataacacctttattcgcaccgaattcggaatggccattggcccagaaaactccggtaaggtggtgttgaccgcagaggtgtcgggcggctcgcgtggtggacggatctttagatcgtccgactttgcaaagaactttgtgcagaccgatctcccctttcatcccctcacccagatgatgtattcaccacaaaattcagactacctgctggccctgtcgaccgaaaatggtctttgggtcagcaagaacttcggtggcaagtgggaagaaatccataaggcagtctgtcttgctaagtggggctcagataatacgatcttctttacgacctacgcaaatgggagctgtaccgatttgggagccctggaactttggcgcacttccgatctgggtaagtcctttaagacgattggcgtgaagatctacagctttggacttggaggaagatttctgtttgcctccgtgatggcggacaaggataccacccgccgtatccatgtctccactgatcagggagacacttggtcgatggcacagctgccctcggtcggacaagagcagttttactcgatcctggccgcaaatgatgacatggtgttcatgcacgtcgatgaaccaggtgataccggctttggaaccattttcacgagcgatgaccggggaattgtctactcgaagtcgcttgacagacatctgtacaccactaccggcggagagactgattttactaacgtgacttcccttaggggagtctacataacttcggtgctttcggaagataatagcattcaaacgatgattactttcgatcagggtggacggtggactcacctcagaaagcctgaaaattctgagtgtgatgcaactgcaaagaataagaacgaatgttcactgcatatacacgcatcgtactccatctcccagaagctgaatgtgccaatggcgcccttgagcgaaccaaacgcagtgggtatcgtgatcgcacacgggtcggtcggtgacgccataagcgtgatggtccctgatgtttacattagcgacgatggtggttactcgtggactaaaatgcttgaaggtcctcattactataccatcctcgactcaggaggcattattgtggctatcgagcatagctccagaccaattaacgtgatcaagttttcgaccgatgagggtcagtgctggcaaacctacactttcacccgagatccaatttacttcaccggtctggcgtcggaaccaggtgctcggtccatgaacatctcaatctggggatttactgagtcgtttctgactagccaatgggtttcatacactatcgactttaaggatattctcgagagaaactgtgaagagaaagactataccatttggctggcacacagcactgatcctgaagattacgaagatggttgtatactcggatataaggagcaattcctgaggcttcggaaatcctcagtgtgccaaaatggacgagattacgtggtgaccaagcaaccaagcatttgtttgtgctcgctggaagattttctctgtgacttcggctactaccgcccagaaaacgactccaagtgcgtggaacaacctgaactcaagggacacgatctggagttttgtctttatggaagggaggaacatctcactactaatggatacagaaaaatccctggagataaatgccagggaggggtgaacccagtgcgggaagtgaaagacctgaagaaaaagtgtacgtccaatttcctttcaccagaaaagcagaattccaagagcaattcggtcccgatcattctcgcaatcgtcggattgatgctggtcactgtggtggccggtgtccttattgtgaaaaagtacgtgtgcggtggtcggtttctggtccataggtactcggtgctgcagcaacacgcggaagcaaacggtgtcgatggcgtggatgccctggacaccgcctcccacactaacaaatctggataccatgacgatagcgacgaggacttgcttgaa

SEQ ID NO: 19652 - DNA, 2082 bp, synthetic construct
  misc_feature 1..2082: note = source = /note="Description of Artificial Sequence: Synthetic coding sequence"
  source 1..2082: mol_type = other DNA
atgaccttcgggcagtctaagctctacagaagcgaggactacggcaagaatttcaaggatattactgacctgatcaacaatacttttattcggactgaattcgggatggctatcggccctgagaattcaggaaaagtggtcctgaccgccgaagtgtcgggtggatcgcgcggaggaaggatcttcaggtcctccgactttgcgaaaaacttcgtgcaaaccgatctcccgttccacccactgacccagatgatgtactcgcctcaaaactccgactacctgctggccctgtcgactgagaacgggctctgggtgagtaagaatttcggaggcaaatgggaggaaatccacaaagccgtgtgtctggcgaagtggggttccgacaataccattttcttcaccacttacgctaacggctcctgcacggacttgggagcactggagctctggcggacctcggacctcggtaagtcgttcaaaactatcggagtgaagatctacagcttcggattgggaggcaggttcctttttgccagcgtgatggcggacaaggataccactaggagaatccacgtgtcgaccgaccaaggagacacctggtcaatggctcagctgccgagcgtgggtcaggaacagttctactccatcctcgcggccaacgatgatatggtcttcatgcatgtggacgagcccggggatactggatttggtactatcttcacttcggatgaccgcgggattgtctactcgaagtcgctggacagacacctctacactaccactggaggagaaacggacttcactaatgtcacttcactgcgaggagtctacatcacttccgtgctgtccgaagataactcaatccagacgatgatcaccttcgaccaaggaggacggtggacccaccttcggaaaccagagaattcggagtgcgatgctactgccaagaacaagaatgaatgctcccttcacatccacgcatcttactcgatctcgcagaaactgaatgtgccaatggcgccactgtcagagccgaacgctgtcggtatcgtcattgctcacggctcagtgggagatgccatcagcgtcatggtgccggatgtgtacatttccgatgatggcggctactcctggaccaagatgctggaagggccgcactactacaccatcctggacagcggaggaatcatcgtggctatcgagcatagcagccggccgatcaatgtgatcaaattttcgaccgatgaaggccagtgttggcaaacctacactttcactcgggaccccatctacttcaccggcctggcctccgagccaggcgcccgctcaatgaatatctctatttggggatttacggagtcattcctcacttcccaatgggtgagttacacgatcgacttcaaagacattttggaacgcaactgcgaagagaaagactacactatctggttggcgcattccaccgatccggaggattacgaggatggttgtatcctgggatacaaggaacagttcctgcggctgcgcaaatcgtcagtctgccagaacggccgcgactacgtggtgaccaagcagccttctatttgcctgtgctccctggaagatttcctgtgcgacttcgggtactaccggccggaaaacgactcgaagtgcgttgagcaacctgagctgaagggacatgacctggaattctgcctctacggacgcgaagaacacctgaccacgaacggctaccggaagataccaggagacaaatgccagggtggggtgaatccggtgcgcgaggtgaaagacctgaagaagaagtgtacttccaatttcctgtcaccagaaaagcaaaacagcaagtcgaattccgtgcccatcatcctggcgatcgtgggcctgatgctggtgactgtggtggcgggagtcctgatcgtcaagaagtacgtgtgcggcggacgatttctggtccatcgctactccgtgctgcaacagcatgccgaagctaacggagtggacggagtggatgcccttgataccgcatctcataccaataagtcgggctaccacgacgattccgacgaagacctcttggaa

SEQ ID NO: 19653 - DNA, 2082 bp, synthetic construct
  misc_feature 1..2082: note = source = /note="Description of Artificial Sequence: Synthetic coding sequence"
  source 1..2082: mol_type = other DNA
atgaccttcgggcagtccaagctgtacaggtccgaagactatgggaagaatttcaaggacattactgatctgatcaataatacattcatacgtaccgaatttgggatggccattggccctgagaactccggcaaggtggtgctgacggcagaggtaagcgggggtagtcgtggcgggagaatctttaggtcgtccgacttcgcaaaaaattttgtgcagactgacttaccctttcatccactgactcagatgatgtatagtcctcagaattcagattaccttcttgccctgtctaccgaaaacgggctctgggtgtccaagaatttcgggggcaagtgggaagaaattcataaagctgtatgcctggccaagtgggggagcgacaataccatcttcttcacaacctacgccaatggctcgtgcacagacctgggagcactggagctgtggcggacgtcagatttgggaaaatcttttaagactatcggcgtcaaaatttactcttttggtttaggcgggcggttcctgtttgctagcgtcatggccgacaaagacaccaccagacgaatccacgttagcactgaccaaggggatacctggtcaatggcacagcttcctagcgtgggccaggagcagttttattccattttggctgccaatgacgatatggtgttcatgcacgttgatgaaccaggcgatacaggcttcggcacgattttcacatccgacgacagagggatcgtttattctaaatcacttgaccggcacctgtacaccacaaccggcggcgagacagactttaccaacgtgacttctctgcggggtgtctacattacctctgtcctgtcagaggataattcaatccaaactatgataaccttcgaccagggtggacgctggacccatttacgcaagcccgagaattccgaatgtgatgccactgcaaagaacaaaaacgagtgctccctgcacatccatgctagttattccatctctcagaaacttaatgtgcctatggcaccgttgagtgaaccaaacgccgtaggaatagtaatcgcacacgggagcgttggagatgctatttcagtcatggtaccagacgtgtacatatctgatgacgggggctactcatggaccaaaatgttggaaggcccacactattatacaatcttggacagtggaggcataatagttgctattgaacactcctctcggcccattaacgtcattaaattctccacagacgagggacaatgttggcagacctacacttttacacgggacccaatctactttacagggctcgcttcagagcccggagcccggagtatgaacattagcatatggggattcactgagtcgttcctgacatcgcagtgggtgagttacaccattgactttaaagacatcctggagaggaattgcgaagaaaaggactatactatttggctggcccattcaactgaccccgaagactacgaggacggctgtatccttggatacaaagagcagtttctccgccttcgcaagagttcggtctgccaaaatggccgtgactatgtcgtcacaaagcagccttcaatctgtctgtgttccctggaggattttttatgtgattttgggtattacagacctgaaaacgacagtaagtgcgtggagcagcctgaattaaaggggcatgacctggagttctgcctgtacggacgtgaagaacaccttacgaccaacggctatcgcaaaatcccgggcgataagtgtcagggaggcgtcaaccccgtgcgggaggtcaaggacctgaaaaagaagtgtacttctaactttttgtctccggaaaagcagaattctaaatcgaattccgtgcctatcattcttgcgatcgtgggactaatgctcgtgacagtcgtggcaggcgtgctcattgtgaagaagtacgtgtgtggtggccgtttcctggtccatagatactcggttctccagcaacacgcggaggcaaacggtgtggatggcgtggatgccctcgatacagcctctcatactaacaagagcgggtaccatgacgactctgacgaggacctgttggaa

SEQ ID NO: 19654 - DNA, 2082 bp, synthetic construct
  misc_feature 1..2082: note = source = /note="Description of Artificial Sequence: Synthetic coding sequence"
  source 1..2082: mol_type = other DNA
atgaccttcggacaaagtaagctgtaccgcagtgaggactacgggaagaacttcaaggacattaccgacttgatcaataatacattcatccggaccgagtttggaatggccattgggcccgaaaacagcggtaaggtggtgctgaccgccgaggtgtccggggggtcacgcggaggccgcatctttaggtccagtgattttgctaaaaacttcgtgcaaactgatcttccattccatcccttgactcagatgatgtacagcccacaaaactccgattacttgctggctctctccaccgagaacggactgtgggtaagcaagaactttggtggaaaatgggaggaaatccacaaagctgtctgtctcgctaagtggggatccgacaacactatttttttcaccacatacgccaacggctcctgtacagacctgggagccttggaactgtggagaaccagcgacctcggaaaatcctttaaaacaattggcgtcaagatctattcttttggactggggggacggttcctgttcgcctccgtcatggccgataaggatactacgcggaggatccatgtgtcaacagatcaaggagacacctggtccatggcgcagcttccctccgtgggccaggagcagttctacagcatcctcgccgcgaacgacgatatggtgttcatgcacgtggatgagcccggtgacacaggcttcggaacgattttcacatcagacgacagggggatcgtttacagcaagagcctggataggcatctctatactaccacggggggagagactgacttcacaaatgtgacctccttgcggggggtatatatcacgtccgtcctgagcgaggataactcaattcagaccatgatcacattcgatcagggcggcaggtggacgcatctcaggaagccggagaattctgaatgcgacgccactgcaaaaaataagaatgaatgttcactgcatatacacgcttcctacagtatcagtcagaagttgaacgttcccatggctccgctcagtgagcctaatgcggtgggtatcgttattgctcatggatctgtgggtgatgccataagtgtgatggtccccgacgtgtacatcagcgatgacggggggtactcatggactaagatgctcgagggcccccattactacaccatccttgattccgggggcattattgttgcaattgaacactcatccagaccaatcaatgtgattaagttctctaccgacgagggccagtgttggcagacatatacattcactcgcgaccccatctacttcacgggactggctagtgagccaggagcgcgctccatgaacatttctatctgggggttcacagaatcttttcttaccagccaatgggtaagctatacaatcgactttaaggacattctggagcgaaattgcgaagaaaaagattataccatatggctggcccattctacggatccagaggattatgaagacggatgcattctgggctataaagagcagttccttaggttgcggaagagctccgtgtgtcagaatggccgagactatgtcgtcactaaacagcccagtatatgcctctgcagtttggaagactttctctgtgactttgggtactatcgccccgagaacgattctaagtgcgtggaacagccagaactgaaaggacacgatcttgagttctgcctgtacgggcgcgaagaacatctgactactaacggttataggaagataccaggcgacaaatgccagggtggggtgaatccagtacgggaagtgaaggacctgaaaaagaagtgtaccagcaatttcttgagcccagagaaacagaactctaaaagcaacagtgttccgataatccttgccatagtgggactgatgctcgtgacagttgtggcgggcgttctgattgtcaagaaatatgtgtgtgggggacggttcctcgtgcacaggtactccgtcctccagcagcatgccgaggcaaacggtgtggacggagttgatgccctcgacaccgcaagccataccaacaagagtggataccacgacgattctgacgaagacctgctggaa

SEQ ID NO: 19655 - DNA, 2082 bp, synthetic construct
  misc_feature 1..2082: note = source = /note="Description of Artificial Sequence: Synthetic coding sequence"
  source 1..2082: mol_type = other DNA
atgaccttcgggcagtcaaaactttaccgctcggaggactacgggaagaactttaaagatattactgatctcatcaacaacacctttatcagaaccgaattcggcatggcaatcggacctgagaactcaggaaaggtggtccttaccgcagaggtatccggaggatcccgtgggggacgcatcttcagatcgtcagatttcgctaaaaactttgtgcaaacggatcttccttttcaccctctgacccaaatgatgtactcgccccaaaactctgattatctgcttgcactcagcactgagaacggactgtgggtgtcgaagaattttggaggtaaatgggaagaaattcataaagcagtgtgtttggccaaatggggaagcgacaacactattttcttcaccacctacgcaaacggatcatgcaccgaccttggagcacttgaactgtggaggacctcggatctgggtaagtcatttaagacgattggcgtgaagatttactccttcggactcggtgggagatttctttttgcgtcagtcatggcagataaagataccaccaggcggatacatgtgtccactgatcagggtgacacctggtcgatggcccagttgccatcggtcggtcaagagcaattctactcgatcctcgcagcaaatgatgacatggtgtttatgcatgtggacgaacccggtgataccggttttggaaccattttcacctcggatgacagaggaatcgtgtacagcaagagccttgatcggcatctctacaccactacgggcggcgagactgattttactaacgtgacttcgctcaggggtgtgtatatcacctcggtgctgtccgaagataatagcattcaaactatgattacctttgaccagggcggaagatggactcatcttcgcaagcccgaaaacagcgaatgtgatgctaccgctaagaacaaaaacgagtgctcacttcatatacatgcaagctactcgatttcacagaagctcaatgtgccaatggcccctctgtccgaaccaaatgccgtgggcatcgtgatcgcacacggttcagtgggagacgccatttccgtgatggtgccggacgtgtacatttcagatgacggaggttactcctggacgaagatgctcgaaggaccacattactacaccattcttgattccggaggcataatcgtggcaatcgagcattcaagcagacctataaacgtcattaagtttagcacggatgagggacaatgctggcaaacttatacctttacccgcgaccccatatactttacggggctggcatcagagcctggcgcacggtcgatgaacattagcatttggggtttcaccgaatcctttctcacttcgcagtgggtgagctataccatcgatttcaaggatatcctggagcggaattgcgaggaaaaagactacaccatttggctggcccattcgactgaccccgaagattatgaggatggttgtattttgggttacaaggagcaatttcttaggcttagaaaaagttcggtgtgtcaaaacgggagagattacgtggtgaccaagcaaccatctatttgcctttgctcacttgaggatttcctgtgtgattttgggtactaccggccagagaacgattctaagtgtgtggagcaaccagaactgaagggccatgacctggagttttgtctttacggaagggaagaacacctgactaccaacggttacagaaaaatcccgggtgataaatgtcaaggtggtgtgaaccctgtgcgcgaggtgaaggaccttaagaagaagtgtacttcaaactttctgtcccctgaaaagcagaactcgaaatcgaacagcgtgccaattatcctggccattgtggggctgatgcttgtgacggtggtcgcgggggtgcttattgtcaagaaatacgtgtgtggaggaagatttcttgtgcatagatactcggtgcttcagcaacatgcagaagcgaacggagttgatggtgtggacgcattggacacggcgtcacatactaataagagcggttaccatgatgactcagatgaagatctcctggaa

SEQ ID NO: 19656 - DNA, 2082 bp, synthetic construct
  misc_feature 1..2082: note = source = /note="Description of Artificial Sequence: Synthetic coding sequence"
  source 1..2082: mol_type = other DNA
atgacgtttggccagtcaaagctgtacagatcggaagattacggtaagaactttaaagatatcactgacctgatcaacaacactttcattcgcaccgagttcggtatggccatcggtcctgaaaacagcggaaaagtcgtgctcactgccgaagtctcaggagggtcgcgtggcggacgcatcttccgcagttcggacttcgccaagaatttcgtgcagacggacttgccgttccatcctcttactcagatgatgtactcgcctcagaactcggactacctgctggccctctcgaccgagaacggactgtgggtttcgaagaatttcggaggaaagtgggaggaaatccataaggcggtgtgtctggccaagtggggatccgacaacaccattttctttactacttacgccaatggatcatgcactgatctcggcgcactggaactctggcgcaccagcgatcttggaaagagtttcaaaacgatcggtgtgaaaatctactcgtttggactgggcggacggtttttgttcgcgtctgtcatggccgacaaagacaccactcggcgaatccatgtgtccaccgaccaaggagacacttggagcatggcacagttgccgtcggtggggcaagagcagttctactcgatcctcgcggccaatgacgacatggtgttcatgcatgtcgacgagccaggcgatactggattcggaactatcttcacttccgatgataggggaattgtgtactcgaagagcctggataggcacctgtacaccaccaccggtggagaaaccgacttcaccaacgtgacttcccttcgcggggtctacatcacttcggtgctgtcagaagataattccatccaaaccatgattaccttcgatcaaggagggaggtggactcacctccgaaagccagaaaattccgagtgcgacgccactgcaaaaaacaaaaatgaatgctcgttgcacatccatgcatcctacagcatctcacaaaagctgaatgtgccgatggccccgctctccgagcctaatgccgtgggcatcgtgatcgcccatggatccgtcggagatgccatttccgtcatggtcccggatgtgtatatctcagacgatggaggatactcgtggaccaagatgctggaaggtccgcattactacaccatcctcgattcgggagggattatcgtggctatcgagcactcaagccggccgatcaacgtgatcaaattctctaccgacgagggccagtgctggcaaacttataccttcacccgggatcctatctatttcactgggctggcgtctgagccaggagccagatcaatgaacatcagcatctggggattcaccgaatcgtttcttacctcgcagtgggtgtcgtacactatcgactttaaggacattctggagcgcaactgcgaagaaaaggactataccatctggcttgcccacagcaccgatccggaggattatgaggacggatgtattctcggttacaaggaacagttcctgcggctgcgaaagtcatccgtgtgccagaatggtcgggactacgtggtaaccaagcagccatcaatctgcctctgctccctggaggactttctgtgcgacttcggatactaccgcccagagaacgattcgaaatgtgtggaacagcctgagttgaagggccacgacctggaattttgtctgtatggacgcgaggaacacctgactacgaacggttacaggaagataccaggtgacaaatgccagggaggcgtgaatcccgtccgcgaagtgaaggatcttaagaagaaatgtacctccaatttcctgtccccggaaaagcagaatagcaagtcgaactccgtgccgatcatccttgcaatcgtaggactgatgctcgtcactgtggtggctggagtgttgatagttaagaagtacgtgtgcggaggacggttccttgttcacaggtactcagtgctgcaacaacacgcggaagccaacggagttgacggagtggatgctttggacactgctagccacactaataagtcgggataccatgatgattctgacgaagatctgctggaa

SEQ ID NO: 19657 - DNA, 2082 bp, synthetic construct
  misc_feature 1..2082: note = source = /note="Description of Artificial Sequence: Synthetic coding sequence"
  source 1..2082: mol_type = other DNA
atgacattcggacaatctaaactatatagatctgaggattatggtaagaattttaaagatatcactgatttaattaataatacttttatacgaactgaattcggtatggcaataggaccagaaaatagtggaaaggttgtcttaacagcagaggtatcaggaggtagtagaggtggaagaatatttagatctagtgactttgcaaaaaactttgttcaaaccgatcttccattccatcctttaacacaaatgatgtattcaccacaaaacagtgattacttattagcattatcaactgaaaatggattatgggtttctaagaatttcggaggaaaatgggaagaaattcataaagcagtatgtcttgctaaatggggatcagataatactatattttttacaacatatgcaaatggatcttgtacagacttaggagcattagagctttggagaacttctgatcttggaaaatcattcaaaactattggagttaaaatatatagttttggacttggtgggagatttttattcgcaagtgtgatggcagataaggatacaacaagaaggattcatgttagtacagatcagggagatacatggtcaatggctcaattaccatcagtcggacaagaacaattttattctattttagctgctaacgatgatatggtattcatgcacgttgatgaacctggagatacaggatttgggacaatcttcacatcagatgatagaggaatcgtttattcaaaatcattagacagacatctttatactactactggaggtgaaacagattttacaaatgttacaagtttaagaggagtttatatcacttctgtattatctgaagacaattctattcaaacaatgattacttttgatcaaggaggaagatggacacatcttagaaaacctgaaaactcagagtgtgatgctacagcaaaaaataaaaatgaatgttcacttcatatacatgcttcttatagtatttcacaaaaacttaatgtgcctatggctccattatcagaaccaaatgcagtaggtattgttatagctcatggatcagttggtgacgctatttcagttatggttccagatgtttatatctccgatgatggaggatattcatggactaaaatgttagaaggaccacattattatacaattttagactcaggaggaattatagtcgctatagaacattcttcaagaccaattaatgttatcaaattttcaactgatgaaggtcagtgttggcaaacatatacattcactagggatccaatttatttcacaggattagcatctgaaccaggagcaagatcaatgaatatatcaatatggggatttactgaatcatttttaacctcccaatgggtttcatatacaattgattttaaggatattcttgaaagaaattgtgaagaaaaagattatactatttggttagctcatagtactgatccagaagattatgaagatggatgtattttaggttataaagagcaatttttacgtttaagaaagtcatcagtttgtcaaaatggtagagactatgtagtaactaaacaaccatcaatttgtctttgttcattagaagactttctttgtgattttgggtattaccgaccagaaaatgattcaaaatgtgtagaacaacctgaattaaaaggacatgaccttgaattctgtctttacggaagagaggaacatttaactactaatggatatagaaagattcctggagataaatgtcaaggaggagttaatccagttagagaagttaaagatttaaagaaaaaatgtacatcaaattttttaagtccagaaaagcaaaatagtaaatctaattcagttccaattattcttgctattgtaggattgatgttagttacggtagttgctggagttttaatcgttaaaaaatatgtatgtggaggtagatttttagttcatcgttattctgttttacaacaacatgctgaggcaaatggtgttgatggagtagatgcacttgatactgctagtcatactaataaatcaggttatcacgatgatagtgatgaagatttacttgaa

SEQ ID NO: 19658 - DNA, 2082 bp, synthetic construct
  misc_feature 1..2082: note = source = /note="Description of Artificial Sequence: Synthetic coding sequence"
  source 1..2082: mol_type = other DNA
atgacattcggacaatctaaactgtacagaagcgaggactacgggaaaaattttaaggacatcacagacctgatcaacaacaccttcataagaacagagttcggcatggctattggcccagagaattctgggaaggttgtgcttacggccgaggtgtccggcgggagtagggggggcagaatctttagatcttctgatttcgccaagaacttcgtgcagacagaccttccattccacccactgacacagatgatgtacagtcctcagaactctgattacttgttagccttaagcaccgaaaacgggctatgggtaagcaaaaatttcgggggaaaatgggaggagattcacaaagccgtgtgtttagcaaagtggggaagcgataatacaatattcttcactacatatgctaatggcagttgtacagacctcggtgccctcgaactatggcggacaagtgacctgggtaaatcttttaaaacaattggggtgaaaatctactcctttgggctgggcgggcgtttcctgttcgcctccgtcatggccgacaaagacacaacacgccgcattcatgtgtccactgatcagggggacacatggtcaatggcccaactgcccagcgtcggacaggaacagttctactctattctggccgcaaatgatgacatggttttcatgcacgtggatgaacccggcgatactggcttcggaaccatcttcaccagcgatgatagaggtatagtctactctaagagcttagatcggcatctctataccaccacagggggcgaaactgatttcacaaacgtcacttcccttaggggcgtctatattacctccgtgctgtcggaggacaacagtatccagacaatgatcacctttgatcaaggggggagatggacccacctgagaaagcccgagaattcggaatgcgatgccactgccaaaaacaagaatgaatgctccttgcacattcacgcttcctatagtatatcacagaaattgaacgttcctatggcccccttaagcgaacctaacgcagtcggtatcgtgattgctcatggctccgtcggcgatgcaatctccgtgatggtacccgacgtgtacatctcggacgacgggggctactcatggacaaaaatgttggagggacctcactattatacaatcctggattcgggtgggatcatcgtggctatcgaacactcatcgagacccatcaacgtgattaagttttcaaccgacgagggccagtgttggcagacatatacctttactagagaccctatctactttacgggacttgcaagcgagccaggggcacgttcaatgaatatctcaatttggggcttcactgagagctttctgaccagccaatgggtgtcatacactatcgacttcaaggacatcctggaacggaattgcgaggagaaggattataccatctggttggcccactccactgatcctgaggattacgaagatgggtgtatactcgggtataaagaacaattcctcagacttcggaaatctagcgtttgccagaacggaagggactatgtcgtgactaagcaaccatctatttgcctgtgtagccttgaagacttcctttgcgactttggctattaccggccggagaatgacagtaagtgtgtcgagcagccggagttaaaggggcacgatctcgagttctgtctgtatgggcgagaagagcatctcaccacgaatgggtacaggaaaatcccaggggataagtgtcagggaggagttaaccccgttagggaagtgaaggacttaaagaagaagtgcacttcgaatttcctgagtcctgagaaacagaatagcaaatccaatagtgtccctattattttggcaatcgtcggtctgatgctggttacagtagtggctggagttcttattgttaagaagtacgtttgtgggggacgattccttgtgcatcgctactcagtgctccagcaacacgcagaggccaacggggtggacggagtcgatgccctggatactgcctcacacactaataagtctggttatcacgacgattccgatgaagatctgcttgag

SEQ ID NO: 19659 - DNA, 2082 bp, synthetic construct
  misc_feature 1..2082: note = source = /note="Description of Artificial Sequence: Synthetic coding sequence"
  source 1..2082: mol_type = other DNA
atgacgttcggacagtctaagttatacaggtccgaggactacggcaaaaactttaaggacatcactgatttaatcaacaacactttcattcgcaccgagtttggaatggccatcggtccggaaaatagcgggaaggtcgtgctcaccgctgaggtatcgggaggaagcagaggtggccgcatctttaggagcagcgatttcgccaagaattttgtccagacggatttgccattccaccccctaacccagatgatgtatagcccgcagaactccgattacctgctggcactgtcaacggaaaatggactctgggtgagcaagaacttcggcggcaagtgggaggaaattcacaaggctgtgtgccttgccaagtggggatcagataacactatcttcttcacaacttatgccaacggcagttgcaccgatctgggcgctctggaactgtggcggacctctgatctcggtaagtccttcaaaactatcggggtgaaaatatactcgttcggattgggcggccggttcttgtttgccagcgtaatggccgacaaggacaccaccaggcgcattcatgtttccaccgatcagggcgatacatggtcgatggcccaactcccctccgtaggtcaagagcaattctattctatcttggccgccaacgatgatatggtgtttatgcatgtggatgagccgggcgatacgggtttcggtaccatttttacgtcagacgaccgcggcatcgtttatagtaagagcctggaccgtcacctatatactacaactggcggcgagacggacttcactaacgtcactagccttcgcggagtttatatcacgtcggtgctgtccgaggataactcgattcaaaccatgataacgtttgaccaaggcggacgatggacgcatctccgcaagccggagaattcggagtgtgatgcaacagcgaagaacaagaacgagtgctcgcttcacattcatgcctcttacagtatttctcagaagttgaacgtgcctatggcgcccctaagtgagccgaacgcggtcggaatcgttattgcccacggaagcgtgggcgacgccataagcgtgatggtgcctgatgtttatatcagcgatgatggcggatattcatggaccaagatgttggagggaccgcactactacacaatcctggactctggaggcatcatcgtggcaatagagcattcttcacgtcccatcaacgtgattaagttctcgaccgacgagggacagtgctggcagacctatacgtttacgagggatcccatatactttaccggtctggcctcggagcccggcgcccgaagcatgaatatctccatatggggttttaccgagtcatttcttacgagtcaatgggtgtcatatacgattgattttaaagacatccttgagagaaattgcgaagagaaggattataccatttggctcgcccatagcaccgacccagaggactatgaagatggttgcatcttgggctacaaggagcagtttctccgtttgcgcaagtcgtcagtttgtcaaaacggccgtgattatgtcgttaccaagcagcctagcatctgtctgtgcagcttggaagactttctgtgcgatttcggatattaccgtcccgaaaacgattccaagtgcgtggagcaacccgagcttaagggccacgatctcgagttctgtctctacggccgcgaggagcatctgacaacgaacggctacagaaaaattcccggagacaaatgccagggcggcgttaacccagtgcgcgaagtcaaagaccttaagaagaaatgcacgtcgaacttcctgagtccggagaaacagaattcaaagtccaactcggttccgatcatcctggccattgtcggcctaatgctggtcactgtcgtggccggcgtcctaatagttaagaaatacgtatgcggtggacgtttccttgtgcaccggtactcggtactgcaacagcacgccgaggctaacggtgttgacggcgtggacgcactagacactgcatctcatactaacaagagcggttatcacgacgactccgatgaggatctgctagag

SEQ ID NO: 19660 - DNA, 2082 bp, synthetic construct
  misc_feature 1..2082: note = source = /note="Description of Artificial Sequence: Synthetic coding sequence"
  source 1..2082: mol_type = other DNA
atgacctttggacagtcaaaactgtaccggtccgaagattacggcaagaacttcaaggacatcactgacctgatcaataacacctttatccgcaccgagtttggaatggcaattggccccgagaattcgggaaaggtggttcttaccgcggaagtgtctggcggttccaggggaggcagaatctttcgctcaagcgatttcgcaaagaacttcgtccagaccgatctcccatttcaccccctcacccagatgatgtactccccgcaaaactccgattaccttctcgcccttagcactgagaacgggctgtgggtgagcaagaatttcggggggaagtgggaagagatccacaaagcagtctgccttgccaagtggggatccgataacaccatcttctttaccacctatgccaatgggtcatgcactgatctcggcgcccttgaactttggcggaccagtgatttgggcaagtcctttaagaccattggtgtgaagatctactccttcggactgggaggtcgctttcttttcgcctcagttatggcagataaggataccactaggagaattcacgtgtcgaccgaccaaggagatacctggtcaatggcacaacttcctagcgtgggccaagaacagttttactcaattttggcggccaacgatgatatggtctttatgcatgtggatgagcctggtgatactggtttcggtactatcttcacgtctgacgatagggggattgtgtactcaaagtcgttggatcgccacctgtacaccactaccggaggagagacggattttactaacgtgaccagcctgcggggcgtgtacattacctcggtcctgtcggaagataactcgattcagactatgatcacgttcgatcaaggaggacggtggacccacctgagaaagccagaaaattcggaatgcgatgcaactgctaagaacaaaaacgagtgtagcctgcacatccacgccagctacagcataagccagaagctgaatgtgccaatggcccctctgtcggaacctaatgccgtgggaatcgtcattgcccatggatcggtgggggatgcaatctccgtcatggtccctgacgtgtacattagcgatgacggtggatatagctggacgaaaatgcttgaaggcccgcattactacactattctggattccggagggattattgtcgcaatcgaacatagcagccggcctattaacgtgataaagttttcgactgacgaaggtcaatgttggcagacctacacctttaccagagatcctatttacttcactggtctggcttccgaacctggggcacgctcgatgaacatttccatctggggattcaccgaatcatttctgactagccagtgggtgtcctacactatcgactttaaggatattcttgaacgtaattgcgaggagaaagactacacgatttggcttgcgcattcgaccgatcctgaggattacgaagatggttgtattctcggttacaaggagcaatttcttagactgagaaagtcgtcggtgtgtcaaaacggtcgggattatgtggtcactaaacaaccttctatttgtctgtgtagcctggaggactttctttgcgatttcggctactacagaccagagaacgattcaaagtgtgtcgagcagcctgaacttaaaggtcacgatctcgaattttgcctctacggaagagaagaacacttgactaccaacggctacagaaaaatccccggtgataagtgtcaaggtggggtgaaccctgtccgtgaggtcaaggacttgaaaaagaaatgtaccagcaatttcttgtcgccagaaaagcaaaattctaagagcaattccgtccccattattcttgcaattgtcggtctgatgcttgtgactgtcgtggcaggagttttgatcgtgaagaagtacgtttgcggaggccgctttctggtgcatcgctacagcgttctgcagcagcatgccgaagctaatggtgtcgacggtgtggatgcgctggataccgcctcgcatactaacaaatcgggataccacgatgattcagatgaagatctgctcgag

SEQ ID NO: 19661 - DNA, 2082 bp, synthetic construct
  misc_feature 1..2082: note = source = /note="Description of Artificial Sequence: Synthetic coding sequence"
  source 1..2082: mol_type = other DNA
atgacctttggccagtccaagctttatcgatctgaagactatgggaagaattttaaagacataacagacttaattaataacactttcatacggacagaatttggaatggccatcggcccagagaactccggcaaggtggttctcaccgctgaagtgtctggcgggtctcgcgggggcagaatttttaggtcttccgattttgctaagaactttgttcagactgacttacccttccaccctcttacacagatgatgtacagcccacagaactctgactacctgctagccctcagcaccgagaatggactatgggtctctaagaatttcggaggcaaatgggaggaaattcataaagctgtttgcttggcaaaatggggctcagacaacaccatcttcttcacaacttatgctaacggatcttgcacagacctcggggcactggaactctggcggacttccgacctaggcaaaagtttcaagacaatcggcgtgaagatatactccttcggcctgggcggccgatttctatttgcatctgtgatggcagacaaggataccacccggagaatacacgtgtccactgaccagggggatacttggagcatggcccagctgcccagtgttggccaggaacagttttattcaattctagcagccaacgacgacatggtgttcatgcacgttgatgagcccggagatacaggttttggcaccatcttcacctctgatgatcgtggtatcgtgtacagcaagtctttagaccgtcacctatatacaaccactgggggggagaccgacttcaccaatgtgacttctctgcgtggagtgtacattacatccgtattaagcgaggacaattctattcagaccatgattacattcgaccagggcggcagatggacacacctgaggaaacctgaaaattctgagtgtgacgcaaccgccaagaataaaaatgagtgcagcctgcacatacacgccagttattctataagtcagaaactgaatgtccctatggcacctctctccgagcccaatgccgtcggaatagtgatagcacatggctctgttggcgatgccatatcagttatggtcccagacgtctacatatctgatgacggcgggtactcttggactaaaatgctagagggcccacattactacaccattctcgacagcggcggcatcattgtggcaattgaacacagctccaggccaattaacgtgataaaatttagcacagatgaagggcagtgctggcagacttacacattcaccagagaccccatatactttacagggctcgcctcagaacccggagcaaggtccatgaacatctccatttgggggtttactgagagttttcttacatcacagtgggttagctacaccattgactttaaagacattttagaacgcaattgtgaggagaaggactataccatctggctggcacactcaaccgatcccgaagactacgaggatgggtgtatcctgggctataaggaacagttccttagactgcgaaagtcttctgtttgtcagaatggacgggactatgtggttaccaaacaaccatccatatgtctgtgtagcttagaagactttctgtgtgacttcggctactacaggcctgagaatgatagcaaatgcgtggaacagcccgagctcaaaggtcacgacttagaattttgcctatacggccgggaggaacacctcactaccaatggttataggaagatacctggcgataaatgccaggggggtgtcaatccagttcgcgaagtgaaggatctgaagaaaaagtgtacttccaacttcttaagtccagaaaaacagaatagcaagagtaatagcgttcctataattctggccattgtgggcttgatgctggtgacagtcgtggctggggttctgattgtgaaaaagtacgtgtgtggcggtcggtttcttgttcatagatattctgtactgcagcagcatgccgaagctaacggcgtcgacggggtcgatgccctggatacagccagccacacaaacaaatccggataccatgacgattccgacgaggacctgctggaa

SEQ ID NO: 19662 - DNA, 2082 bp, synthetic construct
  misc_feature 1..2082: note = source = /note="Description of Artificial Sequence: Synthetic coding sequence"
  source 1..2082: mol_type = other DNA
atgacctttggacaatcaaagctgtaccgttcggaggactacggcaaaaacttcaaagacattactgaccttatcaacaacacctttatccgtactgaatttggaatggctatcggaccagaaaactcgggcaaggtggtcctgaccgccgaagtcagcggtggatcgaggggaggacgcatctttcggtcgtcagattttgcgaagaattttgtgcaaaccgatctgcctttccatccactgacccaaatgatgtactcgcctcagaattccgattaccttctggcactgtccactgagaatggactgtgggtttcgaagaactttggtggcaaatgggaggaaatccacaaagcagtgtgcttggctaaatggggttcagacaacacgatattctttaccacctacgcgaacggatcgtgtaccgatctgggagctcttgaactttggcgcaccagcgatctgggtaagtcattcaagactattggcgtcaagatttacagctttggccttggagggaggtttctttttgcctccgtcatggcagataaagacaccactagaagaattcacgtgtcaaccgaccaaggagatacttggtccatggcccaactgccgtcggtgggtcaggaacagttttactccattctcgcggccaatgatgatatggtgtttatgcatgtcgacgaacctggtgacaccggatttggaacgattttcacgtccgacgatcgcggtatcgtgtattcgaaatccctggataggcacctttacaccactactggcggcgagactgattttaccaatgtgacctcattgcgaggcgtctacattacttcagtcctctctgaggacaattccatacaaactatgatcacctttgatcaaggcggtcggtggactcatctgcggaagccagaaaatagcgaatgcgatgcaaccgcaaagaacaagaatgaatgtagccttcacatccatgcatcctacagcatttcgcaaaaactgaatgttcctatggctcctcttagcgaaccaaacgcagtgggtattgtgattgcacatggcagcgttggtgacgccatttccgttatggtgcccgatgtgtacatttcggacgatggaggctactcttggaccaaaatgttggaaggcccccattactacactatactcgattcgggtggaatcatagttgctattgaacattcgtcgcgccccattaacgtgattaagttttcaaccgacgaaggccaatgctggcagacctacacttttacccgggatcctatttacttcaccggtttggcatccgagccaggtgcaagatcaatgaacatttccatctgggggtttactgaatcctttcttactagccagtgggtttcatatactatcgactttaaagatatcctcgagcgaaactgtgaagaaaaagattacaccatttggctcgctcactcaacggatcctgaggactacgaagatgggtgcattttgggatacaaagaacaattcttgcgtctccggaaatcgtccgtctgtcagaacggcagagattacgtcgtcactaagcagccgtcaatctgtctctgctccctcgaggactttctttgtgatttcggatactaccgcccagaaaacgactccaaatgtgtggagcaaccagagctgaagggccatgatctggaattttgtctttatggtagagaagaacatcttaccactaatggctacagaaagataccaggtgataaatgtcaaggcggcgtgaacccagtccgcgaggtgaaggacctcaagaagaaatgtacctcgaatttcctgtcacccgagaaacaaaattcgaagtcaaacagcgtgcccattatcctcgccatcgtgggtctgatgctggtgactgtggtggcaggtgtgctgattgtgaagaagtacgtctgtggcgggagatttctcgtgcacaggtacagcgtccttcaacaacatgcagaagccaacggggtggatggagtggacgcactggatacggcatcgcatactaacaagtcgggctaccacgacgacagcgacgaggatctgctcgaa

SEQ ID NO: 19663 - DNA, 2082 bp, synthetic construct
  misc_feature 1..2082: note = source = /note="Description of Artificial Sequence: Synthetic coding sequence"
  source 1..2082: mol_type = other DNA
atgacattcggacagagtaagctgtacaggtccgaggactacggcaagaattttaaggatatcactgaccttataaacaacaccttcataaggactgaatttggaatggctattgggcctgagaactctgggaaagtggttctgaccgctgaggtgagcggtggctctcggggcgggaggatctttaggtctagtgatttcgcgaagaacttcgttcagactgacctcccttttcatcctctgactcagatgatgtacagccctcagaactcggattacctcctggccctctccaccgagaatggcctctgggtgagcaagaattttggcgggaagtgggaggagatacataaggccgtgtgtctcgctaagtggggctctgacaatactatcttttttaccacttacgccaacgggagctgcaccgacctcggagcactcgaactctggagaacaagcgacttagggaagtctttcaaaactatcggggttaaaatctactcattcggactgggcgggcggtttctgttcgcttctgtcatggccgataaggacactacgaggaggatccatgtatccacagatcagggcgatacctggtcgatggctcagctgccctccgtcggtcaggaacagttctactcgatcctcgcagccaatgacgacatggtctttatgcatgtcgacgaacccggagatacaggatttgggacaatctttacctcagacgaccggggcatcgtgtatagcaaatcattggatcggcacctctacaccacaacgggtggtgagacagacttcacgaatgtcaccagtttgagaggggtttacatcacatcagtgctctctgaggataattcgatccagacaatgattacttttgaccagggcggaaggtggacccatcttcggaaacccgaaaatagtgagtgtgatgctactgccaagaacaagaatgaatgctctctccatatccatgcatcctatagtattagtcagaagcttaatgtgcccatggccccactgtccgagcccaatgccgtgggaatcgtcatagcacacgggagcgtgggtgatgccatctccgtgatggttcccgacgtctacatctctgatgacggcgggtatagctggaccaaaatgctcgaaggcccacactactacactatcctggattcaggtggaatcattgtcgcaattgagcactcatcccgtcccattaatgtaataaagttttccaccgacgagggacagtgctggcagacgtacacttttactagagatcctatatatttcacaggtctggcatcagagcccggggcccgatccatgaacattagcatctggggctttacagagtccttcctgacaagtcagtgggtgagctacaccattgattttaaggatatcctggaaaggaactgtgaagaaaaggactacacaatttggctggcccattccacagaccccgaggactatgaagatggttgcattttgggctacaaggagcagtttctgcgccttcgcaaatcctccgtatgtcaaaatggaagggactacgttgtcacaaagcagccttcaatctgtttgtgttccctggaggatttcctatgcgatttcgggtactaccggccagagaacgattccaagtgtgtggagcaacctgagctcaagggccatgacctggagttctgtctgtacggccgcgaggagcatctgaccactaatgggtaccgaaaaatccctggggataaatgtcaggggggggttaatcccgtgagagaagtgaaagacctaaagaaaaagtgtacctccaatttcctgagcccagaaaagcagaactctaagagtaattcagtgcccattatcctggcaattgtggggctgatgttggttaccgtggtcgccggagtgctgatcgtgaagaagtatgtctgtggaggcagattcctggtgcaccggtactcagttttgcagcagcacgccgaggccaatggcgtggatggagtagacgcattggatactgcaagccacaccaataaaagtggttaccatgacgactccgatgaggatctcctggag

SEQ ID NO: 19664 - DNA, 2082 bp, synthetic construct
  misc_feature 1..2082: note = source = /note="Description of Artificial Sequence: Synthetic coding sequence"
  source 1..2082: mol_type = other DNA
atgaccttcggacagtccaaattgtataggtctgaagattatggtaaaaactttaaggacatcaccgatctcatcaataacacgttcattcgaacagagttcgggatggccatcggacccgaaaacagtggaaaggttgtgctgacagcagaggtcagcggaggcagccggggagggagaatcttccggtcctcagatttcgctaagaacttcgtgcaaaccgacctgccctttcaccccctcactcagatgatgtactctcctcaaaactccgactatctgctggccctcagtaccgagaacggtctgtgggtgagcaagaatttcggcggcaaatgggaggagattcataaggcagtatgtctggccaaatggggttccgacaacaccatcttctttactacttacgcgaatggatcctgcaccgacctgggggctttggaattgtggaggacctcagatctgggtaagagctttaaaacaatcggtgtgaaaatatactccttcggtttgggtggtcgctttctttttgcatcagtgatggcggacaaggacacaacacgcaggatccacgtttccactgaccagggagatacatggtcaatggcccaactgccctccgtgggtcaggagcagttctattctattctcgctgcgaacgatgacatggtattcatgcatgtcgatgaaccaggtgacaccggcttcgggacaattttcacatccgatgacagagggatagtgtatagcaaaagcctggatcgacatctgtacactacaaccgggggagaaaccgactttaccaacgtcacttccttgcggggagtatacattacaagcgtcctctctgaagacaactccatccagactatgattacattcgaccagggggggaggtggacacatctcaggaagcctgaaaactcagaatgtgacgcaacagccaagaacaagaatgagtgctctctgcatattcatgcaagctattctatttctcagaagctgaatgtgcctatggctccgctgtctgagcctaacgcagtgggcatcgtaatcgcccacggatccgttggcgatgcaatcagcgtgatggtgcccgatgtgtacatctcagatgacggcggctatagctggacaaaaatgctcgaggggccacactactacactatactcgatagtggtggaatcatcgtggctatcgagcacagctcacgacccatcaatgtgatcaaatttagcactgacgaaggccaatgctggcaaacctacacatttacacgagacccgatctactttaccggcctggcctctgagcctggggcaaggtctatgaatattagcatttggggtttcaccgaatctttcctgaccagccaatgggtaagctataccatcgacttcaaggatatccttgagagaaattgcgaagaaaaggactacaccatctggctcgcacacagcactgaccccgaggactacgaggatggatgcattttgggctacaaggaacagtttcttagacttcggaagtctagcgtctgccagaacggacgcgactatgtagtcacaaagcagcctagtatctgcttgtgttctctggaagactttctctgcgattttggatattataggcctgagaatgattcaaagtgcgtggagcagcctgaacttaagggtcatgatcttgagttctgtctttatggacgcgaagaacacctgaccacaaatggttaccggaagatcccaggggacaaatgtcagggcggggtgaacccagtcagggaagtgaaagatctgaagaagaagtgcacctctaactttctctccccagagaagcaaaactcaaagtctaacagtgtgcctattatcttggcgatagtggggcttatgctggtcaccgtagtggctggagtactgattgtgaagaaatacgtttgtgggggtcgctttctggtccatcggtattcagttttgcaacagcatgcagaggctaacggcgtggatggcgtggatgctttggatactgcctcccatacgaacaaaagtggttaccacgacgactccgatgaagacctcctcgag

SEQ ID NO: 19665 - DNA, 2082 bp, synthetic construct
  misc_feature 1..2082: note = source = /note="Description of Artificial Sequence: Synthetic coding sequence"
  source 1..2082: mol_type = other DNA
atgaccttcggccagtccaagctctatcggagcgaggactacgggaagaatttcaaggatatcactgacctgatcaataacactttcatccggacagaatttggaatggcgattggcccagagaattccgggaaagtggtcctcaccgccgaagttagcggcggctcgagaggaggcaggatctttcgttcatcagactttgcaaaaaatttcgttcagaccgatctaccattccaccccctcactcagatgatgtattcgccacagaactccgactacctgctcgctctgtccaccgagaacggcttgtgggttagtaagaattttggcggaaaatgggaggaaatacacaaagccgtgtgcctggcaaagtggggcagcgataacactattttttttactacctacgctaatgggtcctgtacggatcttggagctctcgaactttggcgcacctccgatctgggaaagtcattcaagactatcggcgtgaaaatctattctttcggtctgggaggaagatttctcttcgcttccgtcatggcggataaggacaccacgaggagaattcacgtgtcgaccgaccagggcgatacgtggagcatggcacagcttccttcagtgggacaggaacagttctattcaatcctagccgccaatgatgacatggtgtttatgcatgtcgatgagccaggcgataccggcttcggcaccatcttcacctctgacgatcggggaatcgtgtactctaagtcattggatcgccatctgtataccactacaggtggagaaacagactttaccaacgtcacaagcttaaggggcgtgtacattacatcggtgttgtcagaggataactcgattcagacaatgatcacgttcgaccagggcggtcgttggacacacctgaggaaacctgaaaatagcgaatgcgacgcgaccgctaaaaacaagaacgaatgttctttgcatatacatgcgagttacagcatcagccagaagctgaacgtgccgatggccccactctccgagccgaacgccgtgggcatcgtaatagctcacggctctgtaggcgacgccattagcgtgatggtgccagatgtctatatttccgacgacggaggctactcatggacaaaaatgctcgagggaccgcattattacactatcctcgactccggcggaataattgtggcaatcgagcatagttcacgccctatcaacgttataaagtttagtactgacgagggacagtgctggcaaacctatacttttacacgagatcccatttactttaccggcctggccagtgaacccggcgccagatccatgaacatctccatctggggctttacagagtccttcctgaccagtcagtgggtgtcatatactattgactttaaagatattcttgagagaaattgcgaggagaaggattatacgatatggctggcccacagcaccgatcctgaggattatgaggatggctgtatattgggctataaagagcagttcctgaggttgcggaagtcctctgtgtgccaaaatggccgcgactatgtcgtgacaaaacagcccagtatttgtctgtgctccctggaggattttctctgcgacttcgggtattatagacctgagaatgattcgaagtgtgtggagcagcccgaattgaagggacacgatctcgaattttgcctgtatggccgggaagagcatctgacaacaaacggatacaggaaaattcccggcgataagtgccagggcggtgtgaatcccgtacgggaagttaaagacctcaagaagaaatgtacatccaattttctcagtcccgagaaacagaacagcaagtcaaatagtgtgcctattatactggcaatagtgggactgatgcttgtgactgtggtcgccggagtgttgatcgtcaagaagtacgtgtgtggtgggaggtttctggtccacagatatagcgtcttacagcagcatgcggaggctaatggggtagacggcgtggatgccctggacacagcctcccatactaataagagtggctatcatgacgactcagacgaggacctgctggag

SEQ ID NO: 19666 - DNA, 2082 bp, synthetic construct
  misc_feature 1..2082: note = source = /note="Description of Artificial Sequence: Synthetic coding sequence"
  source 1..2082: mol_type = other DNA
atgacctttggccagagcaagctatatcgaagcgaggattacggaaaaaactttaaagatataacagacctgattaacaacacttttattcggacagagttcgggatggctatcggacccgagaactctgggaaagtcgtccttactgcagaggtgtccgggggctctagaggcggacgtattttccgcagcagtgatttcgcaaagaactttgtgcagacagatttgccattccatccgctgactcagatgatgtactctcctcagaactcggattatctgctggccctatccaccgagaatgggctttgggtgtccaagaactttggcggcaagtgggaggaaatccataaggcagtttgcttagccaagtggggctccgacaacaccatcttctttaccacctacgccaatggcagttgtactgatctcggggcattggagttgtggcgaacatccgatctgggaaagtccttcaaaactattggcgttaaaatatattcctttggattgggaggaaggtttctgtttgcctcagtgatggccgacaaagatacaacccggcgcattcacgtctccactgatcagggagacacttggtccatggcccaacttccatccgtcgggcaagagcagttttattccatcctggctgctaatgacgacatggtctttatgcatgtggacgagcccggggatacaggattcgggacgatctttacgagcgatgatcggggcatcgtgtactctaagagtctagacagacacctgtatacaactaccggcggggagacagactttaccaacgtgacaagtctgaggggggtgtatataaccagcgtgctgtctgaggataattcaattcaaactatgataacattcgatcaaggcggccggtggacccacctccgaaagcccgagaactcagagtgtgatgccaccgccaagaataaaaacgagtgttcccttcacatacatgcttcttattcgatctcacagaagctgaacgtgcctatggccccactgagtgaacccaacgcagttggtatcgtgattgctcatggcagcgtcggggatgcaatttcagtgatggtgcctgacgtgtatatctccgatgatggcggttactcatggactaagatgcttgaggggccccactattacacgattctcgattccggcgggattatagtggcgatcgagcacagctccaggcccattaatgtaataaaattcagtaccgacgagggccagtgctggcagacctacactttcacccgcgaccccatttacttcaccggccttgcgtctgaaccgggagccagatctatgaacatctccatttggggcttcactgagagttttctgacgtcccagtgggttagctacactatagacttcaaagacatattggagcgcaattgtgaggagaaagactatacaatttggctggcacattctaccgaccccgaggactatgaagacggctgtattctggggtataaagagcagttcttacgcctgagaaagtcgagcgtctgtcaaaacgggagggattatgtggtgaccaagcagcctagtatctgcctgtgttccttggaggattttctgtgcgattttggttattaccgaccagagaatgattcaaaatgcgtagagcaacccgagctgaaaggacatgatctggaattttgcctgtatggaagggaggagcacctcactactaatggatacaggaagattcctggcgataaatgccagggtggggtaaaccccgtgcgcgaggttaaggatttaaagaagaagtgcactagcaatttcctgtcacccgaaaagcagaatagcaaatccaatagcgtgccaattattctggccattgtcggattgatgctggtgacggtggtggccggcgtgctcatcgtcaagaaatacgtttgtggtggacgctttttggtgcatcggtattccgtactgcagcagcatgccgaggctaatggggtcgacggagtagatgccctggatacagcttcccatactaacaagagcggctaccacgacgactctgacgaagatctgctggag

SEQ ID NO: 19667 - DNA, 2082 bp, synthetic construct; identical to SEQ ID NO: 19644
  misc_feature 1..2082: note = source = /note="Description of Artificial Sequence: Synthetic coding sequence"
  source 1..2082: mol_type = other DNA

SEQ ID NO: 19668 - DNA, 2082 bp, synthetic construct
  misc_feature 1..2082: note = source = /note="Description of Artificial Sequence: Synthetic coding sequence"
  source 1..2082: mol_type = other DNA
atgaccttcgggcaatctaagttgtacagatcggaggactacggaaagaacttcaaggatattactgaccttatcaataacactttcatccgaaccgagtttggaatggcgattgggccagagaactcaggaaaggttgttctcaccgcagaagtgtccggcggatcacgcggcgggaggatttttcgtagtagcgactttgctaagaatttcgtccagactgatcttcctttccatccactgactcaaatgatgtatagcccacaaaactcggactaccttctcgcgctttctactgaaaatggcctttgggtgtccaaaaacttcggtgggaagtgggaagaaattcataaggccgtgtgtcttgcaaagtggggttcagacaatactatctttttcaccacttacgcaaacggaagctgtaccgatctgggggcccttgaattgtggaggacctcggatctcggaaaatcatttaagactataggggtgaagatttacagctttggactgggaggccggtttctctttgcatccgtgatggcagacaaggatactacccggagaatccatgtgtctaccgaccagggggacacctggtcgatggcacaactgccatcagtcggacaggaacagttttacagcatcctcgcagcaaatgatgatatggtgtttatgcatgtggatgaaccaggagacaccggatttggtactatattcacttccgacgatagaggtatcgtgtactcgaagtccctggatagacatctgtacacgaccactggcggtgaaacggactttactaacgttacgtcattgaggggagtgtacattacttccgtgctgtccgaagataactctattcaaaccatgatcaccttcgatcagggcggacgatggacccatctgcgcaaacctgaaaactcggaatgtgatgcaactgccaagaacaaaaacgaatgttcattgcatattcacgccagctattcaatatcgcaaaaactcaacgtgccgatggcacctttgtccgagcctaacgcagtcggaattgtgattgcacatggcagcgtgggcgatgcaatctcggtgatggttcccgacgtctacatctcagacgatggaggatactcatggaccaagatgcttgagggtccgcattactacactatacttgattccggaggcatcattgtggcgatcgaacattcgtcccggcctatcaatgtcatcaaattctccactgatgaaggacaatgttggcagacctacacttttacccgcgaccctatttacttcactggactcgcatcggaaccaggagcacgatcgatgaacatctcgatatggggtttcacggaatccttcctcacctcccagtgggtgtcgtatactatcgacttcaaggacattctcgagcgcaattgtgaagaaaaagattacacgatttggctcgcacacagcacggatccagaggactacgaagatggctgtatactgggttacaaagaacaatttctcagactgagaaaatcgtccgtgtgtcagaacgggcgcgattacgtggtcaccaagcagccctccatctgcctttgttcgctggaagatttcctgtgcgatttcgggtactacagacctgaaaatgattccaaatgtgtggaacagccagagctgaagggtcatgacttggagttttgtctgtacggaagggaggagcacctcactaccaatggataccgcaagattccaggggacaagtgtcaaggaggagtgaaccctgtcagagaggtcaaggaccttaagaagaaatgcacttctaatttcttgagcccagaaaagcaaaacagcaaatccaactcggtccccataattctggcgatcgtgggactgatgctcgtcactgtggtcgcaggagtgttgatagttaagaaatacgtctgtggaggtcgctttctggtgcataggtactcagtgctgcagcagcatgcagaggcaaacggagtcgatggagtggatgccctggatactgcatcgcataccaacaagtccggataccacgacgattcagacgaggatctgctcgaa

SEQ ID NO: 19669 - DNA, 2082 bp, synthetic construct
  misc_feature 1..2082: note = source = /note="Description of Artificial Sequence: Synthetic coding sequence"
  source 1..2082: mol_type = other DNA
atgacgtttggtcagtcgaagctctatcgcagcgaagactatggaaagaatttcaaggatatcactgatttgatcaacaacaccttcatccggaccgagtttggtatggccatcggtccagaaaactctggcaaggtggttctgaccgccgaagtctctggcgggtctcgcggtggtcgcatcttccgctcttctgacttcgccaagaatttcgttcagaccgacctgccattccacccgctgacccagatgatgtacagcccacagaattcagactatctgctcgctctgtctaccgaaaatggtctgtgggtatcgaagaatttcggtggaaaatgggaagagattcataaagcagtttgcctggctaagtgggggagcgacaacacgatttttttcaccacttacgcgaacggttcgtgcacggacctgggcgccctggaactgtggcgcacatcagatctgggaaagagctttaaaaccattggtgtgaagatttacagctttgggttgggtggacgcttcttgttcgctagcgtgatggcagataaggatactactcgtcgcatccacgtcagcacggatcagggcgatacctggtctatggcgcagttgccttcagttggtcaagaacagttctactctattttagctgctaacgatgatatggtgttcatgcatgtcgatgagccaggcgacacgggttttggcaccatcttcacctccgatgatcgcggtatagtctacagcaagtctctggaccgccatttgtacacgaccactggtggcgagaccgacttcaccaatgttacgagtctgagaggtgtctatattacttccgttctgtccgaagataacagcattcagacgatgatcacgttcgaccagggcggccgctggacacatcttcgcaaaccagaaaatagcgaatgcgacgctactgcgaagaataaaaatgaatgtagcctgcatattcatgcgagctacagcatcagtcagaagcttaatgtgccgatggcgcctctttctgaaccaaacgccgttggcattgtcatcgctcatggttccgtcggtgatgccatcagcgttatggtgccggacgtttatattagcgacgacgggggctatagctggactaagatgctggagggaccacattattacacgattctggatagcggtggaattattgtggctattgaacattcatcaagaccaatcaacgttatcaagttttccaccgacgaaggtcaatgctggcaaacgtacacttttacgcgtgacccaatttacttcacgggactagcctccgagcctggtgcaagaagcatgaacatttccatctggggttttaccgaaagcttccttacctcacagtgggtcagctacacgatcgatttcaaagacatcctggagcgcaactgcgaggaaaaagattataccatctggctggcgcatagcactgacccagaggattatgaggatgggtgtatcctggggtataaagaacagttcctgcgactccgtaaatcaagcgtctgccagaatggccgcgattacgtagttactaaacagccgtctatctgtctgtgctcattggaggacttcctgtgtgactttggttattacaggcctgaaaacgatagcaaatgtgttgagcagccagagctgaagggccatgacttggagttttgcctgtatggacgagaagagcacctgacgaccaacggctaccgtaagatcccgggtgataagtgccagggtggggtcaaccctgtgcgcgaagtgaaagacctgaaaaaaaaatgtacctcgaacttcctaagtccagagaaacagaattcgaagtctaacagcgtgccaattattctggcaattgtcgggctgatgctggttaccgttgtggctggggtgctgattgtgaaaaagtacgtttgcggcggtagatttcttgttcaccgctattctgttttgcagcagcatgccgaagcgaacggtgtggatggagtagatgctctcgatacggcttcccataccaacaaatctggttaccacgacgacagcgacgaagacctgctggaa

SEQ ID NO: 19670 - DNA, 2082 bp, synthetic construct
  misc_feature 1..2082: note = source = /note="Description of Artificial Sequence: Synthetic coding sequence"
  source 1..2082: mol_type = other DNA
atgacatttgggcaatcaaagctgtatcggtcggaggattacgggaaaaactttaaggatattaccgacctgatcaataatacatttataagaactgagttcggcatggcaatcggccctgagaactctggaaaggtcgtcctaacagccgaggtgagcggtgggtcacgggggggccgtatattcagaagtagtgacttcgcaaagaactttgttcagactgatctcccatttcatcctctgactcagatgatgtactctccccagaattccgattatctgttggccctctctacagagaatggtctgtgggtcagcaagaatttcggagggaaatgggaggagatccataaggccgtttgcttggccaaatggggcagtgataataccattttcttcacaacttatgccaatgggagctgcaccgacctcggagcactggagctgtggcggacttccgatcttggaaaatcctttaagaccatcggcgtcaagatatactcctttgggctggggggtcggtttttgttcgccagtgttatggcagataaagacaccactcgacgcatccacgtttctactgaccagggagacacatggagcatggctcagttgccgtccgtgggacaggagcagttctactctattctggcagctaatgacgacatggtgttcatgcacgttgatgaacctggagacacaggcttcggtacaattttcacctccgatgatagaggtattgtgtattctaagtcactcgataggcatttatacacaaccacagggggagagaccgattttactaatgttacctcactaagaggggtctacattaccagcgtcctgagcgaagataattcgattcagaccatgattacattcgaccagggaggcagatggacacacttaaggaagccagaaaactctgaatgcgacgccaccgccaagaacaagaacgaatgttcactacatatacacgccagttattcaatttcacagaagctgaatgtgcctatggcaccactgtctgagccgaacgccgtgggaatcgtgattgcccacggttcggtgggggacgcaatctccgtgatggtgcctgacgtttatattagcgacgatggcgggtactcgtggactaagatgttggaaggtccccactattacacaatcttagattccggggggatcatagtcgcaatcgagcatagcagtagacccattaacgtaatcaaattttccacagacgaggggcaatgttggcagacatatacctttacgagggatcccatttattttacgggtctggccagcgagccaggcgcacggtctatgaatatctctatctggggatttactgagagcttcttgacctcccagtgggtatcatacaccatagatttcaaggatatcctggagcgaaattgcgaggagaaagattacaccatatggctagctcactccacagaccccgaggattatgaggacggttgcatactcggatacaaagaacagtttctgcgattgaggaaaagctccgtgtgccagaacggccgggattatgttgtgactaaacagcccagcatttgtttatgcagtcttgaagacttcctgtgcgacttcggatactaccgacctgagaacgactccaaatgcgtggagcagccggagttgaagggacatgatctcgaattctgcctgtacggtagggaagagcacctgactactaacggataccggaagatacccggtgataagtgtcagggaggggtcaacccagtgagggaggtaaaggatctcaagaaaaaatgtacatccaactttctgtcgccagagaaacagaactccaagtccaactcagtcccgattatcctggctattgtgggcctaatgttggtgactgtggtagcaggcgtcctgattgtgaaaaagtatgtttgcggcggccggtttctggtgcaccggtacagcgtcctgcagcagcacgccgaggccaacggtgtggacggggtggacgccctggatacagccagtcatacaaacaaatccgggtaccacgatgattctgatgaagacctcttagag

SEQ ID NO: 19671 - DNA, 2082 bp, synthetic construct
  misc_feature 1..2082: note = source = /note="Description of Artificial Sequence: Synthetic coding sequence"
  source 1..2082: mol_type = other DNA
atgacctttgggcagagcaagctctaccgctcggaggattacggaaagaactttaaggatatcactgatctgatcaataacactttcattcgcaccgaattcgggatggcaattggacctgagaattccggaaaagtcgtgcttactgccgaagtgtcaggtgggtccagaggggggcgaatattccgatccagcgattttgctaagaactttgtccaaacggatcttccttttcatccacttactcaaatgatgtacagcccacaaaatagcgactacctgctcgctctgtccactgagaacggactgtgggtgtcaaagaattttggtggaaagtgggaagagattcataaggccgtctgtctggccaagtggggatccgataataccatctttttcactacgtacgccaatggatcgtgcactgacctgggggcacttgaactttggcgtacctccgatctcggaaagtcattcaaaaccattggagtgaaaatctactcgttcggacttgggggccgttttctcttcgcatccgtgatggccgacaaggataccaccaggagaattcatgtctccaccgatcagggagatacctggagcatggcccaactgccctctgtcggccaagagcagttctactccatcctggcagccaatgacgatatggtgtttatgcatgtggacgagccaggtgacactggatttggtaccatattcacgagcgatgaccgcggaattgtgtactcaaaatccctggatagacacctttacaccaccactggcggagaaaccgactttaccaacgtgacttccctccgcggagtgtacatcaccagcgtgctctcggaagataattccattcaaactatgattacctttgatcagggaggaaggtggacccacctcaggaagcctgaaaactcagagtgtgatgcaaccgcgaaaaacaagaatgaatgtagcctccacatccatgccagctactccatttcccagaagctcaacgtccctatggcaccgctttcagagcctaatgcagtgggaattgtaattgcgcacggatccgtcggtgacgcaatttcagtcatggttcctgatgtgtacatttcagatgacggtggctactcctggactaaaatgcttgagggaccgcattactacactattctcgactcaggaggaatcatagtcgctatcgaacattcatcccgccccatcaacgtgatcaagttttcgactgacgaaggacagtgttggcaaacttacacctttactagggatccgatctactttaccggtctggcctcggagccaggtgcacggtcgatgaatatcagcatatggggatttactgaatcgtttcttacgtcgcaatgggtgtcgtacaccattgacttcaaggacattcttgagagaaactgcgaagaaaaggattacaccatttggttggcacactcaactgatcctgaggactacgaggacgggtgtatactgggatacaaagaacaattccttcggttgcggaaatcttcggtgtgtcagaacggcagagattacgtcgtgactaaacagccaagcatctgcctttgttccctggaagatttcctttgcgatttcggctactacagacctgagaacgattccaagtgtgtggagcagcccgaactcaaaggtcatgacttggagttctgtctctacgggcgagaagaacacctgaccacgaatggatacagaaagattcccggggataaatgtcaggggggtgtcaatcccgtgagagaagtcaaggacctgaaaaagaaatgtacctcaaacttcctcagccccgagaagcaaaactccaaatcgaactctgtccccatcatcctggccatcgtgggcttgatgctggtgaccgtcgtggcaggtgtccttatagtgaagaagtacgtctgtggtggacggttccttgtgcatagatactcagtgctgcaacagcatgccgaagcgaatggggtggacggagtggacgctctcgataccgcttcgcataccaacaagtcaggataccatgacgatagcgacgaggatcttctggaa

SEQ ID NO: 19672 - DNA, 2082 bp, synthetic construct
  misc_feature 1..2082: note = source = /note="Description of Artificial Sequence: Synthetic coding sequence"
  source 1..2082: mol_type = other DNA
atgactttcggtcagagcaagttatatcgttccgaggattacggcaagaacttcaaggacatcacagatctcatcaacaatacctttattagaacagaatttggaatggcgataggtccagaaaattcgggcaaggtggtgcttacggccgaagtcagcggcggcagccggggaggaagaatctttagaagcagcgactttgcaaagaatttcgtacagaccgatctgccatttcacccactcactcagatgatgtactctccacagaactctgactatctgcttgctctgtccaccgagaacggcctgtgggtgagcaagaacttcggtgggaagtgggaggagatccacaaagcagtctgtttagcgaagtggggctccgacaatacaatatttttcacaacatacgcaaatggctcttgcacagatttgggagcactagaactttggaggacaagtgacttgggcaagagttttaagacaataggagtgaaaatatattcattcggactcggagggagatttctgttcgcttcagtgatggctgacaaggatacaacacgacgaatccacgtgagtaccgaccagggtgacacttggagcatggcccagctgcctagtgtggggcaggagcaattttattcaatccttgccgccaatgacgacatggtattcatgcacgtcgatgagccaggtgacacaggcttcggaaccatctttacatctgatgaccgggggatcgtgtattctaagagcctcgacagacatctgtacacgacaactggcggcgaaacggattttaccaatgttactagtctccggggggtctacatcactagcgttctgagcgaggataattctatccagacaatgattactttcgaccagggggggcggtggacccacttaaggaagccagaaaacagcgagtgtgacgctactgctaaaaacaaaaatgagtgctcgctccacattcacgcttcttactctatcagccagaaactcaatgtaccaatggcacctctaagtgagcctaatgctgtgggaatagtgatagcacacggtagcgtaggggatgctatcagtgtgatggttcccgatgtgtacatcagtgatgacggcggatattcatggaccaagatgttagagggaccacattactacactatcttggatagtggtggcatcatcgtggccatagagcattcgtcccggcccatcaatgtgattaagttctcgactgatgaaggccagtgctggcagacatacacctttactagggaccctatctactttaccgggttggcatctgagcccggggcccggtctatgaacatcagcatttggggattcacagagtccttcttgacctctcaatgggtctcatacacaattgatttcaaagatatcctagagcgcaactgcgaagaaaaggattataccatctggctggcgcactccactgatcctgaagactatgaagacggctgcatactgggatacaaggaacagttcctccggcttaggaagtcatctgtatgtcagaacggacgggattacgtcgtgactaagcagccttctatttgtctctgctcactggaagactttctttgcgactttggctattaccgccctgagaacgattcaaaatgcgttgagcaacccgagctcaagggacacgacttggagttctgcctttacggcagggaggagcaccttacgacgaatggatatcgaaagatccccggcgacaaatgccagggcggcgtaaacccagtgagggaagtgaaggatctcaaaaagaagtgcacctccaattttctttcacccgaaaagcagaattcgaagtctaacagcgttccaataatcctcgcgatcgtgggtctgatgctagtcactgtagtggccggcgtgctgatagtcaaaaagtatgtgtgcggcggtcggttcttggtccatcggtattcagtgctgcagcagcatgcagaggcaaacggagtagatggggtggatgctctggacacagcttcacacaccaacaaatccggctaccatgatgatagtgacgaggacctgttggaa

SEQ ID NO: 19673 - DNA, 2082 bp, synthetic construct
  misc_feature 1..2082: note = source = /note="Description of Artificial Sequence: Synthetic coding sequence"
  source 1..2082: mol_type = other DNA
atgacttttggtcagtccaagctgtaccgatccgaagattacggaaaaaacttcaaagatataaccgacctgattaacaacaccttcatccgcactgaatttgggatggcaattggacccgagaactcgggtaaagtggttcttaccgcagaggtgtcgggtggaagcagaggcggtagaatcttcaggtcatctgattttgcaaaaaacttcgtccaaactgatcttcctttccatccccttacgcagatgatgtactcaccacaaaatagcgactacctgctggccctgagcacggagaacggcctttgggtttccaagaactttggggggaagtgggaggaaattcataaggctgtgtgcctcgctaagtggggatcggacaataccatattctttactacctacgcaaacggatcgtgtaccgatctcggcgcactggagctctggcgaacctccgatctgggcaagtcgttcaaaaccataggtgtcaagatctactcctttggtcttggtggaagatttctttttgcatcggtcatggcagacaaggatacgacccggaggattcatgtatctacggatcaaggtgatacttggtcaatggcccaactcccaagtgtgggtcaggaacagttttactctattcttgcagcaaacgacgacatggtgtttatgcacgtggatgaaccaggggataccggtttcggcaccattttcacttccgatgaccgtggaatcgtatactcaaagtcactcgatcgtcacctgtacactactactgggggcgaaaccgattttaccaacgtgacgagcctcagaggagtgtacattacttccgttttgagtgaagataacagcatccaaaccatgatcacgtttgaccaaggtgggcgatggacccatcttaggaagccggaaaatagcgagtgtgacgctaccgcaaagaacaagaacgagtgctcacttcacatccatgcttcatattccatatcccagaaactgaacgtccctatggcccctctgtccgaaccaaatgcagtcggaattgtgattgcgcatggaagcgtgggcgacgctattagcgtcatggtgcctgatgtgtacatcagcgatgatggaggctactcatggaccaaaatgcttgaaggacctcactactacaccatccttgattcgggcgggatcattgtggcaattgaacatagctcaaggcccatcaatgtgattaagttcagtaccgacgaaggacaatgttggcagacttacactttcacccgggaccctatctactttactggccttgcctcggagccgggagcacgctcgatgaacatctcgatttgggggtttactgaatcttttctgacctcgcaatgggtgtcctataccatagacttcaaggacatattggagcggaattgtgaagaaaaggattacacgatttggctcgcgcattcgactgaccctgaggactatgaagatggttgcatactcggatacaaagagcagtttcttcgcctccgtaaatcctcggtctgtcagaacggcagggactatgtggtgaccaaacaaccaagcatttgcttgtgttcacttgaggattttctctgtgattttggatactaccgccccgagaacgactcgaagtgtgtggagcagccagaactgaaaggtcatgatctggaattctgtctgtacggacgcgaagagcacctcaccacgaatggttacagaaagatccccggagataagtgccagggaggagtgaaccctgtaagagaagtgaaggacctgaagaagaaatgcactagcaatttcctgtccccagaaaagcaaaattccaagtcaaactctgtgccaattatcctggccattgtaggcctgatgcttgtgaccgtggtggccggagtcttgattgtgaaaaagtacgtgtgtggggggcggtttctggtccataggtactcagtgctgcaacaacacgcggaagccaatggtgtggacggagtggatgcgctggatacggcgagccacaccaataagtcaggataccatgatgattcagacgaagatctgttggaa

SEQ ID NO: 19674 - DNA, 2082 bp, synthetic construct
  misc_feature 1..2082: note = source = /note="Description of Artificial Sequence: Synthetic coding sequence"
  source 1..2082: mol_type = other DNA
atgacatttggtcaatcaaagctttacagatcggaggactatggcaaaaatttcaaagatataaccgatctgatcaacaatacctttattcgcacggagttcgggatggccatcgggccagagaacagcggaaaggttgttttaaccgcggaagtctcaggtggctctcgtggggggcgcatcttccgctccagcgactttgcgaagaattttgtccaaacagatttgccgttccatcctctcacccaaatgatgtactcaccacagaattctgactacctgctagccctcagcacggaaaacgggctatgggtaagtaaaaatttcggcggcaagtgggaagaaatccataaggccgtgtgcctggcaaagtggggctcggacaacacaatatttttcacgacctatgcaaatggcagctgcacagatctgggcgctctggagctgtggcgcaccagcgacctggggaaatctttcaagacgattggagttaagatctactccttcggcctgggaggcagattcctcttcgcgtctgtcatggcagacaaagacacgacccgtcgcatccacgtgtctaccgaccagggagacacatggagcatggcccaactgccgagtgtcggccaggagcagttctactctattctggccgccaatgacgacatggtgtttatgcatgttgacgagccaggcgacaccgggtttggcaccattttcacaagtgatgaccgaggcatcgtatactctaaatcgctggaccgccacctctacacgactaccgggggggagacagacttcaccaacgtcactagtctgcggggggtgtatataacaagcgtgctttccgaggacaatagtatccagacgatgataacttttgatcagggaggaaggtggacacacctgcgcaagcctgagaattctgagtgcgatgcaaccgctaaaaacaagaacgaatgttctctccacatccacgcttcctactccatcagtcagaaactgaatgtgcctatggctcccctgagtgaacctaacgcagttggaatcgttatcgcccatggatccgtcggcgacgccatctcagtgatggtgccagatgtgtatatttccgacgacggggggtacagctggacgaaaatgctggagggccctcattactataccatcttggactccggcgggatcatcgtcgcaattgagcattcaagtaggccaattaatgtgatcaagttcagtaccgacgaggggcagtgctggcagacgtacacgttcaccagggacccaatctacttcaccggactggcatccgagcccggggctagatctatgaacatttccatctgggggttcaccgaaagcttcctgacttcacagtgggtgagctacaccattgactttaaggatatcctcgagagaaattgtgaggagaaggactatacaatttggctggcgcattccacagatcctgaggattatgaggacgggtgtatactcgggtacaaagagcagttcctgcggctgcgcaaatcctccgtgtgtcaaaacggacgggactatgtggtcaccaagcagccaagtatctgtctctgttcgctggaggacttcttatgcgactttggctactatcgccctgaaaacgacagcaaatgtgttgagcagccagagctgaagggacatgacctcgagttctgtctgtacggccgcgaagagcatctgactacaaacggatatagaaaaatccctggagacaaatgccaggggggcgtgaatccagtccgcgaagtgaaggacctgaagaaaaagtgtacttctaatttcttgagccctgaaaagcagaactcaaagagtaattccgtaccaatcatcctggcaatcgtgggcctgatgctggtcaccgtggtcgccggcgtgttaatcgtgaagaagtacgtgtgcggcggtcgcttcctggtgcaccggtacagcgtcctccagcagcacgcagaggctaatggcgtggacggcgttgatgccctagacaccgcaagccacacaaacaaatccggctaccatgacgatagtgatgaagacctcctggag

SEQ ID NO: 19675 - DNA, 2082 bp, synthetic construct
  misc_feature 1..2082: note = source = /note="Description of Artificial Sequence: Synthetic coding sequence"
  source 1..2082: mol_type = other DNA
atgacgttcggtcagtcgaaactctaccggtcagaggattacggtaaaaactttaaagacattaccgatctgatcaataacacctttatcagaacggaatttggaatggctattggcccagaaaattcaggaaaggtcgtccttaccgccgaagtgagcggtggtagcaggggtggtagaatctttcggtcctcggattttgcaaaaaactttgtccagaccgacctgccttttcatcccttgacgcaaatgatgtattcgccacagaatagcgattacctgttggcactgtcaactgaaaatggtttgtgggtgtcgaaaaactttggcggaaagtgggaggaaattcataaggcagtgtgccttgccaaatggggatctgacaacacgattttcttcaccacctacgcaaacggttcctgtaccgacctgggagcattggaactctggcgcacttccgacctcggaaagtcatttaagactatcggagtgaagatttacagctttggacttggggggcgctttctttttgcctcggtgatggcggataaggatactactcgccgaattcatgtgtcgacggatcagggcgacacctggtccatggcacaacttccatccgtgggtcaggaacaattctactcgattctggcagcaaacgacgatatggtctttatgcatgtggatgaaccaggagatacgggcttcggtaccattttcacctctgatgatagaggaatcgtgtactccaagtcgctggatagacacctctacactactactgggggcgaaactgatttcactaatgtcaccagcctgaggggagtctatatcacctcagtccttagcgaagataactcaattcagactatgatcactttcgaccaaggtggccggtggactcatcttagaaagccagaaaactcagaatgtgacgcaaccgccaagaacaaaaacgaatgtagcctgcacatacatgcttcgtacagcatttcgcaaaagctcaatgtcccgatggctccactttcggaacctaacgcagtcggtattgtcattgcccatgggtcagtgggcgacgcaatctcggtgatggttcccgacgtgtacatcagcgatgatggaggttactcatggacgaagatgctggaaggtccacactattacaccatcttggatagcggcggaatcattgtcgccattgaacattcatcgcgccccataaatgtcataaagttctccaccgatgagggtcaatgttggcagacctacaccttcactcgtgatccgatttactttacgggcctggccagcgaaccaggagcgcgctctatgaacattagcatatggggattcactgagtcgttcctgacgtcccaatgggtgtcgtacaccattgatttcaaggacatcctggaacgcaactgtgaggaaaaggactacaccatctggttggctcacagcaccgacccggaagattacgaggatgggtgcattctgggctacaaggaacagtttcttaggttgcgcaagtcatcggtgtgccaaaatggcagagattacgtggtgactaaacagccctccatttgtctgtgcagcctggaggattttctgtgtgatttcggttactaccgtcctgaaaacgattcgaagtgtgtggagcagcctgaattgaagggacatgaccttgaattttgtctgtacggccgggaagaacatctgacgactaacggctacagaaagataccaggtgacaaatgccagggtggggtcaatccagttcgggaggtgaaagatttgaagaagaagtgtacgtctaacttcctgtcccccgagaagcaaaactcgaagtcgaacagcgtccccatcattctcgcgatcgtgggactcatgcttgtgactgtcgtggcaggggtgcttattgtcaaaaagtatgtctgcggtggtcgatttcttgtccatcgttacagcgtgctgcaacaacatgccgaagcaaatggagtggacggagtggacgcacttgacaccgcctcacacactaataagtcgggctaccatgatgattccgacgaggatttgctggaa

SEQ ID NO: 19676 - DNA, 2082 bp, synthetic construct
  misc_feature 1..2082: note = source = /note="Description of Artificial Sequence: Synthetic coding sequence"
  source 1..2082: mol_type = other DNA
atgacctttggacagtcaaagctgtaccgcagtgaggactatgggaagaatttcaaagatattaccgaccttatcaataacacttttattcgcaccgagtttggcatggccatcggtcccgaaaactctggcaaggttgtcctcactgcagaggtatcgggaggaagccgtggagggagaatcttccgcagctccgattttgccaagaattttgtgcagacagacctacccttccatccgctgacacaaatgatgtattcccctcagaactcggactatctgctggctctatcaaccgagaacggactgtgggtcagtaagaactttgggggcaagtgggaagagattcacaaagccgtatgtcttgccaagtggggaagcgataacacaattttttttaccacttacgccaacggatcatgtacggatttgggcgctctagaactctggagaacttccgatcttggtaagtctttcaagactataggggtgaaaatttattcatttggcctgggaggcaggtttcttttcgccagtgtgatggcagataaggatacaacgcggaggattcacgtttctacagatcagggcgacacctggagtatggctcaacttccgagtgtcggacaggagcagttctatagtatcctggctgccaatgacgatatggtgtttatgcacgttgacgagcccggcgacaccggttttggtaccatctttacctctgatgacagaggcatcgtctacagtaagtctttggatcggcacctgtatacgactaccggcggggagaccgacttcactaacgtgactagcctgagaggagtgtacattacttcagtcctcagcgaggacaactctatccaaaccatgataacatttgaccaggggggtcggtggacgcatttgcgcaaacctgagaacagtgagtgcgatgcaactgccaagaacaaaaacgaatgttcattgcacatacacgcttcctactccatctcacagaaactaaatgtaccaatggcacctctctccgaacctaatgctgtgggcattgttattgcacatggctctgttggcgacgccatctctgttatggtccccgacgtgtacattagcgacgacggcgggtatagttggaccaaaatgctggagggaccccattattatacaatcctggattcgggtggtatcatcgtggccatcgagcattcctctcgacccatcaacgtgatcaaattttctacagatgagggacagtgttggcagacgtatacatttactagggatcctatttatttcacaggcctggcttccgaaccaggcgcacgctccatgaatatcagtatctgggggttcaccgagtccttcctgacctctcagtgggtgtcctatacgatcgacttcaaagatatcctcgagcgtaactgcgaggagaaagactatacgatttggctcgctcactctaccgaccccgaagactatgaggatgggtgtattctggggtacaaagagcaattcttgagacttagaaagagttctgtctgccagaatgggagggactacgtcgtgactaagcaaccgagtatctgtctgtgcagccttgaggattttctgtgtgattttggatactatcggcctgagaatgattcaaaatgcgtggagcagccagagctgaagggacacgacctcgaattctgcctgtatgggcgcgaggagcacctgactacaaatgggtatcggaagatcccaggagataagtgtcagggaggggtgaacccggtgcgcgaggttaaggacctgaagaaaaaatgtacaagcaatttccttagcccagagaagcagaatagcaagtccaatagtgttccaatcattctggctatcgtcggactcatgcttgtgaccgtggttgccggagtcctgatcgtgaaaaaatacgtctgcggcgggaggttcttagtgcatcggtacagcgtccttcagcagcacgcggaggctaatggcgtggatggcgtcgacgcgctcgatacagccagccacaccaataagtccggataccatgatgacagtgacgaagacctgcttgag

SEQ ID NO: 19677 - DNA, 2082 bp, synthetic construct
  misc_feature 1..2082: note = source = /note="Description of Artificial Sequence: Synthetic coding sequence"
  source 1..2082: mol_type = other DNA
atgactttcggacagtcaaagctctaccggtcggaggactacggtaaaaacttcaaggatatcactgatctgattaacaacaccttcattcggactgaatttggcatggccatcggaccggaaaattcaggcaaagtcgtcctgactgcggaggtcagcggcgggagccggggaggaagaatcttcagatcaagcgattttgccaagaacttcgtgcagactgatctccctttccaccccctgacccagatgatgtattctccgcaaaattcagactacctcctggccctgtcgactgaaaacggcctctgggtgtctaagaacttcggtggcaagtgggaagaaatccacaaggctgtctgcctcgccaaatggggcagcgataatactatctttttcaccacttacgcgaacggaagctgcactgacctgggcgcgctggagctgtggcggacttccgatctcggaaagtcgttcaagacgatcggagtcaagatctacagcttcggactcggaggacggttccttttcgcctccgtgatggcagacaaggatacgaccagaaggatccatgtgtcgactgaccaaggcgacacctggtccatggcccaactgccttcggtcggacaggagcagttctactcaatcctggcagctaacgacgacatggtattcatgcatgtggacgagccaggtgatactggattcggaactatctttacgtccgacgatcggggaatcgtgtattccaagtcactggaccggcacttgtacactaccaccggaggggagactgatttcaccaatgtcaccagcctgcggggcgtctacatcaccagcgtcctgtccgaagataactccatccagacgatgattacctttgaccagggaggccgctggacccacctgcgcaagcctgagaactccgaatgtgacgcgaccgccaaaaacaagaacgagtgcagccttcacatccatgcttcgtactcaatctcccagaagctgaatgtgccgatggcaccgctctcggaacctaacgctgtgggtatcgtgatcgctcacggatccgttggtgatgccatcagcgtgatggtgcctgacgtctacatatccgacgacggtggatactcctggaccaaaatgctggagggacctcactactacacgatattggactcaggcggcattatcgttgccatcgagcactcatccagaccgatcaatgtgatcaaattctccactgacgaaggacagtgttggcaaacttacactttcacccgggacccgatttactttactggtcttgcctcggaaccgggcgcccgcagcatgaatatcagcatctggggattcaccgagtccttcctgactagccagtgggtgtcttacaccatcgacttcaaagatatcctggagaggaattgcgaggagaaggattacactatatggcttgcacattcaaccgacccagaggattacgaggacggatgcatcctcggttacaaggagcaattcctgcgcctccggaagtcatccgtgtgtcaaaacggtcgggactacgtggtgaccaagcaaccatcgatctgcctgtgctcgcttgaagattttctgtgcgatttcgggtactaccggccggagaatgactccaagtgtgtggaacagcctgaattgaagggacatgacctggagttctgcctgtacggccgcgaggaacacctgactacgaacggataccggaagatcccaggggataaatgtcaaggcggagtgaacccggtccgggaggtcaaggaccttaagaaaaagtgcaccagcaactttctgtcaccggagaaacagaatagcaaatccaactcagtgcccattatcttggcaattgtcggtctgatgctggtgactgtggtggccggcgtgctgatcgtgaaaaagtatgtctgcggaggcagattcctcgtgcacagatactcagtgctgcagcagcacgcggaagcgaatggagtggacggagtggatgcgctggacaccgcctcacacaccaataagagcggctaccacgatgattcggatgaagatcttctcgag

SEQ ID NO: 19678 - DNA, 2082 bp, synthetic construct
  misc_feature 1..2082: note = source = /note="Description of Artificial Sequence: Synthetic coding sequence"
  source 1..2082: mol_type = other DNA
atgacgtttggtcaatcgaaactatatcgttcggaagattatggtaaaaattttaaagatataacggatttaataaataatacgtttatacgtacggaatttggtatggcgataggtccggaaaattcgggtaaagtagttttaacggcggaagtatcgggtggttcgcgaggtggtcgaatatttcgttcgtcggattttgcgaaaaattttgtacaaacggatttaccgtttcatccgctaacgcaaatgatgtattcgccgcaaaattcggattatttactagcgttatcgacggaaaatggtttatgggtttcgaaaaattttggtggtaaatgggaagaaatacataaagcggtatgtttagcgaaatggggttcggataatacgatattttttacgacgtatgcgaatggttcgtgtacggatttaggtgcgttagaactatggcgtacgtcggatctaggtaaatcgtttaaaacgataggtgtaaaaatatattcgtttggtctaggtggtcgttttttatttgcgtcggtaatggcggataaagatacgacgcgtcgaatacatgtatcgacggatcaaggtgatacgtggtcgatggcgcaattaccgtcggttggtcaagaacaattttattcgatattagcggcgaatgatgatatggtttttatgcatgttgatgaaccgggtgatacgggttttggtacgatatttacgtcggatgatcgtggtatagtttattcgaaatcgttagatcgtcatctatatacgacgacgggtggtgaaacggattttacgaatgttacgtcgttacgtggtgtttatataacgtcggtattatcggaagataattcgatacaaacgatgataacgtttgatcaaggtggtcgatggacgcatctacgtaaaccggaaaattcggaatgtgatgcgacggcgaaaaataaaaatgaatgttcgctacatatacatgcgtcgtattcgatatcgcaaaaactaaatgtaccgatggcgccgctatcggaaccgaatgcggtaggtatagttatagcgcatggttcggttggtgatgcgatatcggtaatggtaccggatgtatatatatcggatgatggtggttattcgtggacgaaaatgttagaaggtccgcattattatacgatactagattcgggtggtataatagttgcgatagaacattcgtcgcgtccgataaatgttataaaattttcgacggatgaaggtcaatgttggcaaacgtatacgtttacgcgtgatccgatatattttacgggtttagcgtcggaaccgggtgcgcgttcgatgaatatatcgatatggggttttacggaatcgtttttaacgtcgcaatgggtttcgtatacgatagattttaaagatatactagaacgaaattgtgaagaaaaagattatacgatatggttagcgcattcgacggatccggaagattatgaagatggttgtatactaggttataaagaacaatttctacgactacgtaaatcgtcggtttgtcaaaatggtcgagattatgttgtaacgaaacaaccgtcgatatgtttatgttcgttagaagattttttatgtgattttggttattatcgtccggaaaatgattcgaaatgtgtagaacaaccggaactaaaaggtcatgatttagaattttgtctatatggtcgtgaagaacatctaacgacgaatggttatcgtaaaataccgggtgataaatgtcaaggtggtgttaatccggtacgtgaagttaaagatttaaaaaaaaaatgtacgtcgaattttttatcgccggaaaaacaaaattcgaaatcgaattcggttccgataatattagcgatagttggtttaatgctagtaacggtagttgcgggtgtactaatagtaaaaaaatatgtatgtggtggtcgttttctagtacatcgatattcggtattacaacaacatgcggaagcgaatggtgtagatggtgtagatgcgttagatacggcgtcgcatacgaataaatcgggttatcatgatgattcggatgaagatctattagaa

SEQ ID NO: 19679 - DNA, 2082 bp, synthetic construct
  misc_feature 1..2082: note = source = /note="Description of Artificial Sequence: Synthetic coding sequence"
  source 1..2082: mol_type = other DNA
atgactttcgggcagtccaaactgtacagatcggaggactacggaaagaactttaaagacatcacggatctgatcaataatactttcatccggacggaattcggaatggcgattggccctgagaacagcggaaaggtcgtcctgactgccgaagtgtcgggaggttcccggggaggccggatcttccgctcgtcggatttcgccaagaattttgtccagaccgatctgcccttccaccctctgacccaaatgatgtactccccgcagaacagcgattacctcctggccctgtcgaccgagaatggcctgtgggtgtcgaaaaacttcggaggaaaatgggaagagatccataaggcggtctgtctcgcgaagtggggctcagacaacaccatcttctttactacctacgccaatggatcttgcaccgatctcggggcgctcgaactctggcgcacttctgatctgggaaagtcattcaagaccattggtgtcaagatctactccttcggtctgggcggtcggtttctcttcgcaagcgtgatggccgacaaggatacgactagacgaatccacgtctccactgaccaaggcgacacctggagtatggcgcagctcccgtcagtcggacaggagcagttttactcgatcctcgccgccaacgatgacatggtgtttatgcatgtcgacgagccgggcgatactggcttcggcactatctttaccagcgacgatagaggcatcgtgtacagcaagtccttggacagacatctgtacaccactactggaggagagactgatttcaccaacgtcacctcactccggggagtctatatcacctcagtgctctcggaggacaactcgatccagacgatgatcactttcgaccaggggggacggtggacccacctgcggaaaccggaaaacagcgaatgcgacgctaccgcaaaaaacaagaatgagtgctccctgcacattcatgcttcctatagcatctcccagaagctgaacgtgccaatggcgccgttgtcggaaccgaatgctgtgggaatcgttatcgctcacggtagtgtcggcgacgcaatctccgtcatggtgccggacgtgtacatctcggacgatggtggatacagctggactaagatgcttgaaggaccacactactacacgatactggactccggaggaatcatcgtggcaatcgaacactcatcccgcccgatcaacgtgatcaagttctcgactgatgaagggcagtgctggcagacctacactttcacccgcgacccaatttacttcactgggctggcatcggaaccaggagccaggtcaatgaacatctccatttggggtttcaccgagtcattccttacctcacagtgggtgtcctacactatcgacttcaaggacattctggaacgcaactgtgaggagaaggattacactatctggctggcccattcgacggaccctgaagattacgaggatgggtgtatcctgggctacaaggaacaatttttgagactccggaaaagctccgtgtgccagaacgggcgcgactacgtggtgaccaagcaaccaagcatctgcttgtgcagcctggaggatttcctctgcgatttcggatactacaggccggagaacgactctaagtgcgttgaacaaccagagctcaaagggcatgatctggaattctgtctgtacggccgcgaggaacacctcaccaccaatggataccgcaagatccccggagacaagtgccaaggaggagtgaaccctgtgcgcgaagtgaaggacctgaagaagaagtgcacgtcgaattttctgtcacccgaaaaacagaacagcaaatcaaatagcgtgccgattatcctggccatcgtgggacttatgctggttaccgtcgtggcaggagtgttgattgtgaaaaaatacgtctgtgggggcaggttccttgtgcaccgttactcggtgctgcaacaacacgccgaggcgaatggcgtggacggtgtggacgccctcgacactgcttcccacaccaacaagagcggatatcatgacgactcggacgaagatcttttggaa

SEQ ID NO: 19680 - DNA, 2082 bp, synthetic construct
  misc_feature 1..2082: note = source = /note="Description of Artificial Sequence: Synthetic coding sequence"
  source 1..2082: mol_type = other DNA
atgaccttcggccagtctaagctttaccgctcggaggattacggcaaaaatttcaaggatatcactgatctgattaacaataccttcatccgcacggagttcggcatggcaattggccccgaaaacagtgggaaggtggttcttacagcggaggtgtccggaggctctagaggaggccggatcttccggagtagtgacttcgccaagaacttcgtgcagacagatctgcctttccatccacttacccagatgatgtacagccctcaaaactctgattatctgctcgccctgagcacagagaatggattgtgggtgagtaagaacttcgggggtaaatgggaggaaatccacaaggcggtgtgtctagccaagtggggtagtgataacaccattttttttacaacctatgccaacggcagctgtactgatttgggcgctcttgaactgtggagaacatccgacctcgggaagtcttttaaaacaatcggcgttaagatttactcttttggattaggggggcggttcctcttcgccagcgtgatggctgataaggatactacccggcgcattcacgtgtcaacagaccaaggcgacacttggtccatggcacagctgcccagcgtcggccaggagcaattttactccatcctcgcagcaaatgacgatatggttttcatgcacgtagacgagccgggagatacgggtttcggtaccatttttacctctgatgaccgcggaattgtgtactccaaatccttggataggcatctttatactacaacaggaggcgagactgactttactaatgtaacttcactacggggggtgtatattacaagtgtgttgagtgaggataacagcatccagaccatgatcaccttcgatcagggcggtcgttggacccacctgcggaagccggagaactctgagtgtgacgctactgccaaaaacaaaaacgagtgttcgctgcacattcacgcttcctacagcatctctcagaaactcaatgtccccatggccccattatctgaaccgaatgcagttggtattgtgattgctcatggatccgtgggagatgctatctccgtgatggtgcctgatgtttacatcagcgacgatggaggatactcatggacaaagatgctggaggggccccactattacactatccttgacagcggtggaattatcgtggctattgaacattcatcgcgacctatcaatgtgataaaatttagcaccgatgagggccagtgttggcagacttacacattcactcgcgaccctatttactttacgggtctggccagtgagccaggagcccgctctatgaatatttccatatgggggttcaccgagtcctttctaacctctcaatgggtgtcctacaccatcgacttcaaggatattttggaacgcaactgtgaagagaaggactacacaatctggttagcgcattccactgacccggaggactacgaggacgggtgcatactcggatacaaagagcagttcctccggctaaggaagtcgtctgtgtgtcagaatgggagggattacgtggtgaccaaacagccatccatctgcctttgctcgttagaggattttctctgtgattttggatactaccggccagaaaatgactctaagtgtgtggaacagcctgaactaaagggacatgatctggaattctgtctgtacggccgagaagagcacttaacgacaaacggatacagaaagatccctggagataagtgtcagggcggagttaaccccgtacgggaggtgaaagacctgaagaagaagtgtactagtaactttctcagtccggagaagcagaactccaagagcaatagcgtcccgattatcttagcgattgtgggccttatgctcgtaacagtcgttgctggggtgctgattgtaaagaagtatgtgtgtggtggaagatttctagtgcatagatacagtgtgcttcagcagcacgctgaggcaaatggcgtggacggggtggacgcactcgatactgctagccacacaaacaaaagtggctatcacgatgactccgacgaggacctgctagaa

SEQ ID NO: 19681 - DNA, 2082 bp, synthetic construct
  misc_feature 1..2082: note = source = /note="Description of Artificial Sequence: Synthetic coding sequence"
  source 1..2082: mol_type = other DNA
atgacctttggtcaaagcaagctgtacagaagcgaggattacggaaagaactttaaggacataactgatcttatcaacaatacgttcatcagaaccgagttcggtatggccattggtccagaaaattcgggaaaagtggtccttactgccgaggtgtccggtgggagcagaggtgggcgcattttcagatcatccgacttcgcaaagaactttgtccaaactgatctgccttttcatcctcttacccagatgatgtacagccctcagaattcagactacctgctcgcgctttcaaccgaaaacggcctctgggtttcaaaaaacttcggaggcaagtgggaagaaattcataaggctgtgtgtcttgcaaagtggggctcagacaacaccatcttcttcactacctacgcaaacggctcgtgtaccgatctgggagcattggaattgtggcgcacctccgacctcggcaagtccttcaaaacgattggtgtgaagatctattctttcggccttggtgggcgatttctgtttgcatccgtgatggcagacaaggacacgactcgccgcattcatgtgtcgaccgaccaaggagatacttggagcatggcacagcttccatcggtgggtcaggaacagttttactctatcctggccgcgaacgacgatatggtgttcatgcacgtggatgagccaggtgatactggatttggtaccatctttaccagcgacgatcgcggtattgtgtactctaagagcctggatcggcatctttataccactaccggaggagaaactgattttaccaacgtgacttccttgagaggcgtgtacataacctcagtgctcagcgaagataacagcattcaaactatgattacctttgaccaaggagggagatggacccatcttaggaagcctgagaattccgagtgtgatgcaaccgcaaaaaacaagaacgaatgctcgcttcatatccacgcctcgtactccatttcgcagaagctgaacgtgcctatggcacctctgtcggaaccaaatgcagtgggaatagtgattgcccatggatccgtgggtgatgcaatatcagtgatggtgcctgatgtgtatatcagcgacgatggcggctactcatggaccaagatgctggaggggccgcactactacactatcctcgatagcgggggtatcatcgtcgccattgaacactcgagtagacccattaacgtgattaagttttcgactgatgaaggacagtgttggcaaacttacacttttacgcgggatcccatctacttcacgggactcgcaagcgagccaggcgccagatccatgaatatcagcatttggggatttactgaatccttcctgacctcccagtgggtgtcctacactatcgactttaaagatatactggagaggaattgtgaggagaaggactacactatttggttggcgcattcaaccgatcccgaagattacgaggacggttgtatacttggatacaaggaacagttccttcgcttgagaaagagctcagtgtgtcaaaacggtagagattacgtggtgactaagcaaccttccatttgtctttgttcgctggaggactttctttgtgatttcgggtattaccggcccgagaacgattcgaagtgcgtcgaacagcccgagctgaagggacacgatctggaattctgtctctacggacgggaagagcatctgaccacgaatggatacaggaaaatacctggagataaatgtcaaggtggtgtgaatcctgtgcgcgaagtcaaagatcttaagaaaaagtgtacttccaactttcttagcccggagaaacagaattcaaagtcgaactcagtaccaatcattcttgcaatcgtggggctcatgctggtgaccgtcgtggcaggagtgctgatcgtcaagaagtacgtctgtgggggtaggttcttggtgcataggtactccgtgttgcaacaacatgcagaagcaaacggcgtggacggagtcgatgcactggatactgcatcccatacgaataagagcggctaccatgatgattctgacgaggaccttctggaa

SEQ ID NO: 19682 - DNA, 2082 bp, synthetic construct
  misc_feature 1..2082: note = source = /note="Description of Artificial Sequence: Synthetic coding sequence"
  source 1..2082: mol_type = other DNA
atgactttcggccaaagcaaactttaccgctccgaggactacggaaagaactttaaggatatcactgacctcatcaacaataccttcatccgcacggagttcggcatggcgatcggaccagaaaactccgggaaagtcgtccttactgccgaggtgtcagggggcagccgcggtggcagaatctttaggtcgtccgacttcgccaagaatttcgtccagactgatctgccgttccaccctctgacccagatgatgtattcacctcagaactccgactacctcctggcgctgtcaactgaaaacggtctgtgggtttccaagaattttggaggaaagtgggaggaaattcacaaagcggtctgcctcgcgaagtggggttcggacaacaccatcttctttacgacctacgccaacggctcgtgtaccgaccttggagccctggaattgtggcgaacctcagaccttggaaagtcattcaaaactatcggtgtgaagatctactcgtttgggctcgggggacggttcctgttcgcgagcgtgatggccgacaaggataccactagacggattcacgtgtcgactgatcagggagacacttggagcatggcgcagctgccttccgtgggacaagagcagttctactctatcctggcagccaacgacgatatggtgtttatgcatgtcgacgaaccgggagacaccggatttggtaccatctttaccagcgatgatcgaggcatcgtctactcaaagtcactggacagacatctctacactaccaccggcggagaaaccgacttcaccaacgttaccagcctccgtggagtttacatcacttccgtgctgagcgaagataactctatccagactatgatcaccttcgaccaaggaggtcggtggactcacttgcggaagccggaaaatagcgagtgtgatgctaccgccaagaataagaacgaatgttcgcttcatatacacgccagctactcgattagccagaagctcaacgttccaatggctccccttagcgaaccgaatgcggtgggcattgttatcgctcacggcagcgtcggagacgcaatctccgttatggtgccggatgtgtacatctccgatgatggcggctactcttggactaagatgttggaaggaccgcactactatacgatcttggactccggcggaattatcgtggccatcgagcattcgtcccggccaatcaatgtcattaagttttcaactgacgagggccaatgctggcagacgtatacttttactcgcgatccgatctacttcaccggtctggcgagcgagccaggggcacgctccatgaatatctccatttggggatttaccgaatcgttcctcacgagccaatgggtgagctacactatcgacttcaaggacattctggaaagaaactgcgaggagaaggattataccatctggctcgcccactcaaccgatccggaagattacgaggacggttgcatcctgggatacaaggaacaatttctgcgcctcagaaagtcgagcgtctgtcaaaacggaagagactacgtcgtcactaaacagccgtcaatctgcctgtgctcccttgaggacttcctctgcgacttcggatactaccgcccggagaatgattcgaagtgcgtcgaacaacccgagctcaagggccatgatctcgagttctgcctgtacggccgcgaggaacacttgaccaccaatgggtacagaaagatccccggggacaagtgccaaggcggggtgaatccagtgcgggaggtgaaagatctgaagaaaaagtgcactagcaatttcctgtctccagaaaagcagaattcgaaatcgaacagcgtgccgatcatactggcaatcgttggactgatgctggtgactgtggtggctggtgtgctgatcgtcaaaaagtacgtgtgcggaggccgctttcttgtgcataggtactcggtgttgcagcaacatgccgaggcgaacggagtcgatggggtcgatgctctggataccgcttcacataccaacaaaagcggctatcacgatgattcggacgaggacctgctcgaa

SEQ ID NO: 19683 - DNA, 2082 bp, synthetic construct
  misc_feature 1..2082: note = source = /note="Description of Artificial Sequence: Synthetic coding sequence"
  source 1..2082: mol_type = other DNA
atgacttttggacaatctaagttgtatcgaagtgaggactacgggaaaaatttcaaagatatcactgatctgatcaacaatactttcatccgaacagaatttgggatggctattggacccgagaattctggcaaagtagtcttaacagctgaagttagtggaggaagccgaggggggcgaatattccgaagtagcgatttcgcgaagaatttcgttcaaaccgatcttccgtttcatccacttacccaaatgatgtatagtccacaaaatagcgactatttattggcactgtcgactgaaaatggactgtgggtaagtaaaaacttcggcggaaagtgggaagaaattcacaaagcggtgtgcttggctaagtggggatctgataacacgatcttttttacaacctatgcaaatggctcatgcacggatctcggagcattagaactttggagaacatcagacctcggaaagtccttcaaaacaattggcgttaaaatatacagtttcggactcggcggaagattcctctttgcgtccgtcatggctgataaggataccactagacgaattcatgtctctacggatcaaggagatacttggtcaatggctcaattgcctagcgtgggacaagagcaattttactcgatattagctgctaatgatgatatggtcttcatgcatgtcgacgaaccgggcgatactgggttcggaacaatctttacttccgatgacagaggtatcgtctactctaaaagtctcgaccgtcacctttacaccactactggaggagagactgactttaccaacgtaacctcactgcgtggagtttatattacgagcgtgctgtccgaagataattctattcaaacaatgattactttcgatcagggtggtaggtggactcacttacgtaaaccagagaattcagagtgtgacgccacggctaaaaataagaatgagtgcagtttgcacattcacgcttcttatagtatctcacaaaagcttaatgtaccaatggctccattaagtgaaccaaatgctgttggaattgtcattgctcacggttcagtcggggatgctatttccgtgatggtcccagatgtttatatttccgatgatgggggatattcatggactaagatgcttgaaggtccacattattatacgatcttggattcgggcggaatcattgtagcaatcgaacactcgtcgcgacctatcaacgttattaaatttagcacagatgaaggtcaatgttggcaaacctacacattcaccagagatccaatttatttcactggtctcgcgtcggaaccaggagcacgctctatgaatatttctatatggggtttcacagagtcgttcctgacgtcccagtgggtttcatataccattgacttcaaggacatcttggaacgtaattgtgaggaaaaagattacactatttggctagcacactccactgatcctgaagattacgaagacggatgtattctcggttataaggaacaattccttcgtctccgcaaatcatccgtctgccagaatggccgtgactatgtggtcacaaaacaaccgtcaatttgtctctgctctctggaggattttctttgtgacttcggttattatcgacccgaaaacgattccaaatgtgttgaacagccagagcttaaaggacatgacctcgagttttgtttgtacggccgagaggaacatcttacaaccaacgggtaccgaaaaattccaggggataaatgtcaaggtggagtgaatccggttcgtgaggtgaaagatcttaaaaaaaagtgcacttcaaatttccttagtccggagaagcaaaactcaaagtcaaattccgttccaattattcttgcgattgtgggcttgatgcttgtgactgttgtagccggagtcttaattgtgaaaaaatacgtctgtggaggaagatttttagttcacagatactccgtgttgcaacagcacgctgaagccaacggtgttgatggagtagacgccctcgatactgcgtctcatactaataaaagtggatatcatgacgattcagatgaagaccttctagaa

SEQ ID NO: 19684 - DNA, 2082 bp, synthetic construct
  misc_feature 1..2082: note = source = /note="Description of Artificial Sequence: Synthetic coding sequence"
  source 1..2082: mol_type = other DNA
atgacgttcgggcaaagtaagttatacagatccgaggactacgggaaaaattttaaggacataaccgatctgattaataatacctttattcggaccgagttcggcatggcgattggccctgagaactccgggaaggttgtacttaccgcagaggtgagtgggggatccagaggagggcggatctttcgcagctcggactttgctaaaaacttcgtccaaaccgatttgccattccatcccttgacgcagatgatgtactcccctcaaaatagcgattacctgctggcactcagtacagagaacggcttgtgggtctccaaaaatttcggcggaaagtgggaagaaattcacaaagccgtctgtctcgcgaagtggggaagcgacaatacgatcttcttcactacatacgccaatggctcttgcacagatctaggagctcttgagctgtggcgcacttcagacctgggaaagagcttcaaaaccataggagtaaagatttattcattcggcctgggagggaggtttctgtttgcttctgtgatggcagataaagacactacgcggcggatccacgtgagcacagaccagggcgacacctggagcatggcccaacttcctagtgtaggacaggagcagttctattctattttagccgctaatgacgacatggtattcatgcacgtggacgagcccggcgacacgggatttggaacgatcttcacttcggacgatcggggtatcgtctacagcaaaagcctcgataggcacctgtataccacaacaggaggcgagacagactttaccaacgtaacctcgttgcgcggtgtttacataaccagtgtgctctcagaggacaatagcatccagaccatgattactttcgaccagggcggccggtggacgcatctaagaaagcctgagaattcggaatgtgacgcaacagccaaaaacaaaaatgagtgctcactacacatccatgcctcatattctatcagccagaaattaaatgttccaatggcaccactgagcgagccgaacgcagtagggattgtgattgcacacggctctgtgggtgacgcaatctccgtcatggttcccgatgtgtacattagcgatgacgggggatatagctggacaaagatgctggaagggccccactattacacgatcctggacagtggggggattatagtggctattgaacactcctccagaccgatcaacgtgattaagttcagcaccgacgaaggacagtgttggcagacctataccttcacgagagaccctatctacttcaccgggcttgctagcgagcccggcgccaggagtatgaacataagtatttgggggtttactgagtctttcctcacgtctcaatgggtgtcttatactatagatttcaaagatatattggagcgcaattgtgaagagaaggactatacaatatggctggctcactctaccgaccctgaggactacgaggacggttgtatcttaggttataaggagcagttcctgcgtctgcggaaaagttccgtgtgccagaacggcagagactatgtggttactaagcagcctagcatctgtttatgcagcctggaagattttctgtgtgatttcggctattatcgccctgagaatgactcgaagtgtgtggagcaaccagaactaaaagggcacgacctggagttttgcctgtatgggcgggaggaacatctgactacaaacggatacaggaagatccctggagacaagtgtcaggggggagttaatcccgtccgcgaggtcaaagacctgaagaagaaatgtacatcaaactttctgtctccggaaaaacagaacagcaaatctaactctgtcccgatcattctggccatagttggcctcatgttagttactgtagtcgcaggggtgcttatagtgaaaaagtacgtctgcggagggaggttcttagtccaccgatactctgtgctgcagcagcacgcagaggctaatggtgttgatggtgtcgatgccttagacactgccagccacaccaataagtcaggctatcatgacgacagcgacgaggacctactcgag

SEQ ID NO: 19685 - DNA, 2082 bp, synthetic construct
  misc_feature 1..2082: note = source = /note="Description of Artificial Sequence: Synthetic coding sequence"
  source 1..2082: mol_type = other DNA
atgacattcggccaatccaagttataccgtagtgaggattatggcaagaatttcaaagatatcacggatctgattaataacacttttatccgcacagaatttgggatggcaattgggcctgaaaactcaggcaaagtcgtgctcactgccgaggtgagtggtgggagccggggcggtaggatcttcaggagttcggactttgccaaaaacttcgtgcagaccgatctgcccttccatccattaacacaaatgatgtactcaccacagaactctgactatctcttggctctgtccaccgagaatgggctgtgggtctctaagaattttggaggtaaatgggaagagatccacaaagctgtctgtctggccaagtggggtagcgataacacgatctttttcacaacgtacgccaacggcagctgtactgaccttggggccctggagttatggcgaacaagcgatctgggcaaatcatttaagactattggcgttaaaatttacagtttcggcctgggcggtcgctttctttttgccagtgtgatggccgacaaagacaccaccaggagaatccatgtgagtacagaccaaggcgacacatggtcaatggcccagctccccagcgtgggccaggaacagttctactcgattctggctgccaacgacgatatggtttttatgcatgtggacgaacccggtgatacgggttttggtactatctttacttctgatgacaggggaatcgtttactctaaaagcttggaccggcatctgtacactacaaccggaggagagaccgattttaccaatgttacgtcactgcggggcgtgtacatcacatcagtgctctctgaggacaacagcatccagaccatgatcacatttgatcagggcggtcgctggacgcatctgcgaaagccagaaaattccgaatgtgatgccacagctaagaacaagaatgaatgcagcctccatattcacgccagctattccatcagccaaaaactgaatgttccaatggctcctctctctgaacctaatgccgttggaattgtaattgcacatggctccgtcggagatgccatctccgttatggtgcccgatgtttatatatcagatgacggaggctatagttggactaaaatgctcgaaggcccacactactacaccatcctggacagcggcgggataattgtggccatcgagcacagctcccgtccgatcaatgttatcaagttctcgacggatgaaggccagtgctggcagacctatacatttacacgggatccgatctactttacaggcctggccagtgaacctggcgcccgtagtatgaatatctccatttgggggtttactgagtcctttctcactagccagtgggtatcttataccattgactttaaggacattttggaaagaaactgcgaggaaaaggactatacaatctggctggcacactccactgatcccgaggattatgaggacggctgcatactggggtacaaagaacaatttctgcggttgcggaaatcctcagtctgccagaacgggagagattacgtggtgaccaagcagcccagtatatgcctgtgtagtctggaggattttctgtgcgacttcggctactacagacccgaaaacgatagtaaatgtgtggagcagccagaactaaaaggtcacgaccttgagttttgtctctatggcagggaagaacacctgaccacaaatggctaccggaagattcccggtgataaatgtcaagggggcgtcaatcctgtgcgggaagtcaaagatctcaagaagaagtgcaccagcaattttctgtctcccgagaaacagaattcaaagagcaatagcgtgccaattatcctggctatcgtgggtctgatgttggtgactgttgtcgccggcgtgttaatagttaaaaagtacgtgtgcgggggacgcttcttggtgcatcggtactcagtgctgcagcagcatgccgaggccaatggcgtagacggcgtcgacgccttggatactgcctcccacacgaacaagagcggctatcatgatgactccgatgaggacctacttgag

SEQ ID NO: 19686 - DNA, 2082 bp, synthetic construct
  misc_feature 1..2082: note = source = /note="Description of Artificial Sequence: Synthetic coding sequence"
  source 1..2082: mol_type = other DNA
atgacttttggccagagcaagctgtacagatcagaagattacggtaagaactttaaggatatcaccgatctgataaacaacaccttcattaggaccgaatttggcatggcaattggtcctgagaactccggtaaagtggtgctgaccgcggaagtgagcggcggttcaaggggaggaagaatctttagatcatctgatttcgccaagaacttcgtccaaaccgacctccctttccatcctcttactcagatgatgtactcgcctcagaactccgattaccttctggcgctttccactgaaaacggactctgggtgtcaaagaattttggaggtaagtgggaagaaattcacaaagcggtctgcctggcaaagtggggatcagataatacgatattctttaccacttacgcgaacggatcgtgtaccgatttgggtgcactggaactttggcgcaccagtgaccttggtaaatcgttcaagactattggagttaagatttactcctttggtcttggcggtagatttctgttcgcatccgtgatggcagacaaggatactacccggcgtatccatgtctcaacggatcagggtgatacttggagcatggcacagctgccgtccgtggggcaagagcagttttactcaattctcgccgcaaacgacgatatggtctttatgcatgtggatgaaccgggagacaccggatttgggaccattttcacttcggatgaccgcggaatcgtgtactccaagagcctggatcgccatctttacaccaccactgggggagaaaccgacttcaccaacgtgaccagcttgcgaggcgtgtacattaccagcgtcctgtcagaagataactctatccagaccatgattacttttgaccaaggaggaaggtggacccatctgcgcaagcccgaaaacagcgagtgtgacgccaccgcaaagaacaagaacgagtgctctcttcacatccatgccagctactccatatcccagaagctcaatgtgccgatggcccccctgagcgagccaaacgcagtgggaattgtgattgcacacggaagcgtgggcgatgccatctcagtcatggtgcctgacgtgtacatttcggacgatggcggctactcatggaccaagatgttggaaggccctcactactacacgattcttgacagcggtggtatcattgtcgccatagaacattccagcagacccataaatgtgatcaaattctcaacggatgaaggacagtgttggcaaacttacactttcacccgcgaccccatttactttaccggacttgcgtccgagcctggtgcccggtctatgaacatatcaatttgggggttcaccgagtccttcctcacctcacagtgggtatcgtacaccattgatttcaaggatattctggaaagaaattgtgaggaaaaggattacaccatctggctcgcccattcgactgatccagaggattacgaagatgggtgtatactcggatacaaagagcagttcctgaggttgcggaagtcgtcagtgtgtcagaatgggcgagattacgtggtcacgaagcagccatcgatctgtctctgttcgctggaagattttctgtgtgattttggttattaccgcccggagaacgacagcaagtgtgtggaacaacctgagctgaagggacatgaccttgagttctgtttgtacggccgtgaggaacaccttactactaatggttaccggaagataccaggagataagtgccaaggaggagtgaacccagtgcgcgaagtgaaggaccttaagaaaaagtgtacctccaacttcctgtccccagaaaagcaaaatagcaagtccaactctgtgcctatcatcctggcaatcgtcggacttatgttggtgactgtcgtcgccggagtgctgatagtgaagaaatacgtctgcggtggtcggtttttggtgcatagatacagcgtccttcaacaacacgcagaagcgaacggggtggatggagtggatgcattggataccgcatcgcatactaacaaaagcggatatcacgatgacagcgacgaagatcttcttgag

SEQ ID NO: 19687 - DNA, 2082 bp, synthetic construct
  misc_feature 1..2082: note = source = /note="Description of Artificial Sequence: Synthetic coding sequence"
  source 1..2082: mol_type = other DNA
atgactttcggacagagtaagctctaccggtcagaagattatggaaagaatttcaaagacatcacggacctcattaacaacacattcatccggaccgagtttggcatggcaatcgggcccgagaacagtggtaaagtggttcttaccgccgaggtatctggaggatcgaggggcggccggatatttagatcctcagatttcgccaagaactttgtgcagacagatcttccatttcatccgctgacccagatgatgtattctccgcagaacagtgattacctgctcgccctgtccacagaaaatggcctgtgggtttcaaagaatttcggaggtaagtgggaggaaattcataaggcggtatgcctggccaaatggggaagcgacaataccatctttttcaccacatatgctaacgggtcgtgtaccgatttaggcgcccttgagctctggcggacctctgacctggggaaaagtttcaaaacaattggcgtcaaaatctacagtttcggactcggtggaaggtttttattcgcctctgttatggcagataaagacaccactaggaggatccacgtcagcactgaccagggcgacacatggtcaatggcccagctacctagtgtcggacaggagcagttctatagtattctagcagccaatgacgatatggtcttcatgcatgtcgatgagccgggagataccgggttcggcaccattttcacctccgacgatcggggcattgtgtactcaaaatccttagaccgtcacttgtacacaaccacagggggagagaccgattttactaatgtgacgtctcttcgtggggtatatatcaccagcgtcctgtcagaagacaactccatacagacaatgatcacgttcgaccaggggggtcggtggacacacctgcgaaagcccgagaactcagagtgcgacgccacagctaagaacaagaacgagtgctccctgcatattcatgcctcctatagtattagccagaaactaaatgtgcccatggcccctctgtcagaacctaatgccgtcgggatagtgattgcccatgggtccgtgggcgacgctatcagtgttatggtccctgatgtctacatctcagatgatggaggatattcatggacgaaaatgcttgagggcccccattattataccattttagatagtggcggaatcattgttgctattgagcactccagtagacccattaatgtgattaaattttctactgacgagggccagtgttggcaaacatatacattcactcgcgatcccatctattttaccggcctggccagcgaaccgggtgctcgatctatgaacatttctatttggggcttcacggaatccttcctaacctctcaatgggtctcttataccatcgatttcaaagacatactggaaaggaattgtgaagagaaagactacacgatctggctagctcacagcaccgatcccgaggactatgaggatggctgcatattagggtataaggagcagttcttgcgattgcggaaaagttctgtgtgtcagaatgggcgcgactacgtggtgacaaagcagccatccatctgcttgtgcagcctggaggacttcctgtgcgacttcgggtactacaggcccgagaatgatagcaaatgcgttgagcagcctgagctgaaaggccacgatttggagttctgcctctatggtcgcgaagagcatctcacaacaaacggctataggaaaatcccgggggataaatgtcaaggaggcgttaaccccgtaagagaggttaaagacctgaaaaaaaagtgcacctccaacttcctatcccctgaaaaacaaaattctaagtctaacagcgtgcccatcattttggctatcgtcggcctgatgttagttactgtcgtggcaggcgttttgattgtcaaaaagtacgtatgcggcgggaggtttctggtgcatcgttactcggttctgcaacagcacgccgaggcaaacggtgttgatggtgtagacgccctggacacagcaagtcacactaataagagcggatatcatgatgatagcgacgaagacctgctggaa

SEQ ID NO: 19688 - DNA, 2082 bp, synthetic construct
  misc_feature 1..2082: note = source = /note="Description of Artificial Sequence: Synthetic coding sequence"
  source 1..2082: mol_type = other DNA
atgacctttggccagtcaaagctgtaccgctccgaggactacgggaaaaatttcaaggacatcaccgacctgattaacaacaccttcatcagaacagagtttggtatggcaatcggcccggagaattccggtaaggtggttcttaccgcggaggtctccggtggttcccggggtggtcggattttcaggtcctcggattttgctaagaattttgtccagactgatcttccattccatcccctaacacagatgatgtactcgccgcagaactccgattacctgctggctttgagcaccgagaatggtctttgggtctccaagaactttggtggcaaatgggaggagatccacaaggccgtttgtctcgcaaagtggggctccgacaacaccatctttttcacgacctacgccaacggttcttgtacagacctgggtgcactcgaactctggcgaacctccgacctgggaaagtccttcaagaccatcggtgttaagatttacagcttcggacttggtggcagattcctgtttgcatctgtcatggctgataaggataccacacgtcgcatccatgtctccactgaccaaggggacacatggtctatggcccagctgccctcggtgggtcaggaacaattctacagcatcctggcagctaacgacgacatggttttcatgcatgtagatgagcccggtgatacaggcttcggtactattttcacctccgatgaccgcggaatcgtttactcaaagagtctggacagacacctctacaccaccaccgggggagaaaccgatttcaccaacgtcacgtcccttcggggcgtctacatcacctcagtgctgagtgaggacaatagtatccagaccatgataacattcgaccagggcggccgttggacccacctgaggaagccggagaacagcgagtgcgacgctaccgctaagaataagaacgaatgctccctccatattcacgcttcctacagcatatcccaaaagctcaacgttcccatggcacccctgagcgagccaaacgcggttggcattgtcatcgcccatggttctgtgggtgatgcgatcagtgtcatggtccctgacgtttatatctctgacgatggaggatactcgtggacgaagatgctggaaggtccgcactactatactatcctggactcgggtggcatcattgtcgccattgagcacagctcacgtcctattaacgtgattaagttctccaccgacgagggtcagtgctggcaaacttacacctttacgcgcgaccccatttactttaccggtctcgcatctgagcccggcgcccgcagtatgaacatctctatatggggattcactgagtccttccttaccagtcaatgggttagctacacaattgatttcaaagacatcctagagcgtaactgcgaggaaaaggattataccatctggttggcccatagcactgatcccgaggactacgaggacggttgtattctcggctacaaggagcagttcttgcggcttcgtaagtcctccgtatgccagaatggccgcgactacgtggtcacgaagcagccctccatctgcctttgctctctcgaggattttctctgcgacttcggttactatcgaccagagaatgactcgaagtgcgtggaacaaccagaactaaagggccatgacctggagttctgcctttacggacgtgaggagcacctgaccaccaacggttatcgtaaaattcctggagacaagtgtcagggcggcgtcaaccctgtgcgcgaggtcaaagacctaaaaaagaagtgcaccagtaacttcctctcaccggaaaagcagaattccaagtccaacagtgtgccgatcattctggcaatcgttggcctgatgctggtcaccgtcgtcgccggagtcctcatcgtcaagaagtatgtatgtggcggaagattccttgtccatcggtactcagtgttgcagcagcatgccgaggcgaatggtgttgacggtgtcgacgccttggacaccgcatcgcatactaacaagtctggctatcacgatgacagcgacgaggatcttttggag

SEQ ID NO: 19689 - DNA, 2082 bp, synthetic construct
  misc_feature 1..2082: note = source = /note="Description of Artificial Sequence: Synthetic coding sequence"
  source 1..2082: mol_type = other DNA
atgacgtttggtcaatcgaagctctaccggtctgaggactacggaaagaactttaaggatattaccgacctgatcaacaatacgttcatcaggaccgagtttggaatggcgatcggaccagaaaacagcggaaaggtggtgctgaccgcagaggtgagcggaggctcgagaggcggtagaattttccggtcatcagacttcgccaagaatttcgtgcagactgacctgccgttccatcctctcactcagatgatgtactcccctcagaactccgactacctgcttgcattgtcgacggagaatgggctgtgggtgtcgaagaatttcggcgggaaatgggaggaaatccacaaagcggtctgtctggccaagtggggttcggacaataccatcttcttcactacctatgcgaatggatcctgtactgatctcggagcactggagctttggcgcacttcggacctcggtaagtcgttcaagaccattggcgtgaagatctacagcttcggactgggtggacgcttcctctttgccagtgtgatggcggacaaggacactactaggcgcatccatgtgtcgactgatcaaggtgatacttggtcaatggcccagctgccatcagtcggacaggagcagttctacagcatcctcgccgccaatgatgatatggtgttcatgcacgtggacgaacctggagataccgggttcggcactatcttcacctcagacgatcgcggaatcgtctactccaagtcactcgaccggcacctgtacactactactgggggcgagactgatttcactaacgtcacttccctgaggggggtgtacattacctcagtgctttccgaagataactcgatccagaccatgatcacgttcgatcagggagggcgctggacccatctgcgtaagccagaaaattcagaatgtgacgcaaccgccaagaataagaatgaatgctcactgcacatccacgcgtcatacagcattagccagaagctcaacgtgccgatggcccctctgtcggagccgaacgccgtgggaatcgtgatcgcacacggctcagtcggcgacgccatctccgtgatggtcccggacgtgtacatctcggacgacggcggctactcctggaccaagatgctggagggtccccactactacactatccttgactcaggaggaatcatcgtcgccatcgagcactcgtcgcgaccaatcaatgtgatcaaattcagcacggatgagggccagtgctggcagacctacaccttcactcgggacccgatctacttcaccggacttgcctccgaaccaggggcacgctcaatgaacatttcgatctgggggttcactgaatcctttctgacctcgcagtgggtgtcatacaccatcgatttcaaggatattctggaacgcaactgcgaggaaaaggattatactatctggctcgcgcactcgaccgatccagaggactacgaggacggatgtatcctgggctacaaggagcagttcctccggctgagaaaatcgtccgtgtgccagaacggaagagattatgtggtgactaagcagccatcgatttgcctgtgctcgttggaagatttcctgtgcgacttcggctactaccggcccgaaaacgactctaagtgcgttgagcaacctgagctgaagggtcacgacctcgagttttgcctgtatggacgcgaagagcacctcactacgaacggatataggaagatcccgggagacaagtgtcaaggaggcgtcaatccggtgcgggaggttaaagacctgaagaaaaagtgcacctcaaactttttgtccccagaaaagcagaactcgaagtcgaattcggtccctattatcctggcaattgtgggactcatgctggtcaccgtcgtcgcgggagttctcatcgtgaagaagtacgtgtgtggcggccgcttcctggtgcatcgttactcagtgctgcaacaacacgctgaggctaacggggttgacggagtggatgctctggacacggcgagccatacgaacaagtcgggttaccatgacgattcggatgaggatctgctggaa

SEQ ID NO: 19690 - DNA, 2082 bp, synthetic construct
  misc_feature 1..2082: note = source = /note="Description of Artificial Sequence: Synthetic coding sequence"
  source 1..2082: mol_type = other DNA
atgacctttggacaatcaaagttatacagaagcgaggactacggcaaaaatttcaaggacattacagacctcatcaataatacatttatcagaaccgagttcggaatggccatcgggcctgagaattcaggaaaagtcgtgttgacggcagaggtttcaggagggtcgcgcggtggccggatctttagatcctcagactttgctaagaactttgtgcaaacggacttgccctttcaccctctgacccaaatgatgtatagccctcagaattccgactaccttctagcactgtccaccgaaaacggactctgggttagcaagaacttcggcggcaaatgggaggagattcacaaagcagtctgtctggctaagtggggatctgacaacactatcttctttaccacatacgcaaatggatcatgcaccgacctgggagccctggagctctggcgaacttccgatttgggtaagtcctttaagactatcggagtgaagatctattccttcggattgggaggaaggttcctctttgcctccgttatggccgacaaggacacgacccgtagaattcacgtgagcaccgaccaaggagatacctggtcaatggctcagttgccctctgtcgggcaggaacaattctacagtatactggccgcaaacgacgacatggtattcatgcacgtggacgagccaggagatacaggctttggcactatcttcactagtgacgatcgcggaatcgtgtacagcaaaagcttggaccggcatctatatacgacaaccgggggcgagacagattttactaatgtaacgtctctgcggggggtgtacatcacatcagttctttctgaggataactcgatccagaccatgatcacattcgaccagggtgggcgctggactcacctcagaaagcctgagaattccgagtgcgacgcaacagcaaagaataaaaatgagtgtagcctgcacatacacgcatcctatagcatcagtcagaagctaaacgtgccaatggcccctctgtccgaaccgaacgctgtgggtatcgttattgctcacggctccgtaggtgacgccatatctgtgatggttcctgacgtgtacattagcgacgacggtggatactcttggaccaaaatgttagagggacctcactactatactatcctagattcaggcggcatcatcgtcgcaattgagcatagtagtcgccccatcaatgtaataaaattctctacggatgaggggcaatgctggcagacatacaccttcacacgggatcctatctactttactggcctcgccagcgagcccggcgcacgaagtatgaacataagcatctggggattcactgaaagcttcctgacctctcagtgggttagctatactatcgactttaaagatatcctggaacgcaactgcgaggaaaaggactacactatatggctggcgcactctactgatcccgaagattacgaagatggctgtattctggggtacaaggagcagtttctgcgcttgcggaaaagtagcgtctgtcaaaacggccgcgattacgtggtcaccaagcagccttctatttgcttgtgcagcctggaagattttctatgcgactttggatactatcgaccagagaacgactccaaatgtgtcgaacagcctgaactgaaggggcacgacttggaattctgcctatatggtagagaggaacatttaacgactaacgggtaccggaaaatcccaggagataagtgtcaggggggcgtcaatcccgttcgcgaagtcaaagacttaaagaaaaaatgtacgtccaattttctttctcccgaaaagcaaaactctaagtcgaatagcgtcccaataatccttgcgatagttggactgatgctagtgacggtagttgcaggtgtgctgattgtcaaaaagtatgtatgcgggggccgcttcctcgtgcataggtattcagtcttgcagcagcatgccgaagccaatggcgtcgacggtgtagatgccttggacacggccagccacacaaataagtcgggctatcatgatgatagcgatgaagatctgttggaa

SEQ ID NO: 19691 - DNA, 2082 bp, synthetic construct
  misc_feature 1..2082: note = source = /note="Description of Artificial Sequence: Synthetic coding sequence"
  source 1..2082: mol_type = other DNA
atgacattcggacagtccaaactatatagaagtgaagattacgggaagaattttaaagatataacagatttgatcaacaatacattcatcaggactgaatttggaatggccatagggcccgaaaactcgggaaaagttgtcctcacagccgaggtctccggaggatcaagagggggaaggattttcagatcttcagattttgccaaaaacttcgtacagacagacctaccattccatcctttgactcagatgatgtattcccctcagaactccgattatcttctggctctctctacagaaaatggattgtgggtttctaagaatttcggaggaaagtgggaggagattcacaaagccgtgtgtttggccaaatgggggtctgataatacaattttttttacaacatatgctaacgggtcatgtactgatttaggagctctggaattatggcggacttcagatcttggaaaatctttcaagactatcggggtgaaaatttactcttttggacttggagggaggttcctttttgcttccgttatggccgataaagatacaacaagacgaatccatgtatcaactgatcagggagatacatggtccatggcccagttaccttcggtagggcaggaacagttttatagtatactcgcggcaaacgacgatatggtgtttatgcatgtggacgaacctggagatactggatttgggactatcttcacttctgatgatagagggatagtatacagtaaatcactggataggcatctgtatactactacaggaggggaaacagatttcacaaatgtcacaagtttacgaggagtatacattacttctgttctttcagaagataactctatacagacaatgatcacattcgatcaggggggaaggtggacacatcttcgaaaacccgaaaattctgaatgtgatgcaactgccaaaaataaaaacgaatgttccttacatatacacgcaagttacagtatttcacagaagctaaatgtgccaatggctcccctatccgaaccaaatgccgtggggatagttatcgctcatggatccgtcggggatgcaatctctgtcatggtccctgacgtgtatatctctgatgatgggggatactcatggactaagatgctcgaagggcctcattattatactattttggattccggggggataatcgtggctatagaacattcaagtcggcctataaatgttataaaattttcaacagacgaagggcagtgttggcagacatacacattcacgcgagatcctatatattttacagggctggcctccgaaccaggggcccggagtatgaacatcagtatctgggggtttacagaatccttcttgactagtcagtgggtgtcttacacaatcgattttaaggatatcctggaaaggaactgcgaggaaaaagattatacaatctggctggcacactctacagatccagaagattatgaagatgggtgtatacttgggtacaaggaacagttcctgcggctcagaaaatcaagtgtgtgccagaatggacgagattatgtagtcactaaacaaccctcaatatgcctttgttccctggaagatttcctctgcgattttgggtattatcggccagagaacgatagtaagtgcgtggaacagcccgaactcaaaggacatgatctagaattctgtctgtatggacgggaagaacatctcacaacaaatgggtacagaaaaatccccggagataaatgtcaggggggagttaatcctgttagggaagtaaaagatctgaagaaaaagtgtacttctaacttcctctctccagaaaagcagaacagtaagtccaattccgtaccaatcatccttgccatcgtaggacttatgctagttactgtggtagcaggggtcctaatagtgaaaaagtatgtctgtggagggaggttccttgtccaccgatattcagtgctccagcagcacgctgaagccaacggggtagatggagtcgatgcactcgatacggcttcgcatactaacaaatcggggtatcacgatgattctgatgaagatttacttgaa

SEQ ID NO: 19692 - DNA, 2082 bp, synthetic construct
  misc_feature 1..2082: note = source = /note="Description of Artificial Sequence: Synthetic coding sequence"
  source 1..2082: mol_type = other DNA
atgacattcggccagtcaaagctgtatcggtctgaggattatggaaagaactttaaagacattaccgacctgatcaacaacacctttatacgcaccgaattcggaatggctatcggccccgagaactctggaaaagtggtgcttaccgctgaggtttccggtggctcacgaggaggtcggatctttcggtcgtcagactttgctaaaaattttgtgcagaccgaccttccctttcacccactgacgcagatgatgtattccccccaaaactctgattacctgctcgctctgagtacagaaaacggcttatgggtgagtaagaatttcggcggcaaatgggaggaaattcataaggccgtttgcttggccaagtggggctccgataatacaattttttttaccacgtatgcgaacgggagttgcacggatcttggggcccttgaactgtggcgtacttccgacctgggcaagagcttcaaaaccattggcgtgaagatttactcctttggcctcggtggacgcttcctgttcgcaagtgtcatggccgataaagatacaacccgtcgaatccacgtatcgacagatcaaggcgacacttggagcatggcacagctcccctccgtgggacaggaacagttctactcaatattggctgcaaacgacgatatggtgttcatgcatgtggacgaacctggtgacaccgggttcggcaccatcttcaccagcgatgaccgaggcatcgtgtatagcaaatctcttgaccgccacctttatactactaccggcggtgaaacagacttcacgaacgtgacatctctgcgcggagtctatattacgagcgtgctctcggaagacaatagcatccagaccatgataaccttcgatcaaggaggaagatggacacacttgcgcaaacccgagaattctgagtgcgacgcgacagcgaaaaataagaacgagtgcagcctccatatccacgcctcgtactcaatcagccagaaactgaatgtgccaatggcccctctgtctgagcctaacgccgtagggatcgttattgcgcatgggtccgtcggcgatgccatctcagtcatggtgcctgatgtgtatattagtgatgacggtggatatagttggacgaaaatgctcgagggccctcattattacacgatcttggattcgggtgggatcattgtagctattgagcatagtagtagaccaattaatgtcatcaaattctccacagatgagggccagtgctggcaaacctacacattcacccgcgaccctatctacttcacggggctggcttccgaacccggagctcggtcgatgaacatctctatctggggctttacagaaagtttcctgacaagccagtgggtatcttacactattgattttaaggatatcttggagagaaattgcgaggagaaggattacactatttggctggcgcacagcacggacccagaagattacgaggacgggtgcatcctggggtacaaggagcagttcctgaggctgcggaagagttccgtgtgtcagaacggtagagattatgtcgtgaccaagcaaccctccatctgcctatgtagccttgaggactttctatgcgactttggatactaccggcccgagaacgacagcaaatgtgtggagcagccagagctgaagggccatgacttggagttctgtctatatgggagggaggaacacctgactactaatggataccgcaagatcccaggggataagtgccaaggaggtgtcaatccggtgagggaagtcaaggacttgaagaagaagtgtacctctaatttcctctctcctgaaaaacagaactccaagtcgaatagcgtgccaatcatcctcgccatcgtgggtttgatgctcgtgacggtagtcgcaggtgtactgatcgttaagaaatacgtatgcgggggaaggttcctggtccacaggtactcagtgctacaacaacacgctgaagcaaacggcgttgacggagtcgacgctctggataccgcaagtcataccaacaagtctgggtatcacgacgattccgacgaggatctgctcgaa

SEQ ID NO: 19693 - DNA, 2082 bp, synthetic construct
  misc_feature 1..2082: note = source = /note="Description of Artificial Sequence: Synthetic coding sequence"
  source 1..2082: mol_type = other DNA
atgaccttcggacagtccaagctttatagaagcgaagattatggaaagaacttcaaagatataacggatctgatcaacaatacttttattagaactgagttcggcatggctataggacccgaaaactctggcaaggttgtgctcacagctgaggtctcggggggctcaagaggggggaggatttttcggagtagcgacttcgcgaaaaactttgtacaaacagacctcccctttcatccattaacgcagatgatgtattcaccacagaactcagactatctcctagctctctctacagaaaacggtctttgggtgagcaaaaattttggaggaaagtgggaagagatccataaggccgtgtgcttggctaagtggggatccgacaacacgattttcttcactacctatgctaatggttcttgtaccgacctgggagctcttgagctatggaggacaagtgatctagggaagagtttcaagaccatcggcgtgaaaatatacagcttcgggctgggagggcgattccttttcgcttctgtgatggcagacaaagacactacgagaagaattcacgtgagcactgatcagggcgatacatggagtatggctcagctgccttccgtgggccaggaacaattttatagcatcttggcggcaaacgacgacatggtgtttatgcatgttgacgagcccggagatacaggcttcggaactatcttcacaagtgatgaccgaggaatcgtctacagtaaaagcctcgatcgccacctgtataccacaaccgggggcgaaactgatttcaccaatgtcacaagtttgaggggtgtgtacatcacctctgtgctgagcgaggacaatagcattcagactatgattacattcgatcagggcggtcgttggacccacttgcggaaacccgaaaacagtgaatgtgacgctactgcgaagaataagaatgagtgctctctgcacattcacgccagctacagtatcagccagaagctgaacgtgcccatggcgcctctctcggaaccgaacgccgtgggcattgtcattgcccatgggagtgtaggggacgctataagtgtgatggtgcccgacgtctacatcagtgacgatggtggatactcatggacaaagatgttagaaggcccccactactacacgatcctggattcaggtggaatcatcgtcgccattgagcattccagccgacctatcaatgtgatcaagttctcaacagatgaaggtcagtgctggcagacctatacatttactcgagacccaatttatttcaccggactggctagtgagccaggcgctcgatctatgaatattagcatatggggttttactgaaagcttcctcaccagccagtgggtgagctatacgatagattttaaggacattctggaaaggaactgtgaagagaaggactataccatctggctcgcgcatagtaccgatcctgaagactacgaggatgggtgtatcctcggatataaagagcaattcttgagacttagaaaaagctcagtgtgtcagaatggtagggattatgtggttacgaaacaaccttccatctgcttgtgctctctagaggactttctttgtgattttgggtactacaggcccgaaaatgactcaaagtgcgtagagcaacctgagttaaaagggcacgaccttgagttttgcctgtacggtcgagaagagcatcttacaacaaacggataccgaaaaattccaggggacaagtgccaaggtggtgtgaacccggtgcgcgaggtaaaggatctgaagaaaaaatgcacaagtaatttcttgagtcccgaaaagcagaattctaaatcgaactcagtgcctataattctagctatcgttggcttaatgctcgtgacagtggtggccggtgtacttatcgtgaagaagtacgtgtgcggaggaagatttttggtgcatcgttactccgtgctgcaacagcacgctgaggctaatggagttgacggggttgacgccctcgataccgcctcccatactaataagagtggatatcacgatgactccgacgaagatctgctggaa

SEQ ID NO: 19694 - DNA, 2082 bp, synthetic construct
  misc_feature 1..2082: note = source = /note="Description of Artificial Sequence: Synthetic coding sequence"
  source 1..2082: mol_type = other DNA
atgaccttcggacagtccaaactgtaccgatcagaagattacggtaagaacttcaaagacattaccgatctgattaacaacacctttatccgcactgaattcggtatggcgatcggaccagagaactcaggtaaagtcgtgctgactgccgaagtgagcggtggatcgcgcggcggacgaattttccggagctcggatttcgccaagaactttgttcaaaccgatcttccattccatcctttgacgcaaatgatgtactcaccgcagaactccgactacctgcttgctcttagcactgaaaacgggctgtgggtgtcgaagaattttggaggtaagtgggaggaaattcataaagcagtatgccttgcgaaatgggggtctgataatactatcttcttcactacttacgcaaacggatcctgtaccgacctcggagcactcgaactttggaggacctcagatctggggaagtcctttaagactattggagtgaagatatacagctttggtcttggaggaagatttctgtttgcctccgttatggcggataaggatactacgaggcgaattcatgtgtcaaccgaccagggtgatacctggagcatggcacagctcccatctgtgggccaagagcagttttactcaatactggccgccaacgacgatatggtgtttatgcacgtggatgaacctggtgacaccggtttcgggaccattttcactagcgatgatcgtgggattgtgtactcgaagtcacttgaccgccacctctatactaccacgggaggtgagacggactttaccaatgtgaccagcctgaggggggtctacattacctctgtgctgtcggaggacaacagcattcagactatgattacctttgaccagggcggtcggtggacccatcttcgcaagccagaaaattcggaatgtgacgcaactgcaaaaaacaagaatgaatgctcactccacatccatgcctcgtactcgatttcgcagaaacttaatgtgccaatggcgccactgtccgaaccaaacgcagtgggaatcgtgattgcacacggatcggtcggagatgcaatctccgtcatggtgccagacgtgtacatatcggacgatggtggttactcctggaccaaaatgcttgaaggacctcattactataccatactggatagcgggggcataatcgtggctattgagcactcttccagaccgattaacgtcattaagttttcaaccgatgaaggccagtgttggcaaacctacaccttcacgagagatccgatttactttacgggactcgccagcgaacctggggccaggtcaatgaatatctccatttggggcttcaccgagagctttctgacttcgcaatgggtgtcatacactatcgatttcaaagatatacttgaacgtaattgtgaggagaaggactacactatttggttggcccattcgactgatcctgaggattacgaagatggctgtattctgggatacaaggaacagtttctgagactgcgcaagtcgtcggtctgtcaaaatggtagggactatgttgtgaccaaacagccttcgatctgtctttgctcccttgaagatttcctctgtgatttcggttactaccggccagaaaatgactcaaagtgtgtggagcaaccggagcttaagggccatgatcttgaattttgcctgtacggtcgcgaagaacatcttacgactaacggttaccgcaagatccccggcgacaagtgtcagggaggcgtaaacccagtccgcgaagtgaaggatctcaagaagaagtgtacctccaacttcctgtcgcctgagaaacaaaactctaaatcaaactcggtcccgattatcctggctattgtgggccttatgctcgtgaccgtggtcgcaggagtcctcattgtcaagaagtacgtgtgcggcggacggtttcttgtgcatcggtactcggtcctgcaacaacatgcagaagctaacggtgtggacggagtggatgctctggatactgcatcacatactaacaagtctgggtatcatgatgattcagatgaagatctgcttgag

SEQ ID NO: 19695 - DNA, 2082 bp, synthetic construct
  misc_feature 1..2082: note = source = /note="Description of Artificial Sequence: Synthetic coding sequence"
  source 1..2082: mol_type = other DNA
atgaccttcggccaaagtaagctgtatcgatcagaagactacggaaagaactttaaagatataacggacctcatcaataacaccttcatccggactgaatttggaatggcaatcggccctgaaaatagcgggaaagtcgtgctgaccgccgaagtgagcggcggtagccgaggcggcaggatttttaggtcaagcgactttgctaagaacttcgtccagactgatctccctttccatcccctcacgcagatgatgtactctccacagaacagcgactaccttcttgccctgtctacggaaaacgggctatgggtgtcgaagaatttcggaggcaagtgggaggaaatccacaaggcagtctgcctcgcgaagtgggggtccgataatacaatctttttcaccacatacgctaacggttcatgcaccgacctcggcgcgctggagctttggcgcacctcagatctgggtaagtctttcaagacaatcggagtcaaaatatattctttcggcttgggcggtcgttttctattcgctagtgttatggctgacaaagataccacacgcaggattcacgttagcactgatcagggagatacctggtcaatggctcaactcccttccgtgggccaggagcagttttacagcatcctggctgctaacgacgacatggtgttcatgcatgtcgacgaaccaggcgacacagggtttggaaccatattcacatccgatgatagagggatcgtgtattcaaagagtcttgaccgccatctgtataccactacaggaggagagacagacttcacaaatgtaacctctttaaggggggtctacatcaccagcgtgctatctgaagacaattcaatacaaaccatgataacctttgatcaaggtggaaggtggacacaccttagaaaaccggagaattcagagtgcgatgcaacagccaagaacaaaaacgagtgtagcttacacatccacgcatcgtatagcattagccagaaattaaacgtgccaatggccccgttatctgagcctaacgctgtggggatcgtcattgcgcacgggtccgtgggcgacgctatctccgtcatggtgcccgacgtttatatcagcgacgatggaggctactcatggactaagatgttggagggcccacattattataccatcctggattcaggagggataattgtggctattgagcactcttcccgccccatcaatgtgatcaaattctccactgacgagggccagtgctggcagacgtacactttcactcgggatcctatctactttacagggcttgcctctgagcccggagctagatccatgaatatcagcatatggggatttacagaaagcttcttgacaagtcaatgggtttcctacaccattgacttcaaggatatcctggaaagaaactgcgaagagaaagattatacgatttggctcgcccacagtaccgatcctgaggattacgaggatgggtgcattctgggatataaggagcaattcttacgtctgaggaaaagctccgtatgtcagaacgggagagattacgtagtgaccaaacaacccagtatctgtctgtgttccttggaggactttctgtgtgacttcggctactaccggcccgaaaacgactccaaatgcgttgaacaaccagagctgaaagggcacgatcttgagttctgcctgtacggcagggaggagcatctgacaactaatggatacagaaagatccctggcgacaagtgtcagggtggagttaaccccgtgcgcgaagtcaaagatcttaagaagaagtgtacgtcaaatttcctaagccctgagaaacagaactcgaagtccaattccgtgcccattatcttagccatagtgggacttatgctagtgactgttgtcgccggcgtgttgatcgtgaagaagtacgtgtgtgggggtcgattcctcgtgcataggtactccgtgctacaacagcacgccgaggccaatggcgtggatggcgtggacgccttggataccgcttcacataccaacaagagtggttatcatgatgattctgatgaagacctgcttgag

SEQ ID NO: 19696 - DNA, 2082 bp, synthetic construct
  misc_feature 1..2082: note = source = /note="Description of Artificial Sequence: Synthetic coding sequence"
  source 1..2082: mol_type = other DNA
atgacttttgggcaaagtaagctctaccgctcagaggactacggaaaaaacttcaaggatatcactgacctgatcaataacacctttatccgaactgaattcggaatggctatcggtccagagaactccggcaaggtcgtgcttacggccgaggtgtccggaggctcgagaggagggcggatctttaggtcatcagatttcgccaagaacttcgtgcaaactgatctgccattccatccgcttacccaaatgatgtactccccgcagaactcggactatctgctggcgctgtcgactgagaatggtttgtgggtgtctaagaacttcggcggaaagtgggaagaaatccataaggccgtctgcttggcgaagtggggtagcgacaacactatcttctttaccacctacgctaacggctcgtgcactgatcttggagccctggaactttggcggactagcgacctgggcaagtccttcaaaaccatcggcgtcaagatttactcgttcggactcggtggtagatttcttttcgcatcagtgatggccgacaaggataccactcggcggatccatgtgtcgacggaccagggcgacacttggtccatggcgcagctgccgtcagtgggtcaggaacaattctactccatcctggcagccaacgacgacatggtctttatgcacgtggatgaacccggtgacaccggatttggaacgatcttcacctcggatgataggggcatcgtgtactcaaagtcattggatcggcacctgtacactaccactggaggggagactgacttcactaatgtcaccagcctccgcggagtgtatatcacttccgtgctgagtgaggacaactccatccagacgatgatcacctttgaccagggaggccggtggactcatctgcgcaaaccggagaactcggagtgcgatgcaaccgccaagaacaaaaacgaatgctcgctgcacatccatgcctcctactcgatttcacagaagctgaacgtgccgatggccccgctcagcgaacctaatgccgtgggtatcgtgattgcccacggttccgtgggagatgcaatctcagtgatggtgccggatgtctacattagcgacgacggtggctacagctggaccaagatgctggaaggtccacactactacactattctggatagcggaggcattattgtcgcaatcgaacattcgtcgcgccccatcaatgtgattaagtttagcaccgacgaaggccagtgctggcagacgtacaccttcactcgcgatccgatctactttacgggcctggcatccgaaccgggagccagaagcatgaacatctcaatctggggtttcactgaatctttcctcacctcccagtgggtgtcttataccatcgacttcaaggacatcttggaacgcaactgcgaagagaaggattacactatatggctggcccactccaccgaccccgaagattacgaggacggatgcattctgggatacaaagaacaattcctgcggctgagaaaatcgagcgtgtgccagaacggacgggactacgtggtgacgaagcaaccgtcgatctgtctgtgctccctcgaggacttcctctgcgattttggatactataggccggagaacgactcaaagtgcgtcgagcaaccggagctgaagggtcatgacctggaattctgcctgtacgggagagaagaacacttgaccaccaatggataccgcaagatccctggagacaagtgtcagggaggcgtcaacccggtccgcgaagtgaaggatctcaagaagaagtgcacctcaaacttcctgagcccagagaagcagaacagcaagtcgaactcggtcccgatcatcctggccatcgtgggattgatgctggtgacggtggtggctggagtcctgatcgtgaagaaatacgtctgcggcggacggttcctggtgcatagatacagcgtgctccaacagcatgccgaggcaaatggcgtcgacggggtggatgccctcgacaccgccagccacactaataagtcgggctaccacgacgactcggatgaggacctcctggaa

SEQ ID NO: 19697 - DNA, 2082 bp, synthetic construct
  misc_feature 1..2082: note = source = /note="Description of Artificial Sequence: Synthetic coding sequence"
  source 1..2082: mol_type = other DNA
atgacttttgggcagtccaaactatatcgaagtgaagactatggaaaaaacttcaaagatataactgatctcatcaacaacactttcataagaactgagtttggaatggccatcgggccagaaaattctggaaaagtagtactcactgccgaagtatctgggggatcacgcggagggcgcatcttcagatcctctgacttcgccaaaaattttgtgcagacagatttgccctttcatccactaacgcagatgatgtatagtcctcagaatagtgattatttgctggccctgtcaactgaaaatgggctgtgggtgtcaaaaaactttggaggaaaatgggaagagatccacaaggctgtgtgccttgcaaaatgggggtctgacaatactatttttttcacaacatatgccaatgggtcttgtactgacctaggagctttagaactttggcggacaagtgacctcggaaaatcattcaaaactatcggggtcaagatttactcgttcggattggggggacggttcctcttcgcatcagtgatggctgataaggatacaactcgcagaatccatgtgtccactgatcagggggatacatggtcaatggctcagctcccttcagtcgggcaggaacagttctattccatactagcggcaaacgatgatatggtcttcatgcatgtagacgaacctggagatacaggattcggaacaatctttacaagtgatgatagaggaatagtctattcaaaaagtcttgataggcacctctatactacgacaggaggggagactgactttacaaatgtcacatcccttagaggggtgtacataacatccgtgctcagtgaagataatagtattcagactatgattacatttgatcagggagggaggtggacacatctgagaaaacctgaaaattctgaatgcgatgcgacagccaaaaataaaaacgagtgctcccttcacattcacgctagttatagtatctcccagaaacttaacgtgccaatggctcctctatcggaacccaatgccgtagggatcgtaatagctcatggaagtgtgggggatgcaatttccgtgatggtgcccgacgtgtatataagtgatgatggaggatatagttggacaaaaatgctagaaggaccacattattatacaatacttgatagtggagggattatcgtggcaatcgaacattcctccagacccatcaatgtcattaagttctctacagatgaggggcagtgttggcagacttatactttcacacgggatcccatctattttacaggactggcatctgaaccaggggcacgatccatgaatatctcgatttgggggtttactgaatctttcctcacaagtcagtgggtgtcatatactatcgatttcaaggatatcctcgaacgaaattgtgaggagaaagactacactatatggcttgcccattccacagatcccgaagattatgaagatggatgtatcctaggatacaaagaacagtttttacgcctacggaaatccagtgtatgccagaacgggcgggattatgtcgtgactaaacagccatcaatttgtctctgttcccttgaagatttcctctgtgatttcgggtattataggccggagaacgattccaaatgtgtggagcagccagaactaaaaggacacgacctcgaattttgcttgtacggacgagaagagcatctgactactaatggatatcggaaaatccctggagataaatgtcagggaggagttaatcccgtccgggaagtaaaagaccttaaaaaaaaatgcactagtaattttctctctcctgaaaagcagaattccaaaagtaacagtgttccaataatactggcaatagtcgggctgatgctagtaacagtagtcgctggggtactgatcgttaaaaaatacgtttgtggagggagatttttggtgcataggtactccgtgctccagcagcacgctgaagcaaatggggtagatggggttgacgccttggatactgcttctcacactaataaatcagggtatcatgatgattctgacgaagatctattggag

SEQ ID NO: 19698 - DNA, 1893 bp, synthetic construct
  misc_feature 1..1893: note = source = /note="Description of Artificial Sequence: Synthetic coding sequence"
  source 1..1893: mol_type = other DNA
atgcctaggtatggagccagtctgcgacagagttgccctaggtccggaagggagcagggccaggacgggacagctggggcccctgggctgctatggatgggactggtactggctctggcgcttgcactggcccttgccctggcactttccgacagcagggtgctctgggcaccagctgaggcccacccgttgtcgccacaaggccaccccgcccgactgcataggattgtgcctcgattgagagatgtctttggttggggtaatctgacttgtcctatctgcaagggcttgtttacagcaatcaatcttggactgaaaaaggagcccaatgttgcacgtgtaggctctgtcgctattaagctttgtaacctgctgaaaattgccccgcctgctgtgtgccaatcgattgtccaccttttcgaggatgacatggttgaagtttggagaaggtctgttctatcaccgtccgaggcctgtggcctgttgctaggcagtacttgtggccactgggacatcttctcttcttggaacatctctcttccaaccgttccgaagcctccgccaaagccgccgagccctccagctcctggcgctcctgtatcacggattctctttctcacggatctccactgggaccacgattacctggagggtaccgaccccgattgtgcagacccactctgttgcagacggggtagtggcctgcctcccgcttcacgccctggcgcaggatattggggagaatacagtaagtgcgacctgccgttgaggacgctcgagtctctgcttagcggtctcggccccgcggggcccttcgatatggtgtattggaccggcgacatcccagcgcacgacgtatggcatcagacacgccaggatcagctgcgcgccttgacaactgtgaccgctttagtgaggaaattcctcggccctgtgccagtctatcccgccgttggaaatcatgagtccacaccagtaaatagcttcccgccgcccttcatcgagggtaaccactctagcagatggttgtacgaagccatggccaaagcctgggagccttggctcccggccgaggctctgcggactctgcgcatcggtggattttatgccctgtctccttaccccggccttagattgatttccctgaatatgaatttttgttccagggagaacttttggttactgatcaactctactgatcccgctgggcagcttcagtggttagtgggagagctccaggcagcagaggatagaggggacaaggtgcacattatcggccatattccgccagggcattgccttaagtcttggagctggaattattaccggattgtagcccggtatgagaatacacttgcagcccagttcttcggacacacacacgtggatgaattcgaggtattctatgatgaggaaaccttatcaagacctctggcggtcgcgttcttagctccatcagccaccacgtatattggactgaatcctggctaccgcgtttatcagattgacgggaattacagcggttcctcacatgtagtgttggaccatgagacatatatcttgaatttaactcaagcaaacattcccggagcgattccgcattggcagctgctgtaccgcgctcgagagacctatggcctacccaatacactgcctaccgcgtggcataacctggtgtatagaatgagaggagatatgcagttatttcagacgttttggtttctgtaccacaagggacatcccccatctgaaccctgtggaaccccttgtagattggcaaccctttgtgcgcagctatccgcgagagccgatagccctgctctatgcagacacctcatgcccgacggctcacttccagaggcacagagcctgtggcctagacccctgttctgc

SEQ ID NO: 19699 - DNA, 1893 bp, synthetic construct
  misc_feature 1..1893: note = source = /note="Description of Artificial Sequence: Synthetic coding sequence"
  source 1..1893: mol_type = other DNA
atgcctcgttacggcgctagcctccggcaatcatgccctcggtcgggacgggagcaaggacaggacggcactgccggagcccctggtctgctttggatggggctcgtgctggccctcgcgctggctctcgccctggctctggccctgagcgattccagggtgctgtgggcgcccgcggaggcccacccgctgtcgccacagggccaccctgcccgcctgcacagaattgtgccccggctcagggacgttttcggatggggaaacctgacttgtccaatttgcaagggacttttcaccgccattaatctcggccttaagaaggagccaaacgtcgctcgcgtgggttccgtggcgatcaaactgtgcaacctgctgaagatcgccccgcccgccgtttgtcagtcgatcgtgcatcttttcgaggatgatatggtcgaggtgtggcgccgcagcgtgctgtcaccgtctgaagcctgcggcctgctgcttggatccacgtgcggtcactgggatatcttctcaagctggaacatctctctgcccaccgtcccgaagccgccaccaaaaccgccgtcgcccccggctccaggagcgccagtgtcgagaatcctgtttctcaccgatctccactgggaccacgactaccttgagggcactgatccagactgcgctgacccactgtgctgtagacgcggctctggactcccgccggcgtcacgcccaggagcaggatactggggggaatactccaagtgcgacctcccgctcaggaccctggagtcactgttgtctggactgggccctgccggacctttcgacatggtgtactggactggggacattccggcgcacgacgtgtggcaccaaacccgccaagatcagcttcgggcactgaccactgtgactgctttggtgcggaaattcctcggacctgtgccagtgtatcccgcagtcgggaatcacgaatcaaccccggtgaattccttcccgccaccctttatagaaggtaaccactcatcacggtggctctacgaagcaatggctaaggcatgggaaccttggttgcccgccgaggcccttcgcacgctcagaatcggaggcttctacgcgcttagcccgtatccggggctgaggctgatctcgctgaatatgaacttttgtagccgggaaaacttttggctgctcatcaactcgacggatccggccggacagctgcagtggctggtcggcgagcttcaggccgcggaagatcgaggcgataaggtccacattatcggacatatcccccctgggcattgcctgaaatcgtggtcctggaactactaccgcatcgttgcacgttatgaaaatactttggccgcacaattcttcgggcatacccatgtggacgagttcgaagtcttttacgacgaggaaacgctgagccgccctctcgcagtggcgttcctggccccatccgcgaccacttacatcggcctgaatccgggataccgcgtgtaccaaatcgacggtaactattccggatcctcccatgttgtcttggaccatgaaacttacatactcaatctcacccaagccaacattcctggtgcgattcctcattggcaattgctgtaccgcgcgcgagaaacctacggacttcctaacactttgccgactgcctggcacaacctggtctaccggatgagaggcgacatgcaactctttcagaccttttggttcctgtaccacaaggggcacccgccgtcggaaccgtgtggaaccccatgcagactcgcaaccctctgtgcccagctgtcagcgagagcggattcaccggccctgtgtcgacatctgatgcccgacggctctctgccggaagcccagtcgctctggccgcggcctcttttttgc

SEQ ID NO: 19700 - DNA, 1893 bp, synthetic construct
  misc_feature 1..1893: note = source = /note="Description of Artificial Sequence: Synthetic coding sequence"
  source 1..1893: mol_type = other DNA
atgcctagatacggtgcgtccctccggcagtcgtgtccccggagcgggcgagaacaagggcaggatggaaccgcgggagctccggggctgctgtggatgggactggtccttgcactcgccttggcacttgccctggccctcgccttgtcagactcacgtgtgttgtgggcaccggctgaggctcacccgctctcaccgcaaggacaccctgcgaggcttcacagaatcgtccctcgcctccgcgatgttttcggctggggcaacctcacttgtccgatttgtaagggactgtttaccgctattaacctcggtctgaagaaggagccaaatgtggcccgggtgggatcggtcgccatcaagctgtgcaatcttctgaaaatcgccccgccggctgtgtgtcagtcgatcgtgcatctgttcgaggatgacatggttgaggtgtggaggcgctcagtgctctccccgagcgaggcttgcggactgctgttgggaagcacttgcggacactgggacatcttttcgtcctggaacatctcactgcctacggttccgaagccgccgccgaagcctcccagcccgccagcacctggcgcacctgtcagccggatcctgtttctgactgacctgcactgggatcacgactacctcgaaggaaccgatccggattgcgcggatccgctgtgctgtcggagaggaagcggattgccccccgcgagccgccccggcgctggatactggggcgaatactccaagtgcgatcttccactccgcaccctggaatcactcctgtcgggactcggaccagcagggccgttcgacatggtctactggaccggcgacatcccggcgcacgatgtctggcatcaaactagacaggaccagctgagggctctgaccactgtcactgcgctcgtcagaaagttcctcggaccggtacctgtttacccagcagtggggaatcatgagtccacccctgtcaatagctttcccccaccattcatcgaaggaaaccattcgtcgaggtggctgtacgaagcaatggctaaggcttgggaaccgtggctgcctgccgaggcgctgcgcacgctcagaatcggaggattctacgctctgagcccatacccgggacttagactgatctccctgaatatgaacttctgctcaagagaaaacttctggctgctgatcaacagcaccgatccggcggggcaactgcagtggttggtgggcgaactgcaggctgcggaagatagaggagataaggtgcacatcatcgggcacatcccgccgggacactgtcttaaatcctggtcgtggaactactaccgcatcgtcgctcgctacgaaaatactctcgcggcacagtttttcgggcacacccacgtcgatgagttcgaagtcttttacgacgaagaaaccctgagccggccacttgcggtcgccttcctcgcaccgtcagctactacttatatcggactcaacccaggataccgcgtgtaccaaatcgatggcaactactccggttcatcacatgtcgtgctggaccacgaaacctacatcctgaatctgacccaggccaatatcccgggcgccatcccacactggcaactgctctaccgggcgagggaaacttatggactgccaaacaccctgcctacggcatggcataacctggtctaccgcatgaggggcgatatgcagttgtttcagactttctggttcctgtaccataagggacatcctccgtcggaaccatgcggtaccccgtgccgcctggcgactctctgcgcccagctgagtgcccgcgccgattccccggccctctgccgccacctgatgccggacggatcacttccagaggcccaatcgctgtggccgcgcccgcttttctgc

SEQ ID NO: 19701 - DNA, 1893 bp, synthetic construct
  misc_feature 1..1893: note = source = /note="Description of Artificial Sequence: Synthetic coding sequence"
  source 1..1893: mol_type = other DNA
atgccaagatatggagccagcctgcgccagtcctgcccacggtctggccgcgagcagggacaggatggaacagcgggcgcccctggcctgctttggatgggcctggtgctggcactggcactggctctggcactggcactggcattgagcgatagccgcgtgctgtgggcgccggcggaggcccacccactgagcccccaggggcaccccgctcgattgcatagaatcgtaccaagactaagagacgtgttcggttggggcaatctcacctgtccaatctgcaaaggcctgtttaccgcgatcaacctgggcctgaaaaaggagccaaatgttgcgcgcgtaggtagcgtggctattaaactatgtaatctgctcaaaatcgcccctcctgccgtctgtcagagcatagtgcatctgtttgaggatgacatggttgaagtgtggcgtcgcagcgtgctgagcccatctgaggcgtgtggcctgcttcttgggtccacctgcggccattgggacatcttttccagctggaatattagtctgccgacggtcccgaaaccgccaccaaaaccaccgtccccacctgccccaggagcaccggtttcacgtattctgtttctgacggacctgcactgggatcatgattacctggagggtaccgatccggactgcgctgacccgctgtgttgccgacgcggttccggtctgccacctgcgagccgcccaggagctgggtactggggtgagtatagcaaatgtgatttgcctttacgaactctggagtccctgctgagcggcctgggcccggccggtccgtttgacatggtctactggactggtgatattccggcgcatgatgtgtggcaccagacgaggcaagaccagctgcgcgccctcactacagtcactgctctggtgaggaaattcctgggtcctgtccctgtttaccctgctgtgggtaatcacgagagcacacctgttaactcctttcctcccccgtttatcgagggcaaccactcaagccggtggttgtacgaggcgatggctaaagcgtgggaaccatggctgccagcggaggccctgaggacgctgcggattggtggcttttatgccctgtccccgtatcctggtctacgtttaataagcctgaacatgaacttttgctctcgcgagaatttttggctgctgatcaattctaccgatccagcgggtcaattgcaatggctggtaggcgaactccaggcggcggaggatagaggtgataaggtccacattatcggccatattcctcccgggcactgtcttaagagctggtcttggaattactaccgcatcgtggcccgctatgagaacactctcgctgctcagttctttggccacactcatgtagacgagtttgaggtgttttacgatgaggagaccctgtcacggccactggctgtggcgtttcttgccccgagcgcaacgacgtacatcggtctgaatccaggttatcgcgtttaccagatcgatggtaactacagcggtagcagccacgtagttctggatcacgagacttacatccttaatttgacgcaggcgaatattccgggagccatccctcactggcagttgttatatcgggctcgtgagacctacggcctcccaaacaccctgccgacggcctggcataatttggtctacaggatgcgtggagatatgcaactgttccagacgttctggtttctgtaccacaaaggtcatcctccgagcgagccttgtggtaccccatgtcgccttgcaaccctgtgcgcgcagcttagtgccagggcggacagcccagccctgtgccgccatctgatgccggacggtagcctgccggaagcccaatctctgtggccacgcccgttgttctgc

SEQ ID NO: 19702 - DNA, 1893 bp, synthetic construct
  misc_feature 1..1893: note = source = /note="Description of Artificial Sequence: Synthetic coding sequence"
  source 1..1893: mol_type = other DNA
atgcctcgctacggtgcaagcctgagacaatcttgcccgagaagcggaagggagcaggggcaggacgggactgcaggggcgccaggattgctgtggatgggtctggtgcttgctctggcattggcgctcgcgctggcactcgcattgagcgattcgcgagttctgtgggccccggcagaagcccatccactctcaccacagggccaccctgcgaggttgcataggattgtccccaggctccgcgacgtgttcgggtgggggaatcttacctgcccgatctgtaagggactgtttacggccatcaatctgggactcaaaaaagaaccaaacgtggcaagagtcggttcggtggctatcaagctgtgtaacctgcttaagattgccccaccggcagtctgccagtcgattgttcatctttttgaagatgatatggtggaagtctggcggagaagcgtcctctcgcccagcgaggcatgcggacttctccttggttcgacctgtgggcattgggacattttcagctcgtggaatatctctctcccgaccgtccctaagccacctccaaagccccctagtccacccgcacccggagcaccagttagcagaatcctttttctgactgatttgcattgggaccacgattacctcgagggcacggatccagattgcgctgatcctctctgttgtagacgtggatcagggcttcctcctgcttcacgcccaggtgcaggttattggggtgaatactcgaagtgtgatctccctcttcgaactctggaatcgctgctcagtgggttgggacctgcaggaccatttgacatggtgtactggaccggcgatatcccagcccatgacgtgtggcatcaaacgagacaagatcaacttagggccctgactactgtgactgcactggtcagaaagttcctgggaccagtcccggtgtacccggcagtggggaaccacgaatcgactccagttaattcatttccacccccctttattgaagggaaccattcgtcccgatggctttacgaagctatggcgaaggcttgggaaccctggctgcctgcagaagcccttagaactctccgaataggaggcttctacgcactgagcccttatcctggtctgcgccttatttccctgaacatgaatttctgcagcagggagaacttttggctcctgatcaactcaaccgatccggcaggacagttgcaatggcttgtgggtgagctccaagctgcagaagatagaggcgacaaagtccacataattggacacatccctccgggacactgtctcaagagctggtcctggaactactacagaattgtggcgcgctacgagaacacccttgcggcgcagtttttcggccatactcacgtcgacgagttcgaggtcttttacgatgaagaaactctgtcgcgcccacttgcagttgcattcctggccccctcggccaccacgtacataggactgaatccaggttacagagtctaccaaattgatggtaactactctggctcgtcccacgtggtgcttgatcatgaaacctatatacttaacctgacccaagcaaacatccctggtgcaattcctcattggcagctcctttaccgcgcccgcgaaacctacgggctgccaaataccttgcctaccgcctggcataatctcgtgtacagaatgaggggagacatgcagctcttccaaactttttggtttctgtaccataaaggtcaccctccttccgaaccgtgtggaaccccttgtcgcctggcaaccctttgcgcgcaactgtctgcaagagccgatagccctgcgctgtgtagacacttgatgccagacggttcacttcctgaggctcagtcgctttggcctcgacctctcttttgt

SEQ ID NO: 19703 - DNA, 1893 bp, synthetic construct
  misc_feature 1..1893: note = source = /note="Description of Artificial Sequence: Synthetic coding sequence"
  source 1..1893: mol_type = other DNA
atgcctaggtacggcgccagcctgagacagtcttgtcctcgctcaggcagagaacaggggcaggatggtactgcaggcgcccctggattactgtggatgggtctggttctcgccctagctctggccctcgccctggccctggccctatcagattcaagagttctgtgggccccagccgaggctcacccactgagcccccagggacaccctgcccggttacacagaatcgttccccgcctacgcgatgtgtttggctggggaaacctgacttgcccaatatgtaaaggcttattcaccgctataaaccttggcctgaagaaggaacctaatgttgcaagagtcggctccgtggcaatcaagctatgtaatctgctgaaaatcgctcccccagctgtttgtcagtccatagtgcacttattcgaggatgacatggtcgaggtgtggcgtcggagtgtcctgtccccctccgaagcatgcgggctgttgctgggctccacatgtggtcattgggatatcttctcttcctggaacattagcctgcccaccgtccccaaacctccacctaagccaccatctccaccggccccaggcgcccccgtgagccggatcctattcctgacagatttgcactgggatcacgattacctagagggtacagatccagactgtgccgatcccctatgctgtagaagaggtagcggccttccacccgctagccgtccaggggctggctattggggcgaatactcaaagtgcgatctgcccttacggaccctggagagtcttctctctggtctgggtccagcaggacccttcgacatggtatattggactggggacattcctgctcatgatgtgtggcaccagaccagacaagaccagcttagggccctaaccacagtgacagcactggttcgaaagttccttggccctgtgccagtctaccctgctgtggggaatcatgagagtacccctgtgaactccttccctcctccatttatcgaaggcaatcattctagccggtggctatatgaagccatggcaaaggcctgggaaccatggctccctgctgaggctctacggacactgagaattggtggattctatgctcttagtccttatcctgggttgcgcctcatctccctgaatatgaacttttgctctagagaaaacttctggctgctcataaacagtactgatcctgccggccagctgcaatggctcgttggcgagctccaagccgcagaagacagaggcgacaaagtgcacataatcgggcatataccccccggccactgcctgaagagttggagttggaattactaccgcattgtggctcggtatgaaaacactctggccgctcagttctttggacatactcatgtcgacgagttcgaggtgttctacgacgaggagacactctctcggcccctggcagtggccttcctggccccttcagcaacaacctatataggactaaaccctggttaccgggtctaccagatagacggtaactactctgggagctcccacgtggtgctggaccacgagacctatattctgaatctgacccaagcaaacatccccggtgccatcccccactggcaactgctctaccgggctagggagacctatggactgcctaacaccctacccaccgcctggcacaatttagtttataggatgaggggggatatgcagctgtttcagacattctggttcctgtatcacaaagggcatcctccttccgagccctgcggcacaccttgcagacttgcaaccttgtgtgctcaactgagcgccagagctgacagtcctgctctgtgcaggcacctgatgccagatgggtctctacctgaagcacagtccctatggccaagacctctgttctgt

SEQ ID NO: 19704 - DNA, 1893 bp, synthetic construct
  misc_feature 1..1893: note = source = /note="Description of Artificial Sequence: Synthetic coding sequence"
  source 1..1893: mol_type = other DNA
atgccaaggtatggagcatccctgcggcagtcctgtccccggagtggccgggagcaaggccaggacggcactgctggggcgcccggactcctgtggatgggtctggtcctggccctggcgttggccttagctttagccctggctctgagcgatagccgggttctctgggcaccggctgaggctcaccccttgagccctcaggggcatcccgctcgcctgcatagaattgtgccccgcctcagggacgtatttggttggggaaatcttacgtgtccaatctgtaagggcctcttcaccgctattaacttgggactcaagaaggagccgaacgtcgcccgcgtcgggagcgtagcgataaaactctgcaacctcctcaaaatcgctcctcctgccgtctgccagtcgatcgtgcatctcttcgaggacgatatggtggaagtgtggagacgctccgtcctcagcccgtctgaggcttgcggcctcctactcggttccacgtgcgggcattgggatatttttagcagctggaatatttcgctgccaacggtgcctaaacctccacccaaaccacctagtccacccgcaccaggcgcccccgtgagtcgtatcctgtttctcacagacttgcactgggatcacgattatctggagggcactgatcctgattgtgccgatccactatgctgccggaggggctctggcttgccaccagcctccagacccggcgccggctattggggcgagtactcaaagtgcgacctaccattgcgcactcttgagagtcttctttctggcctcggccctgcggggcctttcgatatggtgtattggaccggagatattccagcccacgacgtgtggcatcagacccgacaagatcagttgagagcgctcacaacagttacggcactagtacggaagttcttgggcccagttcctgtgtatccagccgtggggaaccacgagtccacgcctgtcaattccttcccaccccccttcattgaggggaatcactcatcccgttggctctacgaggcaatggctaaagcttgggaaccctggttacctgcagaggcccttcgtaccctccgaatcgggggattctacgcgctgagcccttaccctggactgagactcatctccctcaatatgaacttctgctccagggagaacttctggttactgatcaactctaccgacccggccggtcaattgcagtggttggtgggagaactccaagccgccgaggaccggggcgacaaagtacatattataggacacatcccaccagggcactgtcttaagagctggtcttggaattactacagaattgtggcacgttacgagaacactcttgcagctcaattcttcggccacacacatgtggacgaatttgaggtcttttacgacgaggagactctgagcagacccttggccgttgcgtttctagcgccatcggctaccacttacatcgggctgaacccgggctatagagtctaccagatcgacgggaactacagcggcagctctcacgtggtgttggatcatgaaacatatatactcaacctaacccaggctaatattccaggggccattcctcattggcagcttctgtatagggcccgagagacctacgggctccccaacactctcccaactgcctggcataacctggtctaccgcatgcgcggcgacatgcagttattccagactttctggtttctctatcataaagggcaccccccatcagagccttgtggcaccccatgccgtctcgcaaccctttgcgcacaactatccgcccgcgcggattcaccagcactctgtagacatctaatgcctgacgggtcgctccctgaggcccagagcctgtggccacgcccactgttttgc

SEQ ID NO: 19705 - DNA, 1893 bp, synthetic construct
  misc_feature 1..1893: note = source = /note="Description of Artificial Sequence: Synthetic coding sequence"
  source 1..1893: mol_type = other DNA
atgcctcgctacggcgcatctctccggcagtcgtgccccagatccgggcgggagcagggacaagacggaaccgctggagcaccagggctgctgtggatgggactggtgctggctctggcactggcccttgcccttgccctcgctctgtcagactcaagggtcctgtgggcacctgcagaagcccatcctctgtcacctcagggacacccggctagactgcaccgcatcgtgccaaggctgcgggatgtctttggatggggaaacctgacctgtccaatttgtaagggacttttcaccgccatcaatctcggcctgaaaaaagagcctaacgtggcccgcgtgggctcggtcgccatcaaactgtgtaacttgctgaagatcgccccaccagctgtgtgccagagcattgtccacctgttcgaggacgacatggttgaggtctggcgcaggtccgtcctgagcccgtccgaggcgtgcggactgctgctcggctcgacctgtggtcattgggacatcttctcgtcatggaacatctccttgcccactgtgccgaaaccgccaccaaaacctccgtccccgcctgcgccaggggcacctgtgtcaaggatcttgttcttgactgaccttcactgggatcacgattacctggaggggactgatccggactgcgcagacccgctctgctgtcgcagggggtcaggccttccaccggcatcaagaccaggcgcaggctactggggagaatactcgaagtgcgacctgccgctgagaacgctcgagtccctgctctcgggcctgggaccggcaggcccattcgatatggtctactggactggtgatatcccggctcacgacgtgtggcaccaaaccaggcaggaccagttgagggcgctcaccaccgtgaccgcgctcgtgcgcaagttcctgggacctgtgcctgtctacccggccgtgggaaaccacgagtccaccccggtgaacagctttccaccaccgttcattgaagggaaccatagctcacggtggctgtatgaagctatggcgaaagcatgggagccatggcttccagccgaagccctccgaaccctgcgtatcggcggattctacgccctgtcgccataccccggactgcgcctcatttccctgaatatgaatttctgttcgcgcgagaatttctggctgctcatcaatagcaccgacccagcgggacaactgcaatggctcgtgggggaactgcaggcggctgaggatcggggagacaaggtgcacatcatcggccatatcccgccggggcattgcttgaagtcgtggtcctggaactactaccgcatcgtcgcccgatacgagaacaccctcgcagcccagttcttcggacatactcacgtcgatgagttcgaagtcttttacgatgaagaaaccctgtcccgccctcttgcagtcgccttcttggcgccgtccgcgaccacctacattggactgaatcccggctaccgggtctaccagatcgacggaaattactctggctcgtcacacgtggtgcttgaccatgaaacctacatcctgaacttgactcaggctaacatccctggtgccattccgcattggcaactcctgtatagagcgcgggaaacctacggcctgccaaacaccctgcctaccgcctggcacaacctcgtgtacaggatgaggggcgacatgcagttgttccagaccttctggttcttgtaccacaagggtcatcccccatcggaaccatgcgggaccccgtgccggctggccactctctgcgcccagcttagcgcgcgcgcggactccccggcactgtgccgccacctcatgcctgacggatcactccctgaagcccaatccctctggcctcggcccctgttctgc

SEQ ID NO: 19706 - DNA, 1893 bp, synthetic construct
  misc_feature 1..1893: note = source = /note="Description of Artificial Sequence: Synthetic coding sequence"
  source 1..1893: mol_type = other DNA
atgccaagatacggtgcttccctgagacaatcctgtcctaggtccggacgcgaacagggtcaagatgggacggccggagctcctggactcctttggatgggccttgtccttgccctggcgctggcattggcgctggccctcgcactgtcagattcgcgcgttttgtgggctccagccgaagcacatcccctctcgcctcaaggtcaccccgcacgcctgcacaggattgtccctcggctccgggatgtgtttggatggggaaacctcacctgccccatctgcaagggattgttcactgcgattaacctgggactgaaaaaagaacccaatgttgccagagtgggctctgtggctatcaagctctgcaatctgcttaagattgcgccgccagctgtctgccagagcattgtgcacctgttcgaagatgatatggtggaggtgtggaggcggtccgtgctgtcgccctccgaggcgtgcggactgcttctgggctcgacctgcggccattgggacatctttagctcgtggaacatctccttgccgaccgtcccaaagccgccacccaagccgccgagccctccggcaccgggagccccagtctcgagaatcttgttcctcacggacctgcattgggaccacgactacttggaaggcactgacccggactgcgcggacccgctgtgctgtcgacgcggatcgggactccctccagcttcgcggccgggagccggatactggggcgagtacagcaaatgtgatctcccactgcgaactctggaatccttgctgtcaggtctggggccggcgggcccttttgatatggtgtactggactggcgacatcccagcgcacgatgtgtggcatcagactcggcaggatcaactgagggctcttactaccgtgactgcgctggtcaggaagttcctgggacctgtgcccgtgtaccccgccgtcggaaaccatgagtccacgccagtgaactcatttccgccaccattcatcgagggaaaccattcctcccggtggctgtacgaggcaatggccaaagcgtgggaaccgtggctgccggctgaggcgctgaggaccctgcgcattggcggtttctacgcactctcaccgtaccctggactcagactgatttccctgaatatgaacttttgctcgcgggagaatttctggctgctgatcaattcgactgaccctgctggacagctgcagtggctggtcggggaactgcaagcagcagaggaccggggggacaaggtgcacatcatcggccacatccctcccggacactgcctgaagtcatggtcgtggaattactaccgaatcgtcgcgcggtacgaaaacaccttggccgcccaattcttcggacacacccacgtcgacgagttcgaagttttctatgatgaagaaaccctgtcacgccccctggcagtcgcattcctcgcaccgtcagccaccacctacatcggactgaacccgggctacagagtgtaccaaatcgacggtaattactcagggtcctctcacgtggtcctggaccacgagacttacatcctcaatctcacccaggctaacatcccaggcgccatcccgcattggcagttgctgtaccgcgcccgagaaacttatggactgccgaatacgttgccaaccgcgtggcataacctggtctatcggatgcgtggggatatgcaactgtttcagaccttctggttcctttaccataagggacacccaccgtcggaaccgtgtgggacgccctgccgcttggccactctctgtgcacagctgagcgcccgggccgattccccagcattgtgcagacacctcatgccagacggcagcttgccagaagcgcagtctctgtggccgcgtccgctgttctgc

SEQ ID NO: 19707 - DNA, 1893 bp, synthetic construct
  misc_feature 1..1893: note = source = /note="Description of Artificial Sequence: Synthetic coding sequence"
  source 1..1893: mol_type = other DNA
atgcctaggtatggcgcaagcctgaggcagagctgccctaggtctggcagagaacagggacaggatggaaccgcaggtgccccaggcctgctttggatgggactggtccttgcactggcactcgccctggccctcgctctcgctctgagtgactcacgcgtgctgtgggcccccgctgaagctcaccctctctcaccccaaggacacccggcgagattgcaccgcattgtacccaggctgagagatgtattcggctggggaaatcttacatgccccatatgcaagggactgttcactgccatcaatctgggcctgaagaaggaaccgaatgtggctcgcgtcggttccgtcgctatcaaactgtgcaatctccttaagattgcaccgcccgccgtctgccagagtatcgtgcacttgttcgaggacgatatggtggaagtctggaggagatctgtgttgtccccttcagaagcctgtggactgctgctgggctccacgtgtggtcactgggatatcttctccagttggaacatcagtttgcctactgtccccaagcctccacctaaaccaccctcacctccagcccctggcgcccctgtctctcgcatcttgtttttgactgatttgcactgggaccacgactaccttgagggaacagatcctgattgcgctgacccactgtgctgccgcagaggctccggcctcccaccagcctcccgcccgggagccggttactggggagagtactccaaatgtgacttgcccctcaggacacttgagagcctgctgagcggtttgggacctgccggtcccttcgacatggtgtattggaccggcgatatccccgcccatgatgtgtggcaccaaacaagacaggatcaactgagagctctgactaccgtgaccgcactggtaaggaagttcctgggccccgtgccagtatacccggctgtgggaaaccacgaaagcaccccagtcaacagtttcccccctccatttatcgagggaaatcactccagcagatggctgtatgaggcaatggctaaggcatgggagccatggttgccagcggaggcgcttcgcacactgaggattggcggtttctacgctttgtctccctaccctggcttgaggttgatcagtttgaatatgaacttctgtagcagggagaatttctggctgttgataaattctacagatccagcaggtcaactccagtggttggttggcgagctccaagccgccgaagataggggtgataaggtgcatattattggacacatcccccctggtcattgcttgaaatcctggtcctggaactattatagaatcgtggctcgctacgaaaacacacttgctgcgcagtttttcggtcacacccacgtggacgaattcgaagtgttttacgacgaagagacactgagccgcccgcttgccgtggcatttctggccccttctgcgacgacctatatcggtcttaacccgggctatagggtctaccagatcgatggaaactactcaggaagcagccatgtggttctggatcacgaaacatacattctgaacctgacccaagctaatattcccggagcgatcccacactggcagctcctttaccgcgcccgcgagacttacggcttgcccaacacgttgccgacggcttggcacaacctggtgtatcgcatgagaggcgacatgcagttgtttcagaccttttggttcctttaccacaaaggacacccaccgtccgagccatgtggaacaccatgccgccttgctacgttgtgcgcacagctttctgcaagggctgactctccggcactctgcaggcatttgatgccagatggttcactgccggaggcccagtcactctggcctagacctctgttctgt

SEQ ID NO: 19708 - DNA, 1893 bp, synthetic construct
  misc_feature 1..1893: note = source = /note="Description of Artificial Sequence: Synthetic coding sequence"
  source 1..1893: mol_type = other DNA
atgcctcgctatggcgcgagcctgaggcagtcctgtccaagatccggcagggagcagggtcaggatggtaccgctggtgcacctggacttctctggatgggactggtgttggccctggcgcttgccctggcacttgctctggcgctctccgacagccgggtattatgggctcctgctgaagcacaccctctgtctccccagggacaccccgcacggctgcacaggatcgtgccacgcctaagggacgtttttgggtggggcaatctcacttgtccgatctgcaagggactcttcactgccatcaatctaggattgaaaaaagagcccaacgtggcacgggtgggtagcgtagcaataaaactgtgcaacctgctgaaaattgctccgcccgcagtctgccagagcatcgtccatctgtttgaagatgatatggtggaagtgtggcgtcggagcgtactgtctccctctgaagcctgtgggcttctccttggcagtacatgcggccactgggacatattcagcagctggaacatttctctgcccaccgtgcccaagcccccccctaagccacccagcccgcctgcccccggggctccagtttcacgtatcctgtttctcactgatctgcactgggaccacgattacctcgaaggcacggatccggactgcgcagaccctttgtgctgccggcgaggttcgggtctgcctcccgccagtcgacccggcgctggttactggggcgaatattcaaagtgtgaccttccacttagaacgctggagtccctgttaagcggactgggccctgccggcccattcgatatggtatattggactggagacattcccgctcatgacgtgtggcaccagacaagacaggaccagctgcgggccctcaccactgtcacagctttagtgcgcaagtttttgggccctgtaccggtctatcccgctgtcggcaaccacgagtccacgcctgtgaattctttccccccaccctttatcgagggcaatcactcttccagatggctttacgaagctatggcaaaggcatgggagccttggttgcccgctgaagcgctccgaaccctgaggatcggcggattctacgctttgtccccatatccaggcctgaggctcatctcgctgaatatgaatttctgtagccgggaaaatttctggctcctgatcaattccacagatcctgccggccaactccagtggctggtgggggaactccaagccgccgaagatcggggcgacaaggttcatatcattggacacataccccctgggcattgtctgaaaagttggagctggaactactaccgcattgtagcacggtacgaaaatacccttgccgcacagtttttcggccatacacatgttgacgaatttgaggtgttctatgacgaagaaacactgtccaggcctctagcagtggccttcctggcgcccagcgctacaacttatatcggcctgaacccaggctaccgggtgtaccaaatcgatgggaactattctggaagctctcatgttgtgttggaccacgagacttacatattaaatctgacgcaggcaaacatacctggagccatcccccattggcagctgttgtaccgggcccgtgagacttacggtcttcccaatacactccccactgcctggcacaacctggtctaccggatgaggggcgacatgcagctgttccaaactttctggttcttgtatcacaagggtcaccccccaagtgagccatgcgggacaccctgtagactggccactctttgcgcccagctttccgcaagagctgattcaccggccctatgtcgccatttgatgccagatggaagtctgccggaggcgcagtctctgtggccgcgtccactcttctgc

SEQ ID NO: 19709 - DNA, 1893 bp, synthetic construct
  misc_feature 1..1893: note = source = /note="Description of Artificial Sequence: Synthetic coding sequence"
  source 1..1893: mol_type = other DNA
atgccgaggtacggggcctcactgaggcagagttgtccccgatcaggtagggagcagggccaagatgggactgccggcgctccgggcctgctgtggatggggctcgtgctggccctcgctctggccctggcgctcgctctggcactgagcgatagccgggtgctgtgggcccccgccgaggcgcatcctctctcaccgcagggccaccccgcccgacttcaccgaatcgtgcctagactgcgtgacgtattcggctgggggaatctaacctgccctatatgtaaaggactgttcacggccataaacctcgggttgaagaaggagcccaacgtagcgcgggtgggcagtgtcgcgatcaaactatgcaacctactaaagatagctcctcctgcagtctgtcagagtatagttcacctctttgaagacgatatggtagaggtctggcgcagatctgtgcttagcccaagtgaagcttgtggcctgctactgggttctacttgcgggcattgggacatcttctccagctggaacataagtctgccgacagtgcctaagcctcctcccaaaccaccaagcccccctgcacccggtgcacctgtttcgagaatcctcttcctcacggacctgcactgggaccatgactacctggaaggtacagatcccgattgtgcagatcccctttgttgcagacgtggctcaggcctgcctcctgccagccggcctggtgccggttactggggagagtactctaaatgtgacttgcccctgagaacactagagagcctgctctctggactgggacccgctggaccgttcgacatggtgtactggaccggtgacattcctgcacacgacgtgtggcatcagactcgacaggaccaactgcgagccctaactactgtaaccgcactagttcgtaagttcctggggcccgttccagtttatcccgctgtgggcaaccatgaaagtactcccgtgaatagcttcccaccccccttcattgaaggcaaccactcttcccgatggctatacgaggcaatggccaaggcatgggaaccttggctaccggccgaagccctgcggaccctgcgtattggagggttctacgctcttagcccctaccctgggctgcgcctgatttcccttaacatgaacttctgctcccgggagaatttctggttgctcatcaattctaccgatcccgcaggccaactacagtggctggtgggtgagctgcaggcagccgaagaccgaggggacaaggtacatatcatcggtcacatcccccctggtcactgtttaaagagttggtcctggaactactaccgcattgtcgcccgttatgaaaacactctggcggcacagttttttggccacactcatgtcgatgagtttgaggtgttctatgacgaagaaaccctgtctagacctttagctgtcgcatttctggccccgtctgcaaccacatacatcgggctgaaccctggttaccgcgtgtatcagattgacgggaactactccgggagctcacacgttgtgctggatcatgaaacctacattctaaatttgacccaggctaacatacccggggctattccccattggcaattgctgtatcgagccagagagacatacgggctacctaataccttgccgacagcttggcacaatcttgtttatcgaatgcggggtgatatgcagttatttcaaaccttttggttcttataccataaaggccacccgcctagcgagccctgcgggacaccatgtaggctggccacgctctgtgcccagctgtctgccagagctgactcaccggccttgtgcaggcatttaatgcccgacggtagcttgcctgaggcccaatctctctggcctcggccccttttctgt

SEQ ID NO: 19710 - DNA, 1893 bp, synthetic construct
  misc_feature 1..1893: note = source = /note="Description of Artificial Sequence: Synthetic coding sequence"
  source 1..1893: mol_type = other DNA
atgcccagatacggtgcttcactgaggcaatcctgcccgcggtcggggcgcgagcagggacaggacggtactgctggcgcccccgggctgctgtggatgggacttgttctagctcttgcccttgccctagcattagcgttggcgttgtcggatagtagagtcctctgggctcctgctgaagcgcatccattgtctccacaaggacaccccgcacgattacataggatagtaccgcgcttacgcgacgtattcggatggggcaatttgacatgccccatctgtaagggactttttaccgctatcaatttgggactgaagaaggagcctaatgtcgctcgcgtcggctcggttgccatcaagctatgcaacttgctgaaaattgctccacccgcggtctgtcagtctatcgttcacctttttgaggatgatatggtggaagtttggcgtcgttccgtactcagccccagcgaagcctgcggtcttcttctcggttccacttgtggtcattgggatatcttttcgagttggaacatctctcttcccacggtccccaagccccctcctaagcctccgtcgccgccggcccctggggctccggtttcccgcattctattcctaactgacctgcattgggatcatgactatctggaggggaccgatccggactgcgctgatcccttatgttgccgccggggcagtggtctcccccctgcttcccggccaggagcgggctactggggagaatactcgaaatgcgacctgcccctacgaacattggaatctctcctgtccggtttgggtcccgccggcccattcgacatggtctattggaccggggacatccccgcgcatgacgtttggcatcaaacacgtcaagaccaactccgcgctctgacaacagttaccgctctcgtccgtaagtttcttgggcctgttcctgtgtatccagcagtcggaaaccacgagtcaactccagtgaacagtttccctcctcctttcatagaaggtaaccactcttctcggtggctgtacgaggcgatggcgaaagcgtgggaaccatggctaccagccgaagccttgcgaacactccgaatcggcggattctacgcgttgtctccatacccaggtcttagactcatctctctcaacatgaatttttgctcccgggagaatttctggctgctcataaattcgaccgaccctgcgggacaactgcaatggctggtgggggaactccaggcagcagaggataggggggacaaggtgcatattatcggacatatccctccaggacattgccttaaatcatggagctggaactattatcgaattgtagctcgttacgaaaacactctcgcagcacaattcttcggtcatacgcatgtcgatgagttcgaggtattctatgatgaagagaccctttcgcgaccattagcggtggccttcttggcaccttcggctactacttatatcgggctcaacccaggatatcgtgtgtatcaaatagatggcaattattcaggtagttcccacgtagtgctggatcatgagacctatattcttaatcttacccaggcaaatatccccggtgcaattccacattggcaattgctgtacagagctagggagacctacgggctgcccaatacactaccaacggcatggcacaacttggtgtaccgtatgcgcggtgacatgcaactcttccaaactttttggttcttgtatcacaagggccatccaccttctgaaccttgcgggacgccgtgtcggctggcaactctgtgtgctcaactcagtgcccgggcggattcgccggcattgtgtcgacacctgatgcctgatgggtcgttgccggaggcacagagcctatggccgcgtcccttgttctgc

SEQ ID NO: 19711 - DNA, 1893 bp, synthetic construct
  misc_feature 1..1893: note = source = /note="Description of Artificial Sequence: Synthetic coding sequence"
  source 1..1893: mol_type = other DNA
atgccgagatacggtgctagcctgaggcagtcctgccctagatcggggagagaacagggccaggatgggactgcgggagcaccaggccttttgtggatgggtcttgtcctggcgctggcacttgcattggcgcttgcactggcactttcggactcgcgcgtgctgtgggcaccagcagaagcacatcctctcagcccacaaggtcacccagccagactgcaccgaatcgtgcctaggctccgggatgtgtttggatggggaaatcttacctgtccaatctgtaaggggctcttcactgctatcaacttgggacttaagaaggaacccaacgtggcaagggtgggttcggtcgccataaaactttgcaacctgctgaagattgcaccgccagcagtctgccaaagcatcgtgcacctcttcgaagatgacatggtcgaagtgtggagaagatccgtgcttagtcctagcgaggcctgtggtctgcttcttggctccacctgtggacactgggatatcttctcctcgtggaacatatccctgcctactgtgcctaagccacctccaaaacctccatcgccacctgcaccaggagcaccagtgagcaggatactgttccttaccgatctgcactgggaccatgattaccttgagggcaccgacccggactgtgcagatcctctgtgttgtagacgaggatcgggactgcctccggcgtcccgccctggggctggatactggggggaatatagcaagtgcgatctgccacttaggaccttggaatcgctcctcagcgggctcggccctgctggcccgttcgacatggtctactggaccggagatatcccggcacacgatgtgtggcaccagacccggcaagatcaactgagagcacttaccactgtgaccgcgctggtcaggaaattcctgggtcctgtcccggtttatcctgcggtgggaaaccatgaaagcacgccagtgaacagctttccaccaccgtttattgaaggcaaccattccagccggtggctgtacgaagctatggcaaaggcatgggagccatggctgcctgcggaggcactgagaactctgagaatcgggggattctacgcgctgagcccttaccctgggttgagacttattagcctcaatatgaacttctgttccagagaaaacttctggctgctgattaactctactgaccctgcaggacagctgcagtggctcgttggagaactgcaggccgccgaagatcgcggagataaggtgcacatcattggtcatattccccccggccattgtctcaagtcctggtcatggaattactacagaattgtggcgcggtacgaaaacactctggcagctcagttttttggacacactcacgtggatgagtttgaagtgttttacgatgaggaaacccttagcaggcctctggcagttgccttcctcgcaccatcagcaactacgtatatagggcttaatcctggctaccgtgtgtaccaaatagacggaaactactcgggttcgtcacatgtcgtccttgatcacgaaacttacatcctcaatctcacccaagccaatatacctggagccattcctcattggcaattgctgtacagagcccgtgagacttacggattgccaaatactcttcccacggcatggcataacctggtctaccgcatgcggggagatatgcagctgtttcaaaccttttggttcctttaccacaagggtcatccgccaagcgagccttgtggcaccccatgccgccttgccaccctttgtgcacaactgtccgcgcgggcagactccccggcactgtgtcggcaccttatgccagacggttcgcttccggaggcccaatccctgtggcctcgcccactgttttgt

SEQ ID NO: 19712 - DNA, 1893 bp, synthetic construct
  misc_feature 1..1893: note = source = /note="Description of Artificial Sequence: Synthetic coding sequence"
  source 1..1893: mol_type = other DNA
atgcccaggtatggagcaagcttacggcagtcatgtccaaggtcgggccgagaacaggggcaggatggcactgctggggcacccgggctgctgtggatggggctggttttagccctggcgctggccttggccctcgcattagcactctctgactctagagttctgtgggcgcccgctgaagcccacccattatctccccagggccatccagctcgactgcaccgaattgtgcccaggctccgggatgtgtttggatgggggaatctcacctgccctatttgcaaaggccttttcactgcaatcaacttgggcctgaaaaaagaacctaatgtggcaagggtaggttcagtggctatcaaactgtgtaacctgctaaagattgctccccccgccgtgtgccagtcgattgtccacctgttcgaagacgacatggttgaggtctggaggagatccgtgttatcgccgtcagaggcctgcggcctgctgcttgggtctacctgtggacattgggatattttttcgagctggaacattagtttaccgaccgtgcctaagcctcctccaaagccccccagcccgcctgcccccggtgctcccgtttcaagaatcctgttcctgaccgacttgcattgggaccacgattacttggaaggcacagaccccgattgcgctgaccccctgtgttgcaggagggggtccggactgccacctgctagtcgtccgggcgctggatactggggcgaatactccaaatgcgacctgccactgaggactctggaatccctactgtcaggcctgggccccgctggcccttttgacatggtgtactggacgggagacatcccagcccatgatgtctggcatcaaactcgacaagaccagcttcgagcactgactacagtcacagcactcgtaaggaagtttctcgggcctgtccccgtatatcctgcggtgggtaaccacgaaagtactccagtgaatagctttccccctccgtttatcgagggaaatcatagcagccgttggctgtacgaagcaatggccaaagcctgggaaccctggttaccggccgaagcactgaggacgctcaggataggaggcttttacgcgctgtctccctaccctgggctgcgattgatcagcttaaatatgaatttttgctccagggaaaatttctggctgctgattaattccaccgaccctgccggccagttgcagtggctcgtgggagaacttcaagccgccgaggacaggggggataaagtgcatattatcggtcacatccctccaggacactgcctgaagtcatggagctggaattactacaggattgtagctaggtacgagaacaccctggccgcacagttctttggacacacccatgttgacgagtttgaggtgttttacgacgaggaaactctgtctcgtccactggcagtggcattcctcgcaccttcagcgaccacgtatatcggtctgaatcctgggtatagagtgtaccagatcgacggaaattactctggctcctcacacgtagtccttgaccatgagacgtacatcctgaatctcacacaggctaatatccccggggcaatcccccactggcagctactatatcgagcacgggaaacttacggtctgccaaatacgctgcccacagcctggcacaacctggtttaccgtatgagaggggacatgcagttgtttcagaccttttggtttttatatcacaaaggacacccaccctccgaaccttgtggcacgccttgtcgtctggctacactctgtgctcagctctccgccagagccgatagtcctgctctgtgtcgtcatctgatgcccgacggaagcttgcctgaagcccagtccctgtggccacgaccgctgttttgc

SEQ ID NO: 19713 - DNA, 1893 bp, synthetic construct
  misc_feature 1..1893: note = source = /note="Description of Artificial Sequence: Synthetic coding sequence"
  source 1..1893: mol_type = other DNA
atgcctcgttatggggcgagccttcgccaaagttgccccaggagcggtagagaacaaggtcaagatggcaccgcaggtgcaccagggctgctgtggatgggtcttgtccttgcccttgcactggcacttgccctcgcgttggccttgtccgacagccgggtgctgtgggcccccgctgaggcacatcccctgtcccctcaaggccatcctgcacggctgcatcgaatagtccctcggctgcgtgatgtattcggatggggcaatctgacttgtccaatttgtaagggccttttcactgcaatcaacctgggcctcaaaaaagaacctaacgtggcacgggtcggatcagtggccatcaaactttgtaacttgttgaagatcgctcctcctgccgtgtgtcaaagcattgtgcatctgttcgaagatgacatggtcgaggtgtggcgccgctcggtgttgtcaccctcggaagcatgcggacttctgctcggctccacctgcggccactgggatatcttttcctcatggaacatctcgctgcctactgtgcctaagccgcctcctaagcctccttcccctcctgccccgggagcaccagtgtccagaatcctgtttcttaccgaccttcattgggaccacgactatctggaaggaactgatcccgactgtgcagatccattgtgttgccgtagaggctccggacttccaccagccagcaggcctggggcaggatactggggcgagtactccaagtgtgatcttcctctgagaactcttgaaagcctgctgtcggggcttggtcctgcgggaccatttgatatggtctactggaccggcgatattccggcccatgatgtgtggcatcaaaccagacaggaccagcttagagcgcttaccaccgttactgccctggtccggaagtttctggggccagtcccagtgtatcctgcagtgggcaaccacgaatcgacgccagtcaactcgttcccacctccattcattgagggaaatcattcgtcacgatggctgtacgaagcaatggcaaaggcatgggagccttggcttccagcagaagcactgcggacccttagaataggtggcttttacgccctttccccatacccaggacttcggctgatttccttgaacatgaatttctgctctcgcgaaaacttttggctcttgatcaattctaccgacccagcgggccagcttcagtggctcgtgggcgaattgcaagcggcagaagatagaggcgataaagtgcatatcatcgggcatattcctcccggtcattgtcttaagtcatggtcgtggaactactacagaatcgtggcaagatacgaaaatactctggcggcgcaattctttgggcatactcacgtcgatgagtttgaggtgttctacgatgaggaaactctttcccgccctctggcagtggcattcctggctccttccgcgactacctacatcggtcttaaccccgggtaccgcgtctatcagattgatggaaactactccgggtcgtcgcatgtggtgctcgaccacgagacttacatcttgaatcttactcaggcaaacattccgggagcgatcccccattggcagctgctgtacagggcgcgcgaaacctacggactgcctaatactctccccactgcgtggcataatctggtctacagaatgcgtggagatatgcaactcttccaaaccttttggtttctgtaccataagggtcaccccccgtcagaaccttgtgggactccttgccgtctggcaactctctgtgcacagcttagcgcacgtgcagattcgccggctctctgtaggcatcttatgccagatggctcccttccagaagcacagagcctgtggccaagaccccttttctgc

SEQ ID NO: 19714 - DNA, 1893 bp, synthetic construct
  misc_feature 1..1893: note = source = /note="Description of Artificial Sequence: Synthetic coding sequence"
  source 1..1893: mol_type = other DNA
atgcctaggtatggggcctccctgaggcagagttgcccaaggtccggacgcgaacaggggcaggacggcactgccggagctcccggactgctctggatgggactcgttcttgcacttgcgcttgcactggctcttgctctggcattgagcgactcaagggtgctgtgggctcccgccgaggcccatccactctctcctcaggggcaccccgcccggctacataggatcgtgccaagactgcgcgatgtctttgggtggggtaacctgacgtgtcccatttgcaaaggcctcttcaccgccattaacctggggctgaaaaaagagcccaatgtagcccgagttggatcagtagcgattaagctatgtaacttactcaagatcgccccccccgccgtttgccagtctattgtgcacttgtttgaagacgacatggtggaggtatggcgcagatccgtgctgtctccatcggaagcttgtggactcctcctgggatctacctgcggccattgggacatcttctctagctggaacataagtctgcctaccgtgcctaagcccccgcccaaacccccttctccacctgctccgggcgcacccgtctctcggatcctgttcctgacagatctgcattgggaccatgactatctggagggcacggatcccgactgtgcggatcccctctgctgcagacgagggagcggacttccgcccgcctcgcggcccggagctggctattggggagagtatagcaaatgtgaccttcctctgcgaaccctggaatctctgctttcaggactcggccccgctgggccttttgacatggtatactggactggcgatatccctgcgcacgacgtatggcatcagaccaggcaggatcagttgcgggctctgaccacagtaaccgccctcgtccggaagtttctgggtcccgtccctgtctatcccgccgtcgggaatcacgagtctaccccagtcaacagcttcccacctcccttcattgagggaaaccactcatcaaggtggttatacgaggctatggctaaagcatgggagccatggcttccagccgaggctctccgaacacttcgtattggaggcttctacgctttgagcccgtaccctggcctgcgactgatatcgcttaacatgaatttctgctcaagagaaaatttttggctgttaatcaattcaacagacccagccgggcagctgcagtggttggtcggcgaattacaggctgcggaggaccgcggagataaggtgcatatcattggccatattcctcccggccactgtctcaagtcctggtcttggaactattaccgcattgtggcacgttacgagaatactcttgccgcacagttttttggccatacgcacgtcgacgagttcgaagtcttttacgatgaggaaaccctctcgagacctctcgctgtggcctttctcgcaccttcagctactacttatattgggctgaatccaggctatagagtctaccagattgacggcaattactcaggtagtagtcatgtggttctggatcatgagacctacatactcaacctgactcaggcgaatattccaggcgccattcctcactggcaactgttgtacagagctcgggagacgtacgggctcccaaataccctgcctacagcatggcacaaccttgtctaccgaatgcggggggacatgcagctcttccagacattttggtttctctatcataaaggccatccaccatctgagccttgcggaacgccctgtcggcttgccactctgtgcgcccagcttagtgctcgcgcggattcccccgcgctctgccgacacctcatgcctgatgggagtttgcctgaagcccagagtctgtggccaaggcctctgttttgc

SEQ ID NO: 19715 - DNA, 1893 bp, synthetic construct
  misc_feature 1..1893: note = source = /note="Description of Artificial Sequence: Synthetic coding sequence"
  source 1..1893: mol_type = other DNA
atgccaaggtacggagcttcactgagacagagttgcccgaggagtggccgggagcaggggcaagacggaacagcaggcgcacctggccttctttggatgggcctagtgctggctctggctttagctctggccctggcattggccctcagcgatagcagggtattgtgggcaccagctgaagctcatccactatcccctcagggccatcccgccagactccaccgaatcgtcccccgtcttcgagatgtgtttggttggggtaacttaacttgtcctatctgtaagggtctctttaccgccattaacctggggctcaaaaaggaacccaacgtcgcccgtgtggggtcagtagccataaaactgtgcaacctactcaaaattgcgccgcctgcagtgtgtcaatctattgtgcatctgttcgaggacgacatggttgaagtctggagaagatctgttctgagcccgagcgaggcttgcggtctgctgctaggctccacctgcgggcactgggacatattcagttcatggaacatctcgctccctacagtaccgaagccccctcccaaaccaccatctcccccagcacccggggcacctgtctctaggatactgttccttactgacttgcattgggatcatgattatttggaaggaacagaccccgactgtgctgacccactgtgctgccgaagaggctcaggcctgccgcctgcatcccgtcctggtgcaggttattggggggagtacagtaaatgcgatctccctcttagaacgctggagtccctcctgtctgggctggggcccgctggtccatttgacatggtttattggacaggcgacatccctgctcatgacgtgtggcatcagactcggcaggaccaactacgagccttgactaccgtgacagcactggtgcggaagttcctgggccctgtgcctgtttacccggcagtgggtaatcacgagagtacaccggtgaattccttcccgcctccctttatagagggtaaccacagttcacgatggctttatgaagcgatggccaaggcttgggagccctggctgccagcagaggctttaaggacattacgaatcgggggcttttatgcgctctctccatatcctggccttcgtctgatcagccttaatatgaatttctgctccagagagaacttctggcttctaataaactccaccgatccagccgggcaacttcagtggttggtgggcgagttgcaggccgcggaggacaggggcgataaagtccatatcattggccatatccctcctgggcactgcctgaagtcctggagctggaactattatagaattgtggcacgttatgaaaacactctggccgcccagttcttcggccatacccacgtcgacgaattcgaagtcttctacgatgaagaaaccctgtcacggcccctggccgtcgcattcttggctccatctgcaacaacttacatcggactgaaccctggataccgcgtctaccagatcgacggcaattactccgggtcgtcccatgtggttctggatcacgagacttatatactgaatctgacacaggctaatattccgggagccatccctcactggcagctcttgtaccgagctcgggagacctatggcctgccgaataccttaccaactgcatggcataatctcgtttaccggatgagaggcgatatgcagctgtttcagactttctggtttctataccataagggccaccctccttccgaaccatgtgggaccccttgtaggctggccacgctatgcgcacagctgagcgctcgagccgactcaccagctctctgccggcatctgatgcccgatgggtctctcccagaggctcagtctctgtggccccggccgctcttctgc

SEQ ID NO: 19716 - DNA, 1893 bp, synthetic construct
  misc_feature 1..1893: note = source = /note="Description of Artificial Sequence: Synthetic coding sequence"
  source 1..1893: mol_type = other DNA
atgcctcgttatggagcatctcttcggcaatcgtgcccgaggagcggcagagaacagggccaagacgggaccgcgggagcgccgggattattgtggatgggacttgtattagctcttgccttagcgttggctctcgcactcgcccttagcgatagccgtgtgctgtgggctcctgctgaggctcatcctttgtcccctcagggtcacccggcccggttgcatagaatcgtgcccagactgcgtgatgtcttcggctggggtaatttaacctgcccgatctgcaaaggtttgttcaccgccattaatttgggccttaaaaaggaacctaatgtggccagagttggaagtgttgcgatcaaactatgtaatctgctgaaaattgcaccaccggcggtctgccaaagcattgtacacttatttgaagatgacatggtcgaggtttggcgtaggtctgtcttatccccgtctgaagcgtgcggactgttactcggaagtacatgtggccattgggatatattttcttcctggaatatttcgcttccgacggttccgaaaccgccgccaaaaccgccgtccccgcctgcaccaggcgcacctgtcagcaggatacttttccttacggaccttcattgggatcatgactatctcgaaggcactgatcctgactgtgctgatcccctgtgttgcagacgtggctcaggtttaccgccggcttcgcggcctggagcgggctattggggcgaatattccaaatgcgacctgcccctgcgtaccttggaaagccttctctccgggctgggtccagccggaccgttcgatatggtctactggacgggcgatatccctgcacatgacgtgtggcatcagacccgtcaagaccagctgcgggccttaacaactgtgactgcccttgtgcgtaaatttttgggaccggtaccagtatacccggcggtgggcaaccatgaatctaccccggtgaactcttttcctcccccgttcatagagggcaatcattccagccgctggctttatgaagcgatggctaaggcttgggaaccatggttgccggctgaggcactgcggacgctgagaattggcggattctacgcactcagtccttatcctgggctgcggcttatttctctcaatatgaacttttgttcccgggaaaatttctggttgctgatcaacagcacagatccggctggccaattacaatggcttgtaggcgagttgcaggccgcagaagatcgcggcgataaggtacatattatcggccacatacccccaggtcattgtcttaaatcatggtcatggaactattatcggatagttgctcgttatgaaaacacactggcagcacaattctttggacacacacatgtcgatgaatttgaagtgttctacgatgaagaaacgctgtccaggcctttggctgtcgcattcctggccccttcggcaactacatacattggtttgaatccgggctacagggtctaccaaattgacggaaactatagcgggtcatctcacgtagttcttgatcacgaaacttatattcttaaccttacgcaagcgaacattcctggagcaatcccgcactggcagcttctttatcgggcacgtgaaacttacgggttgccgaacaccttacctactgcttggcacaacttggtctatagaatgcgtggggacatgcaactattccaaactttctggtttttatatcacaaaggacacccaccgtccgagccatgtggcacaccgtgtagacttgctacattatgtgcccaacttagcgctcgagccgattcgcctgctctttgccggcatttaatgccggatggctctttgcccgaggctcagtcactttggccacgaccgttattctgc

SEQ ID NO: 19717 - DNA, 1893 bp, synthetic construct
  misc_feature 1..1893: note = source = /note="Description of Artificial Sequence: Synthetic coding sequence"
  source 1..1893: mol_type = other DNA
atgccccgatatggggcctctctccgccagtcatgtccacgctcaggacgagaacaggggcaagatggcacagcgggcgctcctgggctgctgtggatgggactagtcctggccttagcattggccctggctttggctttggctctgtcggacagcagggtgctttgggcccccgcagaggctcaccccctgagccctcagggccaccccgcccgccttcatcggattgttccacgtctgagggatgtctttggatggggaaacctaacgtgtccaatttgtaagggcctttttactgcaataaacctcggacttaaaaaggagcctaacgtcgccagagtgggctcggtggccatcaagctctgtaatctgctgaaaattgcacctcccgcagtgtgccagagcatagtgcatttgttcgaggatgacatggtggaagtctggcggcgatcggtacttagccccagcgaggcgtgcggccttctgttgggttccacatgtggccactgggacatcttctcatcatggaacattagcctgccaaccgtgcccaagcctccgcctaaaccaccgagtcctccagcgcccggcgctcctgtgtctaggatcttgttccttactgacctgcactgggatcacgactatctggagggcacagacccagattgtgctgaccctctctgttgcaggcgcggaagcggcctgccccctgcctcaaggccgggcgctggttattggggagagtatagcaagtgcgaccttccgctgaggactttggagagccttctcagcggactaggacctgccggtccattcgatatggtatattggacaggcgatatccctgctcatgatgtgtggcatcagaccaggcaagaccaactgcgggcgttgaccacggtgaccgcgctggtgaggaagtttttaggtcctgtccctgtgtatccagccgtgggaaaccatgagagcacgcccgtgaattcttttcctcctcccttcatcgagggtaaccatagctctagatggctatatgaggccatggcaaaagcctgggaaccctggctgccggccgaagctctgaggacgcttcgcatagggggattctatgccctaagtccttaccccggcctgagattgatttcccttaatatgaacttttgcagccgagaaaatttttggcttctgataaattctacagaccccgctggtcagttacagtggctggtgggggaactccaagccgctgaagatagaggtgataaggtccacatcatcggacatattccgcccggtcattgtcttaaatcctggtcttggaactactaccgtattgtggccaggtacgaaaacactctcgctgcacaattcttcggacatacccatgtggatgaatttgaggttttttacgatgaggaaactctgagcagacccctggctgtggccttcctagccccctcagccaccacttacattggcctgaacccggggtaccgagtgtaccagattgacggtaattactcaggtagtagccacgtggtgctggatcatgagacttatatcttgaacctcacccaggccaacattcctggagcaatcccccactggcagctcttgtacagagctagggagacttatggcctaccgaatacgctgcctaccgcttggcataacttggtgtataggatgcggggtgacatgcagctcttccagaccttttggttcctttatcataaaggccacccgccatccgagccttgcgggacaccatgtagactcgctaccctgtgcgcccaactgagcgcaagagcagacagccccgcactgtgcaggcatctgatgcccgatggaagcctgcccgaagctcaaagcctctggccaaggcccttgttttgt

SEQ ID NO: 19718 - DNA, 1893 bp, synthetic construct
  misc_feature 1..1893: note = source = /note="Description of Artificial Sequence: Synthetic coding sequence"
  source 1..1893: mol_type = other DNA
atgccacgatatggcgcgtctctgcggcagtcttgccctagatcggggcgcgaacaaggtcaagatggaacagccggtgctcctggtctcctctggatggggctggtgctcgcccttgctcttgcgctggctctggccctcgctctttccgattcaagggtcctctgggccccagccgaggcccatccactgtcaccgcagggacaccccgcccgtctgcaccggattgttccccgactgagagacgtgttcggatggggaaatctcacttgcccaatttgcaagggactgttcaccgccatcaatctcggcctgaagaaagagccaaatgttgccagggtgggaagtgtcgccattaaactgtgtaatcttctaaaaattgctcctccagccgtctgtcagtcaatagtgcatctgtttgaagacgacatggtggaggtttggagacggtctgtgctgtcaccttctgaggcttgtgggctgctactgggtagtacttgtgggcattgggatatttttagttcttggaatattagtttgccgactgtgcccaagccccctcctaagcctccaagcccccccgccccaggtgcacctgtgagccgaatactgtttctaacggacctgcactgggatcatgactatttggaaggtacagaccctgactgtgcggatccactgtgttgtcgacgaggttccgggctgccaccggcatctcgaccgggagccggatactggggtgagtactcaaaatgtgacctaccgttgcgcactctggagtctctgctctcggggcttggcccagctggacctttcgatatggtctactggaccggagacattcccgcccacgacgtctggcaccagacaagacaagaccagttgcgagctctcacaacagtaacagccctggtgagaaagtttctgggtcctgttccggtctatcccgctgtcggaaaccatgagtcaactccagtgaatagcttcccccctcccttcatcgaggggaatcacagttctaggtggctgtatgaggccatggccaaggcttgggaaccatggctgccggcggaagccctgcgcacgctccggattggggggttttatgctctgtcaccttaccccggattgcggctgatcagcctcaatatgaacttctgcagcagggagaacttctggttgttgatcaattctacagatccagcaggccagttgcagtggttggtaggggaattgcaggctgccgaagacagaggggataaggtgcacataatcgggcacatccctcctgggcactgcctcaaatcgtggagctggaattactatcggatagtcgcgcgatacgagaacacgctggccgcccagtttttcggccatacccatgtagacgagtttgaggtcttttacgacgaggagaccctgagccggcctctggctgttgccttcttagccccatctgccacgacctacattgggcttaacccaggctatagagtgtatcaaattgatggcaattactccgggtctagccacgtggtgctggatcatgaaacctatatactgaatctgactcaggctaatattcccggagctattccgcattggcaactgttgtacagagcccgcgaaacttatgggctgcctaacacacttcctactgcttggcataatctcgtgtacagaatgcgcggggatatgcagctgtttcaaaccttctggtttctgtatcataaagggcatccgccttcggaaccttgtggtaccccatgtagattagcaactctttgcgcacagctctcagctagagccgatagcccagctttgtgcagacatcttatgcctgatgggagcctccccgaagcccagtcactatggcctcgcccccttttctgc

SEQ ID NO: 19719 - DNA, 1893 bp, synthetic construct
  misc_feature 1..1893: note = source = /note="Description of Artificial Sequence: Synthetic coding sequence"
  source 1..1893: mol_type = other DNA
atgccacgctacggcgctagccttaggcagtcatgtccaaggagtggacgtgaacagggacaggatggaacagcgggagctcccggacttctctggatgggacttgtgcttgccctcgctcttgcgttagcacttgcactcgctctgagcgattccagagtcctttgggctcctgcagaggcacacccgctgtccccgcaaggacatcctgctcgcctccaccggatagtgccccggcttcgggacgtcttcggatggggaaatttaacctgcccaatctgtaaaggattgttcaccgccatcaaccttggattaaaaaaggaaccaaacgtggccagagtgggatctgtggccatcaaattatgcaacctgctgaagatcgcccctccagctgtgtgtcagtcgatcgtgcaccttttcgaagatgacatggtcgaggtttggaggcggtccgtactttccccatccgaggcatgcggcttgttactgggctccacatgcgggcattgggatatcttcagctcttggaacatttccttgcctactgtccccaaaccacctccaaagccaccctctccacctgcacctggagcccccgtcagcagaatcctgttcttgacagatctccactgggaccacgattacctcgagggaacggatcctgactgtgccgacccattgtgctgtaggcgggggtcaggactgccaccagcgagccgcccaggcgctggatactggggcgagtacagcaaatgcgatttgccactcagaaccctcgaaagcctgctctctgggctgggacctgctggaccgtttgacatggtatactggaccggcgatatccccgcccacgatgtgtggcaccagaccagacaagatcagctcagagccctcactaccgtgacagctctggttcggaaattcctgggccctgttcccgtgtatcccgcagtgggaaatcatgagtcaacccctgttaacagtttccctcccccgtttatcgagggcaaccattcttcaaggtggttatacgaagctatggctaaagcttgggaaccctggttgcccgcagaagcccttcggacactgaggataggaggtttctatgcacttagtccatacccaggacttaggctgatcagcctgaacatgaacttctgctcaagagaaaatttctggctgcttataaactctaccgacccggcgggccagttgcagtggcttgtaggcgagctgcaggctgctgaggaccggggagataaggtccacatcataggccacatccctcctggacactgtctcaagagttggagttggaattactacaggattgtggcacggtacgagaacaccctcgcagcgcagttcttcggtcatactcatgtggacgagttcgaagtcttctacgacgaggagaccttgtcacgcccgctggctgttgctttcctggccccctctgcaacgacatacatcggtttgaacccggggtacagagtgtatcagattgacgggaactatagcgggagttctcatgttgttctggatcatgagacttatatactaaacttgacccaggctaatatccctggcgctatcccccactggcaactgctctacagagctagggagacctacggcctgccaaacactctacccacagcgtggcacaatctcgtatacagaatgcgcggagacatgcagctttttcaaactttttggttcctttatcacaagggccatccgccaagcgagccatgcggaacaccctgccgtctggctactttgtgtgctcaactgagcgcaagagctgatagcccagccctttgccgccacctgatgcctgacggcagcctgcccgaggcccagtcactttggcccagaccactgttctgt

SEQ ID NO: 19720 - DNA, 1893 bp, synthetic construct
  misc_feature 1..1893: note = source = /note="Description of Artificial Sequence: Synthetic coding sequence"
  source 1..1893: mol_type = other DNA
atgccacggtatggagcatctctccgccagtcttgcccacgctccggccgcgagcagggacaggatggtaccgctggcgctcctggtctcctttggatgggcctcgttctcgctttagccctggcattggcccttgcgctggcactgtctgatagccgggtgctgtgggcaccagccgaggcccacccgctaagtccacaaggacatccggcccgcctgcatcgaatagtgcccaggctccgggatgtctttggttgggggaacctgacttgtccgatctgtaaaggccttttcacggctattaacctcggtctgaagaaagaacccaacgtggccagagttggatcggttgccatcaagctttgcaatttactgaaaatcgctcctccagcagtttgccagagtattgtgcatttattcgaagatgacatggtggaggtttggcgaagatccgtgctgtccccttccgaggcttgcggtttgctgctgggctcgacctgtggacactgggatatattttcgagttggaacatttcactcccgaccgttcccaaacctccccccaagcctccctcacccccggccccaggcgctcccgtttctcgcattcttttccttactgacttacattgggatcacgactatctcgaaggcaccgatccggattgtgcggatcctttatgctgcagacggggtagtgggctgcccccggcttcccggccaggagctggttactggggcgaatatagcaagtgcgatctccccctgagaacactagagtcgcttctttccgggctgggccccgcagggcccttcgacatggtgtactggacaggtgacatccctgcacatgacgtgtggcaccagacccggcaggaccagctaagggcccttactacagtaactgccctggtgagaaagttccttggtcccgtgcccgtttatcctgcggtgggcaaccatgaatcgacgccagttaactcttttcctccacccttcattgagggcaaccacagcagccgatggttgtacgaggctatggccaaagcctgggagccctggctgcccgccgaggccttaaggacattgcggattggcggattttatgccctcagtccttatccaggcctccggctgataagtctgaacatgaatttttgtagccgagaaaacttttggctcttgatcaatagcaccgacccagctgggcagttgcagtggttggtcggtgaactccaagctgccgaagataggggcgataaggtgcacataataggacacatacctcccggacattgtctgaagtcttggagttggaactattatcgaattgttgccagatatgaaaacacgctcgccgctcagtttttcggtcacactcacgtggatgagtttgaagtattttacgacgaagaaaccttgtctcgcccccttgcagtggcatttttagctccttctgccaccacctatattggactgaatccaggataccgggtgtaccagatagatggcaactattctggcagcagtcatgtggttctggatcatgagacgtacattctaaatttgacacaggcgaatatcccaggagcaataccgcactggcagctgctttatcgggcccgcgagacatatggactgcctaacaccctccctacagcctggcacaacctggtgtatcggatgaggggagacatgcagctgttccagactttttggttcctatatcataaaggccatcccccttcggaaccatgtggaacgccgtgcaggctggccactctttgtgctcaactctccgccagagccgactctcccgccctgtgtagacatctaatgccagacggatccctccccgaggcacaatccctctggcctcggcccctgttttgt

SEQ ID NO: 19721 - DNA, 1893 bp, synthetic construct
  misc_feature 1..1893: note = source = /note="Description of Artificial Sequence: Synthetic coding sequence"
  source 1..1893: mol_type = other DNA
atgccacgctacggagcttcgcttcgccaatcctgtccccgctccggacgtgagcaagggcaggacgggacggcaggcgcaccaggtctgctgtggatgggtcttgtgctggcgcttgcattggctctggccctggctctggcactttcggattcgcgagtcctgtgggcccctgcagaggcccatcctttgagcccacaaggtcatccagcccgccttcatcgcatcgtgcccagactgagagatgtctttggatggggcaacctgacgtgtccaatatgcaaggggcttttcactgccattaaccttggactgaagaaggagccaaatgtcgcccgtgtgggtagcgtggcgataaagctgtgtaatctgctgaagatcgcgccgcccgcggtctgtcaatcaatcgtgcaccttttcgaagatgacatggtggaagtgtggaggcgctcagtgctttccccttcggaagcatgtggcctccttttgggcagcacctgcggacactgggacattttcagctcctggaacatttctcttccaacggtgccaaagcctccccctaagccaccatcacctccggcacctggggcacccgtgtcacgcattctgtttctcactgacctgcattgggatcatgattaccttgaaggtactgacccggattgcgcagatccactgtgttgcagaagaggatcaggcctcccacctgcatcacgacctggagcaggatactggggggaatactccaagtgcgatctccccctgcgtaccttggaatccctcctttcgggacttggtcctgccggcccgttcgacatggtgtactggactggagatatacccgcacatgacgtgtggcatcaaactcggcaagatcaacttagagcattgaccactgtgaccgccctcgtgaggaaattcctcggacccgtgccagtttaccctgcagtgggaaatcacgaatccactcctgttaattcattccctccaccgtttattgaaggaaaccattcctccagatggctttacgaagcaatggcaaaggcatgggaaccatggctgcctgctgaggccttgcggaccctgcgaattggcggtttttacgccctttcgccctacccgggacttcgtcttatctcccttaacatgaacttttgtagccgtgagaacttttggcttttgatcaattcgaccgaccctgccgggcaactgcaatggcttgtgggagaacttcaagccgcagaagatcgaggtgataaggtccatatcatcggccatatcccaccgggacactgcctgaaaagctggagctggaattactaccggattgttgcaagatacgagaacactcttgcagcacagtttttcggtcatacccatgtggatgaattcgaagtgttctacgatgaggagacgctctcgcgcccgcttgcagtggcatttctggcgccttcagcaactacttacatcgggctcaatcctggttaccgcgtgtaccaaattgatggtaactactcaggttcgagccatgtggtgctcgatcatgagacttacattctgaaccttactcaggcaaatatcccaggggcaatacctcactggcagctgctgtacagagcaagagaaacctacggacttccgaacactctgcctactgcgtggcacaatctcgtttacaggatgcggggtgatatgcagctttttcaaaccttctggtttctgtaccataaagggcaccctccaagcgaaccttgcggaaccccttgtcggctggcaactctgtgcgcgcaacttagtgcgagagcagacagccccgcgctttgccgccatctcatgcctgacggatccctcccagaagcacaatcgctttggccaagacctctcttctgc

SEQ ID NO: 19722 - DNA, 1893 bp, synthetic construct
  misc_feature 1..1893: note = source = /note="Description of Artificial Sequence: Synthetic coding sequence"
  source 1..1893: mol_type = other DNA
atgcctcgatatggcgcctccctcaggcagagctgcccacgaagtggtcgcgagcaagggcaggacggcaccgccggagcccccggattattatggatgggcctggtactggcgctggccttggcgttggcactggctctggccttgagcgactcccgggtcctttgggccccagccgaagcccacccgctgagcccacagggccaccctgctagactacatagaattgttccgcggctgcgagatgtctttgggtggggaaatctcacgtgtccgatctgcaaaggcctcttcaccgctatcaacctgggcttgaaaaaggagcctaatgtggcccgagtagggtcagttgccatcaaactctgtaacttgcttaaaatagctccgcccgccgtttgccagtcgatcgtgcacttgttcgaagacgatatggtcgaggtttggcgacgaagcgtccttagcccgtccgaggcatgtggactgttgctggggtccacctgtggccactgggatatcttttcttcttggaacatatctctgccgacagtgcccaagccaccccccaaacctccctctcccccggcacccggtgcccccgtcagtagaattctgtttctgaccgacttacactgggaccacgactatcttgaaggaacagacccagattgcgctgatcctttatgttgccggaggggctccggcctgccacccgcaagcagaccaggtgcgggctactggggagagtactccaaatgtgacctccctctgcgcacccttgaaagcctcttgagtggattaggccccgccggaccatttgatatggtgtactggacaggagacatcccagcacatgatgtctggcaccaaacacgccaggatcagctgcgggccctcactacagtcaccgccttggtgcgcaaatttctcggtccagttccggtgtatcctgctgttgggaatcacgagtcgactccagtgaactcgtttccaccgcccttcatagagggcaaccattcgtcaaggtggctttatgaagccatggctaaggcttgggaaccctggctacccgcagaggccctgagaaccctgaggatcggaggcttctacgcgctctccccatatcccgggctgcgactgatctctctgaatatgaatttctgttcgagggagaatttctggctgcttatcaatagcaccgatccagccggacagctgcaatggctcgtgggagaattgcaggccgctgaagatcgcggagacaaggttcacatcattggccacatccctcccgggcactgcctgaaatcctggtcctggaattattacagaatagtggcccggtatgagaatacactggccgcacagttcttcggtcacacgcatgtggatgagtttgaagtgttctacgacgaggagaccctgtccaggcctttagccgtggcttttcttgcacccagtgccaccacttacataggcctgaaccccgggtatcgggtctaccagattgatggtaactatagcggaagcagtcacgtggtgctagaccatgaaacctatatccttaatttgacccaggccaacatccccggcgccatcccacactggcagctgctttatcgcgcccgcgagacctacggcctgccaaacaccttacccacagcctggcacaaccttgtgtatcgaatgcgcggagacatgcagttgtttcagacattttggtttctgtatcacaaagggcatcccccttccgaaccttgcggaactccatgtagattggccaccctgtgtgctcagctgtcggctcgggccgacagtcccgctctctgtcgacacctcatgcccgatgggagcttgcccgaagcccaatccctctggcctaggcccttgttctgc

SEQ ID NO: 19723 - DNA, 1893 bp, synthetic construct
  misc_feature 1..1893: note = source = /note="Description of Artificial Sequence: Synthetic coding sequence"
  source 1..1893: mol_type = other DNA
atgccacgctacggcgcaagtctccgccagtcttgtcccagaagcggtcgggagcaaggccaggatggaacagcgggcgctcccggtttgttgtggatggggctggttctggccctcgccctggcactcgcattggcccttgcgctgtcagactcacgcgtgctgtgggccccagcggaggcgcatcctctgagtccccaaggtcatccagctagattgcaccggatcgtcccacgcctcagggatgtcttcggctgggggaacttgacctgccctatctgcaaggggctttttactgcgattaatctgggactgaaaaaggagcccaacgtagcccgagtggggtcagtcgccatcaagttgtgcaacctgctcaaaatcgccccccccgcagtctgccagagcattgttcacctgttcgaagatgacatggtcgaggtgtggagacgaagtgtgcttagcccctctgaagcctgtgggctgcttctcgggtccacatgtggccactgggacatatttagctcatggaacatttcacttcccacagtgccaaaaccaccgccaaagcctccttcaccgcctgctccaggcgcccccgtctctagaatcctgtttttgaccgatctccattgggatcatgactacctggagggaactgacccagattgcgctgatcctctctgttgtcggcggggttctggtctcccgccagcctccaggcccggcgccggctattggggggaatatagcaaatgtgatctccctcttcgcaccctggagtctcttctcagcggacttggacctgctggccctttcgacatggtgtattggaccggtgacatccctgcccatgatgtttggcatcagacccggcaagatcagcttcgggccctcaccacagtgactgcccttgttaggaagttcctgggccccgtgcccgtctacccggccgttggcaaccatgagagtacccccgtcaattccttcccgcctcctttcatcgaagggaatcattccagtcgatggctctatgaagctatggccaaagcttgggaaccctggctgcccgctgaggcactgaggaccttgagaatcggcgggttttacgcactgtctccatatccaggtctgcgactgatcagtctgaatatgaatttctgctccagggagaacttttggttgctcatcaatagcaccgatcccgccggacagctgcaatggctggtgggagagttgcaggctgccgaggatcggggggataaagtccacataatcggccacatacctcctgggcattgtctgaagtcttggtcttggaactattaccgaatcgtggcccggtatgagaacaccctggccgcccagttttttgggcacacgcacgtggatgagttcgaagtgttctacgacgaggaaactctctcacgacccctggctgtggccttcttggccccttcagctactacctacatcggtcttaatccaggctatcgggtgtaccaaattgatgggaattattccggctcttcccacgtcgtcctcgatcacgaaacgtacatccttaacctgacccaggccaacatcccaggagccatcccccattggcagctgctttacagagctcgagaaacctacggtctgcctaatacactcccaaccgcgtggcacaatctggtataccggatgcggggcgacatgcagctctttcagaccttctggtttttgtatcacaagggacaccccccatccgagccctgtgggacgccctgtcgcttggccacactgtgcgcccagctcagtgcccgggctgatagccctgccctttgccggcatctcatgcctgacgggtcactgcccgaagcccagagcctgtggccacgaccgcttttctgc

SEQ ID NO: 19724 - DNA, 1893 bp, synthetic construct
  misc_feature 1..1893: note = source = /note="Description of Artificial Sequence: Synthetic coding sequence"
  source 1..1893: mol_type = other DNA
atgcctagatacggcgcgtcactgcggcaaagctgcccacgctcaggacgcgagcaaggacaggacggtactgcaggcgccccaggtctgctctggatgggactggtcctggccctcgctttggcgctcgcgctcgccctggccctcagcgatagccgggtgctgtgggccccggcggaggcgcaccctctgtccccgcaggggcatccggcgcgccttcaccggattgtcccgcggttgcgagatgtctttggatggggaaacctcacctgtcctatatgcaagggcctctttaccgcaatcaacctggggctcaagaaggaaccaaatgtggcaagagtgggatcagtcgcgatcaagctgtgtaatctgctgaagatcgcaccgccagccgtgtgccaaagcatcgtccatctgtttgaggacgatatggtggaggtctggcggcgctctgtgcttagcccttccgaagcgtgcggattgctgctgggaagtacttgcggacactgggatatcttctcgtcatggaatatctcactgcccactgtaccaaagccgccacctaagccgccgtcgccgccggcccccggcgcccctgtgtcaagaatcctgttcctgaccgacctccattgggatcacgattacctggagggcacggatcctgactgcgcggaccctctgtgttgcagacgagggtccggactcccaccagcttcaagaccgggtgctggctactggggtgaatactcaaaatgtgatttgccgctgcgcacccttgaaagcctgctttccggactcggacctgcaggaccattcgatatggtgtactggaccggggacatcccggctcatgacgtctggcaccagaccagacaagatcagctgcgggccttgacgacggtgaccgctctggtgagaaagttcctcggtcctgtgcccgtgtacccagcagtgggtaaccacgaaagcaccccagtgaactccttcccgccgccgttcattgagggaaaccactccagcagatggctgtacgaagcgatggctaaagcctgggagccctggctcccggccgaggctctccgcactcttcggatcggtgggttctacgctctgtccccgtaccccggactgaggctgatctcgctgaatatgaatttctgttcacgggaaaacttctggcttctgattaactcaaccgacccggccggccagcttcaatggctggttggggaacttcaagcagcagaagataggggagacaaagtgcacattatcggacacatcccaccgggacactgcttgaagtcgtggtcatggaactactaccggatagtggccaggtacgagaacaccttggcggcacagttctttggacacactcatgtcgacgaattcgaagtgttctacgatgaagaaactctgagccgcccattggccgtggcgttcctggcgccgtccgccaccacctacatcggactgaacccgggataccgggtgtaccaaatcgatggaaattactccggatcatcgcacgtggtgctcgaccacgaaacctacattctcaatctcactcaagctaatatcccaggagccatcccccattggcaactgctgtacagagcgcgcgaaacgtacgggttgccaaatactcttccgactgcctggcacaacctggtgtatcggatgagaggagatatgcaactgtttcagactttttggttcctgtatcacaaaggacacccgccatcggaaccgtgcggaaccccatgccgcctcgccaccctgtgtgcacaactgtcagcccgggcggactcccccgccctttgcaggcaccttatgccagatggtagcctccctgaagctcagagcctctggccgcggccgctcttttgc

SEQ ID NO: 19725 - DNA, 1893 bp, synthetic construct
  misc_feature 1..1893: note = source = /note="Description of Artificial Sequence: Synthetic coding sequence"
  source 1..1893: mol_type = other DNA
atgcctcgctatggcgcgtcactgcgccagtcctgtcctcgttccgggagagaacagggacaggacggaacggcgggcgccccgggtctcctttggatgggcttggtgctggctttagcgcttgcacttgccttggcactcgctctgagtgattcaagggtactttgggcccccgctgaagctcacccactgagccctcaggggcaccctgcacgcctgcataggatcgtgccccgattgagagatgtgtttggatggggcaatctgacatgccctatttgcaagggtctttttactgctatcaacctaggactgaaaaaagagccaaacgtagctcgggtggggagcgtcgcaatcaaactatgtaatcttcttaagatcgcccccccagcggtctgtcagtcaattgtgcacctttttgaggacgacatggtggaggtatggaggcggtctgtgttgtcaccttctgaggcatgtggcctgttactgggctccacctgcggtcattgggatatttttagttcctggaacatctctcttcctaccgtgcctaaaccccctccgaaacccccgagcccaccggcccctggagctccagtgtccagaatcctgtttctgaccgacttgcactgggaccatgactacctcgaaggcaccgatccagactgcgctgatccactttgctgtcggcggggatccggtctgccacccgcctctaggcccggcgccggttattggggcgaatactctaaatgcgacctgcccctgcgtacccttgaaagtcttctcagtggactagggcctgccggtccgttcgatatggtctattggacaggcgatattcctgcccatgatgtgtggcaccagacccgccaagatcagttgagagctctgacaaccgtgactgctctggtccgaaaatttctcgggcccgtgccggtgtaccccgccgtaggtaaccatgaaagcacccccgtgaactcctttccacctcccttcattgaaggaaaccatagtagtaggtggctttatgaggccatggctaaggcctgggagccctggctgccggctgaagccctcagaaccctgcgcatcggagggttttatgccctctctccttaccccggtctgagattgatatcacttaacatgaacttctgcagccgggagaacttttggcttctcataaacagcacagaccccgctggtcagctccagtggttggtaggagaactccaggccgccgaagatcggggagacaaagtacatataatcgggcacatccctccaggacattgcttgaaaagctggtcttggaattattaccggatcgtcgctcgctacgaaaatacgttggccgcccagttcttcggacatacccatgtggatgaattcgaggtgttttacgacgaagagactctctccagacccttggccgtggcatttctggctcccagtgccaccacgtacataggactcaaccctggctatagagtttatcagattgatggcaattatagtggttcatcccatgtggtcctggaccacgagacgtatatcttaaacctgactcaggccaacatcccaggagctatcccacattggcagctactgtaccgggcacgcgaaacgtacgggctgccaaatacgctgcccaccgcctggcacaatctagtgtatcgcatgcgcggtgatatgcagctgtttcaaacattctggtttttgtatcacaaggggcaccctccttctgaaccatgcggtacaccctgcaggctcgctaccctgtgtgcacaattatctgcccgcgccgatagtcctgctctgtgccgtcacttgatgcccgacgggtccctgcctgaagcccagagcctatggccccggcccctgttctgc

SEQ ID NO: 19726 - DNA, 1893 bp, synthetic construct
  misc_feature 1..1893: note = source = /note="Description of Artificial Sequence: Synthetic coding sequence"
  source 1..1893: mol_type = other DNA
atgccgcggtacggcgcttcgctgcgccaatcctgcccacgctccggacgggagcaaggccaggacggaaccgccggagctcccggactcctttggatgggactcgtgctggcgcttgctctggccctcgctcttgctcttgccctctcggattcgagagtgttgtgggcgcccgcagaagcgcacccgttgagcccgcagggccacccagcacggctgcacaggatcgtgccgcgcctgagagacgtgtttggctgggggaacctcacttgcccgatttgcaagggactgttcactgcaatcaacctgggcctcaagaaagaacccaatgtggcccgcgtggggtccgtcgccatcaaactgtgcaacctgctcaaaatcgccccaccggccgtgtgccagagcattgtccacctgtttgaggatgacatggtggaagtgtggcggcggtccgtgctgagcccgagcgaagcatgcggactcctgctgggatccacttgcggacactgggatatcttctcgtcgtggaacatttccctccctacggtgccaaaaccaccacctaaacccccttccccgccggccccgggtgcaccggtgagcaggattctcttccttacggacctccactgggatcacgactacctggaggggaccgaccctgactgcgccgatcctctgtgttgccggagaggatccggactgccccctgcgtcccggcctggagcaggttactggggagaatactcgaagtgtgatctcccccttcggaccctggaatccttgctgagcggattgggacccgcgggcccgttcgatatggtgtactggaccggcgatatccctgctcacgacgtctggcaccagactagacaggaccaactccgggcgctgaccaccgtcaccgcacttgtgcgaaagtttctcggtccagtaccggtgtacccggccgtgggcaatcacgagtcaacgcccgtcaattccttcccgccaccgttcatcgagggtaaccactcctcgcgctggctgtacgaggcaatggccaaggcttgggagccgtggctcccagccgaagccctcagaactctccggattgggggcttctacgcactgtcaccataccctggcctgcgattgatctctctgaacatgaacttttgcagcagagagaacttctggctgctgatcaacagcaccgacccagcagggcagctgcaatggctggtgggagagttgcaggcggcggaggatcgcggagataaggtccatatcatcggccatatcccaccaggacactgcctgaaaagttggtcgtggaattactaccgcattgtggcccgctacgagaatactctcgcggcccagttcttcggacacacgcacgtggacgaattcgaagtgttttacgatgaggaaactctgagccgcccactggctgttgcgtttctcgctccttcagcgaccacttacattggcctcaaccctggatacagggtgtaccaaatcgatggcaactattcgggaagctcccatgtggtgctcgaccacgaaacctacatcctgaatctgacccaagccaatatcccaggtgcaatcccgcattggcagctcctgtaccgcgcccgtgaaacctacggactcccaaacactcttccaaccgcgtggcacaacttggtctaccgcatgcggggagatatgcagctcttccagaccttctggttcctgtaccacaaagggcacccaccgtcggagccctgcggcaccccatgtcggttggccactctgtgcgctcagttgagcgcacgcgccgactcgcctgccctctgccggcatctcatgccggatggaagcctgcctgaagcccaatcgctgtggccaagacctctgttttgt

SEQ ID NO: 19727 - DNA, 1893 bp, synthetic construct
  misc_feature 1..1893: note = source = /note="Description of Artificial Sequence: Synthetic coding sequence"
  source 1..1893: mol_type = other DNA
atgccccggtacggggcctccctacgccagtcttgcccacgcagtggtcgggaacaaggccaggatggaaccgctggggcaccaggacttctgtggatgggactggtactggctctggcactagctctggccttagcgctggccctgagcgacagccgggtactctgggcccctgccgaggcccaccccctctccccgcagggccacccggcaagacttcaccggattgtgcctaggcttcgggatgtgtttggctggggtaacctcacttgccctatctgcaaaggtcttttcaccgctattaacctgggcctgaagaaggagccaaacgtcgcaagggtcgggtccgtggccattaaactctgcaatctgcttaaaatcgctcctccagcagtctgccagtcaatagtgcacctatttgaagacgatatggtagaggtgtggagaaggtcagtcctgagcccttctgaggcatgcggcttattgctgggatccacctgtgggcactgggatattttctcctcttggaatataagcttgcctaccgtcccaaagcctcctcccaagccccccagtccccctgcgccaggcgcaccagtgtcgcggatcctgtttctgacggatctccactgggatcacgactacctggaggggactgaccctgattgtgccgaccccctgtgctgtcggcggggttccggacttccgcccgccagccgacccggcgcaggctattggggcgagtattcaaaatgtgatcttccacttcgaacgctggagagcctcctgtctggcctgggaccggccggccccttcgacatggtttactggaccggagacatccccgcccatgacgtgtggcatcagaccaggcaggaccaactgcgtgcattgacaaccgtcacagcccttgtgagaaagtttctcggacccgtgccagtatatcccgccgtaggcaaccacgaatctaccccagttaactcatttcccccgcctttcatcgagggaaatcatagtagccgctggctgtatgaggccatggctaaagcctgggagccctggctccccgccgaggccttgaggaccctgaggattggcgggttttacgctctctccccgtacccaggactaagactgatctccctgaacatgaacttctgctcgcgggagaatttttggctactgatcaacagtacagatccggccggtcaactgcagtggctcgtgggcgagctgcaggccgcagaggaccgcggcgataaagttcacatcatcggccacatcccgcccggtcactgcctcaagtcctggagttggaattactaccggatagtggcgagatacgagaacactctagccgcccagttttttgggcacacacacgtggatgagttcgaggtcttttatgacgaggaaacactctcacgccccctggcagtcgctttccttgctccatccgccaccacatacattggactcaaccctggctaccgcgtctatcagatcgatggaaactacagcgggtcctcacatgtggttttggaccacgagacttatattctgaatctgacccaggcgaacatccctggcgccatccctcattggcagctgctctatcgggctcgggagacctatggcctgccaaatacattgccaaccgcctggcacaatctggtttatagaatgcggggcgatatgcaactcttccagacgttctggttcctgtatcacaaagggcaccccccatcagagccatgcggtacaccttgtagacttgccacactatgtgcacagctttccgcccgcgcggacagccccgcactatgcagacatctgatgccagatggcagtctgcctgaggcccagtcactgtggcccagacctctcttctgt

SEQ ID NO: 19728 - DNA, 1893 bp, synthetic construct
  misc_feature 1..1893: note = source = /note="Description of Artificial Sequence: Synthetic coding sequence"
  source 1..1893: mol_type = other DNA
atgcccaggtatggagcatcattaaggcagtcatgcccaagatccggacgcgaacaggggcaggatggaacggctggagctcctggacttctatggatgggactagtgttggccttggcactcgctttggcccttgccttggcactttctgactctcgggttctgtgggctcccgccgaagcccacccacttagtccacagggacaccccgcaaggctccaccgaattgtccccaggctgcgggatgtctttgggtggggaaacttaacttgtcctatatgcaagggactctttactgctattaacttaggactcaaaaaagaaccaaacgtggctcgggtcgggtcagtagctattaaattatgtaatctcctgaagatcgcccctccagctgtctgtcaaagtatcgtgcatctttttgaggatgatatggtcgaagtctggagaaggtccgtactgagtccatctgaggcctgcgggttactgcttggatccacttgtgggcactgggatatattttcttcctggaacatttctttacctactgtcccaaaacccccacctaaaccaccttctccacctgcgcccggagcccccgtatctcggatcctattcctcacagatctccattgggatcacgattacctcgaaggaacagatccagattgtgcagatcccctgtgctgtaggcgcggaagtggactccctcctgcctctaggcctggagcaggatattggggggaatacagtaaatgtgatctgcctcttagaactctcgaatcgctgctgtcagggctggggcctgcaggacccttcgacatggtgtattggacaggagatatacctgcacatgatgtgtggcatcagacaagacaagatcagctgagggccttgacaacagtcacagctctggttaggaaatttctcggacccgtgccagtatatcccgccgtggggaaccacgagagtacaccagtgaatagtttcccgcctccttttatagaggggaaccatagttccagatggctctacgaggctatggcaaaagcttgggaaccttggcttccagccgaagctcttcgcacactaagaattgggggattctatgctctatctccctatcccggactgaggcttatctcattgaacatgaatttttgttcccgagaaaacttctggcttttgatcaattctactgaccccgctgggcagctccagtggctggtgggagagctccaggccgccgaggatagaggggacaaagtacatatcatagggcacattccccccggacactgtcttaaatcatggtcatggaattattatagaatcgtggccagatacgaaaatacactggcggcacaattctttggacatactcatgttgatgaattcgaagtgttttacgatgaagaaacattaagtcggccattagccgtggcgtttctagccccatcagcaacaacttacattgggctgaacccaggataccgggtgtatcagatcgatgggaattattccgggtcttctcatgtcgtgctggatcatgagacttatatcctaaatctcactcaggccaacattcccggagccatcccccattggcagctactctaccgggcccgagaaacttatggactacccaatactcttcccacagcttggcacaaccttgtttatagaatgaggggagatatgcagctcttccagactttctggtttctctaccacaaagggcatcccccctccgaaccatgcggaacaccatgccggcttgcaacactctgcgctcagctttcggctcgggccgattcaccagccctatgtaggcacctgatgcctgatggatcactgccagaagctcagtccctatggcctaggcctctattctgt

SEQ ID NO: 19729 - DNA, 1893 bp, synthetic construct
  misc_feature 1..1893: note = source = /note="Description of Artificial Sequence: Synthetic coding sequence"
  source 1..1893: mol_type = other DNA
atgcctcggtatggtgcctcgctgcggcaatcgtgtccaaggagcggtcgggagcaagggcaggacgggacggcaggtgcgcccggcctgttgtggatgggactcgtcctggccctggctcttgccctggctctagcattagcgctctccgactcgagagtcctgtgggcaccagcagaggcccatccattatcgcctcaggggcatcccgcaagattgcatcgaattgtgccccggctccgcgacgtcttcggatggggcaaccttacatgccctatctgcaaaggactgttcacagctatcaacctaggccttaaaaaggagcctaacgtggctagggttggttccgtggcaataaagctatgcaaccttctgaagatcgctccgccagcggtgtgtcaatctatagtccacttgtttgaggatgatatggtggaagtgtggagaaggtctgtgctctctccttctgaggcatgtggcctgctgctcgggtcaacatgtggtcactgggacatcttcagcagctggaatatatctctaccaactgtgcctaagcctccacctaagcccccgtcccccccagcccccggcgcgcctgttagccgaatcctgtttctgacagacctccactgggaccacgattacctggagggcactgaccctgattgtgccgatccgctgtgttgccgacgcggatccggccttcctccggcaagccggcccggagcgggctactggggagaatattcgaaatgcgacctccctcttaggaccctcgagtctctgctatctggccttggccccgctggaccgttcgatatggtgtactggactggcgatatacctgcacacgatgtgtggcatcagactagacaggatcagctcagagccctgactacagtgacggcccttgtgcggaagttcctggggcccgtgccagtctatcccgccgttggcaaccatgagtcaacccccgtgaattccttcccccccccctttattgagggaaaccactcctctcgctggctatatgaagctatggctaaggcctgggaaccatggcttccagcagaagcgcttagaaccctgcggattggaggtttttatgccctttccccctacccgggcctgcgtcttatatccctcaatatgaatttctgcagtcgcgaaaacttctggctcctcatcaactcgaccgacccggctgggcaactgcaatggcttgtgggggagcttcaagccgccgaggaccgcggcgataaggtgcacatcatcggacacattccccccggtcactgcctgaaatcttggagttggaactactaccgcattgtggctagatacgaaaataccctggccgcccagttcttcggccatacccatgtggatgagttcgaggttttttacgatgaggaaaccctgtcccgaccactcgccgtcgcttttcttgcaccttctgccaccacttatataggcctgaacccagggtaccgcgtctaccagatagacggtaattattccggatcctctcacgttgtcctggaccacgagacatatattctcaacctcactcaggctaacatccctggcgctataccccactggcagctgttgtatcgggccagagagacctacggcctcccaaatacactcccgactgcgtggcacaaccttgtctaccgaatgcggggtgatatgcagctgttccagacgttttggtttctctaccataaaggacacccaccgagcgagccttgcggcacaccctgtcgcttagcgacgctctgtgcacagctctctgctagagcggacagtcccgctttgtgtaggcacttaatgccagacggctcactcccggaagctcaatctctctggccaagacccctgttctgt

SEQ ID NO: 19730 - DNA, 1893 bp, synthetic construct
  misc_feature 1..1893: note = source = /note="Description of Artificial Sequence: Synthetic coding sequence"
  source 1..1893: mol_type = other DNA
atgcccagatacggcgcgtctctgcgccaaagctgcccgcgcagcggacgcgaacaaggtcaagatggcaccgccggagcgcccggactcctctggatggggctcgtcctcgcacttgccctcgcgctcgcactcgcgttggccctgtcagactccagggtcctctgggcaccagccgaggcccacccactttccccacagggtcatccagccagacttcaccgcatcgttccacggctgagagacgtgttcggatggggaaacctgacctgccctatctgtaaaggcctgttcactgcgatcaacctcggcttgaagaaggaaccaaatgtggcgagggtgggatcggtggccatcaaactgtgcaacctgttgaaaatcgcaccaccagcggtgtgccagtcgatcgtccacctctttgaggatgatatggtggaggtgtggcggcggtcagtgctctccccctcggaagcgtgtggacttctcctgggaagcacttgtggccattgggacattttcagcagctggaacatttcgctcccaacggtgcctaagcctcctccgaagccgccttccccaccagcacctggagcccctgtatccagaatcctgttcctgaccgatctgcattgggatcatgattaccttgagggaaccgacccggattgcgctgacccactctgctgccgccggggatccgggctccccccggcctcccgcccgggcgccggctactggggcgaatacagcaaatgcgacctcccactgagaaccctcgaatcgctgctgtctggccttggcccagcggggccgtttgacatggtgtactggacgggagacatcccggcgcatgatgtgtggcaccagacccggcaagaccaactgcgcgcgttgactacggtcactgctctggttcggaagttcttggggccggtacctgtgtacccggccgtcggaaaccacgaatcgaccccggtgaactccttcccgcctccgttcatcgaaggaaatcattcatcaagatggctgtatgaggccatggcgaaggcttgggaaccatggctgccggctgaagccttgaggacccttagaataggcggattctacgcgctctcaccttacccgggccttagactcatctctctgaatatgaatttctgtagccgagaaaacttttggttgctgatcaactcaactgaccccgccggccagttgcagtggcttgtgggtgaacttcaagcagccgaggaccggggtgacaaggtgcacattatcggccacatcccaccaggacattgcctgaagagttggtcatggaactattaccgcatcgtcgctaggtacgagaataccctggccgcacagtttttcgggcacactcacgtggacgagttcgaagtcttttacgatgaggaaaccctgtcccgcccgctggccgtggctttcctggctccatcggcgactacctacataggactgaatccaggttaccgcgtctaccagatcgacggtaactacagcggctcgtcacacgtggtgttggaccacgaaacttacattctgaatctcactcaggctaacatcccgggagcaatcccacattggcaactgctctaccgggcgcgagaaacctatggccttccgaacacgctccccactgcctggcataacttggtctacaggatgagaggggatatgcagttgtttcagactttctggttcctgtaccacaagggacacccgcccagcgagccatgcgggaccccgtgccggcttgcgactttgtgcgctcagctgtcggcacgcgcagatagtccagctctgtgccggcacctgatgccagacgggtcactgcccgaagcccagtccctttggcctcggccactgttctgt

SEQ ID NO: 19731 - DNA, 1893 bp, synthetic construct
  misc_feature 1..1893: note = source = /note="Description of Artificial Sequence: Synthetic coding sequence"
  source 1..1893: mol_type = other DNA
atgcctcgatacggagcatcgctgagacaatcatgccctcgaagcggccgggaacagggacaggacggaactgcaggagcaccaggacttttgtggatggggctcgtcctcgcgctcgcacttgcgcttgccctggcacttgcactttccgattcgcgcgtgctttgggcccctgcagaagcacaccctctttctcctcaaggtcatcccgcaagactccacagaattgtccctcggcttcgggacgtgtttggatggggaaatctgacctgcccgatttgtaagggcctgtttaccgcgattaacctggggctgaagaaggaacccaacgtggcacgggttggttcggtggctataaagctctgtaatcttctgaaaatcgcccctcccgcagtctgccagtccatcgtccatctgttcgaggatgatatggtggaggtgtggaggcgctcggtgctgagtccgtcggaagcgtgcggattgctgttgggaagcacctgcggtcattgggacattttctcgtcgtggaacatatcacttccgaccgtgcctaagccacctcctaagcctccgtcccctcccgcaccgggtgcacctgtgtcgcggattctgttcctgaccgatctgcactgggatcatgattatctggagggtaccgatcctgattgtgcagaccccctctgctgtaggagaggaagtggactcccacccgcaagccgcccaggagcaggctactggggtgaatactcgaaatgtgatcttcccttgcgcaccctggagtctcttctttccggtctgggcccagcggggccctttgatatggtgtactggaccggagatattccggcgcatgacgtgtggcatcagactcgacaggatcagcttcgggcccttaccaccgtcactgcactggtgcgaaagtttcttgggccagtgcccgtttacccagcagtgggtaaccacgagtcgacccctgttaattccttccctcctccctttatcgagggtaatcattcttcacgctggctgtacgaagcgatggcgaaggcttgggaaccttggcttcctgccgaagcgctgagaacgctccgcattgggggtttttacgctctttcaccttacccgggattgcgcctcatctccctcaacatgaacttttgttctcgcgaaaacttctggcttctgattaacagcactgatcctgccggacagttgcagtggctggtgggtgaactccaagcagccgaggatcgaggtgataaggtccacattatcggccatatccctcctggccattgtcttaagtcttggtcatggaactactatcgcatcgtggcccggtacgaaaacactcttgcagcacaattcttcggtcacactcacgtcgatgaatttgaagtgttttacgatgaagagactctttccagaccccttgcagtggcattcctggccccatcggccactacttacattggactgaatcccggctatagagtgtaccagatagacggcaactacagcggatcctcgcatgtggtgctcgaccacgaaacttacatcctcaaccttactcaagccaacatacctggagccataccacattggcagctgttgtacagagcccgcgaaacttacggactgccaaacaccctgccgacggcgtggcataaccttgtgtacagaatgcgcggggacatgcaattgtttcaaaccttttggtttctttaccataaaggacatcctccatcagagccatgtggaaccccttgccgcctcgcaactttgtgtgcacaactctcagcaagagctgattcacccgctctgtgtaggcacttgatgcccgatggatccctgccagaagcacagtccctttggcctagaccactgttttgt

SEQ ID NO: 19732 - DNA, 1893 bp, synthetic construct
  misc_feature 1..1893: note = source = /note="Description of Artificial Sequence: Synthetic coding sequence"
  source 1..1893: mol_type = other DNA
atgcccaggtacggtgcgtcgcttcgtcaaagctgcccccgttctggaagagaacaaggtcaagatggaacggctggcgcaccggggttgctctggatgggtctcgttcttgccctcgcattggctctcgctctggccctcgctttatctgactcccgagttttgtgggcacctgctgaggcacatcctttgtctcctcaggggcacccagcgcgtctgcaccgcatcgtgccacgacttagggacgttttcggttggggtaacttgacatgtcctatttgtaaaggattgtttaccgccatcaacctgggtcttaagaaagaaccgaacgtcgctcgtgttgggtccgtcgctattaaactctgcaacttgctcaagattgcacctccagcagtttgtcagtcaatagtgcacctttttgaagatgatatggttgaggtctggaggcgctcggttctcagtccctccgaagcctgcggcttgctgcttggttctacgtgtggccactgggatatcttctcttcttggaatatcagcctaccaactgttccaaaacctcccccgaagcctccttcacctcctgctcctggggcacctgtttccagaattctgtttctgacagacttacattgggaccatgactacctggagggtactgatcccgattgcgctgacccgctttgttgcaggcgtggttccggactaccccctgcatcaaggccaggagcagggtactggggtgaatatagtaagtgtgatctgcccttgcgtactttggagtcattgctctccggtttgggacccgcaggacccttcgatatggtttattggactggagatatccctgctcacgacgtgtggcatcaaacgaggcaagatcaactacgcgcactcacaacagttactgcccttgtgcgaaagttcctcgggcctgtccccgtttacccagccgtcggtaaccacgaaagcaccccagtgaatagcttcccccctccctttattgaaggaaatcacagttctagatggctctatgaggccatggctaaagcctgggaaccatggttacccgctgaggctttacgtacattgcgcattggaggtttctatgcccttagtccctatcctggtttgagattgatttctcttaacatgaatttttgcagtcgggaaaatttttggttacttataaactcaacggacccagctggacagctccaatggctggtcggcgaacttcaggcggctgaggacaggggggacaaagttcatataattggccacatcccacccggacattgtttaaaatcttggtcatggaattattatcgaattgtcgccagatacgaaaacactttagccgcccaattttttggccatactcatgttgatgaatttgaggtgttttatgatgaagagactttatctcgccctcttgctgtagcatttcttgccccgtctgctacgacctatatcggattgaatccagggtacagagtatatcaaatcgacgggaactatagcggctcatcacatgtcgtcttggatcatgagacgtatattttgaacctaacgcaggctaacattcctggcgcaattccgcattggcaactcttgtaccgggctcgggaaacatacggcttgccaaatacgcttcctacagcctggcacaacctagtttacagaatgaggggagatatgcaattgtttcaaactttttggttcctttatcacaaggggcatccgccaagtgagccatgtgggaccccttgcagacttgcaaccttgtgcgcacaactgtccgctcgagcggacagcccggccctctgcagacacctcatgccggatggcagtttgcccgaggcccagtcattatggccaagaccacttttctgc

SEQ ID NO: 19733 - DNA, 1893 bp, synthetic construct
  misc_feature 1..1893: note = source = /note="Description of Artificial Sequence: Synthetic coding sequence"
  source 1..1893: mol_type = other DNA
atgcctagatacggcgcgtcccttcggcaatcgtgccctcgctcaggtagagagcagggacaggatggcactgcaggtgcccctggattgctgtggatgggactcgtgcttgccttggctttggctcttgcactcgccctcgccctttctgatagccgcgtgctgtgggccccggcggaagcacacccgctgtccccacagggacaccctgccaggctgcatcggatcgtgccgcgcctgcgggacgtctttggctggggaaacctcacctgcccgatctgtaagggtctgttcaccgcaatcaacctgggcctgaagaaggaaccaaacgtcgctagggttggctccgtggcgatcaagctgtgtaatttgctcaaaatcgcgcccccagccgtctgccagtcgattgtgcatttgtttgaggacgacatggtggaagtgtggcgcaggtcggtgctgtcaccatccgaggcgtgcggactcctcctgggaagcacctgcggacactgggatatcttctcgagttggaatatctccctgccaaccgtgccgaagccaccacctaagccgccgagcccacctgccccgggggccccggtatcccgcatcctgttcctgacggatctgcactgggaccacgattacctcgagggcactgatccagactgtgcggacccgctgtgctgcaggagaggatccggcctccctcccgcctcgcgccctggagctggatactggggcgaatacagcaagtgcgacctgcccttgcggactctcgaatcgctgctctcgggacttggaccggcgggaccattcgatatggtctactggactggcgatatccctgctcacgatgtgtggcaccagaccagacaagaccaactgcgggcccttaccaccgttactgcactggtcaggaaattcctgggaccagtgcccgtctacccggcagtgggtaaccacgagtcaactccagtcaacagcttcccaccgccgttcatcgagggaaaccatagcagcaggtggctgtatgaggcgatggccaaggcatgggaaccttggcttccagcagaagcattgcgtacccttcgtatcggaggcttctatgccctctcaccgtaccccggcctgcgcctgatctcgctgaatatgaatttctgctcacgagaaaacttctggctcctgatcaactccacggacccagcgggacaactgcagtggttggtgggtgaactgcaggcggccgaggacaggggcgacaaagttcacatcataggacatatccctcctggccattgtcttaagagttggtcctggaactactatagaattgtcgcacgctacgagaacaccctggcggcacagttcttcggacatacccatgtggatgagttcgaggtgttttacgacgaggaaacgctgtcacgcccgctggccgtggctttcctcgccccgtcggcaactacttacatcggactcaatcctggataccgcgtttaccaaatcgatggaaattactcgggatcatcgcatgtcgtgctggatcacgaaacgtacattctgaacctcactcaggctaacattcctggagccatccctcactggcagctcctgtaccgtgcccgggaaacttacgggctcccaaatacccttccaaccgcttggcataacctggtgtaccggatgcgcggcgacatgcagctgttccaaactttttggtttctttaccataaaggacaccctccttccgaaccttgcggtactccctgtagactggctaccctctgtgcgcagctgtccgcacgggccgactcgccggccctctgtcgacacctgatgcctgacgggagtctgcccgaagcacaatcgctgtggccgcggccgctgttttgc

SEQ ID NO: 19734 - DNA, 1893 bp, synthetic construct
  misc_feature 1..1893: note = source = /note="Description of Artificial Sequence: Synthetic coding sequence"
  source 1..1893: mol_type = other DNA
atgccacgttatggagcctcattgagacagtcgtgcccaagatcaggaagagaacagggacaagatgggacggccggtgcacccgggctgctttggatgggtttggtgcttgcattggcacttgcacttgcgcttgcgctggcactttcggattcccgagtgctttgggcccctgcagaagcacatcctctcagcccgcaagggcatcccgcccgactccaccgcattgtcccccgactccgggacgtgtttggttggggaaatctcacctgtcccatctgtaagggtttgttcacggcaatcaatcttggcttgaagaaagagccaaacgtcgcacgggtcggatcggtggccataaaactgtgcaaccttctgaagattgcccctcccgcagtttgtcagagcattgtgcacctttttgaggatgacatggtggaggtttggcgtcggagcgtgcttagcccttcggaagcctgtggcttgcttttgggatcgacctgtggacactgggacatcttttcatcttggaacattagccttccaaccgtcccaaaaccgccacctaagccaccatcaccacctgcacctggtgcgcctgtgtcaaggattcttttcttgaccgatctgcattgggatcatgactacctggaagggacggaccctgattgcgcagacccactgtgctgcaggcggggcagcggcctcccacccgcctcccgtcccggggccggctactggggagaatactccaagtgtgacctcccgcttagaaccctggaatcgctgctgtctggacttggaccagcaggtccttttgatatggtgtactggacgggagacatcccggcacatgatgtctggcatcaaactcggcaagatcaattgcgagctctcacgactgtgactgcactcgtgcggaagttcctggggcctgtccctgtgtatcctgcagtcggaaatcacgaatctactccggttaattcgtttcccccacctttcattgaaggcaaccactcgtcaagatggctctatgaggcgatggcaaaggcttgggagccttggcttccagccgaagcccttcggacgctgcgaattggaggcttctacgccctgtctccctacccgggactgaggctgattagtctcaatatgaacttctgttctagggagaatttctggctccttatcaacagcacggatccagctggccaacttcaatggctggtgggagaactgcaggcagccgaggatcgcggtgataaagtgcacattataggccacataccacccggacattgtctgaagtcatggtcgtggaactactaccggatagtggcccgctacgaaaacaccctggcagcgcaattctttggtcacacccatgtggatgagtttgaagtcttttacgatgaagaaaccctctccaggcccctggctgtagcatttctcgcaccgagcgcaactacttacatcggactgaaccctgggtatcgagtgtaccagattgatggcaattactccgggtcgtcccatgtcgtgctcgaccatgaaacctacattctcaaccttacccaggcaaacatcccgggtgcgatcccacattggcagctgctctaccgtgcccgggagacttacggcctccccaacaccctccctaccgcgtggcataatctggtgtacagaatgcgcggtgatatgcaactgtttcagaccttttggttcctgtaccataaggggcatcctccatcggaaccttgtgggactccctgtaggcttgcaactctctgcgcacaactttccgcccgagcagactctccagcactgtgtcggcacctgatgcctgatggatccctgcccgaggcacagtcactgtggccacggccacttttctgc

SEQ ID NO: 19735 - DNA, 1893 bp, synthetic construct; identical to SEQ ID NO: 19715
  misc_feature 1..1893: note = source = /note="Description of Artificial Sequence: Synthetic coding sequence"
  source 1..1893: mol_type = other DNA

SEQ ID NO: 19736 - DNA, 1893 bp, synthetic construct
  misc_feature 1..1893: note = source = /note="Description of Artificial Sequence: Synthetic coding sequence"
  source 1..1893: mol_type = other DNA
atgcctaggtacggtgcatcactgagacagtcctgtccacgatcaggacgggaacagggccaagatggaactgcaggagcacctggccttctgtggatgggtctggtgttggcgctggccctggctcttgcccttgctctcgcgctctcagattcgcgggtcctctgggcaccggcagaggcgcatcctctgtcgcctcaagggcatccggctagactgcatcgcatcgttccacggttgcgagatgttttcggttggggcaatctcacctgccctatttgtaagggcctgtttactgcaatcaatctgggccttaagaaggagcctaacgtggcccgagtgggtagcgtcgcgatcaaactctgcaacctgctgaaaatcgcacctcccgcagtctgtcaatctattgtgcacctgttcgaagatgatatggtggaagtgtggagacggtctgtcctgagcccatcagaggcctgtggcttgctcctgggttcgacttgtggacattgggatatctttagctcctggaacatttcccttcctaccgtgcccaagccccctccaaaacccccctcgccacctgccccaggtgctccggtcagcaggatactttttctgactgatctgcattgggaccatgactacctcgaagggactgacccggactgtgccgacccgctgtgctgccgtaggggttccggactccctccagcgtcgcgcccaggtgcaggatactggggcgaatactccaagtgtgatctgcctcttcgaaccctcgagtcccttttgtcgggacttggtcctgccggaccttttgatatggtgtactggacgggcgacattccagcgcatgacgtgtggcatcaaacccgccaggatcaactcagagcccttactactgtgacggcacttgttcgaaagtttctgggacctgtgccagtgtaccccgcagtgggaaaccatgaaagcacccctgtcaacagcttcccacctccctttatcgagggtaatcattcgagccgctggctctacgaggcaatggcaaaggcttgggaaccgtggctgccagctgaagcattgcggacgctccgcatcggaggtttctacgcactgtcgccatacccaggacttcgactcatttcactcaacatgaacttctgtagcagagagaatttctggcttcttatcaactcaactgatccagccgggcaactccaatggcttgtgggggaactgcaggcagccgaggacagaggcgataaggtgcacattattggacatatacccccgggtcactgtctgaaatcatggtcttggaactattaccgtattgtggcgagatacgaaaatacccttgcagcccagtttttcggacatacgcatgttgatgaatttgaagtgttctacgatgaagagactctctcaagaccacttgctgtggcatttcttgcaccatcagcaacgacttacatagggctgaatcctggataccgggtgtatcagattgacggcaactactccggatccagccatgtcgtccttgatcatgaaacctacattctgaacctgactcaagcaaacatccctggcgctattcctcattggcaattgctgtaccgagcacgcgaaacttatgggttgccgaataccctgccaactgcttggcataatctggtgtaccggatgaggggtgatatgcaactttttcagaccttttggtttctttaccataaaggtcatcccccctcggagccctgcggcaccccatgccgtctcgctactctttgcgcacagctttccgcgagggcggactcgccagccctctgcagacatcttatgcctgacgggagcctccctgaggcacagtcactgtggccgcgccccctgttttgc

SEQ ID NO: 19737 - DNA, 1893 bp, synthetic construct
  misc_feature 1..1893: note = source = /note="Description of Artificial Sequence: Synthetic coding sequence"
  source 1..1893: mol_type = other DNA
atgcccagatacggagcatccttgaggcagtcgtgcccacgatccggtcgcgagcaggggcaagacggcactgccggagcccccggactcctgtggatggggctggtcttggccctcgccttggcgctcgcgcttgcgctggccttgtccgactccagagtgctttgggctccggccgaagcccaccccctgtcgcctcaaggtcacccggcccggctccatcggatcgtcccacggctccgcgacgtgttcggatggggaaacctgacttgcccgatctgcaagggactttttactgcgatcaacctgggcctcaagaaggaaccgaacgtggcacgcgtcggaagtgtcgctatcaaattgtgcaacctgcttaagattgccccgccggccgtgtgccaatcgattgttcacctctttgaggacgatatggtggaggtctggagacgttcggtgctgtcgccgtccgaagcgtgcggactcttgctgggatcgacttgcggacactgggacatcttttcgtcatggaatatctcgctgccgacggtcccaaagcctccgcctaagccaccgtccccacctgcgcccggagcaccggtgtcccgcatcctgttcctgaccgacctgcattgggatcatgattacctggagggaactgatccggactgcgcagacccactttgctgtcgccggggctcgggcctcccgccggcgagtcgccctggagccggttactggggagaatacagcaagtgtgacttgcctctgaggactctggaatccctcctgtcgggccttggtccggctggcccttttgacatggtttactggaccggcgacatccccgctcatgacgtctggcatcagacccggcaagaccaactccgggccctcaccaccgtgacggccctcgtcagaaaattccttggacctgtgcctgtgtatcctgctgtgggcaaccacgagagcactccggtgaacagcttcccgccaccgttcatcgaaggtaatcactcatcacgctggctgtacgaggctatggcgaaggcctgggagccgtggttgccggccgaagctctgcgcactcttcggatcggcggtttctacgccctgtcaccgtacccaggtctgcggctcatctcgctgaacatgaacttctgttcccgggagaacttttggctcttgattaactcgactgacccagcgggacagttgcagtggctggtcggagagctgcaggctgccgaggaccggggagacaaagtgcacatcatcggccatatcccgccggggcactgcctgaagagctggtcgtggaactactacaggatcgtggccagatacgaaaacaccctggctgcgcagttcttcggacacacccacgtggatgaatttgaagtgttttacgatgaagagactctgtcccgcccacttgctgtggcctttctggccccatcagcgaccacctacatcggactgaatccgggctaccgcgtctaccagatcgacggcaactactccggatcctcccacgtggtcctggaccacgagacgtacatcctgaacctgacgcaggcaaacattccaggggctataccacattggcaattgctttacagggcacgggaaacctacggcctgccaaataccctcccgaccgcctggcataacttggtgtacagaatgcgaggcgatatgcagctgtttcagactttttggttcctgtaccacaagggtcatcctccgtcagaaccgtgtggaactccgtgtcggctggcgaccctttgcgcgcagttgtcagcccgagctgactcaccggcgctgtgcagacatcttatgccggacgggagcctgcccgaagcccagagcctgtggccacgcccgctgttttgt

SEQ ID NO: 19738 - DNA, 1893 bp, synthetic construct
  misc_feature 1..1893: note = source = /note="Description of Artificial Sequence: Synthetic coding sequence"
  source 1..1893: mol_type = other DNA
atgccaagatacggcgccagtcttcgtcaatcttgtcctagatcaggacgcgagcagggacaagatggcaccgccggcgcacccgggctactgtggatgggcctggtacttgctttagccctggcgcttgctctcgctcttgccctgtcagactcgagggttttgtgggcgcctgcagaggcgcacccactcagtccccagggacaccctgcgagactacacagaattgtcccaaggctgcgggatgtgttcggctggggtaatttgacctgtccaatctgtaaaggcctgttcacggcgatcaacttgggcctgaaaaaagagccaaatgtggcaagggtgggatcagtggccatcaaattatgcaatctcctgaagattgccccccctgcagtttgtcagagcattgtgcacctttttgaggacgatatggtggaggtttggaggaggtccgtgctgagccctagcgaagcctgtggactacttctgggatccacctgtggtcattgggatatcttttcgtcttggaatatctcgctccccaccgtgcctaaacccccaccaaagccacctagtcctcccgcccctggcgccccagtgagtcggatccttttccttacagatcttcactgggatcacgactacctcgaggggacagaccccgactgtgccgacccactctgttgcagacgcgggtcaggacttcccccagcatcacgtccgggcgccggctattggggcgaatacagcaagtgcgatctccctctgcgcactctcgagtctcttctttccggtctgggcccagccggtccttttgatatggtctactggacgggggatattccggcacacgacgtttggcaccagacaaggcaggaccaactgcgagcgttaaccacagttaccgccctggttaggaagttcctgggcccggtgccagtttaccccgctgtgggcaaccatgagagcactccagtcaatagctttcctccgccctttatcgagggtaaccactcttcccggtggttgtacgaggccatggcaaaggcctgggagccatggctgcctgcggaggccttgcgtactttgagaattggcggcttctacgccctctctccctatcccggattgcggctgattagtctcaatatgaatttttgcagcagagaaaacttctggctgcttatcaattcgactgacccagcaggccaattgcagtggctggtgggagaacttcaggccgcagaggataggggggataaggtgcacatcatcgggcacatcccacccggacactgcctgaaaagttggagctggaattactaccgcatcgtcgctcggtatgagaacaccctggcggcccagttttttggccacacgcatgtggatgagttcgaagtgttctatgatgaagagacactgagccgccccctcgcagtagcctttctggcccctagcgccaccacctatatagggttgaatcctggataccgcgtatatcagattgacgggaattacagtgggtccagtcacgtggtgctcgaccacgagacctacatcctgaacctcacccaagccaacatccctggggctatcccgcattggcagctcttgtatagggcccgcgagacctatggcttaccaaacaccctccctactgcctggcacaatcttgtatacaggatgcgtggagatatgcagttgttccagacattctggtttctctatcataagggccatccaccgtctgagccatgtggcaccccctgtcgcttagctacactctgtgcccagctctctgctcgggctgattcaccggcactgtgtcggcatctgatgcctgacggctccctgcccgaagctcaaagcctctggccccgccccttattctgc

SEQ ID NO: 19739 - DNA, 1893 bp, synthetic construct
  misc_feature 1..1893: note = source = /note="Description of Artificial Sequence: Synthetic coding sequence"
  source 1..1893: mol_type = other DNA
atgccgcggtacggtgcctcactccgccagtcctgcccgaggtccggaagagaacagggccaggacggcaccgccggggcaccagggctgctctggatgggactcgtgctggctctggcgctggccctcgccttggcactcgctttgagcgatagtcgggtcctgtgggccccggcagaagcacaccctctgtccccgcaaggacatcccgcccgcctccatcgcatcgtgcctcgcctgcgggacgtgttcggatggggcaacttgacttgcccgatctgcaagggactgttcacggccatcaatcttggcctgaaaaaggaaccgaatgtggcgcgagttgggtccgtggccattaaactctgcaatctgctcaagatcgctcctcccgcagtgtgccagtcgatcgtccacctgttcgaggacgacatggtggaggtgtggagacggtcagtcctcagcccgtcagaggcgtgtggactcttgctgggctccacttgcggccattgggacatcttctcatcatggaacattagcttgccgaccgtgccgaaaccacctccaaagccaccgtcaccgccggccccaggagcccctgtgagccggattctgtttcttaccgatctgcactgggaccacgattacctggagggaaccgatccggactgcgccgacccgctctgctgtcgccgcggatccgggctcccaccggcatcccgcccgggagccggctactggggggagtactcgaagtgcgatctgccgctgcgcaccctggagtctctgctgtccggcctcggtccagcgggcccgtttgacatggtctactggactggagacatcccggcacacgatgtctggcatcagacccggcaggatcagctgagagcgctgactaccgtgaccgcgctggtgcggaaattcctcgggccggtcccggtctacccggcggtgggcaaccacgagagcactcccgtgaatagcttccccccgccgttcattgagggaaaccactcatccaggtggctgtacgaagctatggcaaaggcctgggagccgtggctgcctgcagaggccttgagaacccttcgcatcggaggattctatgcactttcaccttacccgggactgagattgatctcccttaacatgaacttttgctcgagagaaaacttctggctgctgatcaattccaccgaccccgccggacaactgcagtggctggtgggagagctccaggccgcggaagatcgtggagacaaggtgcacatcatcggccacatcccaccgggacactgccttaaatcgtggtcctggaattactaccgcatcgtcgcaaggtacgaaaacaccctggcggctcagttcttcggacacacgcacgtggacgaattcgaggtgttctacgacgaagagactctctcgaggccgctcgccgtggccttcttggccccgtcagctaccacttacatcggactcaatcctggataccgggtgtaccaaatcgatggcaactactcgggttcgagccacgtggtgctggaccacgaaacctacatcctgaatctcactcaggcgaatatcccgggagcaataccgcactggcaactgttgtaccgcgcgcgagaaacctacggacttcccaacaccctgccgaccgcgtggcataatctggtgtacaggatgcgcggcgacatgcagctcttccagaccttctggttcctgtaccacaagggccacccaccttcagagccgtgcggaaccccctgccgcctggcaacgttgtgtgctcagctctcagcgcgcgccgactcccctgccctttgccgccacctcatgccagatgggtccctgccagaagcccagtccctctggccgcgccccctcttctgc

SEQ ID NO: 19740 - DNA, 1893 bp, synthetic construct
  misc_feature 1..1893: note = source = /note="Description of Artificial Sequence: Synthetic coding sequence"
  source 1..1893: mol_type = other DNA
atgccgcgatatggggctagccttaggcaatcatgccctagatccgggagggaacaggggcaggatggcactgcaggagccccagggctgctctggatgggcctggtcttagcgctagcgctggcactcgccctggctctagcgctgagcgattcgagggttctgtgggcaccggctgaggcccatccgctaagtcctcagggccatcctgccagactgcacagaatcgtaccacgattacgagatgtcttcggctggggaaatctgacctgccccatctgcaagggcttattcacagccataaatctcgggctgaaaaaggaaccaaacgtggctcgggttggctctgttgccatcaagctctgtaacttgcttaagatcgcaccacccgccgtgtgtcagtccattgtgcacttgttcgaggatgacatggtcgaggtgtggcgacgcagcgtcctgtcaccgagtgaggcatgtgggttactcttagggtcgacttgcggccactgggacatattcagttcctggaacataagtctccctacagtgcctaagcccccgcctaagccaccttctcctcctgctccaggtgccccagtttcccggattctgtttttgacagacttgcactgggatcacgattacctggaggggaccgatcccgactgtgccgaccccctatgttgcagacggggttcagggctcccacccgccagcaggccaggcgctgggtactggggagagtattcgaagtgcgacctgcccctgaggaccctggaatctttgctcagtgggctcggtccggcagggcccttcgatatggtgtactggacaggcgatattccagcccatgacgtgtggcatcagaccagacaggaccagctaagggctctgaccacagttaccgctttagtgcggaaattcttggggccagtgccggtttaccccgctgtcggcaaccacgagtcaaccccagtgaattcatttccccctccctttattgagggcaatcattcatccaggtggctctatgaagcgatggccaaggcttgggaaccttggctccccgccgaagctctcaggactcttcgtatcgggggcttctatgctctgtcgccttacccgggtctaagattgatatccctgaacatgaatttttgctcgagggaaaacttctggcttttaattaactcgacagaccccgcaggccagcttcagtggctagtgggtgaactacaggccgcggaggacagaggtgataaggtccatatcattggtcacatcccccccgggcattgtttaaagtcttggtcctggaactactacagaatagtggcgcgctacgagaataccctggccgcccagtttttcggacacacacacgtggacgaatttgaggtattttatgacgaggagacattgtcgcgtcccctggctgttgcatttttggcaccctctgccacaacatacattggtctcaatccggggtaccgagtgtatcagatcgacggtaactactcagggtcctcccacgtggtactcgaccacgagacatacatccttaatttgacacaggcgaacatcccaggcgctattccccattggcagttgctctatcgggccagggagacctatgggctgccgaacacgctgccgaccgcatggcataatttggtctacaggatgaggggggatatgcagctgtttcagacattctggtttttgtaccataaagggcatcccccgagtgagccctgtggcacaccctgtcggttggctactctatgcgcgcagctcagtgcacgcgccgattctcctgctttgtgccgacacctcatgcccgacggatccctgcccgaggcgcagtccctttggccacgtccgctcttttgt

SEQ ID NO: 19741 - DNA, 1893 bp, synthetic construct
  misc_feature 1..1893: note = source = /note="Description of Artificial Sequence: Synthetic coding sequence"
  source 1..1893: mol_type = other DNA
atgcctcggtatggcgcttctctacgacaaagctgcccacgatccgggcgagagcagggtcaggacggtacagccggcgccccaggccttctgtggatggggctggtgctggctttggccctggccctcgccttggctctggctctgagtgactcgcgcgtcctgtgggctcctgcagaggcccatccgctgtccccccagggacatcctgcaagacttcacagaatcgtcccccgtctcagagacgtgttcggctggggcaatctcacgtgcccgatctgcaaaggcctattcactgctatcaatctgggtcttaaaaaggaacctaacgtcgccagagttggctctgtggcaataaagctctgtaatttgcttaagattgcgcctcctgccgtgtgccaatctatcgtgcacctgttcgaggatgacatggtggaggtgtggcgtagaagtgtgctcagccctagcgaggcgtgtggcttgcttctgggctctacttgtggccactgggacatcttcagctcttggaacatctccctacctacagtgcctaagcctccccctaagccgccatcgccacctgctcccggcgccccagttagccgaattctctttttgactgatctccactgggatcacgactacctggagggaaccgatcctgattgtgcagatcccctgtgttgtcgtcgcggatccggtctcccccccgccagccggccaggggccggctactggggagagtactcaaagtgcgacctaccactgcggactttagaatctctgttgagtggcctcggtcctgccggacccttcgatatggtgtattggacgggagatatccctgcacacgacgtgtggcaccagaccagacaggaccaactccgggcactgactacagtgacagctctcgtccgaaaattcctgggtccagtgccagtttatccagccgtgggcaaccacgagtctacacccgttaattcgtttcctccaccctttatcgaaggcaaccactctagtaggtggttgtacgaagctatggcaaaagcatgggaaccatggctgccagcagaagccctgcggacactgcgaataggaggtttttatgctctctcaccataccctggactgcggctgatttcacttaatatgaacttttgcagccgcgaaaatttctggctccttatcaattccaccgaccccgctggacagcttcagtggctcgtaggcgagttgcaagcggctgaggatcgtggagacaaggtccatattatcggacacatacctcctggccactgtctgaagtcatggtcttggaattactaccgcatcgtggctagatatgaaaacacactggccgcacagtttttcgggcacacccacgtggacgaattcgaagtattctatgatgaagaaaccttgagcaggccactcgctgtggcatttctagccccatccgcaaccacatatatcggtttaaatcctggatacagagtgtaccagatagatggaaactattccggcagctcccacgtggtcctggatcatgagacctacattctcaatctgacgcaggctaacatacccggagcaataccacattggcaactcctgtaccgggccagggaaacctatgggttgcccaacacactgcctacggcctggcacaacctggtgtaccggatgcgcggggatatgcagctatttcagaccttttggttcctgtatcacaaaggccatccccccagcgagccctgcggaacaccttgtcgccttgcaactctatgcgctcagctctctgcacgagcagactcaccagctctgtgcagacacctgatgcccgatgggtcgctgcctgaggcccagagtttgtggccgcgccctttgttctgt

SEQ ID NO: 19742 - DNA, 1893 bp, synthetic construct
  misc_feature 1..1893: note = source = /note="Description of Artificial Sequence: Synthetic coding sequence"
  source 1..1893: mol_type = other DNA
atgccacgctacggcgcatccttgagacagagctgtccaagaagcggacgcgagcagggtcaggacggcaccgcaggagctcctggtctgctctggatgggcttggttttggctttggccctggctctggcattggccttggccctcagtgatagccgcgtgctgtgggctcccgcagaggctcacccccttagcccccagggccatcccgctaggctgcataggatcgtcccacgtctgagggacgtgttcggctggggcaacctgacatgtcctatctgcaagggtttgttcacagctataaatctgggcctcaagaaggaaccaaacgtcgcacgtgttggttcagtggcaattaagctgtgtaacctgctcaaaattgctccccctgccgtttgccaaagtattgtacacctgtttgaagacgacatggtagaagtgtggaggaggtccgtcttgagtccctccgaggcttgtggtctgctgttgggcagtacatgtggacattgggacatattctccagttggaacatatctcttcccacagtacccaagcccccacccaagcctccttccccacccgctcccggagcccccgtgtccagaatcctgttcctgactgaccttcactgggaccacgattacctcgagggaacagatcccgattgtgccgacccattgtgctgcagacgcggttctggcctgcctcctgcttctaggcccggtgccggatactggggtgagtactcaaaatgcgaccttcctctcaggaccctcgaatcactgctgagcggactgggcccagctggcccctttgatatggtgtactggactggagacatccctgctcatgatgtctggcatcaaacaaggcaggatcagctccgcgcactcacaacagtgacagccttggtcagaaagtttctcggtccagttcctgtttaccctgccgtgggtaaccatgagagtacccccgtaaattccttcccacctccttttatcgaaggtaaccacagctctcgctggttgtacgaggccatggccaaggcctgggagccttggctgcctgctgaggccctcagaactctccgtattggtggattttacgctctcagcccttaccctggtcttcgtctgatctctctgaacatgaacttttgtagtagagaaaatttctggctcctcatcaattctaccgatcctgctggacaactgcagtggttggtaggtgaacttcaagctgcagaggataggggcgataaagtgcatattatcggccacatcccccctggtcattgcctgaagtcttggagctggaattactatcgtattgtagcacgctatgagaatactctggcagctcaatttttcggccacacccatgtcgacgagttcgaggtcttctacgacgaggagacactcagccgcccactcgctgtggcattcctcgctccttcagccactacttacattggattgaatccaggctaccgcgtctatcagattgatggtaactattcaggtagctcccatgtcgtgcttgaccacgagacatacattctgaacctgacccaggccaatatccctggcgctataccccactggcagctcctgtaccgtgctagggagacatacggtctccctaacactctgcccaccgcctggcacaatcttgtgtatcgtatgaggggtgacatgcagctgtttcagactttctggtttttgtatcataagggtcaccctccctccgagccctgcggaaccccttgcagactggccactttgtgcgcacagctttccgctagagccgactcacccgctctctgccgtcaccttatgcccgacggctctctgcctgaggcacagagcctgtggcccagacccctcttctgc

SEQ ID NO: 19743 - DNA, 1893 bp, synthetic construct
  misc_feature 1..1893: note = source = /note="Description of Artificial Sequence: Synthetic coding sequence"
  source 1..1893: mol_type = other DNA
atgccccgctacggagcttccctgcgtcaatcgtgcccgagatccggaagggagcagggccaggacggaaccgcgggagcgcctgggcttctgtggatgggtctggtgcttgcactcgcactggctctggcactggcgctggcactttcggattcccgggtgctgtgggcgccggcagaggcacatccgctctcccctcagggtcatcctgccaggttgcatcgcatcgtgcctagactgcgtgacgtctttggttgggggaatttgacttgtcctatttgcaaggggctgttcactgccattaacctgggcctcaaaaaagaaccaaatgtggccagggtgggtagcgtggccatcaagttgtgtaatctcctgaaaattgcacccccagccgtctgtcaaagcatcgtgcatttgttcgaagatgatatggtggaggtgtggagacgtagcgtgctttcgccatcggaagcctgcggactccttctggggagcacttgcggacactgggacatcttctcatcttggaacatttcgctgccgactgtcccaaagcccccacccaagccaccttcaccacctgcgccgggtgcgcctgtgagcaggatactgttcctgaccgatctgcattgggatcacgactacttggaggggactgaccctgattgcgcagacccactttgctgtcggaggggaagcggcctgccaccagcgtccagaccaggtgccggctattggggggaatacagcaagtgtgatcttccactgcggaccctggagtcacttctctcgggacttggtcctgcaggtccttttgacatggtctactggactggcgacatccctgctcatgatgtgtggcatcagactcgccaagatcagctgcgagctcttactacggtgaccgccctggtcagaaagtttctgggaccagtccctgtttatcccgcggtggggaaccatgaaagcaccccagtcaactcgtttccgcccccgtttattgaaggaaatcattcatccagatggttgtacgaagcgatggcaaaagcctgggaaccctggctgccagcagaagcattgcggaccctgcggattggcggcttttacgcactctcgccttaccctggactccgcctgattagcctcaacatgaatttctgttcgagagagaacttctggctgctgatcaattcgaccgatcccgctggacagctgcagtggcttgtgggagagctgcaggcggcagaagatcgcggagataaggtgcatatcattggacacatccctccaggacactgcctcaagtcgtggtcctggaattactaccgtatcgtggcccgttacgagaatacgctcgcagcgcaattcttcggtcacacccatgtggacgaatttgaagtgttttacgacgaggaaactttgtcccgaccgttggccgtggcctttctggcaccgtcggcaaccacctacatcggcctgaacccgggatacagagtctaccagattgatggcaattacagcggatccagccacgtggtgcttgaccacgaaacgtacattcttaacctgactcaagcaaacattcccggtgcaattccccattggcagctcctgtaccgcgcaagagaaacttacggacttccaaacacccttccaactgcctggcataaccttgtgtaccggatgagaggagatatgcagctgtttcaaaccttctggtttctttatcataaaggtcaccctccatctgagccttgcggtactccttgcagacttgctaccctgtgcgcacaactgtcggctagagccgactcccctgcactttgccgccatcttatgccagacgggtcactgccagaagcacaatcactttggccgcgccctctgttttgt

SEQ ID NO: 19744 - DNA, 1893 bp, synthetic construct
  misc_feature 1..1893: note = source = /note="Description of Artificial Sequence: Synthetic coding sequence"
  source 1..1893: mol_type = other DNA
atgccaagatatggtgcatcattaagacaaagttgtccacgttcaggacgtgaacaaggtcaagatggaaccgctggagccccagggttgctatggatgggacttgttttagcattggcattagctttagcattagctctagcacttagtgattctagagtattatgggcaccagctgaagcacatccactttcaccacaaggacatccagctagacttcatagaatagttccaagacttagagacgtatttggttggggaaatttaacatgtccaatctgtaaaggacttttcactgctataaatcttggacttaagaaggaaccaaatgttgctagagtaggaagtgttgctattaaactttgtaatcttttaaaaatcgctccaccagctgtctgtcaatcaattgtgcatctttttgaagatgatatggttgaagtttggagaagaagtgttttatctccttctgaagcatgtggtcttcttttaggttcaacatgtggacattgggatatttttagttcttggaatatttcattaccaactgttccaaaaccaccacctaaaccaccttcacctccagccccaggagcaccagtatcaagaattctttttctaacagatttacattgggatcatgattatctcgaaggaacagatccagattgtgctgatccattatgttgtagaagaggatcaggtttaccaccagcatctagacctggagcaggatattggggggaatatagtaaatgtgatttgccacttagaacattggaaagtttgctttccgggttaggaccagcaggtccatttgatatggtatattggacaggtgatattccagcacatgatgtatggcatcaaactagacaagatcaattaagagcattaacaacagttactgcacttgtaagaaaatttttaggtccagtcccagtttatcctgctgttggaaatcatgaatcaactccagtaaattcatttcctccaccttttatcgaaggaaatcattcatcacgatggttatatgaggcaatggctaaagcatgggaaccttggttaccagctgaggcacttagaacattaaggattggagggttttatgcactttcaccatatccaggtttaagattaatttctttaaatatgaatttttgttcacgagaaaacttttggcttttaattaattctacagatccagctggtcaattacaatggcttgttggtgaacttcaagctgcagaagatagaggagacaaagttcatatcattggacacattccaccaggtcactgtcttaaatcatggtcctggaattattataggattgttgctagatatgaaaatactttagctgctcaattttttggtcatacacatgttgatgaattcgaagttttctacgatgaagaaacattatcaagaccactagcagttgcatttcttgcaccttctgctactacttatattgggcttaatccaggttatcgtgtatatcaaattgatggaaattattctggttcttcacatgttgttcttgatcatgaaacatatatattaaatttaactcaagctaatattccaggagcaataccacattggcaattattatacagagctagagaaacatatggacttccaaatactcttccaacagcttggcataatcttgtttatagaatgagaggtgatatgcaacttttccaaacattttggtttctttatcacaaaggacatccaccatcagaaccatgtggtacaccatgtagattagcaactttatgtgcacaattatcagcaagagcagattcaccagctctttgtagacatcttatgcctgatggatcattaccagaagctcaaagtctttggcctagacctttattctgt

SEQ ID NO: 19745 - DNA, 1893 bp, synthetic construct
  misc_feature 1..1893: note = source = /note="Description of Artificial Sequence: Synthetic coding sequence"
  source 1..1893: mol_type = other DNA
atgcctcgttacggtgcttccctccgacagagttgccctcggagtggacgtgaacagggtcaagatggaaccgcgggcgcccctggcctgttgtggatgggactggtgctggctcttgccctcgcgctcgctctggccctggctctgagcgacagtcgggtgctgtgggctcccgccgaggcccacccgctgtctcctcagggacatcccgccagattgcaccgcattgttccacgtttgcgtgacgtgtttggatggggaaacctgacctgtcccatttgcaagggccttttcaccgctatcaacctcggactgaagaaggaacccaacgtcgctcgcgtaggttcggtcgctatcaagctgtgcaacttgttgaaaatcgccccgcctgcggtttgccagtccatcgttcacctcttcgaagacgatatggttgaggtgtggcgtagatccgtgctgtctccgtcggaggcctgtggtctgcttcttggctcgacttgcggacactgggatatcttcagctcctggaatatctctttgcctaccgtccccaagcctcccccaaagccccccagccccccagcgcccggtgccccggtttcgcgcatccttttcctgaccgacctgcactgggaccacgactatttggaaggtaccgaccccgactgtgcagaccccctttgctgtcgccgtggtagtggactgcctcccgcctcgcgccccggtgccggttactggggggagtattctaagtgcgatctccccctccggacgctcgagtccctcttgtcaggtctaggacccgccgggcctttcgatatggtttactggaccggcgacattcctgcccatgacgtctggcaccagacacggcaagatcaactgcgcgctctgactacggtcacggcactcgtccgcaagttcttgggccccgtccccgtctaccccgccgtgggcaaccacgaatctactcctgtcaactccttcccccctcctttcatagagggtaaccacagttcccgatggctgtacgaggctatggctaaggcttgggagccctggctgccagcggaggctttgcgcaccctccgcatcggtggcttctatgcattgagcccatatccggggctccgcctcattagccttaacatgaacttttgctcccgtgagaacttttggctcttaatcaattcaacggatcccgccggccagttgcagtggttagtcggcgagttgcaggccgctgaggaccgcggcgataaggtccatatcatcggtcatatcccccctggccattgcttgaagtcctggagctggaactactaccgtatcgttgcgcgttacgaaaacacgctggccgcgcagtttttcggtcacactcatgttgatgaattcgaggtcttctatgacgaagagactctgtctcgcccgcttgccgtcgccttcctggctccgtctgctacgacgtatatcggccttaaccccggttaccgtgtttaccagattgacggcaactatagcggatcctcccatgtagtgctggaccatgagacttacattctcaacctcacccaagctaacatccccggcgcaattccccactggcaactgctctatagagctagggaaacctacggtctccctaacaccttacctacggcctggcacaatctggtctatcgtatgcgaggtgacatgcagctcttccaaactttttggtttttgtaccataagggtcacccgcctagcgaaccctgcggtaccccatgccggctggccactttgtgcgcccagctgtccgctcgtgccgattcccccgccctctgccggcatttgatgccagatggatccttaccagaggcgcagtcgctgtggccccgtccacttttctgt

SEQ ID NO: 19746 - DNA, 1893 bp, synthetic construct
  misc_feature 1..1893: note = source = /note="Description of Artificial Sequence: Synthetic coding sequence"
  source 1..1893: mol_type = other DNA
atgcctagatacggcgcctccctccggcaatcttgtcctcggtccggccgcgagcaggggcaggacggcacagccggggccccggggctgctgtggatgggccttgtcctagcgctcgccctggccctggcacttgcactggccttgagcgatagcagagttctgtgggcacctgctgaggcacatccgctaagtccccaggggcacccagctagactccaccggattgtgccaagactccgggatgtgttcggatggggcaacttaacctgccctatctgcaaaggcctctttaccgcaattaacttaggcctgaagaaggaacccaacgtggccagggtgggcagcgtggcaataaagctctgcaatttactcaaaattgctccaccagccgtctgtcaatctattgttcatcttttcgaagatgacatggtcgaagtgtggcgccgctcggtactaagtccgtcagaggcctgcggcctattgctcggctccacctgtgggcactgggatatattcagttcatggaacatcagcttacctaccgtgcctaagcccccacctaaaccaccttccccccccgctcccggagcccccgtgagcaggatacttttccttacagacttgcactgggaccacgattacctggagggtacagatcccgactgtgcagatccgctgtgttgccgtcgcggcagcggactgcctcccgcaagcagacctggcgccggctactggggtgagtattcaaagtgtgacctgcctctgcggacgttggaatccctcctctctggactggggcccgcaggcccctttgatatggtgtattggactggggacatccccgcccatgacgtgtggcatcaaacacgtcaagaccagctgcgggcgctaactaccgtcaccgccttagtccgcaagttcctgggacctgtgcccgtgtatccagcggtgggaaaccatgagagcactcccgtcaactccttccccccccccttcattgagggcaatcactctagccggtggttgtatgaggccatggctaaggcctgggaaccgtggcttcctgccgaagccctgcgcacccttcgaattggtggtttctatgctctgagtccttacccagggctgagactgatcagtcttaatatgaacttttgctccagggaaaatttctggctgctgatcaactccaccgacccagcgggtcagctgcagtggctggtgggcgaacttcaggccgctgaagacagaggcgacaaagttcacataattggccatatcccacctggacattgcctgaagtcatggtcttggaactattaccgcatcgtggccagatacgagaacaccctggcagcgcaatttttcggtcacactcatgtggatgagtttgaggtcttttatgacgaagaaaccttatccagacctctagctgtagcattcctagctccttctgcaactacctacatcgggttgaaccccgggtaccgcgtctaccagatagatggcaattactccggctcttcccacgtagttttggaccacgagacctacatcctaaacctcacgcaggccaatattccaggagccatcccacactggcagctgctttatcgcgccagagaaacctatggtctccccaacaccttgcctacagcctggcataacttagtttaccgaatgcggggggacatgcagttgttccagactttttggtttctgtaccacaagggccatccgccttccgagccatgcggaacaccctgtaggttggccacactctgcgctcagctgtcagcgcgcgccgacagccccgcgttatgtaggcaccttatgccagacggtagtttgccagaagctcagtccttgtggcccagacccctcttttgc

SEQ ID NO: 19747 - DNA, 1893 bp, synthetic construct
  misc_feature 1..1893: note = source = /note="Description of Artificial Sequence: Synthetic coding sequence"
  source 1..1893: mol_type = other DNA
atgccccgatacggtgccagtctgaggcagtcttgtcccagatccggtcgggaacagggccaagatggaaccgctggagccccaggtctgctttggatggggctggttctggccctcgccctggccctcgccctggcactggcgctgtccgatagccgggttttgtgggcacccgctgaggcccatccactttctccgcaggggcaccccgctcggctgcatcgcatcgtgcctcgactgagggatgtgtttggatggggtaacctcacctgccctatctgcaaggggctctttactgcaataaatcttggccttaagaaggaacctaacgttgcccgcgtgggttcagtcgctatcaaactgtgcaaccttctcaaaattgcccccccggcagtatgccagagcatagtacacctctttgaggacgacatggttgaggtctggagaagatccgtcctgtcccccagcgaagcttgcggactgctcttgggatccacctgtggccactgggatatttttagctcttggaatatctctcttccgacagtgcctaagccaccccccaaaccacccagcccacccgctcctggcgccccagtctctagaatcctttttctgaccgacctccactgggatcacgactatctcgaagggaccgatcccgactgcgccgaccccctctgttgtcgaagaggctcaggtctccctcccgcaagcagaccgggggccgggtattggggagagtacagtaagtgtgacctgcctctgcggactctggaatccctgctctccggactgggtccagccggccctttcgacatggtctactggacaggcgatattcccgcacacgatgtgtggcaccaaacaagacaggaccaactgcgagctcttaccacggtgactgcccttgtcaggaagtttctcgggccagttcctgtgtaccctgctgtaggcaaccatgagagtacccccgtaaattcttttcctccaccttttattgaaggcaaccattcttcaaggtggctctacgaggctatggcaaaggcgtgggagccctggctgcccgctgaggctctgaggacactgagaatagggggattttacgctctttccccttaccctggcctgaggctgatttccctcaacatgaacttctgtagccgggagaacttttggttgctgatcaactcaaccgatcccgccggtcagctgcagtggctggtgggagagctgcaagcagcagaggaccgcggggataaggtgcacataatcggccacatcccgcccggccactgtctcaagagctggagctggaattactacaggatcgtggcacgctacgagaatactctcgccgcccagttcttcgggcatacacatgtcgacgaatttgaggtattctacgacgaggagacactgtcaagaccgttggcggtggcttttttggcccccagcgctacaacctacatcggtctcaaccccgggtatcgcgtctatcagattgacggcaattatagcgggtcaagccacgtcgtgttggatcatgaaacctacatccttaacctcacacaagctaatattcccggagcaatcccacactggcagctgctgtacagagcccgcgaaacatacgggctgccgaacaccctccccaccgcgtggcacaatctggtttataggatgaggggtgatatgcaactgttccagacattctggttcctctaccacaagggccatcctccctcagaaccttgtggcaccccttgccgcctggcgactctctgcgcccagctgtcagccagggccgactcccctgctctctgcagacaccttatgccagacggatctctgcctgaggctcagtccctgtggccacgccccctcttctgt

SEQ ID NO: 19748 - DNA, 1893 bp, synthetic construct
  misc_feature 1..1893: note = source = /note="Description of Artificial Sequence: Synthetic coding sequence"
  source 1..1893: mol_type = other DNA
atgccaaggtacggtgcatcgctgcgacaatcatgccctcgctccggacgggaacaaggtcaagacggtaccgcaggagcgccaggccttctttggatggggctggtgcttgcactcgcgctggcgctggcgctcgcacttgctcttagcgactcgagagtcctctgggcaccagccgaggcccatccactttcaccccaaggccaccctgcaaggctgcatcgcattgtcccacgcctgagggatgtgtttggatggggtaacctcacttgtccgatttgtaaggggctgtttaccgcaattaacctgggactgaaaaaggaacctaacgtggcaagggttggttctgtggcaattaagctgtgtaacctcctcaagatcgcaccacctgctgtctgtcaatcaatcgtccatctttttgaagatgatatggtggaagtctggcgaagaagcgtcctctcgccatcagaggcatgcggacttctcttgggttctacctgtggacactgggacattttctcctcgtggaacatttctcttcctactgttccaaagccaccgccaaaaccgccttcgccacctgcaccaggcgcacccgtcagccgaattctttttctgaccgaccttcattgggaccatgattacctggaaggcactgacccagactgcgcggatcccctttgttgcagaagaggatcagggctccctccagcctccaggccaggggccggttattggggagaatacagcaagtgcgacctccctcttagaactcttgaatctctgctttcagggctgggtccagcagggccttttgacatggtgtactggaccggtgatatcccggcacatgatgtgtggcatcagactaggcaagaccaactgcgggccctcaccactgtgactgcattggtgagaaaattccttggtcctgtgcccgtgtaccctgcggtgggcaatcatgagtcgacgccagtcaactcgttccctcctccctttattgaagggaaccattcctcgagatggctgtacgaagcaatggcaaaggcttgggaaccttggttgcctgcagaggctctgaggactctgagaattggcggcttttacgcactttcaccatacccaggtcttagactcatctcattgaatatgaatttctgtagccgggagaacttttggcttctcatcaactccaccgatcccgccggacaactgcaatggctcgtgggagagctgcaagccgcagaggatcggggagataaagtgcacattattgggcatattcctccgggtcattgtttgaagtcctggagctggaactactaccgtattgtcgccagatacgaaaacactcttgcagcacaattctttggacatacccatgtggatgagtttgaagtcttttatgacgaagaaacgctgagccggcctcttgccgtggcatttctcgcccctagcgcgaccacctacatcggcctcaatcccggttaccgcgtgtaccaaatcgacggaaactactcaggatcgagccacgtggtccttgaccacgaaacctacatacttaacctgactcaagcaaacattcctggtgcgatacctcactggcaacttctttaccgagcacgcgaaacttacggtctgcctaacactctcccaactgcatggcacaatttggtgtaccgaatgcgcggtgatatgcaactgttccaaacgttttggtttttgtaccacaagggacacccaccttcagagccctgtggaaccccatgtcgcctcgcaaccctgtgtgcacagctttccgcaagagcagattctcctgccctgtgcagacatcttatgccagatggcagcctcccagaagcacaatcgctgtggccccgcccactcttctgt

SEQ ID NO: 19749 - DNA, 1893 bp, synthetic construct
  misc_feature 1..1893: note = source = /note="Description of Artificial Sequence: Synthetic coding sequence"
  source 1..1893: mol_type = other DNA
atgcctcggtacggggcctcgcttaggcagtcgtgtccgagatcaggccgcgaacaaggacaagacggcactgcaggtgccccgggactcctctggatgggactggtgctggccctggctctggccctggcgctggcactggccttgagcgattcacgggttctgtgggccccggcggaggcacatccgctctcgccacagggccatccggcacggttgcatcgcatcgtcccacgcctgcgggacgtgttcggatggggaaacctcacgtgcccgatctgcaagggactctttaccgccatcaacctgggattgaaaaaggagccgaatgtcgcaagggtgggatcggtggctatcaagctctgcaatctcctgaagatcgctcctccggccgtgtgtcaatccatcgtgcatctgttcgaggacgatatggttgaggtgtggcgccggagcgtgctgtcacctagcgaggcgtgcggcctcctgctcggatcaacctgcggacattgggacatcttctcgtcctggaatatctcactgccgactgtcccgaagccgccgcccaagcccccttcgcccccagcaccgggagcgccagtgtcgaggattctgttcctgactgacctccactgggaccacgactacctcgaaggaaccgacccagattgtgcagacccgctgtgctgccggcgtggcagcgggctcccgccagcctcccggcctggcgccggatactggggagagtactccaaatgtgatctcccactgaggactctggagtctctcttgtcgggacttggtccggcaggaccattcgatatggtgtactggactggagacatccctgctcacgacgtgtggcaccaaactaggcaggaccagctcagagccttgactactgtcaccgcgctggtccgcaaattcctcggaccagtcccggtgtacccggccgtgggaaatcacgagagcaccccagtcaactccttccctcctccgttcatcgaaggaaaccactcgtcgcgctggttgtacgaagctatggccaaggcatgggagccttggttgccggcagaggctctgcggactctgagaattggcgggttctatgctctgagcccatacccaggactgcgcctgatctcgctgaacatgaacttctgttcaagggagaatttctggctgctgatcaatagcaccgacccggccggccagcttcaatggcttgtcggtgaactccaagcggcagaggaccggggcgataaggtgcatatcattggacacattccacctggccactgtctgaagtcgtggtcgtggaactactatcgtatagtggcaagatacgaaaatacgttggcagcgcagttcttcggacatacgcacgtcgatgagtttgaagtgttctacgacgaagaaactctgtcacgcccgctcgccgtcgcgtttcttgccccgtcagctactacctacatcggcctgaatccaggatacagagtgtaccaaatcgacggaaactacagcggatcatcccacgtcgtgttggatcatgaaacgtacattctgaatctcactcaagcgaatatcccaggtgcgatccctcattggcagctgctgtacagggcccgcgaaacttacggcctgccgaacaccctgccaacggcgtggcataacctcgtctaccggatgcgcggagacatgcaactcttccaaactttctggttcctgtatcacaaaggacatccgccatcggaaccctgtggaaccccatgcaggcttgcaaccctgtgcgctcagctgtcagcccgggccgatagcccggccctgtgtcgccacctcatgccggatggttcactgccagaagcccagagcctctggccaagaccgctcttttgc

SEQ ID NO: 19750 - DNA, 1893 bp, synthetic construct
  misc_feature 1..1893: note = source = /note="Description of Artificial Sequence: Synthetic coding sequence"
  source 1..1893: mol_type = other DNA
atgcccaggtatggggcgagtctgcgacagtcatgtccccggagtggaagagaacaggggcaggacggaaccgctggcgcacccggactgctttggatgggactggtgctcgccctcgctctcgccctggccctcgctcttgctctctccgactctagagtcctgtgggctccagctgaagcccaccctttgtcgcctcagggccaccctgcgcgtttgcatcgaattgtgccccgcctgcgggacgtgttcggctggggaaacctgacatgccctatctgtaaaggcttattcaccgcaattaatttaggtttgaaaaaggagcccaacgtggcccgggttggttccgtggcaatcaaactttgcaatctgctgaagattgccccccccgcggtatgccagagcattgtccacctctttgaagatgatatggtagaggtttggaggcgttcagttttatccccaagtgaagcatgtggtctgcttctgggcagtacatgcgggcattgggatatttttagctcctggaatatcagtctcccaaccgtgcccaagcccccgcccaagccgccttcaccccccgctcctggggcccctgtctcccggatactgttcctcactgaccttcactgggatcacgactatttagagggaactgatccggattgcgctgaccctctgtgttgtagaagagggtccgggttacctccggcgtcacgccccggagcaggatattggggagaatactcaaagtgcgatctacccttgagaaccttggagagtctactctccggtttaggacccgcaggtcccttcgatatggtttactggacaggcgatatccccgctcacgatgtgtggcatcagaccaggcaggatcaactgcgggccctgacgacagtgaccgccttggtgcgcaagttcctgggccccgtaccagtatatcccgcggtcgggaatcacgagtctacccctgtaaattcgttccctccgcccttcattgaaggcaatcattcatccaggtggttatatgaggcaatggccaaggcatgggagccttggctccctgcggaagcgctcaggaccctgaggattggtggcttttacgccctcagcccctaccccggtttgcgacttatctcattgaatatgaatttctgctccagggaaaacttctggttgttaatcaatagcacagatccagcaggccagctgcaatggctcgtgggggaactgcaggctgctgaggaccgaggcgacaaggtccacataatagggcatatcccacccgggcactgcctgaagtcatggagttggaactactaccggatcgtggcccgctacgaaaacactttagccgcccagtttttcgggcacacccacgttgacgaatttgaagtattttacgatgaggaaacactctcgcggccactggccgttgccttcttggctccctccgccacgacctacattggcctcaacccgggttaccgagtataccagatagacgggaactactcaggctctagccacgtggtcttggaccacgagacctacatcttaaacctcacacaggccaatattcccggggcgattcctcactggcagctgctctatcgggcgcgagagacctacggtcttcccaacaccctccccacagcctggcacaacctggtgtaccggatgagaggcgacatgcagctcttccaaacattttggttcctgtaccataagggccatccaccatccgaaccttgtggaactccctgcaggctcgctacactctgtgcccagctctctgctagagcagactccccagcgctttgccgccaccttatgcctgatggatccttgcctgaagcacagtccctgtggcctcgccctctcttctgc

SEQ ID NO: 19751 - DNA, 1893 bp, synthetic construct
  misc_feature 1..1893: note = source = /note="Description of Artificial Sequence: Synthetic coding sequence"
  source 1..1893: mol_type = other DNA
atgccccgatacggtgcctcacttcgccaaagctgccctcgatccggacgtgaacaaggtcaggatggcactgccggtgcacctgggcttctgtggatgggacttgtcttggccctggccctggctttggcacttgcacttgcactgtccgattcaagagtgctgtgggcacctgccgaagcacatcctctctcaccgcagggccatccagcccgtctgcatcgaatcgtgccaaggctgcgagacgtgtttggatggggtaacctgacttgcccgatatgtaagggactctttacggctataaacttgggcctgaagaaggaaccgaatgtggccagagtgggctcggtcgcaattaagctgtgtaatctgctgaagattgcgcctcctgcagtgtgccagtccatagtgcacttgttcgaggacgacatggtggaagtctggcgccgatccgtcctttcaccttcagaagcctgtggacttcttctgggctccacttgcggacactgggatatcttttcatcgtggaatatctcccttcctactgtgcctaaaccccctccaaagccacccagcccgccagctcccggagcaccagtcagcagaattctgttcctgactgatttgcattgggatcatgattacctggaaggtaccgacccagattgcgccgatcctctttgctgccgccggggatctggactcccacctgcttcaagaccaggagccggttactggggtgaatactcaaagtgcgacctgccccttcggactctggaatcgctgttgtcagggcttggacccgcaggaccatttgacatggtctactggaccggcgatattcccgcgcatgatgtgtggcaccagactagacaggaccaacttcgcgcactcaccactgttaccgcacttgtcagaaagtttctggggcctgtccctgtgtacccggcggtgggaaatcatgaatcgactcctgtgaactcgtttcctcctcctttcattgagggaaaccattcgagcagatggctctacgaagctatggccaaagcgtgggaaccctggcttcctgcagaggcattgcgtaccctccgtatcggaggcttttatgctctgtcgccgtaccctggacttaggcttatctcgttgaacatgaatttctgttcgagagaaaacttttggctgcttatcaattcgacggatcctgcagggcaacttcaatggctcgttggcgagctgcaagccgcggaggaccggggtgataaggtccacattataggtcatataccccctggccactgtcttaaatcgtggtcgtggaactactacagaattgtggcgagatacgagaacaccttggccgcccaattcttcgggcacacccacgtggatgagtttgaggtgttctacgacgaggaaactctttccaggccccttgcagtggcatttctggcccctagcgcaacgacttatatcgggttgaatccaggctaccgggtctaccagatcgatggtaactacagcgggtcctcccacgtggtcctggatcatgaaacctacatcctgaatttgactcaggctaacattcctggggcaatcccacactggcagcttctctaccgggcacgcgaaacctatggcctgccaaacaccctgcctaccgcatggcacaaccttgtgtacagaatgagaggagatatgcagctgttccaaactttctggttcctgtaccacaagggacatccaccatccgaaccttgcgggacgccgtgcagattggcaactctctgtgcgcagctctccgcacgcgctgatagccctgcgctttgccgccatctgatgccggatggctcgctgccagaggcacagtcgctgtggcctagacctcttttctgt

SEQ ID NO: 19752 - DNA, 1893 bp, synthetic construct
  misc_feature 1..1893: note = source = /note="Description of Artificial Sequence: Synthetic coding sequence"
  source 1..1893: mol_type = other DNA
atgccacgatacggagcgtcactccgtcagtcctgtccaagatcgggacgggaacaaggacaggatggaaccgcaggtgcccctggtctgctctggatggggctggtcttggcattggcactggcgctggcacttgcactcgctctgtcggactcaagagttctgtgggcccctgccgaagcacaccctctctcgcctcaaggacaccctgcaaggctccaccgcatcgtgccacgcctgcgggatgtgtttggttggggaaacctcacgtgccccatctgcaaagggctttttaccgcaatcaatctgggactgaaaaaggaacctaacgtggcaagagtgggctcagtggccatcaaactttgcaatcttttgaaaatcgcaccccctgcggtctgccagtcgattgtgcatctgtttgaagatgatatggtcgaagtctggcgtcgaagtgtgctctccccctcggaagcatgtggcctcttgctggggtcaacctgtggacattgggacattttcagctcatggaacatttcgctccctactgtccctaaacctccacccaaaccaccttcgccccctgcccctggagccccagtctcgagaattctttttctgactgatctgcactgggatcatgattaccttgaagggactgacccagattgtgccgacccgctgtgttgcaggcgcggcagcgggctgcctcctgcatccagacctggagcaggatactggggagagtactcgaagtgtgaccttcccctgcggactttggaatcgctgctcagcggactgggcccagcgggaccctttgatatggtctactggactggtgatattcctgctcatgacgtgtggcatcaaacgagacaagatcagcttcgggccctgacgaccgtcactgcgctcgttagaaagttcctgggccctgtccccgtgtacccggcagtcggcaaccacgagtcgacgccagtcaactccttcccccctccctttattgagggaaaccattcatcgcggtggctttacgaggcgatggccaaggcatgggaaccatggctgcctgcggaagcacttcgcactcttcgtattggtggattctacgctctttcgccgtatcctggtctgagattgattagcttgaacatgaacttttgctccagagagaacttctggttgctcatcaatagcactgaccccgctggccagctccagtggcttgtgggagaacttcaagcagccgaggacagaggagataaggtgcacatcataggtcatattcctcctggtcactgcttgaagtcgtggtcctggaattactaccggattgtggctagatacgagaacaccctggccgcccagtttttcggccacacccatgtggacgaatttgaggtcttttacgatgaagaaacccttagccgcccacttgcagtggcattcctggcaccatcggccaccacttacataggcctgaatcctggataccgtgtgtaccagattgatggcaactactcaggatcgagccatgtggtgctggatcatgaaacctatatactgaatcttacccaggcaaacattcctggagcaatcccacactggcagctgctctacagggctcgggaaacctacggactgcctaatactttgccaactgcctggcataatctcgtgtataggatgagaggggacatgcagttgtttcagaccttctggtttctgtaccacaaaggtcatcctcctagcgaaccatgtggaacgccatgccgtctggcaactttgtgcgctcagctttcagcacgagcagattccccagccctttgtagacatctcatgccagatggctcgttgcctgaagcccagagcctttggcccaggcctcttttttgt

SEQ ID NO: 19753 - DNA, 1893 bp, synthetic construct
  misc_feature 1..1893: note = source = /note="Description of Artificial Sequence: Synthetic coding sequence"
  source 1..1893: mol_type = other DNA
atgccgcgctacggggcctcattgcgccaatcctgccctagatcaggtagagagcaaggccaggacggaactgcgggggcccctggactgctgtggatgggtctggtcctggctcttgccctcgcgttggctctcgccctggccctctccgacagccgggtgctgtgggctccagcggaagcccatccactgagcccgcagggccatccagcacgcctgcatcggatcgtcccacgactccgcgatgtctttgggtggggaaaccttacctgtcccatctgcaagggattgtttaccgcaatcaacctcggactcaaaaaggaaccgaacgtggcgagggtgggatcggtggctatcaagctctgcaatttgctgaagatcgcgcccccggccgtatgtcaaagcatcgtgcatctcttcgaggatgatatggtggaagtgtggaggcgctcagtgctttccccatcggaagcgtgtggactcctgctcggatcgacctgcggacattgggatattttctcctcgtggaacatctccctgcccaccgttccgaagcccccaccgaaaccgccgtccccaccagcgccgggagcaccagtgtcacggatcctgtttctgactgacctgcactgggaccacgactacctggagggaaccgatcccgactgcgccgatccactgtgctgccggaggggcagcggcctcccgcctgcgagccggccgggcgcaggatactggggtgaatactctaagtgcgacctgccgcttcgtactctggagagcctcctctcagggctcgggcctgcaggaccgttcgacatggtgtactggactggcgatatcccggcacacgatgtctggcaccagactagacaggaccagctgagagctctgaccaccgtcactgccctggtgagaaagtttctgggaccggtgccggtgtaccctgccgtggggaaccatgagtcgaccccagtcaactccttcccgccgccgtttatcgaaggaaaccactcgtcgcggtggctctacgaagcgatggccaaagcctgggagccctggctccccgccgaagctctccgcactctgcgcatcggtggattttacgcgctgagcccatacccaggtctgcgcctgatctccctgaacatgaatttctgctcgcgggaaaatttctggctgcttattaacagcactgaccctgccggacaactgcagtggctggtcggagagctgcaagcagccgaggacagaggagataaagtgcacatcatcggtcatattccgcctggacactgcttgaagtcttggagttggaactactatcgcatcgtggcccgctacgaaaatacgttggctgctcagttcttcggacacactcacgtggatgagttcgaggtgttctacgacgaggaaactctctcccggccgctggcagtcgccttcctggcgccttcggcgaccacctacatcggcctgaacccaggctaccgcgtctatcaaatcgacggcaattactcagggagctcacatgttgtgctggaccacgaaacttacattcttaacctgacccaggccaatatcccgggagctattccacactggcagctcttgtaccgggcacgagaaacctacggactcccgaatacccttcctacggcatggcataacttggtgtacagaatgcgcggcgacatgcaactgttccagactttctggttcctctatcacaagggccacccgccctccgagccttgcggcacgccgtgtcggctggcaaccctgtgcgcccagctgtccgcgagggccgactcgccggccctttgccggcacctcatgccggatggtagcctccctgaagcccagtcgctgtggcctagaccattgttctgt

SEQ ID NO: 19754 - DNA, 1893 bp, synthetic construct
  misc_feature 1..1893: note = source = /note="Description of Artificial Sequence: Synthetic coding sequence"
  source 1..1893: mol_type = other DNA
atgccgcgttatggtgcgtcgctacgacaatcgtgtccgcgttcgggtcgagaacaaggtcaagatggtacggcgggtgcgccgggtttactatggatgggtctagtattagcgttagcgttagcgctagcgctagcgttagcgctatcggattcgcgagttctatgggcgccggcggaagcgcatccgctatcgccgcaaggtcatccggcgcgtctacatcgaatagtaccgcgattacgagatgtatttggttggggtaatctaacgtgtccgatatgtaaaggtttatttacggcgataaatctaggtttaaaaaaagaaccgaatgttgcgcgagttggttcggttgcgataaaattatgtaatttattaaaaatagcgccgccggcggtatgtcaatcgatagttcatttatttgaagatgatatggttgaagtatggcgtcgttcggttttatcgccgtcggaagcgtgtggtttattactaggttcgacgtgtggtcattgggatatattttcgtcgtggaatatatcgctaccgacggtaccgaaaccgccgccgaaaccgccgtcgccgccggcgccgggtgcgccggtttcgcgaatattatttctaacggatctacattgggatcatgattatctagaaggtacggatccggattgtgcggatccgttatgttgtcgacgtggttcgggtctaccgccggcgtcgcgtccgggtgcgggttattggggtgaatattcgaaatgtgatttaccgttacgaacgctagaatcgctattatcgggtctaggtccggcgggtccgtttgatatggtatattggacgggtgatataccggcgcatgatgtatggcatcaaacgcgtcaagatcaactacgtgcgctaacgacggtaacggcgctagttcgtaaatttttaggtccggtaccggtatatccggcggtaggtaatcatgaatcgacgccggtaaattcgtttccgccgccgtttatagaaggtaatcattcgtcgcgatggttatatgaagcgatggcgaaagcgtgggaaccgtggttaccggcggaagcgctacgtacgctacgaataggtggtttttatgcgctatcgccgtatccgggtttacgtttaatatcgttaaatatgaatttttgttcgcgtgaaaatttttggttattaataaattcgacggatccggcgggtcaactacaatggttagtaggtgaattacaagcggcggaagatcgtggtgataaagttcatataataggtcatataccgccgggtcattgtctaaaatcgtggtcgtggaattattatcgtatagtagcgcgatatgaaaatacgttagcggcgcaattttttggtcatacgcatgtagatgaatttgaagtattttatgatgaagaaacgttatcgcgaccgctagcggtagcgtttctagcgccgtcggcgacgacgtatataggtttaaatccgggttatcgagtatatcaaatagatggtaattattcgggttcgtcgcatgttgtactagatcatgaaacgtatatattaaatctaacgcaagcgaatataccgggtgcgataccgcattggcaattattatatcgagcgcgtgaaacgtatggtttaccgaatacgctaccgacggcgtggcataatttagtatatcgaatgcgtggtgatatgcaactatttcaaacgttttggtttctatatcataaaggtcatccgccgtcggaaccgtgtggtacgccgtgtcgtttagcgacgttatgtgcgcaattatcggcgcgtgcggattcgccggcgctatgtcgacatttaatgccggatggttcgttaccggaagcgcaatcgttatggccgcgaccgttattttgt

SEQ ID NO: 19755 - DNA, 1893 bp, synthetic construct
  misc_feature 1..1893: note = source = /note="Description of Artificial Sequence: Synthetic coding sequence"
  source 1..1893: mol_type = other DNA
atgccacgctatggagcatctcttcgacaatcgtgcccacggagcggacgtgagcaaggacaagacggcaccgcgggcgcgcctggtttgctctggatgggacttgtactagcactggcgctcgctctcgctctggcgttggcgttaagtgattcccgagttctttgggctccagccgaagctcatccacttagtcctcagggacacccagcacgactgcatcgaatcgttccgaggttgcgtgatgtattcggatggggtaatctaacctgcccaatttgtaaaggacttttcacagcgattaatttgggacttaagaaggaacccaacgtggctagagtcggatcagtagcaattaaactgtgtaatctactcaaaattgcaccaccggctgtgtgccagtccatcgtccatttgttcgaggatgacatggttgaggtctggcgtcgctccgtcttaagcccatcagaagcttgcggattattacttggttctacctgtggacactgggatatctttagttcatggaacatctccttgccaacggttccaaagcccccgccaaaacctccatctccaccagcaccaggagctccagtctcacgtattttgttccttactgatcttcattgggatcacgattatttggagggtaccgatcccgattgcgcagacccattgtgctgtcgaaggggctcaggacttccgcctgcctcaagaccaggggctggatactggggagaatattcaaaatgtgacctccctttgcgtactcttgaatcccttctcagcggactcggtccagcaggtccttttgacatggtttactggacgggagacatccccgcccatgatgtttggcatcagactcgacaggaccaactccgagctcttacaactgtgacagctctcgtcagaaaattcttgggaccggtgccagtttatcccgccgtcggaaatcatgaatctacaccagttaactcttttccccctccattcatcgaaggtaaccattcgtcccgatggttatatgaagcaatggcaaaagcatgggagccctggttaccagccgaagctctgcgtacgctccgaattggtggattctatgcactgtccccatacccaggactccgtcttatctcactgaacatgaacttctgctcgcgtgagaatttctggttacttatcaatagcacggacccagctggacaactgcaatggttggtaggagagttgcaagcagctgaagaccgtggggataaggtccatattattggtcatatccccccaggacattgtcttaaatcctggagctggaattactatcgtattgttgcgcgctacgaaaatactctggccgcacagttcttcggtcacactcatgtagacgaattcgaggttttttacgatgaagagacactatcgcgtcctctagctgttgcatttttggccccatctgcaacaacgtatatcggattgaacccgggatatagggtttaccaaattgacgggaactactccggctcgtcgcacgtggtgctcgaccatgaaacttatattttaaacttgacacaggcaaacataccaggagcaatcccgcattggcaattgttatacagggctcgagaaacctatggtcttccaaatactcttccaactgcatggcacaatttggtttatagaatgcgcggtgatatgcaactgtttcaaacgttttggttcctttaccataagggccatccaccgtcagaaccgtgcggaaccccctgtcggctggctacactttgtgcccagctctcggctcgagctgattccccagctctttgtaggcatttgatgccggatggatctctgccagaagctcaaagcttatggcctcggccgttgttctgt

SEQ ID NO: 19756 - DNA, 1893 bp, synthetic construct
  misc_feature 1..1893: note = source = /note="Description of Artificial Sequence: Synthetic coding sequence"
  source 1..1893: mol_type = other DNA
atgcctcgttatggcgccagtctgcgccaatcttgtccgcggtcaggcagagagcagggacaggatggtaccgccggagcccccggactactctggatgggcctggtccttgccctggctcttgccctagccctggctctggcattgtctgatagccgggtgctgtgggcccccgctgaagcgcaccctctcagcccacagggacaccccgccaggcttcacagaatcgtcccacgcctgcgggatgtgttcggctggggaaatctgacatgccctatttgcaagggactcttcaccgctattaacctaggactcaaaaaggaaccaaacgtcgcccgcgtagggtctgtcgccatcaagctttgcaacctactgaagattgctcctcccgcagtgtgccagtctattgtacacctgtttgaagatgacatggttgaggtctggagaagaagcgtactcagcccctcagaagcatgcgggctgttgctcggttccacctgtggacactgggatatctttagctcgtggaacatttctctcccaacggtccccaaacctccgcccaagcccccttcacctccagctccgggggcacccgtctctcgtattttattcctgacagatctgcactgggaccacgactacctagagggcaccgaccccgactgtgcagatcctctctgttgtcgccgcggctccggacttccaccagccagtcggccaggagccgggtactggggcgaatacagtaagtgcgacctgcccctacggacactagagtccttgctgtcgggactagggccggccggcccatttgatatggtgtactggacaggtgatattcccgcacacgacgtatggcaccagacgcgacaagaccaattaagggcattgaccaccgtgactgccctggtgcggaaattcctgggccctgtgccggtttacccggcggtcggcaatcatgaaagcaccccagtgaactcatttcctccaccatttatagaggggaaccattcctcccgctggctgtatgaagcgatggctaaggcatgggagccgtggctgcctgccgaagccctacggaccctaagaattggaggcttttacgccttatccccttatcccggccttcgactgatatcattgaacatgaatttttgttccagagagaacttttggctcttaataaacagtactgatcccgccgggcagttacaatggctggtgggggaattgcaggccgctgaggatcgaggagataaagtgcatattattggccacatcccaccaggccactgcctaaagagttggagctggaattattaccgtatagttgcgcgttatgagaataccctcgctgctcagttctttggacacacccacgtcgacgaattcgaagtattctatgacgaagaaacactgagccggcccctggcggtggctttcctggcccccagcgcaactacttatattggcctcaacccaggatatagggtgtatcaaatcgacggcaattacagcggctccagccatgttgtgctggatcatgagacgtatatccttaacctcacacaggcaaatattccaggcgcaataccacactggcagttgctctacagggctcgggagacttacgggcttcccaacacactgcccactgcttggcacaaccttgtataccggatgcgcggcgatatgcagttattccaaactttttggttcttgtaccataaaggccatcccccatccgagccatgcggtaccccctgtagactcgcaactctgtgcgcccagctgtccgcccgggccgattccccagctctatgccggcacctgatgcctgacggatcgcttcccgaggcccagagcctttggcctcggcccctgttttgt

SEQ ID NO: 19757 - DNA, 1893 bp, synthetic construct
  misc_feature 1..1893: note = source = /note="Description of Artificial Sequence: Synthetic coding sequence"
  source 1..1893: mol_type = other DNA
atgccacggtacggagcctcgcttcgccaatcctgtccgcggtccggaagggaacagggacaagatggaactgccggagcgcctggactgctctggatgggcctcgtcctcgccctcgccttggcactggcgcttgcgttggctctgagcgattcaagggtgctttgggcaccagcggaagcacacccgctgagcccgcagggacacccggcccgcctgcatcgcattgtgcccagactcagggacgtgtttggatggggaaatctgacctgtcccatctgcaaggggctgttcactgcaattaacctcggactgaagaaggagccgaatgtggcgcgcgtgggatctgtcgcgattaagctgtgcaatctccttaagatcgccccacccgcagtgtgccagtcgatcgtgcacctgtttgaggatgacatggtggaagtctggaggcgcagcgtgctttcaccatccgaggcgtgtggactcctcctgggatcaacttgtggacattgggatatcttctcctcctggaacatttccctgcccactgtcccaaagccaccaccgaagccaccgtcgccaccagccccgggagcgccagtgagcaggatcctcttcctcaccgacctccattgggaccacgattacctggagggtaccgatccggactgcgcagatcctctttgctgccgccgggggagcggactgccacctgctagccgcccgggtgccggatactggggagaatactcgaagtgcgacttgcctctccgcaccttggagtcgttgctgtccggtttgggaccggcaggaccgttcgatatggtgtattggactggggatatcccagcacatgacgtttggcaccaaaccagacaagaccagctcagagcgctgaccaccgtgactgcgctcgtgagaaagttcctgggtccggtgccagtgtacccagccgtgggaaaccacgagtcgacgccagtcaactccttcccgccgcctttcatcgagggtaaccatagctcccggtggctgtacgaagctatggcaaaggcgtgggagccgtggctcccagctgaagccctccggacgctgcgaatcggaggattttacgcactctccccctacccgggactgaggctcatctcactcaacatgaacttttgttcccgggaaaacttttggctcttgattaactctaccgaccctgccggacagctccagtggctggtgggagaactgcaagccgccgaggacagaggagacaaagtccatatcattggacacatccctcctggccactgccttaaatcatggtcctggaattactatcgcatcgtcgccaggtatgaaaacaccctggcagcacagttcttcggtcacactcatgttgacgagttcgaagtcttttacgacgaggaaactctgtctcggccactcgctgtggcgttcctggctccgtcggcgaccacctacatcggtctgaacccagggtaccgggtgtaccaaatcgacggcaattactcaggaagctcccatgtcgtgctggatcatgaaacttacatcttgaatctgacccaagccaacatcccgggcgccatcccgcattggcagctcctgtaccgggcccgcgaaacctacggactgccgaatactctcccgaccgcatggcataacctggtgtatagaatgcggggcgacatgcaactgtttcagacgttttggtttctctatcacaaggggcaccccccgtcagaaccatgcggtaccccatgtcggctggcaactctttgtgcgcagctctcagccagagcggattcccctgccctctgccgtcacttgatgccggatggaagcctccctgaggctcaaagcctctggccgcggccgctgttctgt

SEQ ID NO: 19758 - DNA, 1893 bp, synthetic construct
  misc_feature 1..1893: note = source = /note="Description of Artificial Sequence: Synthetic coding sequence"
  source 1..1893: mol_type = other DNA
atgcctcggtacggcgcatcacttcgtcagagctgtcctagaagcggtagagaacaggggcaggatggaactgccggcgcgcccggactcctttggatgggtcttgtcctggcgctcgccctggcacttgcactcgccctcgcattgtccgattcgagagtcctttgggcacccgcagaagcacacccactgtctccgcaaggtcatcctgcgcgactgcatcggattgtccctaggctccgggacgttttcggttggggaaatcttacttgcccaatttgcaagggtctgtttacggcaatcaatctcggcctcaaaaaggagcctaacgtggcaagggtgggctcagtggctatcaagctgtgcaatcttcttaagattgctccccctgcagtctgtcagtcgattgtccatctgtttgaggacgacatggtggaggtctggcgacgctccgtgttgtcgccaagcgaggcatgcggacttctgctcggatccacgtgtggacattgggacatattctcatcatggaacatttccctgcctaccgtgcctaagcctccaccaaaacctccttccccaccggcaccgggcgcacctgtgtcacgcattctgttccttactgaccttcactgggatcatgactaccttgaaggaactgatcctgattgtgccgatccactttgctgtaggcgcggatccggtttgcctcccgcctcgcgccctggagcgggatactggggggaatacagcaagtgcgatcttccgttgcgaactcttgaatcccttttgtcgggactcggtccggcagggccatttgacatggtctactggaccggagatatccctgcgcatgatgtctggcatcaaactcgacaagatcagctcagagccctgaccaccgtgactgcacttgtgcgaaagtttctggggccagttcccgtgtaccctgccgtgggtaaccatgaatccacccctgttaattcctttccacctccattcatagaaggaaatcattcctcgagatggctttacgaggcgatggccaaggcatgggaaccttggctccctgctgaggcactgagaaccctcagaataggtggattttacgcgctttcgccctaccctggactccgactcatcagcctcaatatgaacttctgttcgagggaaaacttttggctgctgatcaattctacggacccagccggacaactgcagtggcttgtgggcgagctgcaagcagctgaggaccgaggagataaggtgcacataattgggcatattcctcccggacactgcctcaagtcatggtcgtggaactactacagaatcgtcgcacgctacgaaaatactctcgccgcacagttttttggccatacccacgtcgatgaatttgaagtgttttacgatgaggaaactctctcgcgccctctggccgtggccttcctcgctccctcggccaccacctacattggtctgaatcctggctacagggtgtaccaaattgatggcaactacagcggttcgtcccatgtcgtgttggatcacgagacttacatactgaacctgacccaggctaatatccctggagcaattcctcactggcaattgctgtacagagcacgggagacttatggccttcccaataccctccctactgcatggcacaatcttgtgtaccggatgagaggtgacatgcaactgttccagaccttctggttcctgtaccataaagggcatcctccatccgagccatgtggaaccccatgccggctggcgaccttgtgtgcccagctttcagcccgggcagattcaccagcactgtgtaggcatcttatgccggatggttcccttcctgaggcgcagtcgctgtggccccgtccactgttctgt

SEQ ID NO: 19759 - DNA, 1893 bp, synthetic construct
  misc_feature 1..1893: note = source = /note="Description of Artificial Sequence: Synthetic coding sequence"
  source 1..1893: mol_type = other DNA
atgcccaggtacggggccagtttgcgccagtcctgtcctagaagtgggcgagagcaagggcaagatggaactgcgggtgcccccggtttgctgtggatgggtctggtcctggcgttggcgctggctctagcattggccctagccctgtccgattcgagagttttgtgggcgcccgccgaggcccacccactctccccacagggccacccagctcggcttcatcgcattgtgcccaggctacgcgacgtgttcgggtggggcaacctcacctgccccatctgtaagggcctattcacagctatcaacctgggacttaagaaagaaccaaacgttgctcgcgtaggctccgtggccatcaagttgtgcaacttgctaaagattgccccacccgccgtgtgccaatcaatcgtacatctgtttgaggacgatatggtggaagtgtggaggagatccgttctctcaccttccgaggcatgcgggttactcctgggctccacctgcggacactgggatatattttcctcttggaatatctccctccccaccgtgcctaagccacctccgaaaccaccaagccctcctgccccaggggcccctgtatccaggattctcttcctgacagatctgcattgggatcacgattatctagagggaaccgaccctgattgcgcggatcccctgtgttgcaggcgaggcagcggtttaccacctgcttctaggcctggggcggggtattggggcgaatacagcaaatgcgacctacccctccgcactctggagtccttgttaagcggtctgggacctgctggtccatttgatatggtgtactggactggagacattcccgcccacgatgtgtggcaccaaacgcgtcaggaccagttacgggcgctgaccactgtgacagccttggtgcgtaagttcctcgggccagttcccgtgtatccagcagttggcaaccacgaaagcactcctgtgaactcttttcctccaccattcattgagggaaatcacagcagtagatggttgtacgaggctatggccaaagcttgggagccatggttgccggcggaggctttgagaacactgaggatcggggggttttacgccctgtcgccctacccaggcttgcgcctaatctcgctgaacatgaatttctgctcccgtgaaaatttctggctgttgatcaactcaaccgaccctgccggccaactgcagtggctggtaggggaattgcaggccgctgaggaccggggggataaagtgcacatcattgggcacatcccccccggacattgtcttaagtcctggagttggaactactatagaatcgtggccagatacgaaaataccttagccgcccaattttttggacacacccatgttgacgagttcgaagtattttatgatgaagaaaccctgtccagacctctcgccgtcgccttccttgcaccgtctgcgaccacctacataggcctaaatccgggttacagagtctatcagatcgatggaaattactccggtagcagccacgtggtgctggaccatgaaacttatatcctgaacctgacccaggcaaacatccctggggcaattcctcactggcagttgctgtatcgagcgcgtgaaacatatggcctccctaacactttacctaccgcctggcataatctggtctaccgtatgagaggcgacatgcagctgttccagaccttttggttcctgtatcacaagggccaccctccaagcgaaccatgtggcactccttgtagacttgctactctgtgcgctcagctgtctgcacgcgcggattcgcctgccctttgcagacacctgatgccagatgggtctctgccggaggcgcagagtctttggcctcggccgttattttgt

SEQ ID NO: 19760 - DNA, 1893 bp, synthetic construct
  misc_feature 1..1893: note = source = /note="Description of Artificial Sequence: Synthetic coding sequence"
  source 1..1893: mol_type = other DNA
atgccgcgatatggagccagcttacgccagtcttgcccccggtctgggcgggaacagggccaggatggtacagccggcgccccaggcctgctttggatgggcctggttctcgctctcgctttggccctcgcgctcgccctcgcactctcggacagccgcgtgctttgggctccggctgaggcccatcccttgtctcctcagggccacccagcccgcctccaccggatcgtcccccggctaagagatgtgtttggctggggcaacctcacctgccccatatgtaaggggctattcaccgctatcaacctcggactcaagaaagaacccaacgtggcaagggtgggatctgtggcaattaaactgtgcaacttgttgaagatcgctcccccagctgtctgccaatccatcgtgcacctctttgaagatgatatggttgaggtatggcgtcgtagtgtcctcagtccatcagaggcttgcggcctgctcctgggttccacctgtgggcattgggatatctttagttcctggaacatctcccttcctactgtgccaaaaccacccccaaaaccaccgagtccgcccgcccccggtgctcctgtctcaaggattttgtttttgactgacttgcattgggaccatgattatcttgaaggcacagaccctgactgtgcagaccctctgtgctgtcggaggggaagcggcctgcctcccgctagtaggccaggggcggggtactggggagaatacagcaaatgtgatctcccgttgcggacactggaatctttgcttagcggactgggacctgccgggcctttcgatatggtatactggaccggcgatattcctgcccacgatgtatggcaccaaaccaggcaggaccaactgcgcgccctaacaacggtcaccgccctggtaaggaaattcttagggcctgtaccagtctacccagcagtgggtaaccatgagtctactcctgtgaacagtttccccccgccattcatcgagggaaatcactcctcccggtggttgtatgaggcaatggccaaggcatgggagccatggctccccgcagaagccttgcggacactgagaatcggaggcttttacgcattaagcccctatccagggctcaggctgattagtctgaacatgaacttttgcagcagagagaatttctggctgctcatcaactcaaccgacccggccggccagttgcaatggctcgtaggcgaactgcaagctgccgaagaccggggggataaagtccatatcattggtcacatacctcctggacactgtttgaagagctggtcatggaactattatcggattgtagcccgatacgaaaatactctggcagcacagttcttcgggcacacccacgtggacgagttcgaagtgttctatgacgaagaaaccctgtctaggccccttgccgttgcctttcttgcccccagtgccaccacctacattggtttgaacccggggtaccgagtgtatcaaattgatgggaattacagcggctcctcgcacgtagtcctggaccacgagacgtacatcctgaacctgacacaggctaacatcccaggagcgatcccacactggcagctcctgtaccgcgcacgcgaaacttatggcctgcctaacaccctgcccacagcctggcataatctggtgtaccgcatgcgcggcgacatgcagctgtttcagaccttctggtttctttatcacaaagggcacccaccctctgagccttgcgggacgccttgcaggcttgctacactgtgcgctcagctctcagctagggctgacagtcccgcactgtgtaggcatctgatgccagatggaagcctgcccgaggcacagagcctctggccccgcccactgttctgc

SEQ ID NO: 19761 - DNA, 1893 bp, synthetic construct
  misc_feature 1..1893: note = source = /note="Description of Artificial Sequence: Synthetic coding sequence"
  source 1..1893: mol_type = other DNA
atgccgcggtacggcgctagtctcagacagtcttgtccgaggagcgggagggaacagggacaggacggtacggcaggggcccccggactgctctggatgggcttggtgcttgccttggctctcgctttggcgttggccctggcactttcagattcccgagtgttatgggctcctgctgaagcccaccccctgagcccgcagggccaccctgcccgactgcatcgaattgtgccacggctgagagacgtgtttgggtggggcaatctgacatgcccaatctgcaaagggttgtttacagctattaacctcggcctgaaaaaagaaccaaacgtcgcccgggtcggttccgtagccattaaactttgtaatctactcaaaatagccccgcccgcggtgtgtcaaagcatcgttcacctgtttgaagacgatatggtggaagtctggcgtcgatccgtgctgtccccttcagaggcatgcgggttactgctcgggagcacttgcggacattgggacatcttctcgtcttggaatatctcccttcctaccgtccctaaaccacctccgaagccacctagccctcccgcccccggtgcacccgtgagccggattctgtttctcactgacttacactgggaccacgattatttggaggggacggacccagattgtgcagaccctttgtgctgcagaagagggtctggtctacccccagcaagtaggccaggggctggctactggggagaatattcaaaatgtgatcttcccctaaggacactagagagtctacttagcggcctgggtccggccgggccctttgacatggtctattggacaggagatatcccagcacatgatgtctggcaccagactcggcaggatcagctaagagccttgacaaccgtaacagctctggtgcgaaaattccttggacccgtcccggtttatcctgccgttggaaatcacgagtccacaccagtcaatagttttccaccccctttcattgaaggcaatcactcttcgcgctggctgtatgaagcaatggcaaaagcctgggaaccttggctgcccgcagaggcactcaggacactgcgaatcggtggcttctatgctttgtccccttacccaggcctgcgacttataagtttgaacatgaacttctgtagtcgcgagaacttctggctactgattaactcaaccgacccggcaggccagttacagtggctagtgggagagttgcaggccgccgaagaccgcggagacaaagtccatattattggccacattccgcctggccactgcctgaagtcttggagttggaattactaccgtatagtggctcggtatgagaacacactggctgcgcagttttttggacacacgcacgtagacgagtttgaagtgttctatgacgaggaaacattgtcccgacccctagctgtcgccttcctggccccaagcgctacaacttatattggcctcaatccagggtacagggtgtatcagattgacgggaattactccggaagctcccatgttgtgctggatcatgaaacctacatcctgaacttgacacaggccaacattcccggtgccatcccccactggcagctactctatcgagctcgtgaaacatacggcctgccaaatacattgcctactgcctggcacaatctcgtttatcgaatgcgaggcgatatgcagctgttccagactttctggtttctataccataaaggccaccctccatctgaaccgtgtgggacgccttgtagacttgctactctgtgcgcgcagctgagtgcaagggcagacagccctgccctgtgcagacatttaatgcctgacggtagtctacccgaggcccagagtctctggccgaggccgctgttctgc

SEQ ID NO: 19762 - DNA, 1893 bp, synthetic construct
  misc_feature 1..1893: note = source = /note="Description of Artificial Sequence: Synthetic coding sequence"
  source 1..1893: mol_type = other DNA
atgccgcgctacggagcatctttgaggcagtcttgccccaggtccggtcgggagcagggacaggacgggacagccggcgcacccgggctgttgtggatgggcctcgtccttgcccttgctctggccttggcccttgccctggcactaagcgactcgcgggtcttgtgggcgcccgcagaagcccacccgctgtccccgcagggtcatccggcgcgtctgcaccgaatcgtgccccgcctgcgcgacgtgttcgggtggggaaacttaacgtgtcccatttgtaagggtctctttactgcaatcaatctcggcctgaaaaaagagcccaacgtggcccgcgtgggttccgtggcgatcaagctgtgcaatctcctgaaaatcgcgcccccggcggtgtgtcagagcattgtgcatctcttcgaggacgatatggtcgaagtgtggcgtcgcagtgtgttaagcccgtccgaagcttgcggcctattactgggttccacatgcggacactgggacatcttctcgagttggaatattagcctcccaacggtcccaaagccccccccaaagccaccttcaccgccggctcctggcgccccggtctcccggatccttttcctgaccgacctgcactgggatcacgactacctcgagggcacggacccggactgcgctgatcccttatgctgtcgccgtggaagcggcctcccccctgcctcccggcccggagccggttactggggggaatattcaaagtgcgacttacccctgcgcacgctggagagtctgctgtccggcctcggccccgccggcccgtttgatatggtctattggacaggtgacataccggcacacgacgtgtggcaccagacccgccaggatcagcttcgcgccctgactacggtgaccgccttggtacgcaaattcctcggcccggtcccggtctaccccgccgtgggcaaccacgagagtacccccgtgaactccttcccgccaccattcatagagggcaatcattcgagccgctggctatacgaggcgatggcaaaggcgtgggaaccctggctgcccgccgaggcactccggacactgcggataggaggattctacgcgctttcgccgtacccgggattgcgcctgatcagcctcaatatgaacttttgttcgcgagaaaacttctggttgctaatcaacagcactgatcccgcaggtcaactgcagtggttggtgggagagctgcaggcggcggaagataggggggataaggtacacatcattggtcacattccaccgggacactgtctaaagtcctggtcgtggaactactaccggatcgtggccaggtacgagaacacccttgccgcccagttctttggccacacacatgtggacgagttcgaggttttttatgacgaggagacactgtcgcgcccgctagccgtggcattcttggccccatctgccacgacctatatcggcctgaacccgggctacagggtctaccagattgatggcaactactccggaagctcacacgtcgtgctggaccacgagacttacatcttgaacctgacccaggccaacatccccggagccatacctcattggcagctgctatatcgcgcccgcgagacttacggcttgcccaatactctgccgacggcctggcataatctggtttatcgcatgaggggagatatgcagctgtttcagaccttttggtttttgtaccacaaaggacacccgcccagtgagccgtgcggcaccccgtgtcgactggcaaccctgtgcgcacagctgagtgcccgtgcagatagcccagcgttgtgtcgccatctgatgccagatggctcactgcccgaagcccagtcactatggcctcgtcccctgttttgc

SEQ ID NO: 19763 - DNA, 1893 bp, synthetic construct
  misc_feature 1..1893: note = source = /note="Description of Artificial Sequence: Synthetic coding sequence"
  source 1..1893: mol_type = other DNA
atgccgaggtatggagcctcactccgccagagttgtcccaggtctggtagagaacaaggtcaagatggcaccgctggtgcccctggcctgctgtggatgggtctagttctcgcactggcactcgcactggccctagccctcgccctcagtgatagccgtgtgctttgggcaccggcagaggcacatccattaagcccccaggggcatcccgcaagactgcaccggatcgtgccccgattacgggacgtgttcggctggggcaatctgacctgtccaatctgtaaggggttatttaccgccatcaatctgggtttaaagaaggagccgaatgtggccagagtggggagcgtcgctattaaactatgcaatttgctgaaaattgccccaccggctgtctgccagtccatcgtgcatctgtttgaagatgacatggtcgaggtgtggcgaagatcagttctcagcccgagcgaagcctgcggccttctgttaggcagcacctgcgggcattgggatattttttcttcctggaacatctcactcccaactgtgccaaagccacctccgaaacccccctctcctcccgcccctggcgcccccgtctctcgcatactcttcctaactgacttgcactgggatcacgactatctggaaggcaccgaccctgactgtgccgacccactgtgttgtcgccgcggctcagggttaccccccgcgtcacgcccgggcgccgggtattggggggagtactccaaatgtgacttgccgctgaggaccctcgagagtctcttgagtggactgggtcctgcagggccctttgacatggtttattggaccggggacatccctgcccatgatgtgtggcaccagacccgccaggaccagctgcgagctcttaccacggtgacggccctcgtgcgcaagttcctgggtccagtgcccgtgtaccccgcagttggaaatcacgaaagcactccagtcaactctttcccacccccctttatagagggcaatcacagctcgcggtggctgtacgaagcaatggctaaggcatgggagccatggttgccagccgaagcactacgaacattgaggatcggcggtttttatgcgctgagcccctatcccggacttcgcctgattagtttgaacatgaacttctgttccagagaaaatttttggcttctgatcaacagcaccgatcccgccggccaactacagtggttggtcggtgagctgcaagctgccgaagacaggggggacaaggtgcatataattggacacattccgcccgggcactgtctaaagtcctggagctggaactattaccggattgtggcacggtacgagaacactctggcagcacagttctttggacacacgcacgtcgacgaattcgaggtgttttatgacgaggaaacactgtctcgtcctttggccgtcgcattcctcgcccccagtgctacaacatatatagggctcaatcccggctatagagtttatcagatagacggaaattacagcggaagttcccacgtagtgctggatcacgaaacatacatactgaatttgacccaggcgaatattcctggagccataccacactggcagctactttacagggccagagagacttatggtctgccgaacacacttcctactgcatggcacaacctggtttatcgtatgaggggagatatgcagttgttccaaactttctggttcctgtaccacaaagggcatccacccagcgaaccttgcggaaccccctgtcgcttggcaaccctgtgcgcgcaactgagcgccagggcagactctcctgcactctgtaggcacttgatgcctgacggatcactccctgaagcccagtccctatggccccggcctcttttctgc

SEQ ID NO: 19764 - DNA, 1893 bp, synthetic construct
  misc_feature 1..1893: note = source = /note="Description of Artificial Sequence: Synthetic coding sequence"
  source 1..1893: mol_type = other DNA
atgcctagatacggcgcaagtctcagacagtcctgcccaagaagtggccgggagcagggacaggacggaacggccggtgcccccggactactctggatgggactcgtgcttgccttggctctagccctcgcattagccctcgccctcagtgatagcagggtgctgtgggccccagcggaagctcatcccctaagcccgcagggccatccagcccgactacacagaatcgtacctcgcctcagagatgtgtttggctgggggaatctcacctgccccatctgtaaggggctgttcacagcaattaatctggggttgaaaaaagagccaaatgtggcccgcgtgggaagcgtcgcaatcaagctctgcaacttattgaagatcgcgccccccgccgtctgtcagtctattgtccatctttttgaagacgacatggtggaggtctggaggcgtagcgtgctgagtccttccgaggcctgcggactcttgttagggagcacttgtggtcactgggatatcttttcatcttggaacatcagcctcccaacagtgcctaagccaccacccaagcccccatctccccctgctccgggggcccccgtgtccagaatattgtttctcaccgacctccactgggaccacgactatctggaaggaaccgatcctgactgtgccgatccactgtgctgcagacgcggctccggactgcctcccgctagccgacccggtgccgggtactggggagaatattccaagtgtgacttacctctccgaaccctggaatctctcctgtccggcttaggaccggcaggcccgttcgacatggtatattggaccggagatataccagcacatgatgtttggcaccagacccgccaagatcagctgagggctctgacaaccgtgactgcactggtgagaaagtttctcggccctgttccagtctatcctgctgtaggtaaccatgagtcaacaccagtgaactcgtttcccccaccttttattgagggtaaccactccagtcgatggctgtatgaggctatggccaaggcctgggagccttggttacccgcagaggctcttcgtactctgagaatcggcgggttctatgcactgtctccgtaccctgggttacgcctgataagcctgaacatgaatttttgttcccgggaaaacttctggctgctgatcaactctaccgacccggcaggccaattgcagtggttagtgggcgaactgcaggccgccgaagatcggggcgataaagtgcacatcatcggacacatcccaccagggcactgtctcaagtcctggtcttggaactactataggatcgtggctcgatacgaaaacaccttggccgctcagttcttcggacatacacatgttgatgaattcgaggtcttttatgatgaggagaccctgagtcggcccttggccgtggccttcctggcaccgagtgcgacaacctatattggtttaaaccctgggtacagggtttatcaaattgacggcaactactccggatccagccacgtagtgctggaccacgagacatacatcttgaacctgacccaggctaacatcccaggtgcgatccctcactggcagctgctttatagagcacgcgagacatacgggctgcctaacacactgcctacagcatggcataatctggtttatcgtatgaggggtgatatgcagctgtttcaaaccttttggtttttataccacaaggggcaccccccctccgagccgtgcggcaccccttgcaggttagccacactgtgcgcacagctgagtgcgcgtgccgatagccctgcgctttgtagacacctgatgccggacggcagcctgcctgaggcccaatcgttgtggcctcggccattattctgc

SEQ ID NO: 19765 - DNA, 1893 bp, synthetic construct
  misc_feature 1..1893: note = source = /note="Description of Artificial Sequence: Synthetic coding sequence"
  source 1..1893: mol_type = other DNA
atgccacgatacggggcatccctccggcagagctgtccacgctccggacgggaacaaggacaagatggtactgccggcgccccagggctgctctggatgggacttgtgctggccctggcactggccctggcgcttgcgctggccctgtcggattcgcgcgtgctctgggcaccagccgaggcccacccactgtcaccgcagggacaccccgcccgcctgcacaggatcgtgccgagactgagggatgttttcgggtggggcaacctgacttgcccgatttgcaagggcttgtttaccgccatcaacctgggactcaaaaaggagcctaacgtcgcgcgggtgggatcggtggccattaagctgtgcaaccttctgaagatcgcgccgcccgctgtctgccagagcatcgtgcatctgttcgaggatgatatggtggaggtgtggagacggtcagtcctttctccgtccgaagcctgcggtttgctgctgggatcaacctgcggacactgggacatcttcagcagctggaacatttccctgcccactgtgccgaaacccccgcctaagccgccatcaccaccggccccgggagctccggtgtcccggattctgttcttgaccgacctgcactgggaccatgactatctcgagggaacggaccctgactgcgcggacccactgtgctgtcggcggggttcggggctgccgcctgcctcacgtcccggagcgggttactggggcgaatactccaagtgcgatctgccgctgagaacgctggagtcgctcctgtcgggattgggaccggccggaccatttgacatggtgtactggacgggggacatccctgctcatgacgtgtggcaccaaacccgccaggaccaacttcgagcactgaccactgtgaccgcgcttgtcaggaagttcctgggaccggtgccagtttacccggccgtggggaatcacgagtcgaccccggtgaatagcttcccaccgccgttcatcgaaggaaaccattcgtcgcgctggctgtacgaagctatggcgaaggcctgggaaccttggctgcccgctgaagcgctccgaactcttcgcattggtggattttacgccttgtccccatatcctggcctgaggctcatctccctcaacatgaacttctgttcgcgggagaacttttggctcctgatcaacagcactgacccagcgggacaactgcagtggcttgtgggagaactccaagctgctgaggatcgcggcgataaagtgcacattatcggacacatcccgccgggtcactgcctgaagtcctggtcatggaattactacaggatcgtggcccggtacgagaatacgctggcagcacagttcttcggacatactcatgtcgacgagttcgaggtgttctatgatgaagagactctttcccggccgcttgccgtggcctttctggcaccttcggctaccacctacatcggactgaacccgggatacagagtgtaccagatcgatggaaattactccggctcctcccacgtcgtcttggaccatgaaacctacatcctgaacctgactcaagctaacatccctggcgccatcccgcactggcagctcctctaccgggcgcgcgaaacctacggactgccgaacaccctccccactgcatggcataatctggtctacagaatgcggggggacatgcagctctttcagacgttctggttcctctaccataaaggccacccgccgtccgagccgtgtggcacgccctgccgcttggccactctgtgcgcccagctcagcgcaagggcggacagcccggcgctgtgccgccacctgatgcccgacggctcattgccggaagcacaatccctgtggccaaggccgctgttctgc

SEQ ID NO: 19766 - DNA, 1893 bp, synthetic construct
  misc_feature 1..1893: note = source = /note="Description of Artificial Sequence: Synthetic coding sequence"
  source 1..1893: mol_type = other DNA
atgcccaggtatggagcatccctccgccagtcatgccctagaagcggtagggagcagggccaggatggtacagccggggcaccaggacttctctggatgggactggtgttggccctggctctggcccttgccttggcccttgcgctgagcgatagccgggtcctgtgggcaccagcagaagcccatcctctgagcccccaaggccatccagcaagactccaccgcatagtcccccggctgagagacgtgttcggctggggcaacctgacatgcccaatctgtaaggggctgttcaccgccattaaccttggtttgaaaaaggaacccaacgtggcacgggtgggatccgtggctatcaaactctgcaatctcctgaagattgcacctcccgccgtatgccagtctatagtgcacctttttgaagatgatatggtggaggtgtggaggaggtccgttctgtctccctcagaggcctgtggattgctgctgggcagcacgtgtggacactgggacattttttcttcctggaacatttccctgccgacagtcccaaagccaccacccaagcctcccagtccaccggcacccggcgctcctgttagtcgcatcctcttcttgaccgacctccattgggaccacgactacctggagggcaccgacccggactgcgctgaccccctttgctgtcgaagaggctcaggactgccccccgcatctaggccgggagctggctactggggggagtactcaaaatgcgacctgccactgcgaacccttgagagcttgctttccgggctcggtcctgctgggccatttgacatggtttattggactggcgacattccagctcatgacgtttggcaccagacaaggcaagatcaattgagggccctgaccaccgtaacggctctggtgagaaaatttctgggacctgtacccgtctaccccgcggtgggcaaccacgagtccacccctgtgaactcatttccccctccctttatcgaggggaaccattcatcccggtggctctacgaggccatggctaaggcgtgggagccctggctgcccgccgaggccctgagaacgctgcgcatcggcggattctacgccctgtccccttacccgggactgagattgatatcactgaatatgaatttctgttctcgggagaacttttggttgctcatcaatagtacagatccagccgggcagctgcagtggttggtgggtgagcttcaagctgccgaggaccgcggcgataaggtgcacatcatcggccatattcccccagggcattgcctgaaaagttggagctggaattattaccgcattgttgcacgatatgagaacaccctggcggcccagtttttcggccatacacatgtggatgaatttgaggtgttttatgatgaagaaaccttgagccgccccctcgccgtcgcatttctcgccccaagtgcgacaacatatatcgggttgaaccctggataccgcgtttaccagattgatgggaattactccggaagctcccatgtggttctggaccacgaaacatatatcctgaatctgactcaggccaatattcctggcgccatcccccactggcaattgctgtacagggcacgggagacgtacggccttcctaatactctcccgacagcctggcataacctggtgtataggatgcgcggagacatgcagttgtttcagacgttttggtttctgtaccataaaggtcaccccccatctgagccatgtggaactccgtgcaggcttgcaaccttgtgcgcccagctttccgcccgagcggactctcccgctttgtgtcgacatctgatgccagatggttctctgcccgaggctcagagtctctggccccggcccttgttttgc

SEQ ID NO: 19767 - DNA, 1893 bp, synthetic construct
  misc_feature 1..1893: note = source = /note="Description of Artificial Sequence: Synthetic coding sequence"
  source 1..1893: mol_type = other DNA
atgcctagatacggagcatcgttgagacaatcgtgtccaagaagcggcagggagcaaggacaagatggcactgcaggtgcaccaggccttctgtggatgggtttggtccttgcgcttgcactggcactggcccttgcactggctctgtccgattcaagggtcctgtgggctcctgctgaagcccaccctctcagccctcaaggccatcctgcccggctgcacaggattgttccacgcctgagagacgtctttggatgggggaatcttacttgccctatctgcaaaggactgtttactgcaatcaatctgggtctgaagaaggaaccgaacgtggcgcgagtgggaagcgttgcgattaaactttgtaaccttctcaaaattgcgcctcccgcggtgtgccagtcaatcgtgcacctgtttgaagatgacatggtggaagtttggagacgcagcgtgctttcaccaagcgaagcctgcggccttcttctcggaagcacctgtggacattgggacattttctcgtcctggaacatctcacttcccactgtgccaaagcctccccctaagcccccgagcccaccagcaccgggcgcgcctgtgtcacgaatcctgttcctcaccgacctccattgggatcatgattaccttgaaggtaccgatccggattgcgccgatcccctctgttgcagacgcggatccggtttgcctccagcatctcggccaggcgccggatactggggcgagtactcgaagtgcgatcttccccttagaacccttgagagccttctttcaggactgggacctgcagggcctttcgatatggtgtactggactggagacattcccgcgcacgatgtgtggcatcaaaccagacaagaccaactgcgcgcactgaccactgtgacggcactggtgagaaaattccttggaccagtgccggtctaccctgcagtggggaatcatgaatccacccctgtgaacagctttcctcccccattcatcgaaggaaatcattcaagccggtggctctacgaggcaatggcaaaggcatgggaaccgtggctgccagcggaggctctgagaacgctgagaattggaggcttttacgcgctttccccataccctgggcttcgtcttatttcccttaacatgaatttctgctccagggaaaacttttggcttttgataaactcaaccgaccccgcaggtcagcttcaatggttggtgggcgaactccaggcagctgaggaccggggagacaaagtccacatcattggtcatattcctccagggcactgtctgaagtcctggtcttggaactactacagaattgtagctcgatacgaaaatactcttgccgcacagttttttggacatacccacgtggatgagtttgaggtgttttacgacgaagaaaccttgtccagacccctcgccgtggcctttctggcaccatcggcgaccacttacatagggctcaaccccggataccgcgtgtaccagattgacggtaactactcgggatccagccacgtggtcctggatcatgaaacttacattctcaatcttactcaggccaacataccaggagctatccctcactggcaactcctgtaccgcgcgcgcgaaacgtacggactgcccaacaccctccctaccgcgtggcataacctcgtgtaccggatgcgcggagatatgcagctgttccagactttctggtttctgtaccacaagggacacccaccttcagaaccttgcggtactccatgtcgtctcgcaactctctgtgctcagctctcggcacgcgctgattcacccgccctgtgtagacatcttatgccagacggatccctcccagaagcacagtccttgtggccgcgccctttgttctgt

SEQ ID NO: 19768 - DNA, 1893 bp, synthetic construct
  misc_feature 1..1893: note = source = /note="Description of Artificial Sequence: Synthetic coding sequence"
  source 1..1893: mol_type = other DNA
atgcccaggtacggtgcatctctgcggcagagctgcccacggagcggtcgggaacaaggtcaggatggaaccgctggagcaccgggattgctgtggatggggcttgtgcttgcactggccctcgcccttgcactcgcgctggcacttagcgattccagagtgctctgggcacccgccgaggcacatcctctgtcgcctcaggggcatccagcaagactccatcgcattgtgccacgattgcgggacgtctttgggtggggaaatctgacgtgtcctatatgtaagggactcttcactgccatcaacctcggcctcaagaaagagcctaacgtggcaagagtggggtccgtggcaatcaaactgtgcaacttgctgaagatagcaccacctgcagtttgccagtcaatcgtgcacctgtttgaagatgacatggtggaagtgtggagacgttcggtgctctccccaagcgaggcatgtggtcttttgcttggcagcacctgcggacactgggatatctttagcagctggaacatcagccttccaactgttcctaagcctccgccgaaaccccctagcccacccgccccgggagcccctgtgtcgaggatcctgtttctgaccgatcttcattgggatcacgattacctggaaggcaccgatccagactgtgcagatccactgtgttgtcgacgcggaagcgggcttccgcctgcaagccgacctggagcaggatattggggggagtactcgaagtgtgacctccccctgagaacgctggagtcattgctctccggtttgggtccagcgggcccattcgatatggtgtactggaccggagatatccctgcccacgacgtctggcatcagactagacaggatcaattgcgtgctttgaccaccgtgaccgcacttgtgcgtaaattccttggtccagttccagtctatcctgcagtgggtaaccatgagtcaactcccgtgaattcatttcctccaccatttatcgagggcaaccactcctcgcgctggctttacgaagcaatggccaaggcgtgggagccatggctgccagccgaagccctgagaaccctgcggatcggcggcttttacgcgctgtctccataccccggactgcggctgatctcgctgaacatgaacttttgttcgagagaaaacttttggctcctgattaactcaactgatcctgcaggtcaacttcaatggctggtcggtgaactccaagcagctgaagataggggagataaggtccacatcattggacacatccctcctggccactgtcttaagagctggtcgtggaattactacagaattgtagcaaggtacgaaaataccctggcagcacagtttttcggacatactcatgtggacgaatttgaagttttctacgacgaggaaactcttagcaggccgcttgccgtggccttcctcgccccatccgcgactacttacatcggccttaacccaggctatcgggtgtaccagatcgatggaaactattccggatcgagccatgtcgtgctggaccatgagacgtacattcttaatctcacgcaagcaaacatcccgggggcaatcccccattggcaacttctgtacagagcacgggagacttacggacttcccaatacccttccaaccgcatggcataatcttgtgtacaggatgcgtggtgatatgcagctctttcaaactttctggttcctttaccacaaaggtcatcccccatctgaaccatgtggaaccccttgccggctcgcaaccctgtgcgcacaactctcagcacgggcggattccccagcgctttgcaggcatcttatgccggatggaagcctcccagaagcccagtccctttggcctcggcctctcttttgc

SEQ ID NO: 19769 - DNA, 1893 bp, synthetic construct
  misc_feature 1..1893: note = source = /note="Description of Artificial Sequence: Synthetic coding sequence"
  source 1..1893: mol_type = other DNA
atgcccagatatggggccagtctccgtcagtcctgccctagatcagggcgggaacagggtcaggatggtacagcaggagcgcccggactactttggatgggtctggtgctcgctttagcactggcattagctcttgctcttgcactgagcgatagccgtgttctgtgggctccggccgaggctcatccccttagcccacaggggcacccagcaagactgcatagaattgtgccacgtcttagggatgtattcggttggggtaatttaacctgcccaatctgtaagggactttttacagccatcaacctcgggctcaaaaaggaacccaatgtggcaagggttggaagcgttgcaataaaactgtgtaaccttctgaagattgccccacctgctgtgtgtcagagcattgtacaccttttcgaagatgatatggtcgaagtatggcgccgtagtgtactgtcaccatccgaggcatgcgggcttctcttgggtagtacgtgtggccattgggacatcttctcctcatggaatatttcactgcccacagtacccaaaccccctcccaagccaccttctcctccagcaccaggagctcccgtatcaaggatcctgttcctgactgatcttcactgggaccacgactatctggaggggaccgacccggactgtgcagacccgctctgttgtagacgtggaagcggactgccccctgcctccaggcccggagccggttactggggtgaatactctaaatgtgaccttccacttagaactctggaatctctgctgtctggacttggcccagcgggcccatttgacatggtctattggacaggagacatccccgcgcacgatgtgtggcatcaaaccaggcaggaccagcttcgggctctcacgacagtgaccgccctggtgcgaaaattcttgggccctgtgcctgtttacccggcagtgggcaaccatgagtctacccctgtgaacagctttcctcccccatttattgaaggcaatcatagtagccggtggctgtatgaggctatggccaaggcctgggaaccctggttgcctgctgaagcccttcgaacgctgcgcatcggcggcttttacgctctgagtccataccctggtctccgcttaatttcccttaatatgaacttctgcagccgcgagaacttctggttgctgatcaacagcactgaccctgccggccagctccagtggcttgtaggagaactgcaggccgccgaggacagaggtgacaaggttcatattatcgggcatataccacccggacactgtcttaaatcctggtcatggaattactatagaatcgtggccagatacgaaaatactttagccgctcagttctttggacacacccatgttgacgaattcgaagtgttctacgacgaagaaacactgtcgcgccccctggcggtggcttttctggctccaagtgccacaacctacattggattaaatcctgggtaccgggtttaccaaatcgacgggaactacagcggatcctctcatgttgtgctggatcacgagacctatattctgaatctcacacaggccaacatcccaggggctatcccccactggcagcttctgtacagggcacgggagacctacggcttgcctaatacactgcccacagcctggcacaatctggtgtatcgcatgcggggggacatgcagttgtttcagactttctggtttctctaccataagggccaccccccttctgagccctgcgggaccccgtgtcggctggctaccttgtgcgcgcagctgtctgctcgggcagattccccggccctgtgtcgacatctgatgccagacgggtccttgccagaggcacagtccctctggccacgccctttgttctgt

SEQ ID NO: 19770 - DNA, 1893 bp, synthetic construct
  misc_feature 1..1893: note = source = /note="Description of Artificial Sequence: Synthetic coding sequence"
  source 1..1893: mol_type = other DNA
atgcctaggtacggagcaagtctgagacagtcttgtcctcgcagtggccgggagcagggccaggacggcacagccggtgctccaggcctgctgtggatgggtctcgtgctggcgttagcactggctttggctcttgccctggctctttccgatagtagagtgctgtgggccccggcggaggcgcacccgctgagtccccaggggcatcccgctcggttgcacagaattgtgcctcgcctgagagacgtgtttggatggggtaacctgacatgcccaatttgcaaaggacttttcactgcaataaatctcggcctgaagaaggagccaaatgttgcgagagttggctctgtggctattaaactgtgtaatctgctgaaaattgcgcctccagccgtgtgtcagtcaatcgtgcatttgttcgaggacgacatggtggaggtttggagaaggtctgtgctgtccccttcagaggcctgtgggttattactgggcagcacatgtggacattgggacatcttctccagctggaatatcagtttgccgactgtacccaagccaccgcctaagccacccagtccccctgcaccaggtgctccagtctcccggatcctgtttctgactgatcttcattgggaccacgactatctggagggtaccgatcccgactgtgctgaccctttgtgttgccgccggggcagtggcctcccaccggctagcaggcctggtgccggttactggggcgaatatagtaagtgcgacctccctcttcggacattggaatcactcctgagtggactgggccccgccgggccatttgatatggtgtattggactggcgacatccccgctcacgatgtttggcatcaaacgaggcaggatcagttgagagcgctgacgacagtgactgccctggtacgcaaatttctgggtccagtgcctgtgtaccctgccgtgggtaaccacgagtccacgcccgtcaattccttcccaccaccgttcattgaagggaatcactcctctaggtggctctatgaggcgatggccaaagcctgggagccatggttgcccgcagaagccttaaggactttgaggattggagggttttacgcattgagcccctacccaggcttacggctcataagtttaaacatgaacttttgcagccgtgaaaatttttggcttctcattaacagtaccgatcctgctggacaactacagtggctggttggcgaactgcaggctgccgaagacaggggagacaaagttcatataattggccacatcccgcctgggcactgccttaagagttggtcatggaattattaccgcatcgtggctaggtacgagaacactttggccgctcagttcttcggacatactcacgtcgacgaattcgaggtgttctatgacgaagaaactctgagccgccccctggcagtcgcctttttggccccgtcagccaccacttatatcggattaaatccagggtaccgtgtgtatcaaatcgacgggaattacagcggttcctctcacgtcgtgcttgatcatgaaacgtatatcctgaacctgactcaagcgaacatacccggcgctatcccccactggcaactgctctatcgggctagggaaacttatggcttgccaaatacgttgcccactgcgtggcataatctggtatacaggatgcgcggagatatgcagctgttccagacattttggttcttgtaccataaaggacacccgccctcagagccatgtggcaccccctgccgcctcgccactttgtgcgcccaacttagtgcacgggcagattcacccgccctgtgcaggcaccttatgcccgatggatctttgcctgaggcccaatccttgtggcccaggccactcttctgt

SEQ ID NO: 19771 - DNA, 1893 bp, synthetic construct
  misc_feature 1..1893: note = source = /note="Description of Artificial Sequence: Synthetic coding sequence"
  source 1..1893: mol_type = other DNA
atgccgaggtacggcgccagcctgcgccaatcctgcccgcggtccgggcgcgagcagggacaagacggaaccgctggagccccagggctcctgtggatgggcctggtgctggcacttgccctggcgctcgcactggcccttgccctctccgatagccgcgtgttgtgggcgccggccgaggctcaccctctgtcaccacaggggcatcccgcgcgtctgcacagaatcgtgccgcgcttgagagatgtgttcggctgggggaacctgacttgtccgatctgcaaaggcctgttcaccgcgatcaatctgggcctcaagaaagagcccaacgtggccagagtgggatcggtcgcgataaagctgtgtaatcttctgaagatcgctccaccggctgtgtgccagtcgatcgtgcatctcttcgaggacgacatggtggaggtgtggaggcgcagcgtgctgtcacctagtgaggcttgcggccttcttctgggctcaacctgcggacattgggacatcttcagctcgtggaacatctcgctgccaaccgtgcctaaaccgccgccgaagccgccgtctccccctgccccaggagctccggtgtcgagaattttgtttctgaccgacctccattgggaccatgattacctggagggtaccgacccagactgcgcagatccgttgtgttgccggcgtggatccggtttgccccctgcctcaagaccaggagcaggatactggggggaatattcgaagtgcgacctgccactgcgcaccctcgaatcactgctgtcgggactggggccagcgggtccgtttgatatggtgtactggaccggagatatacctgcacacgatgtctggcaccagactcggcaagaccagctcagggcccttaccactgtgactgcattggtgagaaagttcctcggaccagtgccagtgtatcccgccgtcggaaaccatgagagcaccccggtcaattcctttccccctccgttcattgaaggcaaccactcatcgaggtggctgtacgaagctatggccaaagcgtgggaaccctggctgccagccgaggccttgaggaccctcagaatcggcgggttctacgcgctgtcaccgtaccctggcttgcgcctgatctctctgaatatgaacttctgctcgcgggagaatttctggcttctcattaactccactgatcccgccggacagctgcagtggcttgtcggagagctgcaagccgccgaggaccgtggcgacaaggtgcatatcattggacacatcccgcccggacactgtctgaagtcgtggagctggaattactaccggatcgtcgcccgctacgagaataccctggcggcacagttttttgggcacactcatgtcgacgagtttgaggtcttttacgacgaggaaactctgtcgcggccacttgcagtggccttcctggcaccgtcggctactacctatatcggattgaatccaggctaccgggtgtaccagattgatggaaactatagcggatcctcgcacgtggtgttggaccacgaaacctacattcttaacctgacgcaagcaaacatcccgggagccatcccgcattggcagctgctctaccgcgcacgggagacgtacggcctgcctaacaccctgcctaccgcgtggcataatcttgtctaccgcatgcgcggagacatgcagctgttccagactttctggtttctttaccataagggacacccgccgtcagaaccctgcggtaccccatgccgcctggcgactctttgcgctcagctctcggcgagagcagatagcccggccctgtgcaggcatctgatgccggacgggtccctgccggaagcccagagcctgtggccaagaccactcttctgt

SEQ ID NO: 19772 - DNA, 1893 bp, synthetic construct
  misc_feature 1..1893: note = source = /note="Description of Artificial Sequence: Synthetic coding sequence"
  source 1..1893: mol_type = other DNA
atgccacgttacggggcgagcctgagacaatcttgtccccgtagcgggagagaacaagggcaggacggcaccgctggagctcctggcttactgtggatgggtctggttctcgccctggcgttagcacttgctcttgctcttgccctcagcgattctcgtgtcctttgggctcccgctgaggcccaccctctcagcccccaagggcacccagcgcgtctgcataggattgttcctaggctgcgcgacgtctttgggtggggtaatctgacatgcccaatttgcaaggggttatttaccgccatcaacctgggcctgaagaaggaacctaatgttgcacgggtagggtctgtggcgattaaactttgcaacctgctcaaaattgccccaccagcagtgtgccagtcgatcgtccatctctttgaagacgacatggttgaagtctggcgcaggagcgttctgagcccttcagaagcctgtggcctgttgttgggaagcacatgcggacattgggatatattcagctcctggaacatctcgctgccaaccgtacctaagccaccacccaagcccccttcacctccagcccccggcgccccagtgtcacggatcctgttccttaccgatttgcactgggaccatgattacttggaaggaaccgaccccgactgtgctgacccactttgttgtcggcgtggtagcggcctgccgcctgccagccgcccaggagccggctattggggagaatacagcaagtgtgatctgcctttgagaacactggaatccttactttcagggctggggccagctggaccattcgatatggtttactggaccggggatatccccgcccatgatgtgtggcaccaaacccgccaggatcaactccgcgctctcaccacggttacagcactcgtccgcaagtttctgggtccagtgcctgtgtacccagcggtgggcaaccacgagagtacacctgtcaacagtttcccaccacccttcatcgaaggcaaccattcatcgcggtggctgtacgaggctatggctaaggcatgggagccctggctgcccgctgaggctctgagaactttgcgaattggcggattctatgctctttcaccatatcccggcctgcgccttatcagcctgaacatgaacttctgtagtcgcgaaaatttctggttactcatcaacagtacagatccagccgggcaactgcagtggctggtcggagaacttcaggccgcagaggatagaggcgataaagtgcatatcattggccacattccccctggacattgcctcaaatcatggagctggaactattacagaatcgtggctcgatacgagaatacgctggcggctcaattttttggacacacacacgtggatgagtttgaggtattttacgacgaagagaccttgagcaggccattggctgttgcattcttggctcctagcgctactacctacatcggcctgaaccccggctaccgcgtgtaccaaatcgatggaaactacagtggctcctcccatgttgtcctcgaccatgagacctatatccttaatctgacccaggcaaatattccaggagccattcctcattggcagttgctgtacagggctcgggaaacatatggcctgccgaacactctgccaaccgcctggcacaacctggtttatcggatgagaggcgacatgcagctctttcagacattctggttcctgtaccacaagggacaccccccttccgagccctgtggcactccctgcagactggcaaccctgtgcgcccagctttccgctagagcagactcccctgctctgtgcagacaccttatgcccgacgggagcttacctgaagcacagtccctctggccgcgccccctgttttgc

SEQ ID NO: 19773 - DNA, 1893 bp, synthetic construct
  misc_feature 1..1893: note = source = /note="Description of Artificial Sequence: Synthetic coding sequence"
  source 1..1893: mol_type = other DNA
atgcccagatacggagcctccctgagacagtcctgtccgcgttccggacgcgaacagggacaagatggcactgccggcgcacccggtctgctctggatgggactggtgctcgcgctggcgctcgccctcgccctggctcttgctctgtccgattccagggtgctctgggcgccggcggaggctcaccccctgagcccacagggacaccctgcccgcctccacagaattgtgccacggctcagagacgtgttcggatgggggaacctcacctgcccgatctgcaagggactgttcaccgctatcaatcttggactgaagaaagagccgaatgtggcgcgagtgggaagcgtggcgattaagctgtgcaatctgctgaaaatcgcgccgcctgcggtgtgtcagtcaatcgtgcatctgttcgaagatgacatggtggaggtgtggagaaggtccgtgttgtcgccgtccgaggcttgcgggctgctgctcgggtcgacctgcggacactgggacatcttcagctcttggaacatctccctgcctaccgtgccgaaaccgccgccgaagccaccgtcaccgccggccccaggagcgcctgtctcacggatcctgttcctcaccgatctgcactgggaccacgattaccttgagggaaccgatccagactgtgccgacccgttgtgttgccgccggggtagcggactgccaccggcctccaggccgggagccgggtactggggggagtattccaagtgcgatctcccgctgcgtactcttgaatcgctcctgtcgggattgggccccgcaggaccatttgacatggtctactggacgggagacatcccagctcatgacgtctggcaccagactcgacaggatcagcttagggcgctcaccactgtgaccgcactggtcagaaagttcctgggtccggtgccggtgtatccggccgtgggaaaccatgaatcgacccctgtgaactcctttccaccacctttcatcgagggcaatcactcgtcgaggtggctttacgaggcaatggcgaaggcctgggagccgtggctgccggcagaagccctgcggaccctgcggatcggaggcttttacgcgctcagcccttatcctggacttcggttgatctccctgaatatgaacttttgctcgcgggaaaacttctggctcctgatcaattcgaccgaccctgctggacagctccagtggttggtcggagagctccaggccgccgaagataggggagacaaggtccacatcatcggacatatccctcccggccattgcctgaagtcctggtcatggaattactaccggatcgtggcaagatacgaaaacactctggcggcgcagtttttcggtcacacccatgtcgatgagttcgaagtgttctacgacgaagaaactttgtcccgccctctggcggttgctttcctcgcaccttccgcaactacgtacatcggactgaaccctggttatcgggtgtaccaaatagatggtaactacagcggctcgtcacatgtggtcctcgaccacgaaacctacatcctcaatctgactcaggcgaacatccccggggcaatcccacactggcagttgctgtaccgcgcccgggaaacctacggcctcccgaatacccttcccaccgcctggcataatcttgtctaccgcatgcggggtgacatgcagctgttccagactttctggtttctgtaccataagggacacccacctagcgagccatgcggtactccgtgcaggctcgcgactctgtgcgcgcagctttcggccagggcggacagcccggctttgtgtaggcatctgatgccggacggctcgctgccggaggcccagagcctgtggccgcggccgctcttttgc

SEQ ID NO: 19774 - DNA, 1893 bp, synthetic construct
  misc_feature 1..1893: note = source = /note="Description of Artificial Sequence: Synthetic coding sequence"
  source 1..1893: mol_type = other DNA
atgccgcgctacggagcatcacttcggcagagctgtccaagatcaggtcgcgagcaggggcaagacggaacggccggtgccccaggccttctttggatgggtctggtgctggcattggcactggcccttgcattggcgctcgcactgtcggacagccgtgtcctgtgggcacctgcggaggcccacccattgtctcctcaaggacaccctgcgagattgcacaggattgtgccaagactccgtgacgtctttggctgggggaacctgacctgtcctatatgcaagggtctttttaccgcgattaacctcggacttaagaaagagcccaacgtggcccgggtcggaagcgtggcgattaagctctgtaatctcctgaaaatcgcccctcctgcagtgtgtcaatcgattgtgcatctttttgaggacgacatggtggaagtgtggcggcggtcggtcctttcgccatcggaggcttgtggtctgctgcttggttcaacctgtggtcattgggacattttctcctcatggaacatctcgctgccaaccgttcccaaaccgccacccaaaccaccttccccaccggccccaggcgctccggtttcccggatccttttcctcactgaccttcattgggatcatgattacctggaaggcactgatcctgactgcgccgacccattgtgttgccgtcgtggatcaggacttccacctgcatcccgccctggcgcaggatactggggagaatattctaaatgcgatctgcctctgaggactctggaatccctgctttcggggcttggccctgcaggtcctttcgacatggtctactggacgggagatattcccgcacatgatgtctggcaccagactcgacaggaccagttgagagcacttactactgtgaccgcactggtcagaaaattccttggtcctgtgcctgtgtaccctgccgtcggtaatcacgaatcaactccagtgaattcctttccacctcctttcatagagggtaatcactcctctcggtggctttatgaggcaatggcaaaggcctgggaaccctggcttccagccgaagcgctgagaacccttaggatcggaggcttctacgcactttcaccctaccccggactccgattgatttcacttaacatgaacttttgttcgcgggagaacttttggctcctgattaactctactgatccagcaggtcaactgcaatggcttgtgggtgaactgcaggcagcggaggacaggggagacaaggtccacatcattggtcacatccccccagggcattgtcttaaatcatggagctggaattactaccgaatcgtggcaagatacgaaaacaccctcgccgcacaattctttgggcacactcacgtcgacgaattcgaggtgttttacgacgaagagactctgtcgcgtcccctggcagtggcgttccttgcgccttccgcgaccacctacataggactgaatccaggatacagagtgtaccaaatcgatggtaactactcgggatcgtcgcacgtggtccttgaccatgaaacttacatcttgaacctgacccaagcaaacattcccggggccattcctcattggcaactcctgtaccgcgcaagagaaacctacggacttccaaacaccctgccgactgcttggcataacctggtctaccgaatgcgcggagacatgcagctgtttcagaccttttggtttctctaccacaaggggcatcccccatcggaaccttgtggaactccctgtagactcgcaaccctttgtgcacagttgagcgcaagagcagattcgccagcgctttgtaggcatcttatgcccgacggaagcctgccagaagcccagtccctgtggccccgccccctcttttgc

SEQ ID NO: 19775 - DNA, 1893 bp, synthetic construct
  misc_feature 1..1893: note = source = /note="Description of Artificial Sequence: Synthetic coding sequence"
  source 1..1893: mol_type = other DNA
atgcccaggtatggggcctcccttagacagtcctgtcctcgcagtggacgcgaacagggacaggacggaacagccggggctcctggactcttatggatggggcttgtgctcgccctagccctcgcacttgctttggccctggccctctctgattctcgagttttgtgggcaccagccgaagcccaccccttatcaccccagggacacccagctagactacatcggattgtgcctaggctcagggatgtgtttgggtggggaaatctcacatgtcccatttgcaaagggctgttcactgccatcaacctcggactcaaaaaggaaccaaacgtggccagggttggatctgtcgctatcaagctgtgtaatttgctaaaaatcgctcctcccgctgtctgtcagagtatcgtgcacctgttcgaagatgatatggtggaagtttggcgcagatccgtcctgtccccctccgaagcatgtggactcctgctagggtccacatgtggacattgggatatattctcttcttggaacatttctctgcctactgtcccaaaacccccacccaaacctccatctcctcccgccccaggagccccagtgtccagaatattgttccttactgacctccactgggatcatgattatcttgaaggaactgatccagattgtgccgatcccctttgttgtcgccggggatcgggattacccccagcgtctcggccaggggctggatattggggggaatactccaaatgcgacttacccctaagaacgctggagtcattgctttcggggctgggacccgctgggccattcgatatggtttattggactggggatatccctgcacacgatgtctggcaccagacaagacaggaccagctgagagctctcactacagtcacagctctggttagaaaatttctagggcccgtgcctgtctatcccgccgtgggaaaccacgagagtacacccgtgaacagttttcctccccccttcatcgagggaaaccattcctccagatggttgtatgaggcaatggctaaagcctgggaaccttggctccccgccgaggccctccggacattaagaatcggagggttttatgccctctctccctatccagggctgagacttatatcattgaatatgaacttttgttctcgggaaaacttctggctactcataaactcaacagaccccgccgggcagcttcagtggctggttggagaactccaggcagccgaagatcgcggggataaagtccatatcatagggcatatccctcccgggcattgtctcaaatcatggagttggaactactatcgaattgtcgcaagatacgagaatactctagctgctcaattcttcggacatacacatgtagatgaatttgaagtgttttacgatgaagaaacactctctcgacccctcgcggtggccttcctagcaccctcggctacaacatacatcggactcaaccccggatatagagtataccagattgatggaaattactccgggtctagtcatgtggtgttggatcacgagacttacatactgaatttgactcaggctaacatacctggagcaatacctcactggcagctgctctatcgggccagggaaacttacggactgcccaacactctgcccactgcctggcataaccttgtttatagaatgagaggagatatgcagctcttccagacattttggttcctataccacaagggacaccccccgagtgaaccttgtggaacaccatgtcggctcgcaactctctgcgctcagctctccgcgagggctgattcccctgctctgtgtagacacttaatgcctgacgggtcactgcctgaagctcagtctctttggccaagacccctcttttgt

SEQ ID NO: 19776 - DNA, 1893 bp, synthetic construct
  misc_feature 1..1893: note = source = /note="Description of Artificial Sequence: Synthetic coding sequence"
  source 1..1893: mol_type = other DNA
atgcctcgatacggagcttcgctcagacagagctgccctaggtctggacgggaacaaggacaggatggcactgccggagcaccgggattgttgtggatgggactcgtgcttgctctggcactggccctcgcgctcgcgctggctctgtcggactccagggtgttgtgggcccctgcggaggcccacccgttgtccccccaagggcaccctgcacgactgcaccgcatcgtgccccgcctgagagatgttttcggctggggaaatctgacctgccctatttgtaagggtctgttcaccgcaatcaatctgggactcaagaaggagcctaacgtggcccgcgtcggttcagtcgcaatcaaactttgtaacctcctgaagatcgcaccaccagccgtatgtcaatcaatcgtccatctctttgaagacgatatggtggaggtctggcgccgctcagttctgagcccatcagaggcgtgcggactcttgctgggctcaacttgcggtcactgggatatcttctcctcctggaatatttccctcccaaccgtgcccaagccccctccaaagccaccgtccccaccggctccaggagcacctgtttcgcgtatccttttcttgaccgaccttcattgggatcatgactacctggaaggcactgatccggactgcgccgaccctttgtgctgtcggcggggcagcggactgccacctgcttcacggcccggggccggttactggggagaatacagcaagtgcgacctgccgctgcggaccttggaatctctcctctcgggactgggcccagcgggcccgtttgatatggtgtattggactggagatatcccggcccacgacgtgtggcaccaaactagacaggaccaactccgagcactgacgacggtgaccgccctggtgcgcaaattcctggggccggtgccggtctaccctgcagtaggaaatcatgagagtaccccggtcaattcctttccaccgccgttcatcgagggaaaccattcttcaagatggctctacgaggcaatggctaaggcctgggagccgtggctcccggctgaagctctgagaactttgcgcatcgggggattctacgcgcttagcccgtacccaggactgcgcctcattagcctgaacatgaatttttgctcccgcgagaatttttggctgctgatcaactcaaccgaccccgccggtcagctgcagtggcttgtgggcgaactgcaggccgcggaggatcgtggcgacaaggtccatatcataggtcatatccctccgggccactgcctgaaatcgtggagctggaattactacagaatcgtggcccgttatgaaaacaccctggctgcgcagttcttcggtcatacccacgtcgacgagtttgaggtgttctatgacgaagaaactctgtcgaggccgctcgccgtggccttcctggccccgtccgccaccacgtacattgggctgaaccccgggtacagagtctaccagatcgatgggaactactcgggatcctcgcatgttgtgctggaccacgaaacgtacattctcaacctgactcaagcgaacatcccgggagcgatccctcactggcagttgctgtaccgcgcaagagaaacttacggactcccgaacaccctgcctaccgcgtggcacaacctcgtctaccgcatgagaggagatatgcaactcttccagaccttctggttcctgtaccacaaaggacacccgccgtcggaaccatgcggtactccatgtagactggcgaccctgtgcgcccagctgtctgcgcgagcagactccccggcactgtgcagacacctcatgccggatggcagtctcccagaagcccagtcactttggccgcggcccctgttctgc

SEQ ID NO: 19777 - DNA, 1893 bp, synthetic construct
  misc_feature 1..1893: note = source = /note="Description of Artificial Sequence: Synthetic coding sequence"
  source 1..1893: mol_type = other DNA
atgccgagatacggtgcctcgctgcggcagtcgtgtccacggagcggaagagaacagggacaggacgggaccgcaggggcaccgggacttctgtggatggggctggtcctcgccctggcacttgcacttgcattggcacttgcgctttcagattcacgagtgctgtgggcaccagccgaagcacaccccctcagcccgcaaggacacccggcaagattgcatcgcattgtgccacgtctccgcgacgtgtttggatggggtaacctgacctgtccgatttgtaaaggactgttcactgcaatcaaccttggacttaagaaggagccaaacgttgcgagggtgggttcggtggcgattaagctgtgtaatctgctcaagatagctccgccggcggtatgccagtcgatcgtgcatctcttcgaggatgacatggtcgaagtgtggcgcagatccgttctctccccttcggaagcatgcggactcctgctcggttcaacctgcgggcattgggatatcttttcaagctggaacatttcactccctaccgtccctaagcctccccctaagcccccatcgcccccggcgcccggggcacctgtgtccaggattctttttcttaccgatctccactgggatcatgactacctcgaaggtactgacccagattgtgcagatcccctgtgttgtagaaggggttccggactgccgcccgcgagcaggcccggggcaggttactggggggaatactcgaagtgcgaccttcctcttagaaccctggaatcgcttcttagcggactcgggcctgcaggaccatttgacatggtgtactggaccggcgatatcccagcgcacgatgtgtggcatcaaaccagacaggaccagctccgcgcacttactactgtgactgccttggtgcggaaatttcttggcccagttcctgtttaccctgcggtgggtaaccatgaaagcacgcctgtgaattccttcccccctcctttcattgaaggcaatcattcgtccagatggctgtacgaggcaatggcaaaagcctgggaaccttggctgccagcagaagcactgcggactctgcgaattgggggattctacgcactgtcaccttaccccggactcaggcttatctccctgaacatgaacttttgttcgcgagagaacttctggctgctgatcaattcgactgatcctgccggacaacttcagtggctggtgggtgagcttcaagcggctgaggaccgcggcgataaggtgcacatcattggacatatcccgcctggccactgtttgaagtcatggtcctggaactattaccggattgtggccaggtacgaaaacactctcgcggcgcagttttttggtcatacccacgtggacgagtttgaagtcttttacgacgaggaaaccttgtcacgtccgcttgcagtggcatttctggcaccgagcgccaccacctatattggtcttaatccaggttaccgagtgtaccagattgatggtaactacagcggatcctcgcacgtcgtgcttgaccatgagacttacattcttaatctcacccaagcaaacatcccgggagccatacctcattggcagcttctttaccgggcaagggaaacctacggacttccaaatacgctcccaactgcatggcataacctggtgtaccggatgcgcggagatatgcaactgtttcaaactttttggttcctgtaccacaaaggtcatccaccttctgaaccctgcggaactccatgtagacttgcaaccttgtgcgcccagctgtcagcgcgcgcggacagcccggcattgtgcaggcatctgatgcctgatggatcgcttcccgaggcacaatccctgtggccaaggcctcttttttgt

SEQ ID NO: 19778 - DNA, 1893 bp, synthetic construct
  misc_feature 1..1893: note = source = /note="Description of Artificial Sequence: Synthetic coding sequence"
  source 1..1893: mol_type = other DNA
atgcctagatacggggcctcacttcggcaatcatgtcctcggtccggtcgcgagcagggacaagatggaaccgcaggagcaccaggactgctttggatgggcctcgtgcttgcactcgcgctcgcattggcccttgcacttgccctttctgattcgcgagtactttgggcaccagcagaagcgcatccgctgtcccctcaaggacaccctgcaaggctccataggattgttccaagactgagagatgtgttcggctggggcaatcttacttgtccaatttgcaagggccttttcacggctattaacctcggtcttaagaaagaacctaacgtggcccgggtcggtagcgtggcaatcaaactctgtaaccttctgaaaatcgcgcctcctgccgtctgccagtccatcgtgcatctttttgaagatgatatggtcgaggtgtggcgacgttcggtcctttcgccttccgaagcatgcggtctgttgcttggatccacctgcgggcattgggatatcttttcgtcgtggaacatatctctgccgaccgtgccaaagccgccaccgaagcctccttcgcctcctgcaccaggtgcacccgtttcgcgtattctctttctcactgatctccattgggaccatgactaccttgaaggaaccgacccggattgtgcagaccctctttgttgtcgcagggggtcgggtttgccacctgctagccgacctggagctggctactggggtgaatacagcaaatgcgatctgcctctgagaacccttgaatcacttttgtcgggactgggacctgccgggccatttgacatggtctattggactggagacattcctgctcatgatgtgtggcaccagaccagacaggatcaactgagagcgctcactaccgtcacggcattggtgagaaagtttcttggacctgtgccagtctaccccgcggtgggaaaccatgagtccaccccagtgaatagcttcccccctccgtttattgaaggcaaccattcgtccagatggttgtacgaagcaatggccaaagcatgggaaccgtggctccccgcagaagccctgcggactttgagaattggaggattctacgccctttccccctaccctggacttcggctcatttcccttaacatgaatttctgttccagagaaaacttctggctcctcataaactccaccgatcctgctggacaactgcaatggctggtgggagaacttcaagcggcggaagataggggagataaagtgcacatcatcggtcatattccacctgggcattgccttaaatcctggagctggaactactacagaatagtcgcccggtacgagaatacccttgccgcccagttctttggacatacccacgtggacgagttcgaagtgttttacgacgaagaaaccctcagccgccctcttgcagtggcattcctggccccctcagcaaccacttacatcggtttgaatcctggatacagagtgtatcaaattgatgggaactactcagggagctcacatgtggtgctggaccacgaaacctacattctcaatctcacccaagcaaacattccgggggcgattccacattggcagctgctttaccgggcgcgtgaaacttacggactgcctaacaccctcccgaccgcatggcacaacctggtgtaccggatgagaggagacatgcaactgtttcaaaccttctggtttctctaccacaagggacaccctccttcggaaccttgtggtactccttgtcgtcttgcaactctgtgtgcacaactgtcggcccgcgccgatagccctgcactttgtagacaccttatgccagatggatcgctccccgaagcacagagtctgtggcctaggcctcttttctgc

SEQ ID NO: 19779 - DNA, 1893 bp, synthetic construct
  misc_feature 1..1893: note = source = /note="Description of Artificial Sequence: Synthetic coding sequence"
  source 1..1893: mol_type = other DNA
atgcctagatacggagcaagtctccggcagagctgcccccgaagcggtcgcgagcagggtcaggatgggacggccggggcaccagggctgttgtggatgggactggtgctggctttggcattagcgttggcgctagcactagctttgtccgacagcagggtcctgtgggcccccgctgaggctcacccgctgtccccccagggtcacccagctcggctgcacagaattgtgccaaggctgagagacgttttcgggtgggggaacctcacctgtcctatctgtaaaggtctcttcaccgccatcaatttgggccttaagaaagagcccaacgtcgcccgggtcgggagtgtagcaatcaaactgtgtaatctgctcaagattgctcctcccgctgtatgccagagcatcgtacatcttttcgaggacgacatggtggaggtgtggaggaggtcggtgctgagtccttcggaagcttgcggactgctgctgggctctacttgcgggcactgggatatcttttcctcctggaacatctctttacccaccgtgccgaagcccccgcccaagcccccctctcctccggctccaggagctccggttagtcgcattctcttcctgacggatctccattgggaccatgattatttggaaggcacggatcccgattgcgctgatccgctgtgttgtcggcggggttctggactgcctccagcaagccgacctggagccggttattggggtgagtacagcaaatgcgatctccccctgagaacccttgagtcgctgctgtcaggcctgggtccagctggtccttttgatatggtctattggaccggcgatattccagctcacgacgtgtggcaccagactagacaagatcagctgcgagctctgaccacagtgacagccctggtgcgaaaattccttggtcccgtccccgtgtaccctgccgtgggcaaccacgaatcaactccagtgaactcttttccccccccattcatcgagggaaaccactcttcgaggtggctctacgaggctatggcaaaagcttgggaaccatggttgcccgccgaggctctgcgtacgcttcgaatcggcgggttttatgccctgagtccctatcccggactacggctgatatctctcaatatgaacttttgcagtcgcgagaacttctggctgctaatcaacagtaccgatcctgctggacagttgcagtggctcgtgggggagttacaagcggcagaggacagaggtgataaggtccacatcattggacatattccccctggacactgcttaaaatcatggagttggaactactacagaatagtcgctcggtacgaaaatactctggccgctcaattctttgggcacacgcacgtcgacgaattcgaggtgttttatgatgaagaaaccctgagtaggccactggcggtggctttcctggcacccagcgccactacatacatcggcctgaatcctggctatcgggtatatcagattgatggcaactactcaggatcttcccacgtggttctggatcatgagacgtacatactgaacctcacgcaagccaacattcctggagcgattccgcattggcagctgctctatcgggcacgtgaaacatatgggctacctaacactctacccacagcttggcataatctggtgtacaggatgagaggggatatgcagttgtttcaaacgttttggtttctttaccacaagggtcaccccccttcggagccctgcggaacaccctgtagactcgccaccctgtgtgctcaactctcagccagagcagactctccagccctctgccggcacctgatgccagacggcagccttcctgaggctcagtctctctggcctagacctctcttctgt

SEQ ID NO: 19780 - DNA, 1893 bp, synthetic construct
  misc_feature 1..1893: note = source = /note="Description of Artificial Sequence: Synthetic coding sequence"
  source 1..1893: mol_type = other DNA
atgccaaggtacggcgcgagtctgaggcagtcatgtcccaggtctgggcgtgagcaggggcaagatgggaccgctggcgcgcccgggctgctgtggatgggcctcgtgctggcccttgctttggcccttgctctggctctcgcactgagcgacagccgagttctttgggcacctgccgaagcgcaccctctcagccctcagggccatcctgcccgtctgcatcggattgtgcccagactacgagatgtctttggctgggggaatctcacctgtcctatttgcaaaggtctctttaccgctatcaatctcggtctcaaaaaagagcccaatgttgcacgggttggaagtgtggcaattaaactgtgcaatctacttaaaatcgcaccacccgctgtatgtcagagcattgtacatctgttcgaggacgacatggtggaggtctggcgacgatctgtattgtctccgtctgaggcttgtgggctactcctcggcagcacatgtggacattgggacatattctccagttggaatatctcacttccgaccgtgcctaagcccccgcccaagccgccaagcccccctgcgccaggagcccccgtatcccgtatactcttcctgacagacctccattgggatcacgattatctagagggtaccgatccggactgtgcagacccactgtgctgtcggagaggatctgggttgcccccggcatcaaggccaggggctggctactggggagagtacagcaaatgtgacctgccgctgcgcactctcgagagtctgctatcaggcctgggtcccgccgggccattcgatatggtgtactggactggcgacataccggcacacgacgtctggcatcagacacgacaggatcaactcagggcactaaccacagttactgcacttgtccgcaaattcttgggccccgtacctgtataccccgccgtgggcaatcatgaatccactccagtgaactcattcccgccccctttcatagaagggaaccacagctctaggtggctatacgaagccatggctaaggcctgggagccttggcttcctgcagaggccttacggacactgagaataggcggtttctacgccctatctccctaccctggtctaaggcttattagcctgaacatgaatttttgctctcgtgaaaacttttggttattgatcaactcaacggatcccgctggccagctccagtggctcgtcggtgaactgcaggcggcagaggaccgcggggataaagtgcatataatcggacacattccccctggacactgtttgaaatcttggtcttggaactactatcgcatcgtggccaggtacgagaataccttagcagctcaattcttcggccatacacacgtagatgaattcgaggtcttttacgacgaggaaacactgtctagaccactcgcggtggcattcctggccccttctgcgacgacttatataggcctgaatcccggatatagagtgtaccagattgacggcaactactccggctctagtcacgtggtcctggatcacgagacctacattctgaatttaacacaggctaatatccctggcgcgattccacattggcagctgctatatagggcacgcgagacatacggtttacctaacactctgcctacggcctggcacaacctcgtatatcgaatgagaggagatatgcagctgtttcagactttctggttcctttatcacaaaggccacccgccgtcagagccctgtggcaccccttgccgactggcaaccctctgcgcccaactgtctgcacgagcagacagccctgctctgtgccggcatctaatgccagatggaagcctgcccgaagcgcagagtctgtggccccggcccttgttctgt

SEQ ID NO: 19781 - DNA, 1893 bp, synthetic construct
  misc_feature 1..1893: note = source = /note="Description of Artificial Sequence: Synthetic coding sequence"
  source 1..1893: mol_type = other DNA
atgccaagatacggcgcctccctgcgccaaagctgcccacgctctggacgtgagcaaggacaggatgggaccgcaggggctccgggacttctgtggatgggtcttgtgctggcactcgctttagccctggccctggcacttgctttatcagacagcagggtgttatgggctccggccgaagcccatcccttgtcccctcagggacaccccgctaggttgcacaggatcgtacctagactaagagacgtctttgggtggggaaatctcacatgtcccatttgtaaaggacttttcactgccattaacctgggactcaagaaagagcctaacgtcgccagggtgggctctgtggctatcaagctgtgtaatcttctaaaaatcgccccccccgccgtgtgccagtctatagtgcacttattcgaagacgacatggtggaagtgtggaggagaagcgtgctctcacccagtgaggcctgcggccttctgcttggctcgacctgtggacactgggacatttttagtagttggaatatttcattgccgactgtgccaaaacctcctcccaagccacccagtccaccagcccctggagctcccgtctcccggatcctcttcctcactgatctccattgggaccacgactatctggaggggaccgaccccgactgtgccgacccattgtgctgtagaaggggttccgggctgccgcccgcatcccgcccaggagccgggtattggggcgagtacagtaaatgtgacctcccactgaggacattggagagtctgctttcaggacttggaccggccggaccctttgatatggtgtattggactggagacatacctgcgcacgacgtatggcaccagactcgccaggaccagctccgggccctcactacggtcaccgcccttgtgagaaaattcctggggccagtgcccgtctaccccgcagtcggcaaccacgaatccacaccagtcaacagcttcccgccaccatttattgagggcaaccattcatctcggtggttgtacgaagcgatggccaaagcctgggaaccctggcttcccgccgaagctctacgtactcttcgcattggaggtttctatgcacttagtccttaccccggcttgaggctgatatcactcaacatgaacttttgctcccgggaaaacttttggctcttgattaattcaacagatccggcggggcagttgcagtggctggtaggggagttgcaggctgcggaagatcgaggggataaggttcacatcatcggccatatcccccccggtcactgcctaaagtcttggagctggaattactatcgtatagtggcgcgttacgaaaataccttggctgcccagttctttgggcatactcatgtagatgagttcgaggtcttctacgatgaagaaacactgagccgaccgctcgccgttgcatttctggcaccgtctgccacaacatacattggactcaaccccggttatcgagtataccaaatcgacggcaactattctggatcaagtcacgtggtgctggatcatgagacttacattctgaaccttactcaagccaacatacccggagcaatccctcattggcagctgctgtacagagcccgcgagacctatgggctacccaatactctgcccaccgcctggcacaacctagtgtaccgcatgcggggagatatgcagctattccaaaccttttggtttctgtaccataagggtcaccccccttcggaaccttgtggaactccttgtagactcgccactctctgcgcgcagctgagcgcacgcgccgattcgccagcgttgtgtcgccaccttatgccagacgggagtttacctgaagcacagtctctgtggcctcgacctctattttgc

SEQ ID NO: 19782 - DNA, 1893 bp, synthetic construct
  misc_feature 1..1893: note = source = /note="Description of Artificial Sequence: Synthetic coding sequence"
  source 1..1893: mol_type = other DNA
atgccaaggtatggagccagcttaagacagagttgccccagatctggcagggagcagggccaggacggcacggctggtgcccccggcctgttgtggatggggcttgtgctagcactcgctctggcactagcccttgcactggcactctctgactcaagggtgctgtgggctcccgctgaagcccatccactgagcccccaggggcacccagctagactgcatcgcattgtgcctagattgcgggacgtgtttggctggggcaatctgacctgtccaatttgcaaggggcttttcaccgcaataaacctagggctcaagaaggagcctaacgttgccagggttggctccgtcgcgattaaattgtgcaatcttcttaagatagcaccgccagctgtttgtcagagtatcgttcacctattcgaagatgacatggtcgaagtatggagacgttctgtgctgtccccttctgaggcctgcggcctgctgttgggaagcacttgcggccactgggatatattttcttcatggaatatctctctccccaccgttcccaagccgcctcccaagcctccaagtccgccggctccgggagcccccgtgtcacgaattttgttcctgactgatctgcattgggaccacgactatcttgagggtacagacccagactgtgccgaccctttatgctgcaggagggggagcggtttgccccccgccagcaggcccggagcgggttactggggcgaatattcgaagtgcgatttgcctctcaggactctggagtccctgttaagtggactgggccccgctggtcccttcgacatggtgtattggactggcgatatcccagcgcatgatgtgtggcaccaaactcgtcaggaccagcttagggcattaacaacagtgactgcgcttgtccgtaaattcctgggacccgtgcctgtctacccagcagtggggaaccatgaatctaccccggtgaacagcttcccccctccctttatcgagggtaatcactcctcacgctggctgtacgaggcaatggcgaaggcttgggagccctggttacccgctgaagcgttgcgcaccctgcgcatcggggggttctatgctctgagcccctatccgggtctccgcctcatatccttaaatatgaatttttgttctcgcgaaaacttttggctgctgatcaacagtacggaccctgccggccaactgcagtggttagttggcgaactccaagcggccgaggatagaggcgacaaggtgcatattatcggccacattcctccagggcattgtctgaagtcttggtcctggaattattacaggatcgttgcgagatatgaaaataccttggccgcccagttcttcggccatacgcacgtagatgagtttgaagttttttacgatgaggagaccctgtcacgtcccctcgctgtcgcttttctggccccatccgccaccacgtacattggactcaatcccggctatcgtgtatatcaaatcgacggaaattattccggttctagccacgtagttctagatcacgaaacttatatattgaacctcacccaggcaaatatacccggggccatcccgcactggcagctgctgtaccgcgcaagagaaacctatgggctccccaatacactgcccacagcttggcacaacctcgtatacagaatgcggggcgatatgcaactgtttcagactttttggtttctctatcacaagggacaccctccaagcgaaccctgtggaacaccatgtaggctggcaaccttatgtgctcagctatcagcccgtgcggactccccagccttgtgccggcacctgatgcccgatggaagtctgcctgaagcccaatccctgtggcccagacccttattttgc

SEQ ID NO: 19783 - DNA, 1893 bp, synthetic construct
  misc_feature 1..1893: note = source = /note="Description of Artificial Sequence: Synthetic coding sequence"
  source 1..1893: mol_type = other DNA
atgccacgctatggggcttccctcaggcagtcgtgcccaagatctggaagagaacagggacaagatggaaccgccggcgctccgggcctgctctggatgggactcgtcctggcactggccctggcgttggccctggctttggccctctcagactcgcgcgtgctgtgggcgcctgcagaggcgcatcctctctcaccacaaggacatcctgcacgcctccataggatcgtgccacgattgagggacgtgtttggctggggcaatctgacttgcccaatctgcaagggcctgttcaccgctattaacctgggacttaagaaagaaccaaacgtggcccgggtcggaagcgtcgcaattaagctgtgcaatctgttgaagatcgcgccgcctgccgtgtgtcaatcgatcgtgcatcttttcgaagatgacatggtggaagtgtggcgcaggtcagtcctctcgccatcggaggcttgcggcctgttgctgggatcgacctgcgggcactgggatatcttttctagctggaatatctcccttcctaccgtccctaagcctccaccgaagcctccgtcaccccctgcgcctggtgcgccggtgagccggatcctgtttctgactgatctgcactgggatcacgactacctggagggaaccgacccggactgcgcagacccgctgtgctgcagaagggggagcggcctgccgcctgcgagccgcccgggagccggatactggggtgagtattcgaaatgtgatcttcctctcagaaccctggagtcactcctctcaggcctcggtccagccggaccgttcgatatggtctactggactggggacatcccggcacatgatgtgtggcaccagactcgccaggatcagctgcgcgctctgactaccgtcactgccctcgtgaggaagttccttggaccggtgcctgtgtacccggcagtcggaaatcacgaaagcactccggtcaacagcttcccgccgcctttcattgagggaaaccattcgtcccggtggctgtacgaggcgatggcaaaggcttgggagccgtggctcccagcggaagccctccgcaccctgcgcattggaggcttctacgcactttcaccatacccaggccttcggctgatatccctgaacatgaacttctgttcgcgcgagaatttctggcttctcatcaacagcaccgacccagcaggacagctccaatggttggtcggagaactgcaggccgcagaggaccgcggagataaagtgcacatcatcgggcacatcccgccaggccactgcctgaagtcctggtcctggaactattaccgcatcgtggcgcgctacgagaacacgctggcagcgcagttcttcggccatacccatgtcgacgagttcgaagtgttctacgacgaagagactctgtcgcgccctctggcagtggcctttttggccccctcagccaccacctacatcgggctgaatccaggctatcgagtataccagatcgacggtaactacagcgggtcatcgcacgtcgtgcttgaccatgagacgtatatactgaacctcactcaagccaacatcccgggagcaatcccccactggcaactgctgtaccgggcccgggagacttacgggctccctaataccctgccgaccgcttggcacaatctggtgtacaggatgcggggagacatgcagctgttccagactttctggtttctctatcataaagggcatccgccgagcgaaccgtgcggtactccgtgcagactggcaaccctgtgcgctcaactgtcagcacgggccgattccccggccctgtgtagacatttgatgcccgatggcagcctgccagaggcccaatccctgtggcctagaccgcttttttgc

SEQ ID NO: 19784 - DNA, 1893 bp, synthetic construct
  misc_feature 1..1893: note = source = /note="Description of Artificial Sequence: Synthetic coding sequence"
  source 1..1893: mol_type = other DNA
atgccgcgctacggggcctccctcaggcagagctgcccaagatcaggacgggaacagggacaggatggcaccgccggagcacctggactgctgtggatgggactggtcctggctttggccctcgcgctggcccttgcactcgcactctcggactcacgggtcctgtgggcgccagccgaggcgcacccgctgtcgccgcagggacacccagcgcggctgcacaggatcgtcccgagactccgcgatgtgtttggctggggtaacctgacctgcccaatctgtaaaggtttgttcactgcgatcaacctcggcctgaagaaggagccgaacgtggctagggtgggctcggtcgccatcaagctgtgcaacttgcttaagatcgcgccaccggctgtctgccagagcatcgtgcaccttttcgaggatgacatggtggaggtgtggagacgctccgtcctgtcgccatccgaggcttgcggcttgctgctgggctcgacgtgtggacattgggacatctttagctcctggaatatctcactgccgaccgtgcctaagccacctcctaagccgccttcacctccggcccctggggcccccgtgtcccgaatcctgttcctgaccgacctgcattgggaccacgactacctcgaaggcactgaccctgactgcgccgacccgctgtgctgccggaggggatccgggctcccgccggcgtcgcgccctggagccggatactggggcgagtatagcaagtgcgaccttccactcagaacgctggagtcgctcttgtcgggactgggacctgctggaccattcgacatggtgtactggaccggcgacatccctgcgcatgacgtgtggcaccaaacccgacaggaccaactcagagccctgactaccgtgaccgcgctggtgcgcaagttcctgggacctgtgccggtctaccctgcagtgggcaaccacgaatcaactcctgtgaacagctttccgccaccgttcatcgagggtaatcactcctcgcggtggttgtacgaggcaatggcaaaagcctgggagccttggctccccgctgaggctctccgcactctcagaatcggagggttttacgccctttccccttatccgggcctccgccttatctccttgaatatgaacttttgctcccgggaaaacttttggctcctgatcaattctaccgaccctgcgggccagctgcagtggctggtgggagagcttcaggcagccgaagatcggggagataaggtgcatatcatcggtcacatcccacctggacactgtctgaagagctggtcgtggaactactacaggatcgtggcaagatatgagaataccctcgccgcgcagttcttcggccacacgcacgttgatgagttcgaagtgttttacgatgaggaaaccctctcccgcccgctggcagtcgccttcctggccccatcagctaccacgtacatcggcctgaacccaggctaccgtgtgtaccagatcgatgggaattacagcggatcctcacacgtggtgctggatcacgagacgtacatcctcaatctgacccaggcaaacatcccgggcgccatcccacattggcagctgctgtaccgggcccgcgaaacctacggactgccaaatacgctgccgaccgcgtggcataaccttgtgtacagaatgcggggcgatatgcagcttttccaaactttctggttcctctaccataagggacatcctccttcagagccatgcggaactccgtgccgcctcgccaccctttgcgcccagctcagcgcgcgggccgattccccggccttgtgtaggcacctgatgcccgatggatcgctgcccgaagctcaatcgctgtggccccgccccctgttctgt

SEQ ID NO: 19785 - DNA, 951 bp, synthetic construct
  misc_feature 1..951: note = source = /note="Description of Artificial Sequence: Synthetic coding sequence"
  source 1..951: mol_type = other DNA
atgtacaacatgatggagactgaactgaagccgcctggacctcaacagactagcggcggcggaggcggcaactctaccgccgcggccgccggaggcaaccagaagaatagcccagatcgcgtcaaacgccctatgaacgcattcatggtgtggtcccgcgggcaaaggagaaagatggcgcaggaaaacccgaagatgcacaattcagaaatctccaagaggctgggcgctgaatggaaactgctgtcggagactgaaaagaggccgttcatcgacgaggcgaagcggcttcgggccctccatatgaaggagcatccggactacaagtacagaccccggcggaaaacgaaaacgctcatgaagaaggacaaatacaccctgcctggcggattgctcgccccgggaggaaattcgatggccagcggtgtcggtgtgggagctggactgggagccggagtgaaccagcggatggattcgtacgctcacatgaatggttggagcaacggatcatattcgatgatgcaagaccagcttggatacccacaacacccggggctgaacgcgcatggcgccgcccagatgcagcctatgcatcgctacgacgtctccgcgctccaatacaattctatgaccagctcacagacgtacatgaacggatcccctacctactcgatgtcatactcccagcaaggaactccgggaatggcgctgggaagcatgggcagcgtggtgaagagcgaagcgtcgtcgtcacctccggtggtcacttcgtcgtcccactcccgggcgccatgtcaggcaggagacttgagggacatgattagcatgtacctgccaggcgccgaggtgcccgagccggcggccccctcgagactgcatatgagccaacactaccaatcgggaccggttccaggcaccgccatcaacggaaccttgccgctgtcccacatg

SEQ ID NO: 19786 - DNA, 951 bp, synthetic construct
  misc_feature 1..951: note = source = /note="Description of Artificial Sequence: Synthetic coding sequence"
  source 1..951: mol_type = other DNA
atgtacaatatgatggaaactgagctgaagcccccaggtccccaacagacctccggcggaggaggaggcaattcgactgccgcggcggcgggcggcaaccagaagaattcgcctgaccgcgttaaacggcccatgaacgccttcatggtctggtcccggggccagcgccgtaaaatggcccaggagaacccgaagatgcataactcggaaatcagcaaacggctgggtgcagagtggaagctgttgtcagaaactgagaagaggccctttatcgatgaggctaagcgcctgcgagctctccatatgaaggagcaccccgactacaaataccgaccgcgacgcaaaaccaagacgctgatgaagaaggacaagtacacgcttccgggcggcctcttggctccaggcggaaattcgatggcatccggagtgggagtgggagccggactgggcgcaggagtgaaccagcgaatggacagctatgcgcacatgaacgggtggtctaatggttcatattcaatgatgcaggatcaactgggttatccacagcatccgggattgaacgcacacggagccgctcaaatgcagccgatgcaccggtacgacgtgtcggctctgcagtacaactcaatgacctcatcgcaaacttacatgaacggctcgcctacctactcaatgtcgtactctcaacaagggaccccggggatggcactgggatccatgggttctgttgtgaaatccgaagcgagctcctcgcctccggtcgtgaccagctcctcgcactcccgggcgccatgccaggccggcgatctgagagacatgatctctatgtacttgccaggagccgaagtccctgaacctgcggcgccgtcgagattgcacatgagccagcattaccaatcggggcctgtgcctggtactgcgattaatggcactctcccactgtcacacatg

SEQ ID NO: 19787 - DNA, 951 bp, synthetic construct
  misc_feature 1..951: note = source = /note="Description of Artificial Sequence: Synthetic coding sequence"
  source 1..951: mol_type = other DNA
atgtataacatgatggagactgaactcaaaccgcctggtccacaacagacgtcgggaggcggcgggggaaattccaccgcagcagcggccggtggaaaccagaagaattcaccagatagggtgaaacgtccaatgaacgcatttatggtgtggtcacgggggcagagacgaaaaatggcacaagagaaccccaaaatgcataactcggaaatctcaaagcggctgggcgcagaatggaagctgttgtcggaaaccgagaaacgcccatttatcgacgaagcaaagcgacttagggcgctgcacatgaaagaacatcctgattacaagtaccggccccgtcgtaagaccaaaaccctgatgaaaaaggacaagtacactctccccggagggcttcttgcacctggaggtaatagcatggcaagcggtgtgggggtcggggctggtcttggtgccggtgtcaaccaacgcatggattcctacgcccatatgaacggatggtccaacggttcgtactcgatgatgcaggatcaacttggatacccacaacatcctggactgaatgcacacggtgctgcacaaatgcagccgatgcatagatacgatgtgtcggctctccaatacaattccatgaccagctcacagacttacatgaatggcagcccgacctacagcatgtcgtactcgcagcagggcaccccagggatggcccttgggtcgatggggtcagtggtgaagagcgaagcctcctcatccccgcctgtcgttactagttcgtcgcactcccgtgcaccctgccaagcaggagatcttcgtgacatgatctcaatgtacctgccgggcgcagaagtcccggaaccagccgctcccagcagactccacatgagccagcactaccaatcaggacccgtccctggtaccgccatcaacggcactctccctctctcacatatg

SEQ ID NO: 19788 - DNA, 951 bp, synthetic construct
  misc_feature 1..951: note = source = /note="Description of Artificial Sequence: Synthetic coding sequence"
  source 1..951: mol_type = other DNA
atgtacaatatgatggaaactgaactgaagccgccaggccctcaacagacctccggcggaggaggcggcaactccactgcggcagcagccggcggcaaccaaaagaattccccggaccgggtgaaaagaccaatgaacgctttcatggtgtggagcagaggacaaaggcgcaaaatggcgcaggaaaaccctaagatgcataacagcgaaatctcgaagcgcctgggagccgaatggaaactcctgtctgaaactgagaagaggccgttcatcgacgaggccaagcgccttcgggctttgcatatgaaagagcatcccgattacaagtacagaccacgcaggaagaccaagaccttgatgaagaaggataagtacaccctgccgggtggacttctggctcctggcggcaactctatggcctcaggggtgggagtgggagccggcctcggcgcgggggtcaatcagcggatggactcctacgcccatatgaatggatggtcaaatggatcctacagcatgatgcaagaccaactgggataccctcagcaccctggcctgaacgcgcacggagccgcgcagatgcagccgatgcaccgctacgatgtttcggcgctgcaatataactctatgacttcctcacagacgtacatgaacggctctccgacctattccatgagctactcccagcagggaacccctggcatggctctcggatccatgggctcggtcgtgaagtcggaagccagctcgagcccgcctgtggtgacctcgtcatcccactcgcgggccccctgccaggcgggtgacctcagggatatgatttccatgtacctgcccggcgctgaagtgcctgagcccgccgctccaagccgactccatatgtcgcagcactaccagtctgggccggtgccaggcaccgccatcaacggaactctgccgctcagccatatg

SEQ ID NO: 19789 - DNA, 951 bp, synthetic construct
  misc_feature 1..951: note = source = /note="Description of Artificial Sequence: Synthetic coding sequence"
  source 1..951: mol_type = other DNA
atgtacaacatgatggagactgaactcaagcccccaggccctcaacagacgagtggaggtggaggcggaaactcaaccgcggcggctgctggtggcaaccagaaaaacagccctgatcgagtcaagcgcccaatgaatgcctttatggtgtggtctagagggcaaagacggaaaatggctcaggaaaatcccaagatgcacaactccgaaatttccaagaggctgggtgcagaatggaagcttctaagtgaaacagagaaacggccattcatagatgaagccaagagattgcgggctctgcacatgaaggaacatcctgactataagtaccgacctcgcaggaagaccaagactctgatgaagaaagacaagtatacgctgccaggaggccttttggcacctggcgggaacagcatggcctcaggcgtgggtgtgggtgcagggctgggcgctggcgtgaaccagaggatggatagttacgcgcatatgaacgggtggagcaatggaagctactctatgatgcaagaccagctgggctaccctcagcatccaggtctcaacgcacacggtgctgcccaaatgcagcctatgcacaggtatgacgtcagcgccctccagtataattccatgacatcatctcaaacatacatgaacggcagtccaacttactctatgtcatactcccaacaaggaactcccgggatggcgcttggcagcatggggtctgttgtgaagtctgaggctagtagtagtccacctgtcgtgacatcgagctctcacagcagggccccgtgtcaggccggagatctccgggacatgatcagcatgtatctgcctggcgcagaggtccccgagcctgccgccccaagtcgccttcacatgtcacagcactaccagtccggaccggttcctggcaccgccatcaatggcacactgccgttgtcccacatg

SEQ ID NO: 19790 - DNA, 951 bp, synthetic construct
  misc_feature 1..951: note = source = /note="Description of Artificial Sequence: Synthetic coding sequence"
  source 1..951: mol_type = other DNA
atgtacaacatgatggaaaccgaattgaaaccgccgggaccacaacagacgagcgggggcggaggaggtaattccacggccgccgcggccggaggaaaccagaagaatagtcctgatcgggtgaagcggcctatgaacgccttcatggtgtggagccgcggacagcgcagaaaaatggctcaagagaatccaaagatgcataactctgaaatctcaaagcggctcggggcggaatggaagttgctttccgagactgagaagcgaccattcattgatgaggcaaagcggctccgcgccctccacatgaaggaacacccggactacaagtaccgcccgcggcgaaagaccaagactcttatgaagaaggacaaatacacgctgccgggtggactcctggccccaggaggcaactcaatggcatccggagtgggcgtcggagccggactgggagccggtgtgaaccagcggatggattcatacgcacacatgaacgggtggagcaacggatcgtactcgatgatgcaggatcagctgggatacccgcagcatccagggttgaacgcccacggagctgcccaaatgcagcctatgcacaggtatgatgtgtcggcgctgcagtacaactcgatgacttcctcgcaaacctacatgaatggatcgccgacttattcaatgtcgtactcgcagcagggaactcctggcatggcactgggatcgatgggatcagtcgtgaagtcggaagccagctcttctccacccgtcgtgacctcgtcgtcccactcccgcgcgccgtgccaggccggcgacctgcgggacatgatctccatgtaccttccaggtgcggaagtgccggagcccgccgcgccgagccggctgcacatgagccaacactaccagtccggaccggtgccgggaaccgccatcaacgggaccctgccgctgtcacacatg

SEQ ID NO: 19791 - DNA, 951 bp, synthetic construct
  misc_feature 1..951: note = source = /note="Description of Artificial Sequence: Synthetic coding sequence"
  source 1..951: mol_type = other DNA
atgtacaacatgatggaaaccgaacttaagccaccaggtcctcaacaaacctccggaggaggaggcggtaacagcaccgcagcagcggccgggggaaatcaaaagaattcccccgatcgtgtgaagcgacccatgaatgcatttatggtgtggtccagaggacaaaggagaaaaatggcgcaggaaaaccctaagatgcacaatagcgaaatctccaagcgtctgggggcggaatggaagctgctttccgaaaccgagaaacggccctttatcgatgaagcaaagaggcttcgggccctgcatatgaaagagcaccctgattacaaataccgccctcgtaggaaaaccaagactctgatgaaaaaggacaaatacacccttcctggtgggctcctggcccccggagggaacagcatggcctcgggagtgggtgtcggagccggcttgggtgcaggcgtgaaccagcgcatggactcttacgcgcacatgaatggatggtccaacggatcctattccatgatgcaagatcagctcggatacccacaacatcctggccttaacgcgcatggcgcggcccaaatgcagcctatgcaccggtacgacgtatcggctctgcaatacaattcgatgacttcttcacagacttacatgaatggcagccctacctactcgatgtcctactcacaacagggtacgccaggcatggcgctgggctcgatgggtagcgtggtcaagtccgaagcctcatcctccccacctgtggtgacctcatcaagccattcgcgcgcaccttgtcaggcaggcgacctccgagacatgatttcgatgtacctgcctggggccgaagtgccagaaccagcggccccgtcgagacttcatatgagccaacattaccaatcgggacccgttccgggtaccgcaatcaacggtaccctccctttgagtcacatg

SEQ ID NO: 19792 - DNA, 951 bp, synthetic construct
  misc_feature 1..951: note = source = /note="Description of Artificial Sequence: Synthetic coding sequence"
  source 1..951: mol_type = other DNA
atgtataatatgatggagacagagctcaagcccccaggcccacagcagaccagcggaggcgggggcggaaactccacagccgcagccgcaggcggtaatcagaaaaatagtccggacagagtgaagagacctatgaatgcttttatggtatggtcgcgagggcagaggaggaaaatggcacaggaaaatcctaagatgcacaatagtgaaatcagtaaaaggctcggagccgaatggaaactgctctctgagacagaaaagaggccttttatcgacgaagctaagcgactgagggccctgcacatgaaggaacaccctgactacaagtatagaccccgcaggaagacgaagactctgatgaagaaagataagtataccctccccggcgggcttctggcacccggagggaactctatggcatccggtgtaggcgtgggggccggcttgggggcaggagtgaatcaacgaatggactcgtacgcacacatgaatgggtggtccaacgggtcctactccatgatgcaagatcagctgggatacccgcaacatccgggactgaatgcacacggagccgctcagatgcagcccatgcatcgctacgatgtgagcgcgttacagtacaatagcatgacatccagtcaaacttacatgaacggatcacctacatatagtatgtcgtatagtcaacagggtacacctgggatggccttggggagcatgggttcagtggtgaagagtgaggcatctagttcccctcctgtagttacatcatctagccactcacgagctccctgtcaggcgggcgacctcagggatatgatttccatgtatttacccggtgccgaggttcccgaacctgccgccccttcaaggctccatatgtcacagcactatcaaagtggacccgtccccgggacagctatcaatggcacactgcctctgagccacatg

SEQ ID NO: 19793 - DNA, 951 bp, synthetic construct
  misc_feature 1..951: note = source = /note="Description of Artificial Sequence: Synthetic coding sequence"
  source 1..951: mol_type = other DNA
atgtacaacatgatggaaaccgaacttaagccacccggacctcaacagacttcgggtgggggcggcggcaatagcacggccgccgcagcaggaggtaatcagaagaacagccccgacagagtcaagcgtcctatgaacgcatttatggtgtggtcacgcggtcaaaggcggaaaatggcgcaagagaaccccaaaatgcacaattccgagatttctaagcgtctgggtgcagagtggaagctgctgtccgaaaccgaaaaacgacctttcatcgatgaggcaaagcggctgcgggcattgcatatgaaggaacaccccgattacaagtacaggccaagacgcaagaccaaaactctcatgaagaaagacaagtacaccttgccaggagggctccttgccccaggcggcaattcaatggcgagcggagttggcgtgggtgccggactcggcgcgggagtgaaccagagaatggattcatacgcacatatgaatggatggtccaatggatcgtactctatgatgcaggaccaactgggatacccccagcatccgggactgaacgcacatggggcggcacaaatgcagccgatgcaccgatacgatgtgagcgctctgcagtataactccatgacctcttcccaaacttacatgaacggatctcctacctactcgatgtcgtattcacaacaagggactcctggtatggccctcggatctatggggtccgtcgtgaaaagcgaagcctcctcttcgccaccggtggtcacgtcatcctcccatagccgcgctccgtgtcaagcaggcgatcttagggacatgatctccatgtacttgccaggcgcggaggtgccagaacctgccgcaccatccagactgcatatgtcccaacactaccagtccggacctgtccccggtactgcaattaacggtaccctgccacttagccatatg

SEQ ID NO: 19794 - DNA, 951 bp, synthetic construct
  misc_feature 1..951: note = source = /note="Description of Artificial Sequence: Synthetic coding sequence"
  source 1..951: mol_type = other DNA
atgtacaatatgatggaaaccgaactgaagcctccggggcctcaacaaacttccggaggaggagggggaaattcgaccgcggcagccgcaggtggcaaccaaaagaattccccggatcgcgtgaagcgcccgatgaatgcctttatggtctggtcgcgcggtcagcgcaggaaaatggcacaagagaatccgaaaatgcataattcagagatctccaagagactgggagctgaatggaagttgctgtcagaaactgagaagcggcccttcatcgacgaggctaagcgcctccgggctctgcacatgaaagaacacccggattacaagtaccgtccgcgacgcaagaccaaaactctcatgaaaaaggacaagtacactctgccaggtgggctccttgctccaggaggaaactcgatggcttcgggagtgggcgtcggagcgggtttgggagctggagtcaaccagcggatggactcgtacgcccatatgaatgggtggagcaacgggtcatactctatgatgcaagatcagctgggatacccacagcatccaggcctgaacgcacacggcgccgctcaaatgcaaccgatgcaccgctacgacgttagcgctctccagtataactccatgacctcgtcgcaaacttacatgaacggatccccgacgtactcgatgtcttatagccaacagggcactccgggaatggcactggggtcaatgggatcagtggtgaagtcggaagcatcctcctcgcctccggtggtcaccagcagctcccattcccgtgctccatgccaggccggtgacctgcgggacatgatctccatgtacctgccgggcgccgaagtgcctgaacctgccgccccgagccggctgcacatgtcacagcattatcagtccggtccagtgcccggaaccgctattaacggtaccctgcctctctcccatatg

SEQ ID NO: 19795 - DNA, 951 bp, synthetic construct
  misc_feature 1..951: note = source = /note="Description of Artificial Sequence: Synthetic coding sequence"
  source 1..951: mol_type = other DNA
atgtacaacatgatggaaacggagcttaagcccccaggacctcaacaaacttcaggaggtggcggcggtaactctactgcagcggcggcgggcggcaaccaaaagaactcgccggaccgcgtgaaacggcccatgaatgcctttatggtgtggtcgagaggacagcgccggaagatggcgcaggaaaaccctaaaatgcataactccgaaatttcgaaacggctcggcgcagagtggaagctcctgtcggagacggagaaaagaccttttatcgatgaagcgaaaagactgcgggcactgcatatgaaagaacatccagattacaagtacaggcctaggcgtaaaaccaagacccttatgaagaaagataagtacactctccctggaggacttctggcgcccggggggaactcaatggcctcgggagtcggagttggcgcagggttgggggcaggagtcaaccaaagaatggattcgtatgctcatatgaatgggtggagcaacggaagctactccatgatgcaggatcagctcggttatccacagcatcccgggcttaacgcccacggagcagctcaaatgcaacctatgcacagatacgatgtgtctgcactgcagtacaattcgatgacttcttcccaaacttacatgaacggctccccgacctactccatgtcgtacagccagcaaggtactcctgggatggctctcggatcgatgggttccgtggtgaagtccgaggcatcgtcgtcaccccccgtggtcacctcatcgtcccattctcgcgcaccgtgtcaggcaggggatctgagagacatgatttccatgtaccttccaggagcagaagtgccggaaccagctgctccttcgagactgcatatgtcccagcactaccaatccggacccgtgcctggtacggcaataaacggaactctgccactgtcacacatg

SEQ ID NO: 19796 - DNA, 951 bp, synthetic construct
  misc_feature 1..951: note = source = /note="Description of Artificial Sequence: Synthetic coding sequence"
  source 1..951: mol_type = other DNA
atgtataacatgatggaaacagagctcaaaccccctggcccccagcaaacctctgggggtggaggaggaaactccaccgcggcggcagcaggcggaaaccagaagaacagcccagatcgagtgaaaaggcccatgaatgctttcatggtgtggagcaggggtcagcgtcgcaaaatggcccaggaaaatccaaagatgcataatagcgagatatcaaagagattgggcgctgaatggaagctgctgtccgagacggagaagaggcccttcatcgatgaggccaagcgcttgagagccctgcatatgaaggaacatccagactacaagtacaggcccagaaggaagaccaagacactcatgaaaaaggacaaatatacgctgccaggcgggctgttagcccccggcggcaatagcatggctagcggggtgggcgtcggagccgggctaggagcaggtgtgaaccagcggatggatagctacgctcacatgaatgggtggtcaaatgggtcctattcgatgatgcaggaccagctggggtaccctcaacaccccggtctgaacgctcatggcgctgctcagatgcagccaatgcacaggtacgatgtgtcagcgctgcaatacaattctatgacctcttcccagacctatatgaatgggtcccccacctacagcatgagctactcacagcagggcaccccagggatggcactggggagtatgggatctgtggtaaaaagcgaggcctcttcttctcctcccgtcgtgacatcttcctcccatagcagggcgccatgccaagccggcgatttgcgggacatgatcagcatgtacctgccaggagccgaggtcccagagcctgcagctccatcacggctacatatgtcacaacactatcagtctggcccagtaccaggtaccgctatcaatggtacactgcccttgagccacatg

SEQ ID NO: 19797 - DNA, 951 bp, synthetic construct
  misc_feature 1..951: note = source = /note="Description of Artificial Sequence: Synthetic coding sequence"
  source 1..951: mol_type = other DNA
atgtacaacatgatggaaaccgagctcaagccgcctgggcctcagcaaacctcgggaggtggagggggaaactcgaccgctgccgcagccggaggtaaccagaagaattcgccggaccgggtgaaacgcccgatgaacgccttcatggtctggtcacgcggacagcggcggaaaatggcgcaggaaaatccgaagatgcacaacagcgaaatctccaagagactgggcgccgaatggaagttgctgagcgaaaccgaaaaacggcctttcatcgacgaagccaagagactgagagcactccacatgaaggagcacccagattacaagtaccggccgaggagaaagactaaaaccctgatgaagaaggacaagtacaccctgcccgggggactcctggcaccgggcggtaactccatggcttcaggtgtgggagtcggcgcgggtctgggtgccggagtgaatcagcggatggattcttatgcgcacatgaacggatggtccaacgggagctactctatgatgcaggaccagctgggatacccgcagcatccgggacttaacgcacatggagccgcgcagatgcagccgatgcaccgctatgatgtctccgctctgcagtacaactcgatgacctcctcacaaacctacatgaatggatcaccgacttactcaatgagctactcccaacaaggcactcctggcatggcgctgggatcgatgggatcagttgtgaaatcggaggcctcctcgtccccgccagttgtgacgtcctcctcccacagccgcgcgccgtgccaagcaggagatctccgggacatgatttccatgtacctgcctggagcagaggtgccggaaccggccgcaccgtcccgcctccacatgagccagcactaccaatcagggccggtgccgggcacggcgatcaacggaaccctgccgctgtcgcacatg

SEQ ID NO: 19798 - DNA, 951 bp, synthetic construct
  misc_feature 1..951: note = source = /note="Description of Artificial Sequence: Synthetic coding sequence"
  source 1..951: mol_type = other DNA
atgtataatatgatggagaccgaactgaagcccccgggcccacagcagacctcaggtggcgggggtgggaactccacagccgcagcagcaggtggcaaccagaaaaacagcccagaccgggtcaagcgacccatgaacgcattcatggtctggagtagaggtcaaaggcggaagatggcgcaggaaaacccaaaaatgcataacagcgagatctcaaagaggctgggggcggagtggaaactcctctcagagaccgagaagagaccttttatcgatgaggccaaaaggttgcgggccctgcacatgaaagagcacccagactacaagtaccggccacgccgaaagactaagactctgatgaagaaggacaagtatacactgcccggcggtctgttggctccgggcggcaactcaatggcctccggggtcggggttggcgcaggccttggcgcgggagttaaccagcggatggactcttatgcgcatatgaacggttggtccaacgggtcctactccatgatgcaggaccaactgggctatccccagcatcccggccttaacgcacatggtgcagcacagatgcagcccatgcatcggtacgatgttagcgcccttcagtacaacagtatgacgagtagtcagacatacatgaatggaagtcccacgtactcaatgagttacagccagcaaggaacgccaggaatggctcttggtagtatgggttcagtggttaagagcgaggccagctcaagtccgccagttgtcacgagctcaagccactcccgggctccttgtcaagcaggtgatctcagagacatgatttcaatgtacctgccgggtgccgaagtccccgaacctgcagccccctcacgactgcacatgagtcagcactatcagtcaggcccagtgccagggacagctatcaacggtacattgcccttgagtcacatg

SEQ ID NO: 19799 - DNA, 951 bp, synthetic construct
  misc_feature 1..951: note = source = /note="Description of Artificial Sequence: Synthetic coding sequence"
  source 1..951: mol_type = other DNA
atgtacaatatgatggagacggagctgaagccgccaggaccgcaacagacttcaggcggaggcggaggaaacagcactgcggccgctgcaggaggaaaccagaagaactcgccggaccgcgtgaagcgaccaatgaacgccttcatggtgtggtccaggggccagcgccggaaaatggcccaagagaacccgaagatgcacaactctgaaatttccaaaagattgggtgccgaatggaagctgctttccgaaaccgaaaagcggcccttcatcgacgaagcgaagagactgcgcgccctccacatgaaggagcatcctgactacaaataccggccgaggaggaaaactaaaactctcatgaagaaggataagtacaccctgccgggaggtctgctcgcgccgggtggaaatagcatggcttccggagttggtgtgggagccggactgggagcgggggtcaaccagcggatggatagctacgcacatatgaacggatggtcaaatggaagctacagcatgatgcaggatcagctgggatatcctcagcatcctggccttaacgcacatggagccgcacagatgcagccaatgcacagatacgatgtgagcgccctgcagtacaactccatgacgtcaagccaaacttacatgaacggatcgccaacctactcgatgtcttacagccagcaggggaccccggggatggcactcggttctatgggatccgtggtcaagtccgaagcgtcaagctcgcctcctgtggtcacctcgagctcgcacagcagagccccttgccaagctggtgatctccgcgatatgatctcaatgtacctcccgggtgccgaagtgcctgaacctgctgcaccgtcgcgactgcacatgtcacagcattaccaaagcggaccggtgccgggcaccgcaatcaacggcacccttcctctgtctcacatg

SEQ ID NO: 19800 - DNA, 951 bp, synthetic construct
  misc_feature 1..951: note = source = /note="Description of Artificial Sequence: Synthetic coding sequence"
  source 1..951: mol_type = other DNA
atgtataatatgatggaaacggaattaaaaccgccgggtccgcaacaaacgtcgggtggtggtggtggtaattcgacggcggcggcggcgggtggtaatcaaaaaaattcgccggatcgtgtaaaacgtccgatgaatgcgtttatggtttggtcgcgtggtcaacgacgtaaaatggcgcaagaaaatccgaaaatgcataattcggaaatatcgaaacgtttaggtgcggaatggaaactattatcggaaacggaaaaacgaccgtttatagatgaagcgaaacgattacgtgcgttacatatgaaagaacatccggattataaatatcgaccgcgacgtaaaacgaaaacgctaatgaaaaaagataaatatacgctaccgggtggtttattagcgccgggtggtaattcgatggcgtcgggtgtaggtgttggtgcgggtctaggtgcgggtgtaaatcaacgaatggattcgtatgcgcatatgaatggttggtcgaatggttcgtattcgatgatgcaagatcaactaggttatccgcaacatccgggtctaaatgcgcatggtgcggcgcaaatgcaaccgatgcatcgatatgatgtatcggcgctacaatataattcgatgacgtcgtcgcaaacgtatatgaatggttcgccgacgtattcgatgtcgtattcgcaacaaggtacgccgggtatggcgttaggttcgatgggttcggtagttaaatcggaagcgtcgtcgtcgccgccggtagtaacgtcgtcgtcgcattcgcgagcgccgtgtcaagcgggtgatctacgagatatgatatcgatgtatctaccgggtgcggaagtaccggaaccggcggcgccgtcgcgattacatatgtcgcaacattatcaatcgggtccggtaccgggtacggcgataaatggtacgttaccgttatcgcatatg

SEQ ID NO: 19801 - DNA, 951 bp, synthetic construct
  misc_feature 1..951: note = source = /note="Description of Artificial Sequence: Synthetic coding sequence"
  source 1..951: mol_type = other DNA
atgtacaatatgatggagactgagctgaaacccccagggccacagcagacttcaggaggtgggggcggaaactcaactgcggcagccgccggagggaaccagaagaactctcctgaccgagtgaaacgcccaatgaacgcttttatggtttggagtaggggccagagaaggaaaatggcccaggaaaatccaaagatgcataatagcgaaatttccaagagactaggagcagagtggaagctcctgagcgagacagagaaacgaccttttatcgacgaggcgaagcggctacgagcactacatatgaaggaacaccctgactataagtaccgcccacgtcggaagaccaaaaccttaatgaaaaaagacaaatatactctgccgggcggtctgctcgctccgggagggaattcaatggcctctggagtcggagtgggcgcagggttgggcgccggggtcaatcagcgtatggacagctacgctcacatgaatgggtggtccaacggatcttatagcatgatgcaggatcaattaggatacccacaacaccctggccttaatgcacatggggcggcccaaatgcagcccatgcatcgatatgacgtatccgcccttcagtacaatagcatgacttcctcacaaacctacatgaacggcagtccaacatattccatgtcttacagccagcaggggacacctgggatggctttaggaagtatggggtcagttgttaaaagcgaggcaagtagttctcctcctgtggtgacttcctcttcacatagccgggccccctgccaggcaggcgacttgagggatatgatcagcatgtatctgcccggggcagaggttcctgagcccgctgccccttcccggttgcacatgtcgcagcactatcagagtggtcccgtgcctgggactgccataaacggcaccctaccgctctcacatatg

SEQ ID NO: 19802 - DNA, 951 bp, synthetic construct
  misc_feature 1..951: note = source = /note="Description of Artificial Sequence: Synthetic coding sequence"
  source 1..951: mol_type = other DNA
atgtacaacatgatggagactgagcttaagccgcctggaccgcaacagacttcaggaggtgggggcggaaattcaaccgccgcagcggccggcggcaaccagaaaaactcccccgatcgggtgaagcggcctatgaatgccttcatggtgtggagtcgggggcagaggcgcaagatggcgcaagaaaatccaaagatgcacaactcggagatctcaaagcgcctcggagcagagtggaagctgctgtccgaaaccgagaagcggccgtttatagacgaagccaaacggctgagagccctgcacatgaaagaacaccccgattacaaataccgccccagacgtaagaccaagaccctgatgaaaaaggataagtacaccctcccaggcggcctcttggccccggggggaaactcgatggcttcgggcgtcggtgtgggtgcaggactcggagccggagtcaaccagaggatggacagctacgcacatatgaatggttggtcgaacggatcgtacagcatgatgcaagaccagcttggttacccccaacacccgggcctgaacgcgcatggagccgctcaaatgcagccgatgcataggtacgacgtttccgcgctgcaatacaactcgatgacctcatcgcaaacttatatgaatggatcgccgacctattcaatgtcctacagtcaacagggaacgccggggatggctctgggttctatggggtcggtggtgaagtcggaggcatcatcctcaccacccgtggtgactagcagctctcactcgcgagcaccatgtcaggcaggagatctgagggacatgatctcaatgtacctcccgggcgcggaagtcccggaaccggcggccccttcacggttgcatatgagccagcactaccagtcgggacctgttccgggaacggccattaatggaactctcccactctcacacatg

SEQ ID NO: 19803 - DNA, 951 bp, synthetic construct
  misc_feature 1..951: note = source = /note="Description of Artificial Sequence: Synthetic coding sequence"
  source 1..951: mol_type = other DNA
atgtacaacatgatggaaacagagctcaagcctcctggaccgcaacagacctccggcgggggtggcggtaactcgaccgctgcagccgcaggggggaaccagaagaattcccctgatagggtgaagcggcccatgaatgcatttatggtatggtctagggggcaacggcggaagatggctcaagaaaaccccaaaatgcacaattccgagatcagcaaacgcctcggcgcagaatggaagctgctctcagagacggagaaaaggccctttattgatgaagccaaacgacttagagcactgcacatgaaagagcaccccgactacaaatacagacctagaaggaaaactaaaacactcatgaagaaagacaaatacacactgccaggcggactgctcgccccaggcgggaactcaatggcttccggggttggggtgggggccggcctaggagccggggtaaaccaaaggatggacagttacgcacacatgaatggttggtcaaacggttcttacagtatgatgcaggaccagctgggctacccccagcatccaggccttaatgcgcacggagcggctcaaatgcagcctatgcatcggtacgatgtgtcagcattacagtacaattctatgactagttcccaaacttatatgaatggttctcctacatatagtatgtcctactcccaacaggggacacctggcatggctcttggatccatgggcagcgtggtcaagtcagaggccagctcttcccccccagttgtgacttcaagctctcactccagagcaccatgccaagccggcgatctgcgggacatgattagtatgtacctacctggggcagaagttccagaacccgctgccccttcccgcctgcacatgagccagcattaccagtctggtccagtgccagggaccgctatcaatggcaccctgcccctgtctcatatg

SEQ ID NO: 19804 - DNA, 951 bp, synthetic construct
  misc_feature 1..951: note = source = /note="Description of Artificial Sequence: Synthetic coding sequence"
  source 1..951: mol_type = other DNA
atgtacaatatgatggaaaccgagctcaagccgcccggaccgcaacaaacctcgggagggggaggaggcaactcaaccgcggccgctgcgggtggaaaccagaagaattcaccggatcgggtgaaaagaccgatgaatgctttcatggtgtggtcccggggacagcgcagaaagatggcccaagaaaatccaaagatgcataattcggagattagcaagcggctcggagcagagtggaagctcctgtcggaaactgaaaaacggcctttcattgacgaagcgaagcgcctgagggctctccacatgaaagaacacccggactataagtaccggccgcggaggaaaactaagaccctcatgaaaaaagacaagtacaccctgccaggaggactcctcgccccgggtggaaattcgatggcgtcaggagtcggtgtcggagcggggttgggggccggtgttaaccaacgcatggactcttacgcccatatgaacggatggtccaacgggagctactcaatgatgcaagatcaacttgggtacccgcagcatccgggactgaacgcgcacggcgccgcccagatgcagcctatgcaccggtatgatgtctccgcgcttcagtacaattcgatgacctcatcacagacctacatgaacggatcgccaacttactcgatgtcctacagccaacaagggacccctggaatggcactgggatccatgggatccgtggtgaaatccgaggcctctagctcgccacctgttgtgacctccagctcgcactccagagccccgtgccaggctggcgacctgagggatatgatttcgatgtacctgccaggagctgaagtgcccgaaccggcagcaccgtcacgcctgcatatgtcccaacactaccagagcggtccggtgcctggtaccgccatcaatggcaccttgccgcttagccatatg

SEQ ID NO: 19805 - DNA, 951 bp, synthetic construct
  misc_feature 1..951: note = source = /note="Description of Artificial Sequence: Synthetic coding sequence"
  source 1..951: mol_type = other DNA
atgtataatatgatggagacagaacttaaacctcctggaccacaacaaacttcagggggaggtggaggaaattcaacagctgcagcagcaggtggaaatcaaaagaattctcctgatagagttaaacgaccaatgaatgcatttatggtttggtcaagaggacaaagaagaaagatggctcaagaaaatccaaaaatgcataattctgaaattagtaaaagattaggagctgaatggaaattattatcagaaacagaaaaaaggccatttattgatgaagctaaaagacttagagcacttcatatgaaagaacatccagattataaatatcgtcctcgtagaaaaactaaaactttaatgaaaaaagataagtatacattaccaggtggtttattagcaccaggaggaaactctatggcatcaggtgttggagtaggtgctggtttgggagctggagttaatcaaagaatggactcttatgcacatatgaatggatggtcaaatggatcttattccatgatgcaagatcaactaggatatccacaacacccaggtttaaatgctcatggagctgcacaaatgcaaccaatgcatcgttatgatgtatcagcacttcaatataattcaatgactagtagtcaaacatatatgaatggatcaccaacatatagtatgtcttattcacaacaaggaactccaggaatggcattaggatctatgggatcagttgttaaatcagaagctagttcttccccacctgttgtaacctcatcatctcatagtcgagctccatgtcaagcaggagatttaagagatatgatttctatgtatttaccaggagctgaagtaccagaaccagcagctccttcacgacttcatatgtcacaacattaccaatctggacctgtaccaggaactgcaattaatggtactcttccattatcacatatg

SEQ ID NO: 19806 - DNA, 951 bp, synthetic construct
  misc_feature 1..951: note = source = /note="Description of Artificial Sequence: Synthetic coding sequence"
  source 1..951: mol_type = other DNA
atgtacaatatgatggaaactgaactgaagccgccaggaccacagcagacgtcgggcggtggcggaggaaacagcaccgcggctgcagctggaggcaaccagaaaaactccccggacagggtgaaacggccaatgaacgcattcatggtgtggtcacgcggccagagacgcaagatggctcaggaaaatcctaagatgcacaacagcgaaatctcgaagcggttgggagcagaatggaagctgctgtcagaaactgaaaagaggccgtttatcgacgaagcgaagcggctccgggctctccacatgaaggaacacccggattacaaataccggccacgccggaaaactaagacgcttatgaagaaggacaagtacactctgccagggggactgcttgcgccgggtgggaactcgatggcgagcggagtcggagtgggagcggggctgggagctggagtcaatcagcgcatggactcctacgcccacatgaatgggtggagcaatggaagctacagcatgatgcaggaccagttgggctacccgcagcatccgggactgaacgcgcatggagccgcccagatgcaacctatgcaccggtacgacgtctcagcgcttcagtacaattcaatgaccagctcgcagacttatatgaacggatccccgacgtactcgatgtcatactcccagcagggtacgccaggtatggccctgggatcaatgggatcggtggtcaaatcagaggccagctcgtcgccacctgtggtgacttcctcatcccactctcgcgccccgtgccaggccggggatctgcgagatatgatctcaatgtacctcccgggagcggaggtgccagagccagcagctccctcccgcctgcatatgagccaacattaccagagcggacctgttccgggaaccgcgattaacgggaccctcccgttgtcgcacatg

SEQ ID NO: 19807 - DNA, 951 bp, synthetic construct
  misc_feature 1..951: note = source = /note="Description of Artificial Sequence: Synthetic coding sequence"
  source 1..951: mol_type = other DNA
atgtataacatgatggaaaccgagctgaagccgccgggaccgcagcagacgtctggaggaggagggggcaactccaccgcggctgccgcgggcggaaaccagaagaatagccctgacagagtgaagcggccgatgaatgcgttcatggtgtggagccgggggcagcgccgcaaaatggcacaggaaaacccaaagatgcacaactcagagatttcaaagcggctgggagcagaatggaaacttctgagtgagacggaaaaacggccgttcattgatgaggcgaaacgactccgggcgctgcatatgaaggaacaccctgactacaaatacaggccacgccgtaagacgaaaactcttatgaagaaagataagtacaccttgccaggaggcctgttggcacctggcggaaattccatggcgtccggcgtgggtgtgggagccggactcggagctggagtgaaccagcgcatggattcatacgcgcacatgaatggttggtccaacggatcgtactcgatgatgcaagaccaactcggataccctcagcatccggggcttaacgctcatggtgcggcccagatgcaaccaatgcaccgctacgatgtgtccgctcttcagtacaatagcatgacttcctcacagacgtacatgaacggatcgcctacgtactcaatgtcctacagccaacagggaacccccggaatggctctcggatcgatgggttcagtcgtcaagagcgaagcatcctcctcaccgccggtggtgacctcgagctcccattccagggccccttgccaagccggcgatttgagagacatgatctcaatgtatctgcccggagcggaagtcccggagccagcagcaccatcacggctccacatgtcgcaacactaccagtccggaccggtgccgggcactgcgatcaatggaaccctgccgctctcgcatatg

SEQ ID NO: 19808 - DNA, 951 bp, synthetic construct
  misc_feature 1..951: note = source = /note="Description of Artificial Sequence: Synthetic coding sequence"
  source 1..951: mol_type = other DNA
atgtataacatgatggagacggaacttaaacctcccggtccacagcagacttccggaggaggtgggggaaattctaccgccgcagccgctggggggaaccaaaagaacagccctgaccgagtgaagcgaccgatgaatgccttcatggtgtggagtcgcggtcaaaggaggaaaatggctcaggagaatccaaagatgcacaattcggaaatatccaagcgtttaggcgccgaatggaaactgttatccgagacagagaagagacctttcatcgacgaggccaaaagactccgagccctgcacatgaaggagcatcctgactataagtataggcctcgaagaaagacaaagacacttatgaaaaaggataaatataccctccccggtgggctcttagcccccggcggtaactccatggcctccggtgtgggcgttggggccggcctgggagctggggtcaatcaacggatggacagctacgcacatatgaacggatggtctaacggttcatacagcatgatgcaagaccagctaggttatccccaacatccaggcctcaacgcccatggagcagcacagatgcagccgatgcatagatacgatgtatcagcactccagtataattccatgacaagctcacaaacttatatgaacggctctccgacctactcgatgtcttattcacaacagggcacccctgggatggcgctgggctctatgggcagcgtagtgaagagcgaggcctccagcagtcccccagttgtgacaagttctagccatagtcgcgccccttgtcaggctggcgatctcagggatatgatcagcatgtacctgccaggcgcggaagtgccagagcccgcggcaccatcacgacttcacatgtctcagcactaccagagtggaccggtgccagggactgccatcaatggaaccctgccacttagccatatg

SEQ ID NO: 19809 - DNA, 951 bp, synthetic construct
  misc_feature 1..951: note = source = /note="Description of Artificial Sequence: Synthetic coding sequence"
  source 1..951: mol_type = other DNA
atgtataatatgatggaaaccgaactgaaaccccctggccctcagcaaacatctggtgggggagggggcaactcaacggcggccgctgcggggggaaaccagaagaattcccccgacagagtcaagagacctatgaacgctttcatggtgtggagccgggggcagcgtaggaagatggcacaggagaatcctaagatgcacaattccgaaatctcgaagagactgggcgctgagtggaagctgctctccgaaactgagaagcgccccttcatcgacgaagccaaaaggctgcgggcactgcacatgaaggagcaccccgattacaagtatcggccaaggaggaaaactaagactctgatgaaaaaagacaagtacacactacccggcggcctccttgccccagggggtaatagtatggcctccggggtcggtgtgggagccggactcggcgccggggttaatcagcgcatggattcatatgcccacatgaatggatggtctaatggatcgtacagcatgatgcaggaccaactgggttatccacaacaccctggcctcaacgctcatggcgcagcacagatgcagccgatgcacaggtacgacgtgtccgcgttgcagtacaacagtatgacaagttcccaaacctacatgaatgggtctccaacttactcaatgtcctatagccagcagggaactcccggaatggccctggggagcatgggcagtgtggtgaaatccgaagccagcagcagcccccccgttgtgaccagtagcagccactctcgggcaccctgccaggcgggggacctacgagatatgatcagcatgtatctgcccggcgcggaggtacccgagcccgccgccccgtctcggttgcatatgtcccagcattaccagtctgggcccgttccaggcacggccatcaacggcaccctgccactgagccatatg

SEQ ID NO: 19810 - DNA, 951 bp, synthetic construct
  misc_feature 1..951: note = source = /note="Description of Artificial Sequence: Synthetic coding sequence"
  source 1..951: mol_type = other DNA
atgtacaacatgatggaaacagagcttaagcccccggggccccagcagacctccggtggcgggggcggaaattccacagcagccgccgctgggggaaatcaaaaaaactctccggatagagtgaaaaggccaatgaacgcattcatggtgtggtccaggggacagcgacgcaagatggcccaggaaaacccaaagatgcataacagtgaaatcagcaaacgacttggcgctgagtggaagctgctctcagagacggagaagagaccatttattgacgaggcaaagagactccgggctcttcacatgaaagagcatcctgattataagtaccgcccgcgccgaaagacaaaaactctgatgaagaaggacaaatacaccctccccggagggctgctggctcccgggggaaatagcatggcctcaggggttggggtgggggctggactgggcgccggcgtcaaccagagaatggacagctacgctcacatgaacgggtggagcaatgggtcatactctatgatgcaggaccagctgggctacccccagcacccaggcttgaacgcccatggggcagcccaaatgcaacccatgcacagatacgacgtgagcgcacttcagtacaactccatgacgtcctcacagacatacatgaacggctcccccacgtacagtatgtcatactctcagcaggggacgcccgggatggccctgggcagcatgggatccgtcgtcaagtccgaggccagttcttcaccccccgtggtaacaagtagttctcacagcagggccccttgtcaagcaggagacctccgcgatatgatctcaatgtatctgcccggcgcagaagttccagaacctgctgcgccctcccggctccatatgtcacagcattatcaatctgggcctgttccaggcaccgccatcaatggtactctgccccttagtcacatg

SEQ ID NO: 19811 - DNA, 951 bp, synthetic construct
  misc_feature 1..951: note = source = /note="Description of Artificial Sequence: Synthetic coding sequence"
  source 1..951: mol_type = other DNA
atgtacaatatgatggaaactgagcttaagcctcccggccctcagcagaccagtgggggagggggcggtaatagtaccgccgccgccgccggcggcaaccaaaagaatagccccgaccgtgttaagaggccgatgaatgcgttcatggtgtggagtagggggcagaggcgaaagatggcccaggagaatccaaagatgcacaattccgaaatctcaaagaggttgggggccgagtggaagctactcagcgagacagagaagaggccatttatcgacgaggctaagcgactgagggccctacacatgaaggaacaccccgactacaaatacagaccacgtcggaagacaaagacacttatgaagaaagataagtataccttgcccggcggactgctggcccccggaggtaacagcatggcttccggcgtcggagtaggggccggacttggcgccggcgtgaatcagcggatggattcttacgctcatatgaacggatggtccaatggatcctacagcatgatgcaggatcagctggggtacccccagcaccccggtctaaacgctcatggagccgcgcagatgcagccaatgcacagatatgacgtttccgctctgcagtataactctatgacctcttcacaaacatacatgaatggctctcctacctacagtatgagctatagtcaacaggggacacccggaatggcgctggggagtatgggaagcgtggtgaagagcgaggccagctccagtcctcctgttgtgacgtcctcctcacattcacgtgccccctgccaggcaggcgatctgcgtgatatgatttccatgtatctgcccggtgccgaggttccagagcctgccgccccatcgcggttgcatatgagtcagcattaccagagtgggcccgtaccaggaacggcaatcaacggaaccctgccattatcacacatg

SEQ ID NO: 19812 - DNA, 951 bp, synthetic construct
  misc_feature 1..951: note = source = /note="Description of Artificial Sequence: Synthetic coding sequence"
  source 1..951: mol_type = other DNA
atgtacaatatgatggaaacagaactaaagcccccggggccacagcagacatcaggaggcggcggcggcaactctacagcagcagccgccggggggaaccagaaaaattcacctgatcgagtgaagagaccaatgaacgcattcatggtatggtcacgggggcagagacggaagatggcccaggaaaaccccaagatgcacaattccgaaatctccaaacggttgggcgctgagtggaagctgttaagtgagaccgaaaagcggccctttatcgacgaggcgaaacgtctgagagccttgcacatgaaagaacatcctgattataaatacagaccgagacgaaaaacaaagaccttgatgaaaaaagacaaatacactctacctggcggcctactcgcccccggaggtaatagcatggcatcgggcgtgggggttggcgcaggcctgggggccggcgtgaaccagagaatggacagctacgcacacatgaatgggtggtccaatggtagttatagcatgatgcaggaccagcttggttatcctcaacatccaggtctgaacgctcacggggcagcgcaaatgcagccaatgcatagatatgacgtttcggccctccaatacaatagcatgacaagttcccagacgtacatgaatgggtcccctacatattctatgtcttacagtcagcagggtacccctggaatggccctgggctccatggggtccgtcgtcaaatcagaggcaagtagcagcccccctgttgtgacctctagcagccactcccgcgcaccttgccaggcgggtgatctgcgagacatgatttccatgtatctgccaggcgcagaggtgccagaaccagctgctccttctaggctccacatgagccagcactatcagtcaggacccgttccgggtaccgcaattaatgggaccctgcccttgtcgcacatg

SEQ ID NO: 19813 - DNA, 951 bp, synthetic construct
  misc_feature 1..951: note = source = /note="Description of Artificial Sequence: Synthetic coding sequence"
  source 1..951: mol_type = other DNA
atgtacaatatgatggagacggaattgaagccaccaggccctcagcagacttcaggagggggaggagggaattcaactgccgcagcggccgggggcaaccagaaaaactcgccggacagagtcaagcgcccgatgaatgctttcatggtgtggtcccggggacagcgccgcaagatggcccaggaaaacccaaagatgcacaactcagagatcagcaaacgcctcggagcagaatggaagctgctcagcgagactgaaaagaggcccttcatcgatgaggcaaagagactgcgcgctttgcacatgaaggaacaccccgactacaagtacaggccgcgccggaaaacgaaaaccctcatgaaaaaggacaagtacaccctgccgggaggtcttttggccccgggtggaaattccatggcctcgggagtgggagttggtgccggactgggagctggagtgaaccaacgcatggattcatacgcgcacatgaatggatggtcgaacggttcatactcaatgatgcaagatcagctgggctaccctcagcatcctggactgaacgctcacggagcggcgcagatgcagccgatgcaccggtacgatgtctcagccttgcagtacaactcgatgaccagctcacaaacgtatatgaatggctcgccgacttattcgatgtcgtacagccaacaaggaaccccgggaatggcgttgggatcaatgggctcggtggtgaagagcgaggcgtcatcatccccacctgtggtgactagctcctcgcacagccgcgcaccgtgccaggctggcgaccttagggatatgatctcaatgtacttgccgggagccgaagtgccagaacctgcggcgccatcccggctgcatatgtcccagcactaccagtcaggaccggtgccgggaaccgccatcaatggcactcttccgctctcgcatatg

SEQ ID NO: 19814 - DNA, 951 bp, synthetic construct
  misc_feature 1..951: note = source = /note="Description of Artificial Sequence: Synthetic coding sequence"
  source 1..951: mol_type = other DNA
atgtacaacatgatggaaaccgagctcaagccacccggaccacagcagacaagtggcgggggaggtggaaactcgacagccgccgccgcgggaggcaatcagaagaattctcccgatcgggttaagcggccgatgaacgcttttatggtgtggtccaggggacagaggagaaagatggcgcaggagaatccaaaaatgcacaacagcgagataagcaaaaggttaggcgccgaatggaagttactctccgaaactgaaaaaagacctttcattgatgaggcaaagcgactacgagctctgcatatgaaggaacacccagattataaatatagacctcgccgtaagaccaagacactcatgaagaaggataagtataccttacctgggggcttgcttgccccaggggggaacagcatggccagtggagtgggggttggtgccgggctgggtgcaggagtgaaccagcgaatggactcgtatgcgcacatgaacggttggagtaacggctcctactctatgatgcaggaccagctggggtaccctcagcatcccgggctgaacgcacacggcgctgcacaaatgcagcccatgcatcgctatgacgtgtccgcgcttcagtataattctatgacttctagccagacatacatgaatggaagcccaacatattcgatgagttattcccaacagggtaccccaggcatggcgctgggttctatgggctcagtcgtgaaatcggaagcttcaagcagcccaccggtggtgacaagcagtagccactcacgggccccctgccaagccggggatctccgagatatgatatcaatgtacctgccaggagcggaagtgccagagcccgcagctccctctcgccttcacatgtcacagcactaccaatccgggcctgtcccaggaactgccatcaatgggactctgcccctatcgcacatg

SEQ ID NO: 19815 - DNA, 951 bp, synthetic construct
  misc_feature 1..951: note = source = /note="Description of Artificial Sequence: Synthetic coding sequence"
  source 1..951: mol_type = other DNA
atgtataacatgatggaaacagaactcaagccaccagggccacagcagacatctggaggagggggggggaattccactgcagccgcagctgggggaaatcagaaaaatagtcccgaccgggtaaagcgccccatgaatgccttcatggtttggagtcggggacagcgaagaaagatggcccaggagaaccctaaaatgcacaactctgagatatcaaaaagactcggggctgaatggaaactattatcagaaacagaaaaacgcccctttattgatgaagcaaagaggctgcgagccctacatatgaaagagcatccagattacaagtaccggcccaggaggaaaactaagactctcatgaagaaagataaatatacacttccaggagggctactggcccctgggggaaactctatggcaagtggagttggggttggggccggactaggagccggggtgaaccagaggatggatagttatgcacatatgaacgggtggagtaatggaagttactctatgatgcaggatcagcttggatacccacaacatcctgggctcaatgcccatggggccgcccaaatgcagcccatgcacagatacgatgtctccgctctacagtataatagtatgacgagttctcagacatatatgaacggatctcccacatacagtatgtcgtactctcagcagggaacacccggaatggccctcgggtccatgggatctgttgtcaaatcagaagccagttcctccccccccgtggtgacttcatcttctcacagtcgagccccttgtcaggctggagatttaagggatatgatttccatgtatcttcctggagctgaggttcccgagccagctgcgccaagtcggttgcacatgtcacagcactaccagagtggacccgtgcccggaactgccataaatggaacacttccattatctcacatg

SEQ ID NO: 19816 - DNA, 951 bp, synthetic construct
  misc_feature 1..951: note = source = /note="Description of Artificial Sequence: Synthetic coding sequence"
  source 1..951: mol_type = other DNA
atgtacaatatgatggaaactgaactgaagcctcccggacctcagcagactagcggtggaggtggaggaaactctaccgctgccgcagcaggcggcaatcaaaagaacagccctgaccgcgtgaaacggcctatgaatgcatttatggtgtggtcccgcggacaacggagaaagatggcgcaggagaaccccaagatgcataactccgagatctcaaagcggttgggggcagaatggaaacttctgtccgaaaccgaaaaaagaccctttattgatgaggccaagcggctgcgagcactccatatgaaagaacatcctgactataagtacagacctcgccgcaagactaagactctcatgaaaaaagacaagtacacccttcccggcggcctgctggcaccagggggaaattcgatggcctcgggagtgggagtcggagccggactcggtgcgggagtgaaccagagaatggacagctacgcacacatgaacggatggtccaacggctcctattccatgatgcaagaccaacttggttacccgcagcaccctggacttaatgcccacggagcagcccagatgcaaccaatgcatagatacgacgtctccgccttgcaatacaattcaatgacctcaagccagacttacatgaacgggtcgccgacctatagtatgtcgtactcgcagcaggggacccctgggatggccctggggtcgatgggctcagtggtgaagagcgaggcctcatcaagccctcctgtcgtgactagctcatcgcatagcagagcaccatgtcaagcaggcgacttgagagacatgatttcgatgtacctgcccggagccgaggtgccagaaccagcggcaccttccagactgcacatgtcccaacattaccagtcgggtccagtgcctggaaccgcgatcaacggaacccttcccctttcgcatatg

SEQ ID NO: 19817 - DNA, 951 bp, synthetic construct
  misc_feature 1..951: note = source = /note="Description of Artificial Sequence: Synthetic coding sequence"
  source 1..951: mol_type = other DNA
atgtacaacatgatggagaccgagttgaaaccccctggaccgcagcagaccagcggcggcggtggtggtaattcaacggccgctgcagctgggggtaaccagaagaactctccagatcgggtcaaacgtcccatgaatgccttcatggtttggagcaggggccagaggcgaaagatggcccaggaaaatccaaagatgcataactcggaaattagcaagcggttgggggccgagtggaagctgctgtcagaaacggaaaagaggccatttattgacgaggccaagagactgcgggccttgcatatgaaagagcaccctgactacaagtacaggcctcgccgcaaaactaaaaccctgatgaaaaaagataagtacaccctgcccggaggcctgctggctccaggcgggaacagcatggctagcggcgtcggcgtgggcgcaggtctcggagcgggagtcaaccagcgcatggacagctacgcgcacatgaacggatggagcaacggttcatacagcatgatgcaggaccagctgggctatccccagcaccccgggctgaacgctcacggcgccgctcagatgcagccgatgcaccgatacgacgtttctgctctccagtataactccatgacgtcaagccaaacctatatgaacggcagtcctacctactccatgagctatagccagcagggtacgccaggcatggctcttggatccatgggctccgtcgtgaagagtgaagcttctagtagcccacccgtcgtgacatcatcctcacacagtagggctccctgtcaggccggagacctgcgagatatgattagcatgtatctccccggcgccgaagtcccagagccagcagcgccctctcgcctgcacatgagccagcattatcagtccggaccggtcccagggacggcaataaacggcacattgcccctctcgcatatg

SEQ ID NO: 19818 - DNA, 951 bp, synthetic construct
  misc_feature 1..951: note = source = /note="Description of Artificial Sequence: Synthetic coding sequence"
  source 1..951: mol_type = other DNA
atgtataatatgatggagacagagctgaaaccgccaggacctcagcagaccagtgggggcggcggtggcaacagtactgccgcagcagcaggaggaaaccagaaaaattcgccagaccgggtgaaacggcctatgaacgccttcatggtgtggtccagaggacagaggcgtaaaatggcacaggagaaccctaagatgcataatagcgaaatatcaaaaaggctgggagcagagtggaagctgctctctgaaacagagaagagacccttcattgacgaagcaaagcgtctaagggccctgcatatgaaggaacacccagattacaaatacaggccaagacgtaagactaaaactctcatgaaaaaagataagtatactctacccggcgggctgctggcaccgggggggaatagcatggctagtggggtgggagtgggtgctggtctcggcgcaggtgtcaatcagcggatggattcttatgcccacatgaacgggtggagcaacggaagttatagcatgatgcaggatcagctggggtacccccagcacccgggcctcaatgcacatggggccgcccagatgcagccaatgcaccgttatgacgttagtgccttgcagtataactctatgaccagctctcagacctatatgaatggatcgcccacctactcaatgagttactctcaacagggaacacctgggatggctctgggttcgatgggctccgttgtgaagtcggaagcctcaagcagtcccccggtggtaacttcctctagccattctcgggccccatgccaggcaggcgaccttagagatatgatatcaatgtatctgcccggtgccgaggtgccagaacccgctgcgccttccaggttacacatgagccagcactaccagagtggcccagtcccgggcacggccattaatgggacattaccactgtcacacatg

SEQ ID NO: 19819 - DNA, 951 bp, synthetic construct
  misc_feature 1..951: note = source = /note="Description of Artificial Sequence: Synthetic coding sequence"
  source 1..951: mol_type = other DNA
atgtataatatgatggagacagaattgaagcctccaggtcctcagcaaacttccgggggcggaggaggaaactctactgccgcagctgccggaggcaatcagaaaaactccccggaccgcgtgaagagaccgatgaacgctttcatggtgtggtcacggggccagcggcggaaaatggcccaggagaaccctaaaatgcacaactcagagatctcgaaacggctcggagcggagtggaagctgctctcagaaacagagaagaggcccttcatcgatgaggccaagcgactgcgagcactccacatgaaagaacaccctgactataagtaccggccaaggagaaaaacaaagactctgatgaagaaggacaaatacactctgccgggcggcctcctggcaccaggaggcaattctatggcttccggagtgggcgtcggcgccggcctaggcgctggagtaaatcaaagaatggattcttacgcccacatgaatgggtggtccaatggcagttattccatgatgcaggatcaactcggttatccacagcatccgggcttgaacgctcacggcgctgcacagatgcagcccatgcacagatacgacgtcagtgctctacagtacaactcaatgaccagcagtcaaacgtacatgaatggttcacccacgtatagcatgtcctactcacagcagggcacacccggcatggctctgggctctatgggaagtgtcgtcaagtcagaagcatccagctcccccccggtcgtaacatctagttcccactcccgcgctccctgtcaagccggcgatttacgggatatgatctctatgtacctgcccggagcggaggttccggagcccgcagccccgtctaggctccacatgagtcagcactaccagtccggccccgtgccaggaacagccatcaatggtacattacccctgtcacacatg

SEQ ID NO: 19820 - DNA, 951 bp, synthetic construct
  misc_feature 1..951: note = source = /note="Description of Artificial Sequence: Synthetic coding sequence"
  source 1..951: mol_type = other DNA
atgtataacatgatggagaccgagctgaaacctcctggcccacagcagacttctggaggcggaggcggcaacagcaccgcagctgcagcaggggggaaccagaagaattccccggacagagtgaaacgtcccatgaatgcatttatggtctggagtagaggacagcggcggaaaatggcacaagagaatccaaagatgcacaactctgagatttctaaaaggcttggggctgagtggaagctgctgtccgagacagagaaaaggccctttatcgatgaggctaagaggcttagagctcttcacatgaaagaacatccagactacaaatatagacctcggaggaagaccaagaccctgatgaagaaggataaatacacattgccaggaggactgctggcccccggcggcaattcaatggcaagtggcgttggcgtgggcgctgggctaggtgcaggcgtcaaccagcgcatggattcatacgcccatatgaatggatggagtaacggctcttacagtatgatgcaggaccagctgggctacccccaacatcctggcctgaatgctcatggcgccgctcagatgcagccaatgcataggtacgacgttagcgccctccagtacaacagcatgactagctcccagacctacatgaatggcagcccaacatattccatgagctactcacagcaaggaacaccaggcatggccctgggcagcatgggatcagtggttaagtctgaggcctccagctccccccccgtcgtcacttctagttcccattcacgcgccccatgtcaggctggcgacctacgcgacatgatatctatgtatctccctggtgccgaggtgccagaacctgcagctcctagtagactgcacatgagccagcactaccaatccggccccgtgcctggcacagccataaacggcaccctgcctctcagccatatg

SEQ ID NO: 19821 - DNA, 951 bp, synthetic construct
  misc_feature 1..951: note = source = /note="Description of Artificial Sequence: Synthetic coding sequence"
  source 1..951: mol_type = other DNA
atgtacaacatgatggagactgaattgaagcccccaggtccacagcaaacaagtggtggcggcggaggtaatagcactgctgcagccgcaggcggaaaccagaagaactctccagatagagtgaagaggcccatgaacgcttttatggtgtggtctaggggacagcgccgcaagatggcacaggagaaccccaagatgcacaactcagagatcagcaagcgcttgggtgctgagtggaagcttctgtccgagactgaaaaaagaccttttatagacgaggcgaagcgcctgcgcgcgctgcacatgaaggagcaccctgattacaaatacaggccgagacgcaagacgaaaacccttatgaagaaggataagtataccttgcctggaggcctgctggccccaggcggaaatagcatggcttctggcgtgggcgtcggagccggtctcggcgcgggcgtcaaccagcgcatggactcctatgcgcatatgaatggctggtccaatggctcctactctatgatgcaggatcagctcggatacccccagcaccctggactgaatgctcacggagccgctcaaatgcaaccaatgcaccgctacgatgtcagcgctcttcaatataattccatgacctcttcccagacgtatatgaacggaagtcccacctattctatgtcttactcccaacagggtacaccgggtatggcccttggatcaatgggtagtgtcgtgaaatccgaggccagctcttcaccccccgtagtgacaagttccagccatagcagggcaccatgccaggccggtgacctccgcgacatgatttctatgtatctccccggagcagaagtacccgagcccgctgcgcctagccgcctgcacatgtcacaacactaccaaagcggacccgtgcccggaacagcaatcaacggaaccctgcccctctcacacatg

SEQ ID NO: 19822 - DNA, 951 bp, synthetic construct
  misc_feature 1..951: note = source = /note="Description of Artificial Sequence: Synthetic coding sequence"
  source 1..951: mol_type = other DNA
atgtacaacatgatggaaaccgagctcaaaccccccggaccgcaacaaacctcgggaggtgggggagggaattccactgcagcagccgcaggcggaaatcagaagaactctcccgacagggtcaaaagaccaatgaacgcatttatggtatggagcagaggccagcgcagaaagatggcacaagaaaatccaaaaatgcataattccgaaatctccaagaggctcggtgcagaatggaaactgctgtcagaaactgaaaagcgccccttcattgatgaagccaaacgtctgcgggcactgcacatgaaggaacacccagattacaagtaccgaccgagacgcaagactaagactttgatgaaaaaggacaagtatacccttccgggaggcctcttggcccccgggggaaactcaatggcatctggagtgggagtgggagcaggactgggtgcgggtgttaaccaaagaatggattcgtacgcacatatgaacgggtggtccaacgggtcctactcgatgatgcaagatcagctgggatatccgcagcatcctggacttaacgcacatggagcggcgcagatgcagccaatgcacagatacgacgtgtcggcactgcagtacaactcgatgacttcgtcccagacgtacatgaacggatccccaacttacagcatgtcctacagccaacaaggtacccctggcatggcacttggctcaatgggatcagtggtgaagtcggaggcgtcgtcgtcgcctccagtcgtgacttcatcgtcacactcacgcgcaccctgtcaagccggggaccttcgcgacatgatctcgatgtacttgcctggagccgaggtcccggaacctgcggcgccctccagactgcatatgagccagcattaccagtccgggccagtgcctggtaccgccatcaacggaactctcccactctcccatatg

SEQ ID NO: 19823 - DNA, 951 bp, synthetic construct
  misc_feature 1..951: note = source = /note="Description of Artificial Sequence: Synthetic coding sequence"
  source 1..951: mol_type = other DNA
atgtacaatatgatggaaactgaactcaagcccccgggcccacaacagacttcgggaggtggaggaggaaacagcaccgccgcagccgcaggtggaaatcagaagaactctcctgacagagtgaagcgtcctatgaatgcatttatggtgtggtcccggggacaaaggcgaaagatggcacaggaaaatcctaagatgcataacagcgaaattagcaaacgacttggagcagaatggaaacttctttcggaaactgaaaagcggccatttatcgatgaagcgaagcgtctccgggcactgcatatgaaagagcatcctgactacaagtaccgcccccgaagaaagactaaaactctcatgaagaaggataagtacaccctgcctggcggattgcttgcacctggaggcaactcaatggcctcgggagtgggagtgggagcgggtctgggtgccggggtgaaccaaagaatggactcctatgcacatatgaatggatggtcaaacgggtcgtactcgatgatgcaggatcaactgggatacccccaacaccctggtcttaatgcacatggagcggcacagatgcaaccaatgcatcgatacgatgtgtccgcacttcagtacaatagcatgaccagcagccagacttacatgaatggatctccaacctactccatgtcgtactcacaacaggggactcctgggatggcattgggttctatgggatcagtggtcaagtccgaggcttcatcatcgccacctgtcgtgacctcctcgtcgcattcgcgcgctccttgtcaggcaggtgatctgcgtgacatgatttcgatgtacctgccgggagccgaagtgcccgaacctgctgcaccatcgcgccttcacatgtcgcagcactaccaaagcggtcctgtgccaggcactgcaattaacggaactctgccactcagccatatg

SEQ ID NO: 19824 - DNA, 951 bp, synthetic construct
  misc_feature 1..951: note = source = /note="Description of Artificial Sequence: Synthetic coding sequence"
  source 1..951: mol_type = other DNA
atgtacaacatgatggagactgagctgaagcctcccggtcctcaacaaactagtggcggcggaggcggtaactctactgccgcggcagccggaggtaaccagaagaattcgcctgaccgagtcaaaagaccgatgaatgccttcatggtatggtcacgaggacagcgtagaaagatggcccaggaaaacccgaagatgcacaattcagagatctctaaaagattgggagctgagtggaaactgttgtcagagaccgagaagagacctttcatcgatgaggctaaacgactaagggccctgcacatgaaagagcaccctgattataagtacagacctaggaggaagaccaagaccttaatgaaaaaggataaatacacactgcccggaggactgctcgcccctggtgggaactctatggcctcgggcgtgggcgtgggcgccgggttgggagccggagtgaaccaacgaatggattcttatgcccacatgaatgggtggagcaacggcagttattctatgatgcaggatcaacttggatatccccagcaccccggactcaacgcacacggagcagcccagatgcagcctatgcatcgttacgatgtttctgccctacagtataactcaatgaccagcagtcagacatacatgaacggctctccaacctactctatgagctatagccagcagggcacccccggcatggcattgggctccatgggttccgtagtgaagagcgaggcctcttccagccccccagtggtcacctcatcttcacactccagggccccatgccaggcaggagatctgcgggacatgatatccatgtatctgcccggggccgaagtgccagaaccggctgccccatcaagattgcacatgagccagcactaccagtccggccctgtgcctggtaccgccatcaacggtaccctgcctctgtcacacatg

SEQ ID NO: 19825 - DNA, 951 bp, synthetic construct
  misc_feature 1..951: note = source = /note="Description of Artificial Sequence: Synthetic coding sequence"
  source 1..951: mol_type = other DNA
atgtacaatatgatggagaccgaacttaagccgccaggacctcaacagactagcggaggaggcggtggaaactccacggcagcggccgcaggcggcaaccagaagaattcaccggacagagttaagcgccctatgaacgcttttatggtttggagcagaggacaacgccgcaagatggctcaggaaaatccaaagatgcataatagcgaaatctcgaaacgcttaggtgcggaatggaaattgcttagtgagacagaaaaacgcccttttatcgatgaagctaagaggttgcgtgcacttcatatgaaagagcatcctgactataagtatcgtccacgtaggaaaacaaagaccctcatgaagaaagacaaatataccctgcctggggggctccttgctccaggcggcaattcaatggcatcgggggttggcgttggggcgggattaggagcgggggtcaatcaacgtatggacagttacgcccatatgaatggttggtccaatggttcatattccatgatgcaggatcagcttggttacccgcaacatccagggttaaatgctcatggcgctgcccaaatgcagccgatgcatagatacgatgtatcagcactgcaatataactctatgacgtcaagccagacatacatgaacggtagtccgacgtactcgatgtcatactcccagcagggaaccccgggaatggcacttggatccatgggaagcgtagtgaaatcggaggcctcctcttcaccgcctgtggtaacaagttccagccattcacgcgcaccatgtcaggccggtgacctacgcgatatgatctcaatgtacctcccgggcgctgaagttccggaacccgcggcaccgagtcggctccatatgtcacagcattatcaatcggggccggttccggggacagccatcaacggaacacttccattaagtcacatg

SEQ ID NO: 19826 - DNA, 951 bp, synthetic construct
  misc_feature 1..951: note = source = /note="Description of Artificial Sequence: Synthetic coding sequence"
  source 1..951: mol_type = other DNA
atgtataacatgatggagactgaactgaagccccccggcccacagcagacttctggagggggaggtggtaattctacggccgcagccgccggggggaatcagaagaactcccccgaccgtgtgaagcgacccatgaacgccttcatggtctggtccaggggacagcgaaggaaaatggcgcaggagaaccctaagatgcacaactctgaaatctcaaaacggttgggcgcagaatggaaacttctatcagaaaccgagaagagaccctttatcgatgaggccaagaggctccgggcccttcatatgaaggaacacccggactacaagtatagacctagacggaagacaaagactctaatgaaaaaagataaatatacattgccagggggattgttggcccccgggggcaatagtatggcctcaggagtcggcgtcggcgcgggcttgggagcgggcgtgaaccaacgcatggacagctatgcacacatgaatggctggtcgaatggcagctactctatgatgcaggaccagctcgggtaccctcaacacccgggtctgaatgcacatggggctgcccagatgcaacccatgcataggtacgacgtttctgctctccagtacaattcaatgactagcagtcagacctacatgaatggttcacccacctactctatgtcttacagtcaacagggtacaccaggcatggcactgggaagcatggggtccgtcgtgaagtccgaggctagctcctccccaccggtcgtcacgagcagtagccattctagagccccatgccaggcaggagatctgcgagatatgatcagtatgtatctcccaggagccgaagtgcctgagcccgcagccccctcccgactccacatgtctcagcactaccagagcggtcccgtcccaggtaccgcaatcaatggcacccttccgctcagccacatg

SEQ ID NO: 19827 - DNA, 951 bp, synthetic construct
  misc_feature 1..951: note = source = /note="Description of Artificial Sequence: Synthetic coding sequence"
  source 1..951: mol_type = other DNA
atgtacaacatgatggagactgagcttaagcctcccgggccccaacagactagtggcggcggaggagggaatagcacggcggccgccgccgggggcaatcagaaaaactctcctgaccgcgttaagcggcctatgaacgccttcatggtgtggagcagaggacagagacggaagatggcccaggaaaaccccaagatgcataatagcgagatatctaagaggctcggcgccgagtggaagctgctgtctgagacggaaaagagaccttttatagatgaggccaaacgcctccgcgctttgcacatgaaggagcatccggattacaagtatcgcccccggagaaaaacaaagaccctgatgaaaaaggacaagtatacactccctggcggcctgctggcccctgggggcaactcaatggcaagcggggtcggcgtgggggcaggtttgggcgcaggtgtcaaccaaaggatggatagttacgcccacatgaacggttggtccaatggttcctattccatgatgcaggaccagctgggatacccacagcatcctggtctgaatgctcatggggcagctcagatgcaacctatgcatcgatatgatgtctctgctctgcagtataacagcatgactagctcccagacctacatgaatggcagcccgacgtattcaatgtcttattcccaacaaggtactccaggaatggcactgggctcgatgggatccgtcgtgaagtcagaggcttcaagctcaccacccgtggtgacttccagcagccactcaagagctccgtgccaagctggggaccttcgggacatgatctcaatgtaccttcctggtgcagaggtgcccgaaccagctgccccctcccgcttacatatgtcgcagcactaccagtctgggccagttccaggaacggccatcaacggcacactcccccttagccacatg

SEQ ID NO: 19828 - DNA, 951 bp, synthetic construct
  misc_feature 1..951: note = source = /note="Description of Artificial Sequence: Synthetic coding sequence"
  source 1..951: mol_type = other DNA
atgtacaatatgatggaaacagagctgaaaccgccaggaccacaacagactagcggcggcgggggtggaaattctaccgccgcagccgcaggtggcaatcagaagaactcacctgatagagtgaagcgcccaatgaatgcattcatggtttggtcgagagggcagcgcagaaagatggcccaggagaaccctaaaatgcacaactctgaaatcagcaagcgccttggcgccgagtggaaactgctcagcgaaactgagaagcgtccattcattgacgaagcaaaacgcctgcgagctctccacatgaaggagcaccccgattataagtaccgcccacgacgtaaaactaagaccttaatgaaaaaggacaagtacaccctgcctggcggactattagctccgggtggaaatagtatggcgtcgggcgtgggcgtgggcgctggactgggagcaggagtgaatcaacgcatggattcctatgcccatatgaacggttggtcaaacgggagctacagtatgatgcaggatcagctgggctatccgcagcatccaggcctgaacgcacacggcgccgcccaaatgcagcctatgcaccgatacgatgtttcagccctgcaatacaatagcatgacttcaagccagacctacatgaatgggagccctacttattccatgtcctacagccagcagggtacacctgggatggcactcggaagcatgggctctgtcgtgaaaagcgaggcttcctcttctcccccagtggtcacgtcttcatcccacagtcgagccccttgccaggctggggatctgagggatatgatttctatgtatctgcctggggccgaggtacccgagccagccgcgccctctaggctgcacatgtctcagcactatcaatcagggccagtgcccgggaccgccattaacggcaccttgcccctctctcatatg

SEQ ID NO: 19829 - DNA, 951 bp, synthetic construct
  misc_feature 1..951: note = source = /note="Description of Artificial Sequence: Synthetic coding sequence"
  source 1..951: mol_type = other DNA
atgtataatatgatggagactgaactgaagccgcccggcccacaacagacgagcgggggaggggggggaaatagtacagctgctgctgccggaggtaatcagaaaaactcacccgacagggtcaaaagacctatgaacgccttcatggtctggtcccgcggccagcgtcgcaaaatggcccaggagaatccaaagatgcacaattcagaaatcagcaagcggctcggagccgagtggaagctgctgtctgaaactgaaaagcggccttttatcgacgaggcgaaacgtctcagggcgcttcacatgaaggaacatcctgattacaaataccggccacggcgtaagactaagacactgatgaagaaagacaaatatacactcccaggcgggttgctcgccccgggtggcaactccatggcctccggtgttggtgttggcgccggccttggcgccggcgttaaccagagaatggactcctatgcccacatgaatggctggtcgaatggatcatactccatgatgcaagaccagctgggctacccgcagcacccagggttgaatgcccatggtgccgcacaaatgcagcctatgcatagatacgatgtgagcgccctccagtataactcaatgacaagtagtcagacttacatgaatggtagccccacttacagtatgagctattcacagcaagggacccccggcatggcactaggtagcatgggctcagttgtgaaatcagaagcctcttctagtcctcccgtcgtgacttcatctagccactctagggcaccatgccaagcaggcgatctgcgggatatgatcagtatgtacttgcccggagctgaggtgcccgaacccgcagcaccctctaggctgcacatgtcccagcactatcaatccggcccagtccctgggaccgctataaacggcacactgcctctgtctcacatg

SEQ ID NO: 19830 - DNA, 951 bp, synthetic construct
  misc_feature 1..951: note = source = /note="Description of Artificial Sequence: Synthetic coding sequence"
  source 1..951: mol_type = other DNA
atgtacaacatgatggaaactgagctcaagccgccgggaccacagcagacctcgggaggcggcggaggaaacagcactgccgccgctgccggcggaaaccaaaagaattcgcctgacagggtgaagcggcctatgaacgctttcatggtgtggagcagagggcagcggcgcaagatggcacaggaaaacccgaaaatgcacaactccgagatctcgaaacgcctcggagccgagtggaagctgttgagcgaaaccgaaaagcgcccatttatcgatgaggcgaagagactgcgcgccttgcacatgaaagaacacccggattacaagtaccggcctaggagaaagaccaagactctgatgaagaaagataagtacaccctgccgggaggattgctggcacctggaggtaactcaatggcatcaggagtgggtgtgggagcgggactcggcgcaggagtgaaccagcggatggattcctacgcgcacatgaatggttggtcgaacggatcatactcgatgatgcaggatcaactgggatacccgcagcatccgggactgaatgcgcatggcgccgcacaaatgcagccaatgcaccgctacgacgtgtccgccctgcaatacaacagcatgacgtcctcccagacctacatgaatggctcgccgacctactccatgtcgtactcacagcaaggcactccgggcatggctctcggcagtatgggaagcgtcgtgaaatcagaggctagctcgagccccccagtggttacctcctcatcccacagccgcgctccgtgtcaggccggcgaccttagagacatgatctcgatgtacctccctggggccgaggttcccgagccggcggccccgtcgcggctgcatatgagtcagcactaccaatccggcccagtgccgggaactgccattaacggcaccctgccactgtcccacatg

SEQ ID NO: 19831 - DNA, 951 bp, synthetic construct
  misc_feature 1..951: note = source = /note="Description of Artificial Sequence: Synthetic coding sequence"
  source 1..951: mol_type = other DNA
atgtacaacatgatggagactgaattaaaacctcccgggccacagcagacttctggtggcggggggggaaattccacagcagctgcagcaggcggcaatcaaaaaaattctccagatagagtaaaacgtccaatgaacgcctttatggtctggtcaaggggccagcgacgaaagatggcgcaagagaaccccaagatgcataatagtgagatctcgaagcgactcggggctgagtggaagttattgtccgagaccgagaagaggccgtttattgacgaggccaaacgactcagagctctacacatgaaagaacatcctgactataaatatcgacctcgaaggaagactaaaactctcatgaaaaaagacaagtatacccttcccggcggattgcttgctcctggtggcaactctatggcaagcggtgttggagtgggcgccggcctcggggcaggtgtgaaccagagaatggattcttacgcccacatgaacggctggtccaacggctcctattcgatgatgcaggaccagctgggctacccgcagcacccaggtcttaatgcccatggcgccgcccagatgcagccgatgcacaggtatgatgtgtcagctctgcagtacaactctatgaccagctctcaaacctacatgaacggttcaccaacatactctatgagttattcacagcagggtacaccagggatggccttgggctcgatgggatcagttgtcaagtctgaagcttcctcgagccccccagtagtcaccagctcctcccactctcgagccccctgtcaagctggggacttgcgcgacatgatctcaatgtatctccccggcgcggaagtgcctgagcccgcagccccctcaaggttgcatatgtcacagcactatcagagcggccctgtgcctggtactgctatcaatggtacattaccactgtcccacatg

SEQ ID NO: 19832 - DNA, 951 bp, synthetic construct
  misc_feature 1..951: note = source = /note="Description of Artificial Sequence: Synthetic coding sequence"
  source 1..951: mol_type = other DNA
atgtacaacatgatggagaccgagctaaagccccctggcccacagcagacctctggcggcggtggtggcaattccacagccgccgccgctggcggcaaccagaagaactcaccggatcgcgtcaagcgtcccatgaatgcattcatggtatggtcgagggggcaacgacgcaagatggctcaggagaatccgaagatgcacaactccgagatctccaaacggctgggtgccgagtggaagctgctctcagagactgagaagagaccgtttattgacgaggcaaagaggctgcgtgccctacacatgaaggagcaccccgactacaaatatcgaccgagacgaaaaacgaagaccctgatgaagaaggacaagtataccctaccgggaggcctgctagccccaggaggtaactccatggcctccggcgtcggcgtcggagccgggctgggcgcgggagtcaaccagcgtatggattcctacgcccacatgaacggctggtcgaacggatcctactccatgatgcaggaccagttgggatacccacagcaccctggtctgaatgcgcacggcgctgcacagatgcagcctatgcacagatacgatgtgagcgctttgcagtataattccatgacatcgagccagacatacatgaacggcagtcccacgtatagcatgtcttacagccagcagggcacgccgggaatggccctgggcagcatgggcagtgttgtgaagtcggaggcctccagctctccacccgtggtgaccagtagttcacactctagagctccttgtcaggccggagacctgcgggatatgattagcatgtatctgccaggtgctgaggtgccggagcccgcggccccgtcacgcttgcatatgagtcagcattatcaatctgggccggtgccaggaaccgccattaatggcactctgccgctgtcacatatg

SEQ ID NO: 19833 - DNA, 951 bp, synthetic construct
  misc_feature 1..951: note = source = /note="Description of Artificial Sequence: Synthetic coding sequence"
  source 1..951: mol_type = other DNA
atgtataacatgatggaaacagagctgaaacctcccgggccccaacagacatcaggcggtggtgggggcaattctacggcggctgcagctgggggcaatcaaaaaaacagcccggacagggtgaaacggcccatgaatgcgttcatggtgtggtcacggggacaaagaaggaaaatggcgcaggagaatcctaaaatgcataactcagaaatctcaaaacgcttaggcgctgaatggaaactgctgtcagaaactgagaagcgtccattcatcgatgaggcaaagagacttagggcgttgcatatgaaggagcatccggactacaagtatcggccccggaggaagaccaaaaccctaatgaagaaagacaaatatacgctgcccggcggtctgctggccccaggtggaaacagtatggcctccggggtgggggtgggggccgggctgggtgctggggtcaatcagagaatggacagctatgctcatatgaatggctggagcaacggaagctacagtatgatgcaggaccagttgggatacccgcagcaccccggcctcaacgctcacggtgccgcgcagatgcagccaatgcataggtacgacgtatccgccctgcaatacaattcaatgactagttcccagacttacatgaatgggtcacctacttactcaatgagctattctcagcagggaacgcctgggatggcccttggatctatgggatctgtcgtaaagtctgaggccagctcaagtccccccgtcgtgacaagctcatctcattctcgagctccttgtcaggccggagatcttagagatatgatctcgatgtacttgcccggggcggaagtccctgagcccgcagccccctcccgcctgcacatgtctcagcactatcagtctggacccgtgcctggaactgccatcaacggtacattacccctctcacacatg

SEQ ID NO: 19834 - DNA, 951 bp, synthetic construct
  misc_feature 1..951: note = source = /note="Description of Artificial Sequence: Synthetic coding sequence"
  source 1..951: mol_type = other DNA
atgtataacatgatggaaacggaattgaagccgccagggccacagcaaacctcgggaggaggcggaggaaattccaccgctgccgcggctggtggtaaccagaagaactcgccagacagggtgaagcgcccgatgaatgcttttatggtgtggagccggggccaacgtcgcaagatggcgcaagaaaacccaaagatgcataactcggagatctcgaaaagacttggcgcagagtggaagctgttgtcagaaaccgagaagcgtccgtttatcgatgaagccaaacgcctgcgcgcactgcacatgaaggaacatccggactacaaatacagaccgcggagaaagaccaagactttgatgaagaaagacaagtacactcttccaggtggactccttgcaccaggcgggaactccatggcgtccggcgtgggggtgggagccggtctgggagctggagtgaatcagcgaatggacagctacgcacatatgaatgggtggtccaacggctcatatagcatgatgcaagatcagctcggatacccgcagcaccctggactgaacgcacatggggcagcgcaaatgcagccgatgcaccgctacgatgtgtcagcgctccagtataactctatgacttcaagccaaacctacatgaatggctcgccaacttactctatgagctactcgcagcagggtaccccgggcatggcactgggatcgatgggatcggtcgttaaatcagaggcttcgtcgtcgcctccggtcgtcaccagctcctcgcactcccgcgccccatgccaggctggcgacttgagggatatgatctcaatgtaccttcccggcgccgaagtgcccgagccggccgctccctcccgacttcacatgtctcagcactaccaatccggacctgtcccggggactgccatcaatgggaccctgcctctctcccacatg

SEQ ID NO: 19835 - DNA, 951 bp, synthetic construct
  misc_feature 1..951: note = source = /note="Description of Artificial Sequence: Synthetic coding sequence"
  source 1..951: mol_type = other DNA
atgtacaacatgatggagactgaacttaagcctcccggccctcagcagacctcgggaggaggaggtggtaactcaaccgcagccgcggcaggtgggaatcaaaagaactcgccagacagggtgaagcggccaatgaatgccttcatggtctggagccgaggtcagcggaggaagatggcacaagagaatcccaagatgcataattcagagatatcaaagagactgggcgcggagtggaaactgctgagcgaaaccgagaagcggccgtttatagacgaagccaagcgtctgcgggcactgcatatgaaggaacacccagactataagtacagacctcgccggaaaactaagaccctcatgaaaaaggacaaatacactctgcctggcggactgctggcaccggggggtaactccatggcatcaggagtcggagttggagcggggctgggagccggagtgaaccagagaatggattcgtacgcacacatgaacggttggtccaacggatcttactcgatgatgcaagatcaacttgggtacccccaacatcctggactgaacgcacatggcgcagcccaaatgcaaccaatgcatcgatacgatgtgagcgccctgcaatacaattccatgacgtcgtcacagacgtacatgaacggatcacccacttactcgatgtcctactcacagcagggaaccccgggtatggcacttggatctatggggtccgtggtcaaatccgaggcatcctcatctcctccagtcgtcacttccagctcccattcgagggcaccatgtcaagcgggagatcttcgggatatgatttcgatgtacttgccaggggcagaggtgcccgaaccggcagcacctagccgccttcacatgtcccaacactaccaatcggggcctgtgcctggtactgcgatcaacggaacccttcctctctcgcacatg

SEQ ID NO: 19836 - DNA, 951 bp, synthetic construct
  misc_feature 1..951: note = source = /note="Description of Artificial Sequence: Synthetic coding sequence"
  source 1..951: mol_type = other DNA
atgtacaacatgatggaaaccgaacttaaaccgcctggcccacaacaaacttcgggtggtggcggcggaaactccaccgccgctgcggcggggggaaaccagaaaaactccccagaccgggtgaaaagaccaatgaatgcatttatggtatggagcagaggacagcgtcggaagatggcacaagaaaaccctaagatgcataattcagaaatttccaaacggcttggggctgaatggaaattgcttagcgaaaccgagaaaagaccctttatcgacgaagcaaagcggctcagagcactgcatatgaaggaacatcctgattacaagtatagacctcgtcgcaagaccaagactcttatgaagaaggataagtacacgctgccaggaggtctgttggctcccggtggtaactcaatggcatccggtgtcggagttggagcgggccttggggcaggtgtgaaccagagaatggattcgtacgcacacatgaacggttggagcaatggctcgtacagcatgatgcaagatcagctgggttatccacagcatcctggtttgaatgcacatggagcagcacagatgcaaccgatgcaccgctacgatgtgtccgccctccagtacaactcgatgacttcatcgcaaacttacatgaatggaagccccacttactccatgagctactcacagcaaggtacccctggaatggccctgggatcgatgggaagcgtggtcaagtccgaggcatcgtcgtctcctccggtcgtgacttcgagctcgcattcccgagccccctgtcaagcaggggaccttcgggacatgatatccatgtaccttccaggggcagaggtgccagagcccgcagcaccatcccgcctgcacatgagccaacactaccaatcagggccagtgcccggaaccgcaattaacgggaccctccctctgtcccacatg

SEQ ID NO: 19837 - DNA, 951 bp, synthetic construct
  misc_feature 1..951: note = source = /note="Description of Artificial Sequence: Synthetic coding sequence"
  source 1..951: mol_type = other DNA
atgtataacatgatggaaactgagcttaagccaccgggtccacaacagacatccggcggtgggggcggcaactccactgcggcggcagcaggcggaaatcaaaagaatagtccggaccgggttaagcgtcctatgaatgctttcatggtttggtctcggggtcagaggcgtaagatggcacaagaaaacccgaagatgcacaactccgaaatatcaaagcgcctgggggccgagtggaagttgctgagtgaaaccgaaaagcgtcccttcattgacgaagctaagcgtctccgcgctctccatatgaaggagcatcctgattacaagtacaggccacgacgcaaaactaaaacgcttatgaagaaggacaagtacaccttacccggcggccttcttgctcctggtggaaactcgatggcgtccggcgtcggcgttggcgccgggcttggcgctggggtaaatcagaggatggattcatacgctcatatgaacggttggagcaatgggtcttatagtatgatgcaagaccaattggggtatccccagcacccaggcctaaacgctcatggcgctgcacagatgcagccgatgcatcgatacgacgtctccgctttgcagtataattcgatgacgtcatcccagacgtacatgaacggatcccctacctattccatgtcatattctcagcaggggacccctggcatggcactgggctctatggggagtgtagtcaagagtgaagcctcgtcttcccctccagtggtgacatcctcgagtcactctcgtgcaccctgccaggctggggacctacgcgatatgatctctatgtatctacctggcgccgaggtgcctgagcccgccgccccctctcgtctccatatgtcccagcactatcaatcgggtccagtgcctggcactgctataaacggcaccttgcctttatcacatatg

SEQ ID NO: 19838 - DNA, 951 bp, synthetic construct
  misc_feature 1..951: note = source = /note="Description of Artificial Sequence: Synthetic coding sequence"
  source 1..951: mol_type = other DNA
atgtacaacatgatggaaacggagctgaagccacccggcccccagcagaccagtgggggcggcggtgggaacagtacagcggccgccgccggcgggaatcagaagaatagccccgatcgggtgaagcggcccatgaacgcgtttatggtatggagccgcggtcaacgcagaaagatggcacaggagaaccctaagatgcacaatagcgaaatctcaaaacgcttgggagccgagtggaagcttctgtcagagaccgagaaacggccttttatcgacgaggctaaacggctccgggcgctccacatgaaggagcacccggactacaagtatcggccccgccgtaagacaaaaacattgatgaagaaagacaaatacacactgcccggggggctgttggcccctggaggaaattccatggcttcaggcgtgggcgtcggggccgggctaggagctggcgtcaaccagcggatggattcatacgcacatatgaacggatggtcaaacgggtcatatagcatgatgcaggatcagctcgggtacccccagcaccccggcttaaacgcccacggcgcagcacagatgcagccgatgcatagatatgacgtgtccgctctccagtataatagtatgacctcgtcgcagacgtacatgaatgggtctcccacctactccatgagctactctcagcagggtacccctgggatggccctgggcagcatgggctcagtcgttaaatccgaggcttcctcgagtccccccgtcgtcaccagcagtagccacagccgcgccccatgccaagccggtgacctgcgagatatgataagcatgtacctccccggggcagaggtccccgaaccagccgctccatcaagactgcatatgtctcagcattaccagagcggccccgtgcccgggactgcgatcaatggaaccctgccattaagtcacatg

SEQ ID NO: 19839 - DNA, 951 bp, synthetic construct
  misc_feature 1..951: note = source = /note="Description of Artificial Sequence: Synthetic coding sequence"
  source 1..951: mol_type = other DNA
atgtacaacatgatggagactgagctgaagccacctggaccgcagcaaacgagcggtggtggaggtggcaactccaccgcggcagcagcagggggcaaccaaaagaattcccctgatagggttaagagacctatgaatgcttttatggtctggtcgagggggcagcgcagaaaaatggcccaagaaaacccaaagatgcacaactcagagattagcaagaggcttggtgccgagtggaagctgctgagtgaaacagagaagagaccctttattgacgaggctaaacggctcagggcactgcacatgaaggagcatcctgactacaagtaccgtcctaggagaaaaacaaagaccctcatgaagaaagataagtacacactgccagggggtcttcttgccccaggaggaaacagcatggcgtctggagttggagtcggtgcggggctcggtgctggggttaaccagaggatggacagctacgcccatatgaatggctggagcaacgggagctatagcatgatgcaggatcagctgggctacccacaacaccccggactaaacgcccacggagctgcccaaatgcaaccgatgcataggtacgatgtgtctgccctgcaatacaactccatgacaagctcacagacttacatgaacgggagccccacatactctatgagttattcccagcagggaaccccgggcatggctctcggctcaatgggctccgtcgtaaagtccgaggcatcgagttctcctccagtggtcacctcatcctcacactccagggctccttgccaggcaggagatttgagggatatgatctctatgtaccttcccggcgccgaggtcccagaacctgccgctcctagtaggctgcatatgagccaacactaccaaagcggtccagtgcctggtactgctattaacggcacactgcccctgagccacatg

SEQ ID NO: 19840 - DNA, 951 bp, synthetic construct
  misc_feature 1..951: note = source = /note="Description of Artificial Sequence: Synthetic coding sequence"
  source 1..951: mol_type = other DNA
atgtacaacatgatggaaacggaacttaaacctccgggtccccagcagactagcggcggaggcggcggtaacagtacggcagcggctgccggaggtaaccaaaagaactcgcctgatcgagtcaagcggcctatgaatgccttcatggtctggagcagaggacagagaagaaagatggcacaggaaaatcccaagatgcacaatagcgaaatatctaagcgcctgggtgccgaatggaagctcttgtcagaaactgagaagcgtccatttatcgacgaggcaaaacggctcagggctcttcacatgaaagaacaccccgactacaagtaccgcccgcgccgtaagactaagactttgatgaagaaagataagtacacccttcctggggggctgctggcccctggaggaaacagcatggcgtcaggtgtgggtgtgggagcggggcttggagcaggggtcaatcagagaatggactcgtacgcacatatgaatggatggtcgaacggatcatactcaatgatgcaggatcagcttggctaccctcaacaccccggactgaatgcccacggggcagcacagatgcaacctatgcacagatacgacgtctcggcgcttcaatacaactcaatgacctccagtcagacttacatgaatgggtccccgacctattccatgtcatactctcaacaaggcactccaggaatggccctgggatcgatgggatcggtggtgaagtctgaagcatcctctagcccgccagtggtgacctcctcgtcccattcgagagcgccctgccaggcaggcgatctgcgagatatgatttccatgtatctgcctggtgcagaggtcccggaaccagcagcgccttcacggcttcatatgtcacagcactaccagtcagggcctgttcccggcaccgcaatcaacggaacccttccactgtcgcacatg

SEQ ID NO: 19841 - DNA, 951 bp, synthetic construct
  misc_feature 1..951: note = source = /note="Description of Artificial Sequence: Synthetic coding sequence"
  source 1..951: mol_type = other DNA
atgtataacatgatggaaactgagctcaagccgcccggaccgcagcagacgagcggaggtggagggggaaactctactgcagcagcagctgggggaaaccaaaagaacagcccggaccgcgtgaagcgccctatgaatgcgttcatggtgtggagccgtggccaaagacggaaaatggcccaggaaaatccgaaaatgcacaattcggagatctctaagaggctgggcgcagaatggaaacttctctcagagactgagaagcgaccatttatcgacgaagcgaagagacttcgcgccctccatatgaaggagcaccctgattacaaataccgccctcggcggaaaactaagaccctgatgaaaaaggacaagtacacgttgccagggggactgctggcccccgggggaaattcgatggcgtcaggagtgggtgtcggtgcgggacttggtgcaggtgtgaaccagagaatggacagctacgcacatatgaacgggtggagcaacggatcatattcgatgatgcaagaccagctcggatacccccagcacccaggcctgaatgcgcacggggctgcccagatgcagccgatgcaccgctacgatgtctcggccctgcaatacaactccatgacttcgtcccagacctacatgaacggcagccctacctactcaatgtcgtactcccagcaaggcactccagggatggcactggggtcgatgggatccgtggtcaagtccgaagcgtcgagctcgccaccggtggtcacctcgtccagccactcgcgcgctccatgccaagccggtgatttgcgggacatgatctccatgtacctgcctggagccgaagtgcccgaaccggcggccccatccagactgcacatgtcccagcattaccagtcgggcccggtgccgggtacggccataaatggcaccctcccgctgagccatatg

SEQ ID NO: 19842 - DNA, 951 bp, synthetic construct
  misc_feature 1..951: note = source = /note="Description of Artificial Sequence: Synthetic coding sequence"
  source 1..951: mol_type = other DNA
atgtataacatgatggagacagaactgaagccccctggaccccaacagaccagcggcggcgggggagggaattccaccgccgctgcggcaggcgggaatcagaagaattccccagacagggtaaagcggcccatgaacgcctttatggtttggagccgagggcagcggcggaagatggcccaggagaatcctaaaatgcacaactctgaaatctctaaaagactcggagcagaatggaaactactgtccgaaactgaaaagcggccatttattgatgaagcaaagagactccgagcactgcacatgaaagagcaccccgattataaatatcgtcctagaaggaagacaaagaccttgatgaagaaggataaatatacgctccccggcggcctgctggctcccggcgggaactcgatggcctctggggtgggggtcggcgccgggctaggcgctggagtgaaccaacgtatggatagctatgcacacatgaatgggtggtcaaacggatcgtatagcatgatgcaggatcagttagggtacccccagcaccctggactgaacgcccacggagccgctcagatgcaaccaatgcaccgatatgacgtgtccgccctgcaatacaactctatgacttcttcccagacttacatgaacggctccccgacctattctatgagctattcccagcaaggcacacctggaatggccctcggaagtatggggtctgtcgtgaagagtgaagcgtcttcctcaccgcctgttgtgacttcttcctcacacagccgagctccctgccaggctggggatctccgcgacatgatctccatgtatctgcccggcgccgaagttccagaaccagccgccccgtctcgtcttcacatgagtcagcattaccagtctggtccagtgccagggactgcgatcaacggtacattaccactgtcacacatg

SEQ ID NO: 19843 - DNA, 951 bp, synthetic construct
  misc_feature 1..951: note = source = /note="Description of Artificial Sequence: Synthetic coding sequence"
  source 1..951: mol_type = other DNA
atgtacaacatgatggagaccgaactgaaacctccaggtcctcagcagactagcggtggtggtggcggcaactccactgcagcggccgccggggggaatcaaaagaactctcctgatagagtgaagcgcccaatgaatgcgtttatggtgtggtcccgtggtcagcgccggaaaatggcacaagaaaaccctaagatgcataattccgaaatatcaaaacgcctgggagcggaatggaaactgctaagcgagacggagaaacgcccttttatcgatgaagctaagcgcctgcgtgctttacacatgaaagaacacccagattataagtatcgcccgcgtcgtaagacgaagaccttgatgaaaaaggataagtatacgctgccaggtggtctgctcgcgcctggtggcaattctatggctagcggggtgggcgtgggtgcgggcttgggtgcaggcgtgaatcagcgcatggattcctatgctcacatgaacggttggtcaaacggcagctattctatgatgcaggatcagctgggttacccgcagcatccgggcctgaatgctcacggcgcggctcaaatgcaacctatgcaccgttacgatgtctcggcactgcagtataatagcatgaccagctcccagacgtacatgaacgggagccctacctacagcatgagctacagccagcaggggactccgggtatggcgttgggaagcatgggctcagtcgtcaagagcgaagcgtcgagctccccaccggtagtgaccagtagctcccattctcgtgcgccgtgccaggcgggtgacctccgggatatgatcagtatgtacctgcctggcgcggaggtcccagagccggcagctccaagcagactgcatatgagtcaacattatcaaagcggcccggtgccaggcaccgctattaacggaactctgccactgtctcacatg

SEQ ID NO: 19844 - DNA, 951 bp, synthetic construct
  misc_feature 1..951: note = source = /note="Description of Artificial Sequence: Synthetic coding sequence"
  source 1..951: mol_type = other DNA
atgtacaacatgatggagacagaattgaagccacctggcccacagcagacaagtggtggaggcggaggtaattctactgctgctgctgccggtggaaaccagaagaactccccagaccgcgtaaaaaggcccatgaatgcatttatggtgtggagtcgcggacagcgccgcaaaatggcacaggagaacccaaaaatgcacaacagtgagatttccaagagattgggagctgaatggaagctgctgtccgagaccgagaagaggcccttcattgacgaggcaaagcgcttgcgcgctctgcacatgaaggagcaccccgactacaaatacaggccacgccgcaaaaccaagaccttgatgaagaaggacaaatataccttgcctggtggtctgctcgccccaggtggtaactctatggccagtggcgttggagtcggcgccggactgggcgctggcgttaaccagcgtatggatagttacgctcatatgaatggctggagcaacggatcctactctatgatgcaggaccagcttggataccctcagcaccctggactcaatgcccatggcgctgcccagatgcagcctatgcaccgctacgacgtttcagcccttcagtacaatagtatgaccagctcccagacttatatgaatggctctcctacctattcaatgagttactcccagcagggtacaccaggaatggcactgggctcaatgggatctgtggtcaagtccgaagcctcttcttcccctcccgtcgtaacatcctcttctcacagccgtgcaccatgccaggcaggcgatcttcgcgatatgatctctatgtacttgcccggagccgaggtacccgaacccgctgcccccagcagactccatatgagccagcattaccagagtggccccgtccccggcaccgctattaatggtactctgcccctgagtcatatg

SEQ ID NO: 19845 - DNA, 951 bp, synthetic construct
  misc_feature 1..951: note = source = /note="Description of Artificial Sequence: Synthetic coding sequence"
  source 1..951: mol_type = other DNA
atgtataatatgatggagacggagttgaagccacccggcccccagcaaacgtccggaggtggcggcgggaatagtacagcagccgctgccggcggtaatcagaaaaattctcctgacagagttaagagaccaatgaatgccttcatggtgtggtctcgaggccagcgccgcaagatggcccaggaaaaccccaaaatgcacaatagcgaaatcagtaagcgtttaggggccgaatggaagcttctgagcgaaaccgaaaagcgcccatttattgacgaggccaaacgcttgcgcgctctacacatgaaggagcatcccgactacaaatacaggccaaggcgcaagaccaaaactctgatgaagaaagacaagtataccttaccaggaggcttgctggcgccaggcgggaattccatggccagcggcgtgggagtgggagctggattgggcgcgggtgttaaccagcgaatggactcttacgcacatatgaacgggtggtctaatgggagttactctatgatgcaggatcaactggggtaccctcagcaccctggactgaacgctcacggagccgctcagatgcagcccatgcacaggtacgatgtcagtgctctgcagtacaattctatgacttctagccagacatacatgaacggctctcccacctattcaatgtcctactcccagcagggcactcccgggatggccctcggctccatgggctctgtggtgaaaagtgaggcctcctcaagccctccagtggtgacatctagttcacacagcagagcaccctgccaggccggcgacctgagggacatgatcagtatgtatctgccaggcgctgaagtgcctgagcctgccgccccgtcacgactccacatgagtcaacattaccagtccggccccgttcccgggactgctatcaatggcaccctgcctttaagccacatg

SEQ ID NO: 19846 - DNA, 951 bp, synthetic construct
  misc_feature 1..951: note = source = /note="Description of Artificial Sequence: Synthetic coding sequence"
  source 1..951: mol_type = other DNA
atgtacaatatgatggaaaccgaactgaagccccctggaccccagcaaacttcggggggcggagggggtaacagcaccgcagcagcagcaggcggaaatcagaaaaactctccggatcgggtcaagcggccgatgaacgcatttatggtgtggtcgagaggacagcgcagaaaaatggcacaagaaaatcctaagatgcataactccgaaatctcaaagcgtttgggagctgaatggaagctgctgtccgagactgaaaaaagacctttcatagacgaggccaagcgtctgcgggccctgcatatgaaggaacacccagactacaaataccgaccaaggcgcaaaactaagacgctgatgaagaaggataagtatacccttcccggaggacttcttgcaccaggaggcaatagcatggcatccggtgtgggtgtgggtgccgggttgggcgccggggtcaaccaacgaatggactcgtatgcacatatgaacggatggtccaacggatcgtactcgatgatgcaagaccaactgggatacccgcaacatccaggactcaacgcccacggagcagcacagatgcagccaatgcataggtacgatgtttcggcacttcaatacaactcaatgacttcgagccaaacttacatgaacggaagccctacctactccatgtcgtactctcagcagggtacccctgggatggccctcggaagcatgggctccgtggtcaaatcggaggcaagctcgtctccccctgtggtcacctcctcctcccactcgagagctccttgtcaggctggagatcttagggacatgatttctatgtacctcccgggtgcagaagtgcctgaaccagccgcaccatcccgacttcatatgagccagcattaccaaagcggaccagtgcctggcacggcgataaacggaacccttcccctgtcccacatg

SEQ ID NO: 19847 - DNA, 951 bp, synthetic construct
  misc_feature 1..951: note = source = /note="Description of Artificial Sequence: Synthetic coding sequence"
  source 1..951: mol_type = other DNA
atgtacaatatgatggagactgagcttaagcctcctggtccacaacaaaccagcggaggtggtggaggtaattcgactgcagcggcagcaggaggaaaccaaaagaactcaccggatcgcgtgaagcgtccgatgaacgccttcatggtgtggtccaggggacagcggagaaagatggcccaagaaaatcccaagatgcataactcggagatttcaaagcgccttggtgcagaatggaagctcctttcggaaaccgaaaagcgcccattcatcgatgaggcaaagcgattgagagctctgcatatgaaagaacatccagactataagtacagacctagacgcaagactaagactcttatgaaaaaggacaaatacacccttcctggaggacttctggcccccggaggaaactcgatggcctcaggagtgggagtcggagcaggacttggtgccggtgtgaaccagagaatggattcatacgcccatatgaacggatggtcgaacggtagctactcgatgatgcaagatcaactcggctacccacaacacccaggtctgaacgcccacggcgctgcacaaatgcagccgatgcatagatacgatgtgtccgctctgcagtacaactccatgacttccagccaaacttatatgaatggttcgccaacttacagcatgtcctactcccagcagggtactcccggaatggcacttgggtcgatgggtagcgtcgtgaaatctgaggcatcatcctcgcccccagtggtgacctcctcctcacattcgagagctccatgtcaagcaggcgatcttagggacatgatttcgatgtacctgccaggagcagaggtgcctgaaccggccgccccatcgcgtctgcacatgagccaacattaccagtccggacctgtgcctgggaccgcgataaacggtactctgcccctgtcacatatg

SEQ ID NO: 19848 - DNA, 951 bp, synthetic construct
  misc_feature 1..951: note = source = /note="Description of Artificial Sequence: Synthetic coding sequence"
  source 1..951: mol_type = other DNA
atgtacaatatgatggaaaccgaacttaaacctcccggcccacaacagactagcgggggcggcggcggaaattcaactgcagcagcagccggtggaaaccaaaagaactccccagatcgtgtgaaaagacccatgaacgcttttatggtttggtcaaggggacagcgaagaaagatggcccaagagaacccgaagatgcataacagcgagatttccaagcgacttggtgcagaatggaagctgctgtccgaaactgaaaaaagaccgtttatagacgaagcaaaacgtctgcgcgcattgcatatgaaggagcacccggattacaaatacaggcctcggagaaagaccaaaactctgatgaaaaaggataagtacactctccctggaggactcctggctcctggcggaaactcgatggcatcgggggtgggcgtgggagcgggactcggtgccggagtgaaccaacgaatggattcctacgcccatatgaacggctggagcaatggaagctactccatgatgcaggaccaactgggttaccctcagcatcctggacttaatgcacatggagcagcacagatgcaacccatgcacaggtacgacgtgtccgccctgcaatacaacagcatgactagcagccaaacctacatgaacggttccccgacgtactccatgtcatactcgcagcagggaactccgggtatggccctgggatctatgggtagcgtggttaagtcggaagcgtcgtcctccccacctgtggtcacctcttcgtcacactcaagagcaccatgccaggcaggagatctcagggacatgatttcgatgtatctccctggagcagaggtgccagaaccagcagcaccctccaggcttcacatgtcgcaacactaccagtcggggccagtgcctggcactgcaataaacggaacgctgccactgagccatatg

SEQ ID NO: 19849 - DNA, 951 bp, synthetic construct
  misc_feature 1..951: note = source = /note="Description of Artificial Sequence: Synthetic coding sequence"
  source 1..951: mol_type = other DNA
atgtataacatgatggaaaccgagctcaagcctccaggacctcagcagacaagcggaggcgggggaggaaacagtaccgctgccgctgcaggcggaaaccagaagaatagtccagatagagtcaagcggcctatgaacgcctttatggtatggtcacgcggccaaagacgtaaaatggcacaggaaaacccaaagatgcacaatagtgagatatccaaacggctcggggccgagtggaagctgctctcagagactgagaagaggcctttcatcgatgaagcaaagcggctgcgtgcactgcatatgaaggaacatccagactataaataccgccctagacgaaaaaccaaaacactgatgaagaaggacaaatatactctgccaggtggcctcctcgcacctggcgggaacagcatggcaagcggggtaggagttggcgccgggctgggtgcgggagtcaatcagagaatggacagctacgctcatatgaacggatggtctaatgggtcctatagcatgatgcaggatcagctcggatatcctcaacatcctgggctgaacgctcacggtgccgcacagatgcaacctatgcacagatatgatgtatcagccctgcaatacaactctatgacatcttctcaaacttatatgaatggaagcccaacttattcaatgtcctatagtcagcagggcactcctggcatggcactgggtagtatgggctcagttgtgaaaagcgaggcatcttcaagcccgccagtggtgactagctcatcccactcaagggcaccatgccaggccggggatttaagagatatgatctctatgtacctaccaggcgctgaggtgcccgagcctgcagccccttcccgattacacatgtctcagcattaccagtccgggccagtgcctggtacagccattaacggcacccttcccctcagccatatg

SEQ ID NO: 19850 - DNA, 951 bp, synthetic construct
  misc_feature 1..951: note = source = /note="Description of Artificial Sequence: Synthetic coding sequence"
  source 1..951: mol_type = other DNA
atgtacaacatgatggaaacagagctgaagcctcctggaccacagcaaacctctggcggcgggggcggcaacagcacagcggccgctgccggcggaaaccaaaaaaattctcctgatcgggtaaaaaggccaatgaacgccttcatggtgtggtcacgaggacagagaagaaagatggctcaggaaaatcccaaaatgcacaacagcgaaatcagcaagcgtctgggcgctgaatggaagctgctgagcgagaccgagaagcgaccttttatcgacgaagcaaagaggcttcgggccttacacatgaaggaacaccccgattataagtacagaccaagacggaaaaccaaaacacttatgaagaaggataaatacacactgccaggcggcctgctcgcccccggcggcaacagcatggcttcaggggtgggagtgggtgccggcctgggggctggagtcaatcaaaggatggattcttacgctcacatgaatggatggagcaatggaagttatagtatgatgcaagaccaactcggatacccacagcatccaggcctgaatgcgcatggagccgcacagatgcagcctatgcataggtacgatgttagcgctctgcagtacaactccatgacatcctctcagacctatatgaacggaagcccaacttactcgatgagttacagtcagcaaggaactccaggcatggctctcggtagtatgggaagcgttgtgaagtcagaagctagttcaagtccacccgtcgtcacaagctcaagccatagccgcgcaccttgccaagcgggcgatctgcgcgacatgatcagtatgtaccttccaggggctgaagtgcctgagcccgctgccccttcccgattgcacatgtctcaacattaccaatcaggacccgtgccgggaaccgctatcaatggtactctcccactgagtcacatg

SEQ ID NO: 19851 - DNA, 951 bp, synthetic construct
  misc_feature 1..951: note = source = /note="Description of Artificial Sequence: Synthetic coding sequence"
  source 1..951: mol_type = other DNA
atgtacaacatgatggaaactgaactgaagcctcctggaccccagcagacctcgggcggagggggtggaaactcgacggcggcagctgctggcggtaaccaaaagaactccccggaccgggtgaaacgaccaatgaatgcctttatggtgtggtcaagaggacagcgccggaagatggcgcaggagaaccccaagatgcacaactcggaaatctccaagcggttgggtgcagagtggaagctgctctccgaaaccgaaaaaaggcctttcatcgacgaggcgaaacgcctgcgggccctgcacatgaaggaacatccggattacaagtaccgcccacggcgtaagacgaaaaccttgatgaagaaggataagtacaccctgcctggaggactgctggctccgggaggcaactctatggcctccggcgtgggagtcggtgcaggcctcggcgccggagtcaatcaacggatggattcgtacgcccacatgaacggctggagcaatgggtcgtactccatgatgcaggaccagctcggatatccacagcacccaggcctgaacgcacatggcgcggcacagatgcagcctatgcatcggtatgacgtgagcgctcttcaatacaattcaatgacctcttcgcaaacctacatgaatggatcgccaacctactcgatgagctactcgcagcaagggactccgggaatggcactgggttccatgggctccgtggtcaagtccgaagcctcgagctcccctccagtggtgacctcgtcatcacatagcagagcaccatgccaagcgggtgatcttcgcgacatgattagcatgtacctgcccggagcagaggtgccagagccagctgccccatcgaggctgcatatgtcccaacattaccagtccggcccagtcccgggaaccgccatcaacggtactctgcccctgtcccatatg

SEQ ID NO: 19852 - DNA, 951 bp, synthetic construct
  misc_feature 1..951: note = source = /note="Description of Artificial Sequence: Synthetic coding sequence"
  source 1..951: mol_type = other DNA
atgtataacatgatggagaccgagctcaagccaccaggaccgcagcaaaccagcgggggtgggggaggcaacagcactgccgccgcagccggcgggaatcagaagaatagtcctgatagggtgaagcgcccaatgaatgccttcatggtctggtcccgcgggcagcgacgaaaaatggcgcaggaaaatcctaagatgcacaatagcgaaataagcaagagattaggggccgagtggaagctcctttccgagactgagaagagaccattcattgatgaggccaagagactgcgggccctccacatgaaagagcatccggactataaatatagaccccgtcgcaagactaaaaccctaatgaagaaagacaaatatactctccccgggggtctgctggccccgggcggtaattcaatggccagcggggtgggtgtcggcgctgggttgggagccggtgtgaaccaaaggatggacagctatgcccatatgaacggatggagtaacggctcttactcaatgatgcaagatcagttgggatacccccagcacccagggcttaatgcgcacggggcggcccagatgcagccgatgcatagatatgatgtttcagccttgcaatacaactccatgactagcagtcagacttacatgaacggatcaccaacctatagcatgtcttattcacagcagggcacccccggaatggcattggggagcatggggtcggtggttaagtcggaggcatctagttctcccccagttgttacatccagctcccatagccgtgccccttgtcaggccggcgatctgcgagatatgattagcatgtacctgcctggcgccgaagtcccggaaccagctgctcccagccgtctccacatgagccagcactatcaaagtggcccagtgccggggactgccattaatgggaccctgccattgagccatatg

SEQ ID NO: 19853 - DNA, 951 bp, synthetic construct
  misc_feature 1..951: note = source = /note="Description of Artificial Sequence: Synthetic coding sequence"
  source 1..951: mol_type = other DNA
atgtacaacatgatggagaccgagcttaaaccccctgggccccaacagacttccggtggtggcggcggaaattcgacagctgcagccgccggaggtaaccagaagaacagcccagaccgcgtaaagagacctatgaatgccttcatggtgtggagtcgaggacagagacgcaagatggcccaggaaaaccccaagatgcataacagcgagatttcaaagcgacttggcgcggaatggaagttgctgtcggagacagagaagcgcccatttattgacgaggcaaaaagactgcgggccctgcacatgaaagagcacccggactacaagtacagacccaggagaaaaacaaaaactctgatgaagaaggacaaatacacactacctggcgggctcctcgcccccggggggaatagtatggcctctggtgtgggtgtcggagccgggctcggcgcgggagtgaatcaaaggatggattcttacgcacacatgaatgggtggtcaaacggctcatactcgatgatgcaggaccagctcggttatccgcaacaccccgggctgaacgctcacggcgccgcgcagatgcagccaatgcatcggtacgacgtttccgctctgcaatacaacagcatgacctcaagtcagacatacatgaatggtagtcctacctactcaatgagttatagccagcagggcacgcccggaatggctctcggatccatgggctccgtggtgaagtccgaagccagctctagtccccctgttgtgacaagcagttcgcattcccgggccccttgtcaggctggagacctgagagacatgatcagtatgtacctgcccggcgctgaagttccggaacctgctgccccctcgcggcttcatatgtctcagcactaccagtcagggcctgttcccggcactgctatcaatggtactcttcccttgagtcacatg

SEQ ID NO: 19854 - DNA, 951 bp, synthetic construct
  misc_feature 1..951: note = source = /note="Description of Artificial Sequence: Synthetic coding sequence"
  source 1..951: mol_type = other DNA
atgtacaacatgatggaaactgagctgaaaccaccagggccccaacaaactagcgggggtggcggtgggaatagcactgcagcagccgcaggtggcaaccaaaagaattcgccagatagggtgaagaggccaatgaacgcatttatggtgtggtcgcggggacaacggcgcaagatggcacaggaaaacccgaagatgcataacagcgaaatcagcaagaggcttggtgcggaatggaagctcctttccgaaaccgagaagcgaccattcattgacgaagctaagcgcctgcgagcactccatatgaaggagcatcctgattacaagtatcgcccccgtagaaagaccaagaccctgatgaaaaaagacaagtacaccttgcccggtggcctccttgccccaggtgggaattcgatggcatccggcgtcggcgttggcgcgggtcttggagcgggagttaaccaaagaatggactcctacgcacatatgaatggatggtctaatggaagctactctatgatgcaggatcaattgggatacccacagcaccctggcctcaatgcacatggagcagcacaaatgcaacctatgcatcgctatgacgtgtcggccctccagtacaacagcatgacttcctctcagacctacatgaatggaagccccacgtacagtatgagctacagccagcagggaacccctggtatggcactgggatccatgggatccgtggtgaaatcggaggcatcttcgtcccctccagtggtgaccagctcctcgcactcacgtgcaccctgccaagccggagatttgagagacatgatctcgatgtatctcccaggcgcagaagttcctgaacctgcagcgccgtccagacttcacatgtcgcaacactaccaatccgggcccgtccctggtaccgctattaacggtacccttcccctctcgcatatg

SEQ ID NO: 19855 - DNA, 951 bp, synthetic construct
  misc_feature 1..951: note = source = /note="Description of Artificial Sequence: Synthetic coding sequence"
  source 1..951: mol_type = other DNA
atgtataacatgatggaaactgaactgaaacctcccgggcctcagcagacttctggagggggaggggggaactccacggccgctgctgctggagggaatcagaaaaactcccccgatagggtgaaacggcctatgaacgccttcatggtgtggtccaggggacagagaagaaaaatggcccaggaaaaccccaaaatgcataactcagaaatctccaaaagactgggagccgaatggaaactgctctcagaaacagaaaaaaggccattcatagatgaagctaaacgactcagagctctacatatgaaagagcatcctgattataagtaccgccctaggaggaagactaaaacattgatgaaaaaagataaatacactctgcccgggggacttctcgctcccggaggaaactctatggcctcaggagttggggtgggggccggactcggagccggggtcaaccagaggatggattcatatgctcatatgaatgggtggagtaacgggtcttactccatgatgcaggaccagctcgggtatcctcagcatccaggacttaacgcacacggagctgctcagatgcagccaatgcataggtatgatgtgtcagctctacagtacaattctatgacaagttctcagacatatatgaatggaagtcctacatattctatgtcatattcccagcaggggactcccgggatggctctcgggtcaatgggatcagtcgttaagtctgaagccagtagttctccacctgtcgtcacatcttcttcccactcaagagcaccttgccaggcaggagacctgagggatatgatctccatgtatttgcctggagccgaagttcccgaacccgctgccccttccaggctgcatatgtctcagcattatcagtctgggccagtgcccgggacagcgattaacgggactctcccactgtctcacatg

SEQ ID NO: 19856 - DNA, 951 bp, synthetic construct
  misc_feature 1..951: note = source = /note="Description of Artificial Sequence: Synthetic coding sequence"
  source 1..951: mol_type = other DNA
atgtacaatatgatggaaactgaacttaagcctcctggcccgcaacagacaagtggaggaggcggcgggaactctaccgccgcagcggcagggggcaaccagaaaaactctccagatcgcgtgaaaaggccaatgaatgcgtttatggtctggtcgaggggccagcgacgaaaaatggcccaagagaatcctaaaatgcacaactcagaaatttctaagcggttaggagccgaatggaagctgttgagcgaaaccgagaaaagaccatttatcgacgaagccaagcgccttcgtgcgttgcatatgaaggagcatccggattacaaataccggcctcgcaggaaaaccaaaactctcatgaagaaagacaagtataccttgccagggggattgttggcgccgggaggaaatagtatggcttccggggttggcgtgggtgctggccttggtgccggtgtgaatcagcggatggacagctacgcccacatgaacggatggtcgaatgggtcctactctatgatgcaggaccagcttggctacccacagcacccaggcctgaacgcccacggcgccgctcaaatgcagcctatgcacaggtacgatgtgtcggctctgcagtacaactccatgacctcgtctcagacctacatgaatgggtcccccacctactccatgagctatagccagcaggggactccagggatggccttaggatctatgggttccgtggtgaagagtgaggcttcatcaagcccaccagtggtcacctcctcatctcattctcgggctccctgccaggcaggcgacctaagggacatgatcagtatgtatctacctggagctgaggttcctgaaccagcagccccaagccgcctgcacatgagtcagcactatcaaagcggcccagtgcccggcaccgccattaatgggaccttgccgctgtctcacatg

SEQ ID NO: 19857 - DNA, 951 bp, synthetic construct
  misc_feature 1..951: note = source = /note="Description of Artificial Sequence: Synthetic coding sequence"
  source 1..951: mol_type = other DNA
atgtacaatatgatggagacggagctgaaacctccaggtccgcaacaaacctctggtggtggagggggtaattcaacagctgccgccgcaggcgggaatcaaaaaaactccccggatagggtgaaacgtccaatgaatgcattcatggtatggtcgagaggacaacgtcggaaaatggctcaagaaaacccgaaaatgcacaattcggagatctcaaaacgactgggagctgagtggaaacttcttagcgaaactgagaagcgaccattcatcgatgaggcaaaacgacttcgcgcattgcatatgaaagaacacccggattataagtatcgtccgcgtcgaaaaactaagactcttatgaagaaagataaatacactcttccgggaggattgcttgccccaggaggtaattcgatggcttctggtgtgggagttggggcaggattaggagcaggagtcaatcaacgaatggatagttacgctcatatgaatggatggtctaatggaagttatagtatgatgcaagatcagctaggatatcctcagcatccaggattgaatgcccatggagctgcgcagatgcaacccatgcacaggtatgatgtttcagctctacaatacaactctatgacgagttctcaaacttacatgaacggatcaccaacttactctatgagctattcacaacagggaacacctggaatggccctgggaagtatgggatcagtggttaaatctgaagctagttcatctcctcccgtagtaacttcatcgtctcactctcgcgcgccttgtcaagcaggagatttgcgggacatgatctcaatgtatctgccgggtgctgaagtccctgaacccgctgctccaagtcgactccacatgtctcagcattatcagtctggaccagtgcctggcacagctataaatggcacattgcctctgtcccacatg

SEQ ID NO: 19858 - DNA, 951 bp, synthetic construct
  misc_feature 1..951: note = source = /note="Description of Artificial Sequence: Synthetic coding sequence"
  source 1..951: mol_type = other DNA
atgtacaatatgatggagacggagcttaagccacctggaccacagcaaacctccgggggtggtggtggtaatagcaccgcagcagcggccggtggtaatcaaaagaactcacccgatcgagtgaagaggcctatgaacgcatttatggtgtggtcaagaggacaaagacgcaaaatggctcaggagaatcctaagatgcacaactcagagatttccaaacgacttggtgctgaatggaagctgctttccgagactgaaaagcgccccttcattgatgaagcgaagaggctgagagcactccacatgaaggagcatccagactacaagtaccgacccagacgcaagaccaaaactctcatgaagaaagataagtacaccctgccaggtggacttttggcccctggcggcaacagtatggcatcgggtgtgggagtgggggcaggtcttggagctggagtgaatcagcgcatggattcatatgcacatatgaacggttggtcgaacggatcctactcgatgatgcaagatcaactggggtacccacaacacccaggactgaatgcacacggggcagcgcaaatgcagccaatgcaccgctacgacgtgtccgccctgcaatacaactctatgacctcatcccagacgtatatgaacggctcgccgacttactcaatgtcctactcacaacaaggtactccaggaatggcactcggatcgatggggtcagtcgttaaaagcgaggcatcctcgtcacctccagtcgtcacgtcgtcatcgcactcgagggcgccctgtcaggcgggcgatctgcgagacatgattagcatgtaccttcctggcgcagaggtgccggaacccgccgcaccatcgcggcttcacatgtcacaacattatcagtccggacctgttcctggtactgcaatcaatggaactttgcctctgtcgcatatg

SEQ ID NO: 19859 - DNA, 951 bp, synthetic construct
  misc_feature 1..951: note = source = /note="Description of Artificial Sequence: Synthetic coding sequence"
  source 1..951: mol_type = other DNA
atgtacaacatgatggaaaccgagctgaaacctcccgggccccagcaaacttctggtggcggcggcggcaacagcacagctgcggccgcaggtggcaatcaaaagaactcacccgacagagtcaagagacccatgaacgctttcatggtgtggagccggggtcagaggcggaaaatggctcaggagaacccaaaaatgcataacagcgagatttctaagagattgggagcagagtggaagttactctcagagaccgaaaagcgcccatttatcgacgaggctaagcgtctccgggccctccatatgaaggaacaccctgactataagtataggcctcgacgcaagacgaaaaccctcatgaagaaagataagtacactctgccaggaggtctactagctcccggtgggaactcaatggcaagcggggtgggcgtgggggcagggcttggggcgggagttaaccagagaatggattcgtatgctcacatgaacggctggtctaacggaagctactcaatgatgcaggatcagctggggtacccacagcaccctggattaaacgcccacggggccgcccagatgcaacccatgcacagatacgacgtttctgcactgcagtataacagtatgacatcctcccagacttatatgaatggctcgcccacatattcgatgtcttactcccagcagggcacaccgggtatggccctaggttctatggggagcgtagtaaagtcagaggcatcatcctcacccccagtcgtgacaagttcttctcacagccgtgctccatgtcaggcaggcgacctcagagacatgatttcaatgtatttacctggcgccgaggttccagagcccgccgctccatcccggcttcacatgagccaacattaccagagcggaccggtgcctgggaccgctatcaatggcactctgcctctgtcacatatg

SEQ ID NO: 19860 - DNA, 951 bp, synthetic construct
  misc_feature 1..951: note = source = /note="Description of Artificial Sequence: Synthetic coding sequence"
  source 1..951: mol_type = other DNA
atgtataacatgatggagacggaattgaaacccccgggaccgcaacaaacgtcgggcggagggggcgggaattccacggccgcggctgcgggaggaaaccagaagaatagcccagaccgcgtgaagaggccaatgaacgccttcatggtctggtcgcgcgggcaacggcgcaagatggcccaagaaaatccgaagatgcacaactctgagatcagcaagcggctgggagcagaatggaagctcctctcggaaactgagaagcgaccctttatcgacgaggcgaagagactgcgcgcgctgcacatgaaggaacatcccgactacaaataccggccccgccgcaagactaagactctgatgaagaaagacaagtatactctcccgggtggactgcttgctccggggggcaattcgatggccagcggcgtaggagtcggagccggtctgggagccggagtcaatcagcgcatggactcatacgcgcatatgaacggatggagcaacggttcctactccatgatgcaagaccagttgggataccctcagcacccagggctgaatgctcatggggccgcccaaatgcagccgatgcacagatacgacgtttcagcactgcagtacaactcgatgacttcgagccagacttacatgaacggatcgccgacctactctatgtcgtactcacagcagggtacccctggcatggcccttggtagcatgggatcagtggtgaaatcggaggcctccagctcgccgccggtggtgacctcctcctcccactcccgtgctccctgccaagccggtgatctccgcgacatgatatcaatgtaccttccgggagcagaagtgccagagccggccgcgccatccaggctgcatatgagccagcattaccaatccggcccagtgccgggcactgcgatcaacgggaccctcccgctgtcgcacatg

SEQ ID NO: 19861 - DNA, 951 bp, synthetic construct
  misc_feature 1..951: note = source = /note="Description of Artificial Sequence: Synthetic coding sequence"
  source 1..951: mol_type = other DNA
atgtataacatgatggagaccgaactcaaaccaccggggccacaacaaacttccggcgggggcgggggtaactctactgctgctgccgccggaggcaaccagaaaaattcgccagaccgcgtgaagcggccaatgaatgcattcatggtgtggtccaggggtcaaaggaggaagatggctcaggagaatcccaagatgcacaattccgagatatcaaaacgtcttggtgctgagtggaaactcctgtcagaaacagaaaagaggcccttcattgatgaggctaaacgtctgcgtgcattgcatatgaaggaacatcccgactataagtatcggccaaggcggaaaaccaaaactttgatgaagaaggataagtacacgttaccaggtggactgttagctcccgggggaaactcgatggcatctggggttggagtaggcgctggactaggtgctggggtcaatcagagaatggactcttacgcccacatgaacggttggagtaacggatcttattctatgatgcaagatcagttgggttacccacaacatccaggtttaaatgcgcatggggcggcccagatgcaacctatgcatcgatacgatgtttcagctttgcaatacaattcaatgacatcatcgcaaacctacatgaacggatctcctacctattcaatgtcgtattcacagcagggtacacctggaatggctttgggatccatgggttctgtcgttaagtccgaagcttcttcgtcccctcccgtcgtgacatcttccagccattcccgggcaccctgtcaagctggtgacctcagggacatgatctctatgtatcttcctggcgctgaagttcctgagcctgctgccccttccagacttcatatgagtcaacactaccagtctggtcctgtcccagggactgccataaatgggactctcccactttcgcatatg

SEQ ID NO: 19862 - DNA, 951 bp, synthetic construct
  misc_feature 1..951: note = source = /note="Description of Artificial Sequence: Synthetic coding sequence"
  source 1..951: mol_type = other DNA
atgtacaacatgatggagactgagctgaagccccctggtccccagcaaacttcgggcggcggcggcgggaacagtacggctgcagctgccgggggaaaccaaaagaacagtcctgatcgtgtgaaacgacccatgaatgcctttatggtgtggtcccggggacagcggcgcaagatggcccaggagaatcctaaaatgcacaactctgaaatttccaagaggctgggagccgagtggaaacttctgtcagaaacagagaagagaccgtttatcgacgaggctaagagattacgagctctgcacatgaaagaacaccctgattataagtaccgtcctagaagaaagaccaagactctgatgaaaaaggacaaatacactctgcctggtggtctgctggcaccaggcgggaactccatggcctcgggtgtaggtgtgggcgcagggctgggcgcgggcgttaaccaaagaatggacagctacgcccacatgaacggctggagcaatggtagctacagtatgatgcaggatcagctagggtatccccagcaccctgggctgaacgctcacggtgcggcccagatgcagcctatgcacaggtacgacgtgtccgcactccagtataattcaatgacttcctctcaaacctacatgaatggcagccccacatatagtatgagctatagtcagcagggtaccccgggaatggccctgggcagcatggggtcagtagtcaagtcagaggcttccagctctcctcctgtagtaacctccagcagccacagtcgggccccctgccaggctggcgaccttcgtgatatgatttctatgtatctgcccggggcagaggtgcccgaaccagccgccccgagcaggttgcacatgagccaacactaccagtccggccccgtgcctggaaccgccataaatggtacattgcccctgagtcacatg

SEQ ID NO: 19863 - DNA, 951 bp, synthetic construct
  misc_feature 1..951: note = source = /note="Description of Artificial Sequence: Synthetic coding sequence"
  source 1..951: mol_type = other DNA
atgtacaacatgatggaaaccgaactgaagcccccaggaccgcagcagaccagcgggggcgggggcgggaacagcactgctgccgcagcaggaggcaaccagaagaattcccctgaccgagttaaacgacctatgaacgcattcatggtctggagcagaggccagagaagaaagatggctcaagaaaatcccaagatgcacaacagcgaaatttctaagagactgggagcagaatggaaacttctctctgaaacagagaaacgaccattcatcgacgaggctaagcgcctgcgggccctgcatatgaaagaacatcctgattacaagtacaggcctcgccggaaaaccaaaacattgatgaaaaaggacaaatatacattgccaggaggtctgcttgcgcccggtggcaacagcatggcttccggcgtaggagtgggggccggactcggggcaggagtcaatcaacggatggactcttatgcccacatgaatggttggtccaacggctcctactccatgatgcaggatcagttgggctatcctcagcaccctggtctcaatgctcatggcgccgcacagatgcaacccatgcaccgctacgatgtgtccgcacttcaatacaactccatgacgtcctcacagacttacatgaatggaagccctacttactctatgtcctacagccaacagggaacaccaggtatggcgctggggtctatggggtccgtcgtgaagtcagaggccagttcttccccccctgttgttacctcctcctcccacagccgcgctccttgccaagcaggcgatctgcgcgacatgatctcaatgtatctgccaggagctgaggtgccggagccagccgccccatccaggttgcacatgagccagcattatcagagtggccctgtaccaggcacagcaatcaacgggacactgcctttgtcacatatg

SEQ ID NO: 19864 - DNA, 951 bp, synthetic construct
  misc_feature 1..951: note = source = /note="Description of Artificial Sequence: Synthetic coding sequence"
  source 1..951: mol_type = other DNA
atgtacaatatgatggagactgagctgaaacctccgggaccacagcagacctcaggcggcggcggaggaaactccaccgcagcggctgccggtggaaaccagaagaactcgcccgaccgcgtgaaacgcccaatgaacgcattcatggtgtggtcgcgcgggcagcggcgcaagatggcacaagaaaatccaaagatgcataactcggaaatctcgaaaaggttgggcgctgagtggaaactgctgtcggaaacggaaaaaagaccgtttatcgacgaggctaagcggctgagagcgctgcatatgaaggagcatccagactacaagtaccggccaagacggaaaaccaagactctgatgaagaaggacaagtacaccctgccgggcggactgctggcccctggcggcaactccatggccagcggagtgggggtgggggcgggactgggcgctggcgtgaaccaacgcatggattcctatgcacatatgaatggatggtccaatggatcatactcgatgatgcaagaccagctcggctaccctcagcatccaggactcaacgcacacggagcagcccagatgcaacctatgcaccgctacgacgtgtcagcgttgcaatacaacagcatgacttcctcacagacctacatgaatggatccccgacctacagcatgtcgtactcccagcagggcactcctggaatggctttgggatcaatgggatcagtggtcaagtcggaggcatccagctccccacctgtggttaccagctcgtcccattcgcgggcgccgtgccaggcaggtgaccttcgcgatatgatctcaatgtacctgcctggcgctgaagtgccagaaccggccgccccctcccgcctgcatatgagccagcactaccagtcaggacctgtccccgggactgctatcaatggaacgctgccgttgtcgcacatg

SEQ ID NO: 19865 - DNA, 951 bp, synthetic construct
  misc_feature 1..951: note = source = /note="Description of Artificial Sequence: Synthetic coding sequence"
  source 1..951: mol_type = other DNA
atgtacaacatgatggaaaccgaactcaagccaccgggaccgcagcagaccagcggaggcggcgggggaaactccacggctgctgccgccggaggaaaccagaaaaactcgccggaccgggtcaagcggccaatgaacgcatttatggtgtggtcgcgggggcaaagaaggaagatggcccaggaaaatcccaagatgcacaattcagaaatcagcaaacgcctgggcgccgagtggaagctgctgtccgaaactgagaagcgcccgttcattgatgaagcgaagcgcttgcgcgccttgcacatgaaagagcatccggattacaaataccggccgagacgcaaaaccaagactctgatgaagaaggacaagtacaccctccctgggggactgctggcaccaggtggaaacagtatggcaagcggagtgggtgtgggagcgggccttggtgccggggtgaaccagagaatggactcttacgcccacatgaatggatggagcaatggatcgtactcaatgatgcaggaccaactcggctaccctcaacacccaggcctgaatgctcatggagctgcgcagatgcaaccgatgcatagatacgatgtctccgccctgcagtacaattcgatgacctcgagccaaacctatatgaacggatcaccgacttatagcatgtcctactcgcaacagggaactccgggtatggcgctcggatcaatgggctccgttgtgaagtccgaggcctcctcgtcgcctcccgtggtgacctcctcaagccattcgcgagcaccatgccaggcgggcgacctccgggatatgatcagcatgtacctgcccggagctgaggtcccagaaccggcagccccttccaggcttcacatgtcccagcactaccaatcagggcctgtcccaggcacggcgatcaacggaactctcccgctgtcgcacatg

SEQ ID NO: 19866 - DNA, 951 bp, synthetic construct
  misc_feature 1..951: note = source = /note="Description of Artificial Sequence: Synthetic coding sequence"
  source 1..951: mol_type = other DNA
atgtacaatatgatggagactgagctcaagccgcccggaccacaacagacctctgggggagggggcggaaacagcaccgctgccgctgcaggggggaaccagaaaaatagtcccgatagagtaaagcgtccgatgaacgcctttatggtgtggtccagagggcagagacggaagatggctcaagagaatcctaaaatgcacaacagcgagatcagcaagcggctgggcgcagagtggaagctcctgtctgagacagagaagaggccattcatcgacgaagccaaaagattgcgcgccttacatatgaaggagcatccagactataaataccgcccacgccgcaaaaccaagaccctgatgaagaaagataagtataccctccctgggggactgctggcacccggagggaactccatggctagtggcgttggtgtgggagcaggactgggagccggagtcaaccagagaatggattcatacgcacatatgaacggttggagcaatggcagttattctatgatgcaggaccagctcggatatccacagcatccagggctgaacgcccatggagctgcacagatgcaaccgatgcatcgatacgatgtaagtgcgttgcagtacaacagtatgacatcatcccagacatatatgaatggctctcccacttacagtatgagctactcccaacaggggacacccggaatggcactcggctcgatggggtccgtcgtgaaatcagaagcatcatccagtcccccggtagtaacctcatcaagccattcacgagccccctgccaagccggagacctacgtgacatgatttcgatgtatctgcccggtgctgaggtccctgagccagctgccccctcccggctgcacatgagccagcactaccagagtggccctgttccaggtaccgcgattaatggtactctgcccttgtcccacatg

SEQ ID NO: 19867 - DNA, 951 bp, synthetic construct
  misc_feature 1..951: note = source = /note="Description of Artificial Sequence: Synthetic coding sequence"
  source 1..951: mol_type = other DNA
atgtacaacatgatggaaaccgagctgaagccccccggcccgcagcagacttcgggtggcggcggtggcaattctaccgccgccgccgccggcggcaaccagaaaaattcgcccgaccgcgtaaagcgccccatgaacgcgttcatggtttggtcacggggtcagcgtcgcaagatggcgcaggagaaccccaagatgcacaactccgagatctctaagagactgggtgccgagtggaagctgctgagtgaaaccgaaaagcgccccttcatcgatgaggcaaaacgtctccgcgcgttgcatatgaaggagcaccctgattacaagtaccggccccgccggaagaccaagacgctcatgaaaaaggacaagtacaccctgcccggcggtctgcttgcccccggtggaaactccatggcttccggtgtcggcgtcggcgctggcctgggtgcgggcgtcaaccagcgtatggactcctacgctcatatgaacgggtggtctaatggcagttattccatgatgcaggaccaactgggctatccccagcaccccggtcttaacgcccacggggcggctcaaatgcagcccatgcatcgctatgacgtcagtgccctgcagtacaactccatgacttcgtcgcaaacatacatgaacggttcgcctacctactccatgtcctacagccaacagggtacccccggtatggccctgggaagcatgggctccgtcgtcaagagtgaagcttcaagttcaccgccagtggttaccagctcgtcccactcgcgggctccatgtcaggctggggatctgcgagacatgatctccatgtatctacctggcgccgaagttcctgaaccggctgcgccgagccgcctccatatgtcgcaacattaccaatccggacccgtcccaggaactgcgattaatggtaccttgccgctctcccacatg

SEQ ID NO: 19868 - DNA, 951 bp, synthetic construct
  misc_feature 1..951: note = source = /note="Description of Artificial Sequence: Synthetic coding sequence"
  source 1..951: mol_type = other DNA
atgtacaatatgatggagacagaactcaaaccgccagggccccaacagacttcaggcggtgggggcgggaactcaaccgctgcagctgcaggcggtaaccaaaagaattcccctgaccgggtgaagcgccctatgaatgcattcatggtgtggagccgcggtcagaggcggaaaatggctcaggagaaccctaagatgcacaattcagagatctcaaagcgtcttggggctgagtggaagctgctgagtgagacagaaaagcggccttttatcgatgaggcaaaaaggttaagggctctgcacatgaaggaacacccggactataagtaccggccccggcggaagaccaaaaccctcatgaagaaggataagtacacattgccagggggcctgcttgctccaggaggcaattctatggcatccggagtaggggtcggggctgggctgggggcgggagttaaccagcgtatggacagctacgctcatatgaacggttggtcaaatggaagttactcaatgatgcaggatcagctcggataccctcagcaccctggactcaatgcccatggagcagctcaaatgcagccaatgcacaggtacgacgtttccgcactgcaatataattctatgactagcagtcagacatacatgaacggtagcccaacgtatagcatgtcttattcccagcagggcactccgggcatggctctcggttccatgggaagcgttgtgaaaagcgaagcctcaagcagcccacccgttgtcacctcttcgtctcactcaagggccccctgtcaggccggagatctcagggacatgatctcaatgtacctgcccggggctgaagtccctgaacccgctgccccatccagattgcacatgagtcaacactaccagtctggccctgtgccgggcaccgctattaacggcaccctgcctctgtcacacatg

SEQ ID NO: 19869 - DNA, 951 bp, synthetic construct; identical to SEQ ID NO: 19828
  misc_feature 1..951: note = source = /note="Description of Artificial Sequence: Synthetic coding sequence"
  source 1..951: mol_type = other DNA

SEQ ID NO: 19870 - DNA, 951 bp, synthetic construct
  misc_feature 1..951: note = source = /note="Description of Artificial Sequence: Synthetic coding sequence"
  source 1..951: mol_type = other DNA
atgtacaatatgatggaaaccgaacttaagccacccgggccacagcaaaccagcggtggaggtgggggaaactccaccgctgcagccgcaggcggtaaccagaagaatagccccgatagagtgaaaagacccatgaacgccttcatggtgtggtcgcgcggacaaagacgcaaaatggcccaagaaaatcctaaaatgcataattccgaaatatcgaaacgacttggagcagagtggaagctcctgtcagagactgaaaagcggccgtttattgacgaagcaaagagattgcgcgctctgcatatgaaggagcatcctgactacaagtacagaccacgccggaaaacgaaaaccctgatgaagaaggataagtacacccttccaggcggcctgctcgcaccgggaggtaactcgatggcatcgggcgtgggcgtgggcgccggactcggggcaggtgtgaaccagaggatggattcgtatgcacacatgaacggatggtccaatggaagctactccatgatgcaagatcaactgggctaccctcaacatcctggtcttaacgcacatggcgcggcgcagatgcagccaatgcaccggtacgacgtctcggccttgcaatacaactcgatgacctcgtcccagacttacatgaatggttcgcccacgtactcaatgtcatactcacagcagggcactcctggtatggcacttggttcaatgggatcggtcgtgaaaagcgaagcatcctcatcacctcccgtggtcacctcttcgagccattcgagggcaccttgtcaagcaggagatctgcgggacatgatctcgatgtacctgccaggggcagaagtgcccgaacctgctgccccatcgcggctgcatatgtcgcaacactatcaatcgggcccagtccctggaactgccataaatggaacgctccctctttcgcatatg

SEQ ID NO: 19871 - DNA, 951 bp, synthetic construct
  misc_feature 1..951: note = source = /note="Description of Artificial Sequence: Synthetic coding sequence"
  source 1..951: mol_type = other DNA
atgtacaatatgatggaaaccgaactgaagcctcccggcccccaacagacttccggtgggggaggcggaaactcaactgctgccgcagccggtgggaaccaaaagaactcccctgatagagtgaagaggccaatgaacgcattcatggtctggtcacggggacagagaaggaagatggcacaagagaacccaaagatgcacaattcggaaatctccaagcgcctgggtgccgaatggaaactcctttcagagactgaaaagaggcccttcattgatgaagcaaagcgactgagggcactgcatatgaaggagcatccagactacaagtatagacctaggcgtaagactaaaacgcttatgaaaaaggacaagtacaccctgcctggtggactcctggcacctggcggaaattcaatggcaagcggggtgggggttggcgcaggtctgggcgcaggggtgaaccaacgaatggattcctacgctcacatgaatggatggtccaacggaagctacagcatgatgcaggatcagctgggttatcctcaacatccaggtcttaacgcacatggagcggcccaaatgcaaccaatgcaccgttacgatgtgtcagcgctccaatacaactcaatgactagcagccaaacgtacatgaatgggtcccctacttacagcatgtcgtactcccagcagggtacgccagggatggcactcggatctatgggatctgtcgtgaaatcggaggccagcagctcgcctccagttgtgactagctcctcccattcgagagctccttgtcaagccggtgatctcagagatatgatttcaatgtaccttccaggagcagaagttccggaacctgcagcgccaagcaggcttcacatgagccagcattaccagagcgggccagtcccaggaaccgccatcaacggaaccctccccttgtcgcacatg

SEQ ID NO: 19872 - DNA, 1725 bp, synthetic construct
  misc_feature 1..1725: note = source = /note="Description of Artificial Sequence: Synthetic coding sequence"
  source 1..1725: mol_type = other DNA
atgctgggagtcctggtcctcggcgctctggccctcgccggccttgggtttcccgcgccagccgagccccagccgggcggaagccagtgtgtggaacatgattgcttcgcactctacccgggaccggccactttcctgaacgcatcgcaaatctgcgatgggctcaggggccatctgatgactgtcagatcgagcgtggctgcagacgtcatctcactcctgctgaacggagatggaggggtcggacgtcggcgcctctggatcggactgcagctgcctcctggatgcggcgacccgaaacggctcggtccgttgagagggtttcagtgggtgaccggtgacaataacacttcctactcgaggtgggcacggctcgatcttaatggagctcctctgtgcggcccactgtgcgtggccgtgtccgccgccgaagccacggtgccaagcgagccaatctgggaagaacaacagtgcgaagtgaaggccgacggcttcctttgcgaattccacttccctgcaacttgcaggccactggccgtcgaaccgggagccgcggcagccgccgtatcgatcacttacggaactcctttcgctgctcgcggagcggatttccaggctctgccagtgggtagcagcgccgcagtggcacccctcggactgcaactcatgtgtaccgcccctccgggtgcggtgcagggacactgggccagggaggcccccggggcctgggactgttcagtcgaaaacggcggatgcgagcatgcgtgtaacgccatcccaggggccccgagatgccagtgccccgcaggagccgcactgcaggcagacggacgttcttgcaccgcctctgcgacccaatcctgtaacgacctctgtgaacatttctgtgttcctaacccagatcagccgggtagctactcatgtatgtgtgagacgggctacaggcttgcagcagaccaacaccgctgtgaggacgtggacgactgcatcctggagccgagtccttgtccacagcgctgcgtgaacactcaaggaggcttcgaatgtcactgctacccgaattacgatctggtggacggcgaatgcgtggaaccggtcgacccgtgttttagggccaattgcgagtaccaatgccaaccgctcaaccaaacctcatacctgtgtgtgtgcgccgagggattcgccccgatcccgcatgagccgcaccgctgccagatgttctgtaatcagactgcctgcccagccgactgcgaccctaacacgcaggcctcttgcgaatgcccggaagggtatatcctggacgatggattcatctgtaccgacatcgatgaatgcgaaaacggagggttctgctcgggcgtttgccataatctgccggggaccttcgagtgcatctgcgggccggactcagccttggcccgccatatcgggactgactgcgattccggaaaggtcgacggcggagattccggttccggagagccaccaccgagcccgaccccgggatcgaccttgactccgccagcagtgggattggtccactcgggactgctgatcggaatttccattgcatcgctgtgcctggtcgtcgcgctgctggcacttctgtgtcacctgcggaagaaacagggcgccgcgcgcgccaagatggaatacaaatgcgccgccccctccaaagaagtggtgttgcagcatgtgcggacggaaaggaccccgcaaagactg

SEQ ID NO: 19873 - DNA, 1725 bp, synthetic construct
  misc_feature 1..1725: note = source = /note="Description of Artificial Sequence: Synthetic coding sequence"
  source 1..1725: mol_type = other DNA
atgctgggggttttagttctgggggctctggccctggcaggacttggcttccctgcccctgccgaaccccagcctggtggctcacagtgcgtggaacatgactgtttcgcattataccctggccccgctaccttcctgaacgcaagtcagatatgcgatggattgcgggggcatctgatgactgtcaggtcctctgtggcagccgatgtgatcagcctactgctcaacggcgacgggggcgtgggccgcaggcgcctgtggataggtttgcagctaccacccggctgtggcgatcccaaaagactcggtcctctaagagggtttcaatgggtaactggcgataataatacaagttactctaggtgggcaaggctggatcttaatggggccccactctgcggtcccctgtgtgtggcagtgtccgcagctgaagccactgtcccctccgaaccaatctgggaagagcagcagtgcgaggttaaagccgatggctttctatgcgagttccacttcccagccacctgtcgccccctcgccgtcgagcccggtgcagccgctgccgcagtgtccatcacctatgggacaccatttgccgcaaggggtgctgatttccaagctctccccgtgggctcttctgcagccgtggcaccccttggtctgcagctcatgtgtactgctccaccaggcgctgtgcaggggcactgggccagagaggccccaggcgcatgggattgctctgttgagaacgggggatgcgaacatgcctgtaatgccatacccggcgctcctaggtgtcagtgccctgccggtgctgcactgcaagccgacggccggtcttgcactgcctcagccacccagtcttgtaatgacttatgcgagcatttctgtgttcctaaccccgaccagccaggctcctatagctgcatgtgcgaaaccggctaccgtctcgcagccgaccaacaccgctgtgaagatgtagatgattgtatcctggagccttctccatgcccccaaaggtgcgtgaacactcagggcggcttcgagtgtcattgctatccaaactatgacttagtggacggcgaatgtgttgagccagtggatccttgcttccgggccaattgtgaataccaatgtcagcccctgaatcaaacatcctacctgtgtgtgtgtgctgagggcttcgcaccaattccccacgagccacatcggtgtcagatgttttgtaatcagacagcttgtcccgcagattgtgaccctaatacccaggcctcatgtgaatgccctgaaggctacattctagatgacggattcatctgcacagatatcgacgagtgcgagaatggcggcttttgcagtggggtatgtcacaacctcccagggactttcgaatgtatctgtggacctgactctgcattagccaggcacataggcactgactgcgattctgggaaggtggatggcggcgacagtggaagcggcgagcctccaccatctcctacccctggctccaccctgactccccccgcagtcggcctcgtgcatagtggcctgctgatcggaatcagtattgccagcctttgtctggttgtggctctgctggcacttctgtgccacctaaggaagaagcaaggggctgcccgagcaaaaatggagtacaagtgcgcagccccaagcaaggaggtggtcctgcagcacgtgagaactgagcgcacaccccagcgacta

SEQ ID NO: 19874 - DNA, 1725 bp, synthetic construct
  misc_feature 1..1725: note = source = /note="Description of Artificial Sequence: Synthetic coding sequence"
  source 1..1725: mol_type = other DNA
atgctgggggtcctggtcctgggcgcattggctttggccgggctgggctttcccgcacccgctgaaccacaacccggaggaagccagtgtgtggagcacgactgttttgctctctaccccggcccagccactttcctaaacgccagtcagatttgcgacggtctgagaggccatctgatgaccgtccgtagttccgtcgccgcagacgtgatcagcctcctgcttaacggcgatggtggggtaggtagaaggcgactgtggattggcttgcagttaccacctgggtgtggcgatcccaaacggttaggcccgttacgaggcttccagtgggtgacaggtgacaataacactagctactccaggtgggcaagactcgacctaaacggagctcccctgtgtggacccttgtgcgtggccgtttccgccgcagaggctaccgtcccttcggagccgatatgggaagagcagcagtgtgaggtgaaggcagacggctttttatgtgagttccattttccagccacttgccgtcctctggccgtggaaccaggtgctgctgccgccgccgtgtccattacatatggtacaccattcgccgctcgaggagcagatttccaagcgctacctgtcgggtcctccgctgcagtggcacccttaggtctgcagttgatgtgcacagctcctccaggggctgttcaaggccactgggcaagagaagccccgggggcctgggactgctctgtggaaaacggcggctgcgaacatgcatgcaacgccatccccggcgccccaagatgtcaatgccctgctggcgcggctctgcaggcagatggccggtcctgtactgcttctgctacgcagagctgcaatgacctttgtgagcacttttgtgtcccaaaccccgaccaaccaggatcttatagctgtatgtgtgagactggatatcggctggcagcagatcagcaccggtgcgaggatgtagacgactgcatactcgaacccagtccttgtccacaacgttgcgtcaacactcaaggaggatttgaatgtcactgctacccgaactacgatctggtagacggagagtgtgtggaaccggtcgacccttgcttcagggccaactgtgaataccagtgccagcccctgaaccagactagttacctatgcgtttgcgctgaaggatttgctcctataccccatgaaccacatcggtgccagatgttttgcaaccagaccgcctgtccagctgattgcgaccctaatacccaggcttcttgcgaatgccctgaaggctatatcctggacgatggtttcatctgcacggatattgatgagtgcgagaatggcgggttctgttctggcgtttgtcacaatcttcctggaacattcgaatgcatatgtggtcctgattctgcgctggcgaggcacattgggacagattgtgacagtggtaaagtggacgggggcgattccggctccggcgaacctcccccgagtccaactccagggagcacccttaccccacctgccgtcggactggtccattccgggctcttgatcggtattagcatcgccagtctctgcctggtggtggctctgctggctctgctctgccacttaaggaagaagcagggagcagcaagggcgaaaatggagtacaagtgcgccgctccctctaaagaagttgttcttcagcacgttcgcacggagaggaccccacagagactc

SEQ ID NO: 19875 - DNA, 1725 bp, synthetic construct
  misc_feature 1..1725: note = source = /note="Description of Artificial Sequence: Synthetic coding sequence"
  source 1..1725: mol_type = other DNA
atgctcggcgtgctggtcctgggggctctggccctcgcaggactggggtttccagcgcccgcagagccccagcctggcggttcacagtgcgtcgagcacgattgctttgctctgtaccccggtcctgcaacttttctgaacgcctcacagatctgcgatggcctgagagggcacctgatgacggtccgcagctccgtggctgccgacgtgatcagcctgctcctcaatggtgacgggggtgtgggccggcgccgactctggatcggcttgcagctccctcctggctgtggcgatcccaagcggctgggcccgcttcgaggatttcagtgggtgaccggggacaacaacactagttattctaggtgggctaggctagacctcaatggcgctcctctctgcgggcccctctgcgtggcagtgagtgccgcagaggctaccgtgcctagcgagcccatctgggaagaacagcagtgcgaggtgaaagccgacgggtttctgtgcgagtttcattttccagctacctgccgccccctagctgtagagccaggagctgccgccgccgctgtctccatcacttatggcactccattcgccgcccgtggtgccgacttccaagccttgcccgtgggatctagcgccgctgtggcaccccttggattgcagcttatgtgcacggctccacccggcgcagtacaaggacattgggccagagaggcaccgggcgcctgggattgttccgtggagaacggtggatgcgaacacgcctgtaacgcaattccgggcgcccccagatgtcaatgtcctgccggtgccgctctgcaggcagatggccgcagctgtaccgcttctgctacacagtcatgcaacgacctgtgtgaacatttttgtgtgccgaaccccgatcagccaggctcctatagttgcatgtgtgagaccggctacagacttgctgccgatcagcatagatgtgaagatgtggacgactgtatcttggaaccatccccctgtccacaacgatgtgtaaatactcagggagggtttgagtgtcattgttaccccaactacgatttggttgatggcgagtgtgtggagcccgtcgatccatgttttagagccaattgtgaataccaatgccagccactgaaccagacctcttacttgtgcgtgtgcgcagaggggtttgcgccaattccccacgagccccaccgttgccagatgttctgcaatcagaccgcctgccctgccgactgtgatccaaacacacaggccagctgcgagtgccctgagggatacatcttagacgacgggttcatttgcaccgacatcgacgagtgcgaaaacggcggcttttgctccggcgtctgccataatctgcctggcactttcgaatgtatctgtgggcccgactcggcccttgcgcgccatattggtacggattgcgacagcggcaaggtcgatggtggcgattctggctctggtgagcctcccccgtcgcccacccctgggagcacccttacaccacctgccgtcgggttagttcactcaggcctgctgatagggatttccatcgctagcctgtgtctggtcgttgctttactggctctcttatgtcatctgcgcaagaaacagggcgcagcccgagccaaaatggagtacaaatgcgctgccccttctaaggaagtggtgctccagcacgtgcgcactgagcggaccccgcagcgatta

SEQ ID NO: 19876 - DNA, 1725 bp, synthetic construct
  misc_feature 1..1725: note = source = /note="Description of Artificial Sequence: Synthetic coding sequence"
  source 1..1725: mol_type = other DNA
atgttaggggtgctcgtcctcggggcactagctctcgctgggctgggctttccggcccccgctgagccccaaccgggtgggtctcaatgcgtagaacatgattgcttcgcactgtatcccggacccgcaacgtttcttaatgcttcgcagatctgtgatggacttcggggtcatttgatgacagttaggtcttccgtagctgccgacgtaatctctcttttacttaacggcgatggcggcgttgggagacggagactatggatagggttgcagctccctcctgggtgcggagacccaaaacgcctggggccgctacgtgggttccagtgggttaccggggataacaatacctcatacagcagatgggcacgactggaccttaacggggcacctctttgcggaccactgtgtgtggccgtgagcgccgccgaagccacggtgccttccgaacccatttgggaagaacagcagtgtgaggtcaaagctgacggtttcttatgcgaatttcacttcccagctacctgccggcccctagctgtggaacccggggccgcagccgctgcagtgtccatcacttacggaaccccttttgctgcacgaggtgctgatttccaggccctgcccgtgggaagctcagccgctgtcgcccctttaggcctgcagctaatgtgtaccgcgccaccaggcgctgttcagggtcattgggcccgtgaggcacccggtgcatgggattgctccgtcgaaaacggtggctgcgagcacgcatgcaacgctatccccggagccccaagatgtcaatgccccgcaggagcggcgttgcaggccgatggccgctcctgtaccgcctcggccactcagagctgtaacgacctgtgtgagcacttctgcgtgcccaaccccgaccagcctgggtcttacagctgcatgtgcgaaaccggctatagactggccgcggatcagcaccggtgtgaggatgtagacgattgtatcctggaaccttccccatgcccacagcggtgcgtaaacacacagggcggctttgaatgccactgctacccaaactacgacctcgttgacggggagtgcgtggagccggtggacccctgtttcagagccaattgcgagtaccagtgtcagcccttgaatcaaacttcctacctctgcgtctgcgccgaagggttcgcccccataccccacgaaccccacaggtgtcagatgttctgtaatcagacagcctgcccagccgactgtgatcccaacacacaggctagttgtgagtgcccggaaggctacatcctagatgacgggtttatatgtacagacatcgacgagtgcgagaacggagggttctgttcaggggtgtgtcataatctccctggcacatttgagtgcatctgtgggcccgattcagccctggcccggcacatagggacggactgcgattcagggaaagtcgatggtggcgactccggatcaggcgagccacccccatcgccaacgccgggctcaacactcacccctcctgctgtggggttggtgcattcaggattattaataggaattagcatcgcttccctttgtttggtggtcgcccttctcgctttactgtgtcatctacggaaaaagcagggcgcagcccgggccaagatggagtataaatgtgccgcacccagcaaagaagtcgtgctgcagcacgtcaggactgagcgaacaccccaaagactg

SEQ ID NO: 19877 - DNA, 1725 bp, synthetic construct
  misc_feature 1..1725: note = source = /note="Description of Artificial Sequence: Synthetic coding sequence"
  source 1..1725: mol_type = other DNA
atgctaggagtgctggtgctgggggcgcttgcactggctggactgggattcccagctcctgccgagcctcagcccggcggctctcagtgcgtagagcacgattgctttgccttgtatcccggtcctgcgaccttcctgaacgccagccagatttgcgacggacttcgcggccatttgatgacagtaagaagtagcgtggccgccgatgtcatctctttgcttctcaatggcgacggaggcgtgggtagacgccggctctggatcggcttgcaacttccccctggctgcggagatcccaagaggctcggccccctcagagggttccaatgggtcacaggggacaacaatacgtcctacagtcgatgggcgcgtctggacttgaacggcgcacctctgtgcgggccgctgtgcgttgccgtgtctgccgcagaggcgactgtgccatccgagcccatttgggaggagcagcagtgcgaggtcaaggctgatggtttcctttgcgaatttcactttccggccacatgccgccctttggccgtggagcccggcgctgctgccgcagccgttagcataacctatggcaccccattcgctgcacgcggcgcggacttccaggccctgcctgtcgggtcttccgctgccgtggctcctctgggattgcagcttatgtgcacagccccacctggggccgtgcaggggcactgggcgcgcgaggcccccggcgcttgggattgttccgtcgagaacggtgggtgcgagcacgcgtgtaatgccataccgggagcaccacgatgccagtgcccggctggggctgcgttgcaggcggacggccgctcctgcacagccagcgcgacccagagctgtaacgatttgtgcgagcacttctgtgtaccgaaccctgatcagccgggcagttattcttgcatgtgtgagaccggttaccgcctggccgccgaccagcatcggtgtgaggacgtagacgactgtattctggagccatccccatgtccccagcgctgtgtcaacacgcaaggcgggtttgaatgccactgctatcccaactatgacctggtggacggggagtgcgtcgaacccgtggacccgtgcttcagggccaattgcgagtaccagtgtcaacctctgaaccagacgagctacctatgcgtgtgtgctgaggggttcgcgcccatcccgcacgagccccatagatgtcagatgttttgcaatcagactgcgtgcccagcggattgcgacccaaatactcaggcctcttgcgagtgcccggagggctacatcctggacgatggattcatctgtacagacatcgatgaatgtgagaacgggggcttctgttccggagtgtgccacaacttgccaggcacattcgagtgtatctgcgggcccgatagtgctctggcgcggcatattggcacagattgcgactccggaaaagtggatggaggcgacagtggatccggggagcctcctccctccccgactcctgggtcaacccttactccacccgcagtcggcctggtccacagcgggcttctgatcggaatctccatagccagtctttgcctagtggtggccctcctggccttactttgccatctgaggaagaagcaaggcgcggcgagggcaaaaatggagtataagtgcgcagccccgagtaaggaggtggtgctgcagcacgtacgcaccgaaaggactccacagcgactt

SEQ ID NO: 19878 - DNA, 1725 bp, synthetic construct
  misc_feature 1..1725: note = source = /note="Description of Artificial Sequence: Synthetic coding sequence"
  source 1..1725: mol_type = other DNA
atgctgggagtcctggtcctcggagccctggcactggccgggcttggctttcccgcgccggccgaaccacaaccgggcggtagtcaatgcgtggagcatgactgtttcgcactgtacccaggccctgccacatttttgaatgcgtcacaaatctgcgatggtctgcgcggccacttaatgacggtgaggagtagtgtcgctgccgatgtgatctcattgctgttgaatggagacggtggcgtgggcagaaggcgactgtggatcggcttgcagctgccacctggttgtggcgatccaaagaggctaggccctctccggggttttcagtgggtcacaggcgataataatacttcctacagccgctgggccaggctggaccttaatggtgcgcctctgtgtggcccactatgcgtggcagtgtccgccgctgaagcgacggtcccgtcagagcccatctgggaggagcagcaatgtgaagtgaaggctgacggcttcctgtgtgagttccacttcccagcgacctgccggcccctggccgttgaacctggcgccgcggctgcggccgtgtcaataacatacggaacgcccttcgccgcccggggcgcggatttccaagccttgcctgtcggaagttctgcagctgtggcccctctcggactgcaactcatgtgcaccgccccaccaggggctgtgcaaggccattgggcaagggaagcacccggagcttgggattgcagcgtggagaatggggggtgtgagcacgcatgtaacgctatcccgggggcccctagatgccagtgtccggccggggctgccctacaggccgacggcagaagttgcaccgcaagtgctacccagtcctgtaatgacctatgcgagcacttctgcgtgcctaaccccgatcaaccgggaagctattcctgtatgtgcgagaccggctatagactagcggccgaccagcatcggtgtgaagacgtggatgactgcattctagaacccagtccttgtccccaacggtgcgtcaatacacagggggggttcgaatgtcactgttaccctaactacgatctcgtggatggcgaatgcgtcgaaccggtggacccttgtttcagagcaaattgcgaataccagtgtcagccactgaatcagacttcttatctgtgcgtgtgcgcggagggatttgctcccatacctcatgagccacatcgctgtcagatgttctgcaaccagacagcctgcccagctgactgcgatcctaacacccaggcttcatgcgaatgtcctgagggttatatcctggatgatggattcatttgcactgatattgatgagtgtgagaacggtggcttttgcagcggcgtttgccataacctgcccgggacatttgagtgtatttgtgggcctgacagcgcattagctaggcatatcggaacagattgcgactccggcaaggtggacgggggtgactcaggaagcggggagccccctccctctcccaccccaggtagcactctaactccccccgccgtaggtttggtgcattctggattactgattggaatatccatcgccagcttgtgtctggtagtggcactgttggccctgctctgccacctaagaaagaagcagggagccgcccgcgcgaagatggagtataaatgtgcagccccttccaaagaggtggtcctgcagcatgtccgaacagaacgaacccctcagcgtctt

SEQ ID NO: 19879 - DNA, 1725 bp, synthetic construct
  misc_feature 1..1725: note = source = /note="Description of Artificial Sequence: Synthetic coding sequence"
  source 1..1725: mol_type = other DNA
atgctgggtgtgcttgtgctcggggccctcgccctggcaggactgggattcccggcacctgccgaacctcagcccggagggagccagtgcgtcgaacacgattgcttcgcgctgtacccgggccccgcaacttttctgaatgccagccaaatctgcgacggcctgcggggacatctcatgaccgtgcggtcctccgtcgcagccgacgtgatcagcctgctcctgaacggagacggaggagtgggccgccggcgcctttggatcggcctgcagttgccgcctggatgtggcgacccaaagaggttggggccactgcgcggctttcaatgggtgaccggagacaataacacttcatactccagatgggcacgcctggatctgaacggcgcaccactgtgtgggccgctgtgtgtggccgtgtcggccgccgaggctaccgtcccgtcagagccaatctgggaggagcaacagtgcgaagtcaaagctgatggattcctgtgcgaatttcactttccggcaacttgccgccctttggctgtggaaccgggagcggcggcggcagctgtctctatcacctacggaactcctttcgcagcgaggggggccgatttccaggccctgcctgtgggctcttcggcagccgtcgctccgttgggactgcagctcatgtgcaccgctccgccgggagcagtgcaaggccactgggcgcgggaggccccaggtgcatgggactgctcggtggaaaatggaggctgtgagcacgcgtgcaacgctatcccaggagccccgcggtgccaatgtcccgctggagcggctctgcaggccgacggccggtcctgcactgcttcagcaactcagagctgtaatgatctgtgtgaacatttctgcgtgcctaatccagatcagccagggtcctactcatgcatgtgcgaaactgggtaccgcctggctgccgatcagcaccgctgcgaagatgtggatgactgtatcctggaaccgtccccgtgtccgcagaggtgcgtgaacactcagggtgggtttgaatgtcactgctacccaaactacgacctcgtcgacggagaatgtgtcgaaccggtggacccgtgctttcgcgcgaactgcgagtaccagtgtcaaccgctcaaccagacctcatacctctgcgtgtgcgccgaaggattcgcacccattccacatgagccacataggtgccagatgttctgcaaccagactgcatgtccggctgactgcgatccgaacacccaagcctcgtgtgagtgccctgaagggtacatcctggacgacggattcatctgcactgacattgacgaatgtgagaacggagggttctgctctggcgtgtgtcataatctgccaggaacctttgaatgtatctgcggtccagactccgcccttgcccgccatattggaaccgattgcgactcaggcaaagtggatggcggtgacagtggatccggagaacctccgccgtcgccaaccccggggagcacgctcactcctccagcggtgggccttgtgcactctggcctgctcatcggaatcagcatcgcgtccctgtgccttgtggtggccctcctcgcccttctgtgccatctgcgtaagaaacagggcgcagccagggctaaaatggaatacaaatgtgcggccccgtcgaaggaagtggtgctccaacatgttagaactgagaggaccccccagagactg

SEQ ID NO: 19880 - DNA, 1725 bp, synthetic construct
  misc_feature 1..1725: note = source = /note="Description of Artificial Sequence: Synthetic coding sequence"
  source 1..1725: mol_type = other DNA
atgctgggtgtgctggtcctgggggccctcgccctggccggactagggttccctgccccagcagaaccccagccgggaggctctcagtgtgtcgagcatgattgttttgccctctatcctggtccagccacttttttgaacgctagtcagatttgtgacggtcttagggggcacctgatgactgttcgctctagtgtggccgcagatgtgatatcgctgcttctaaatggagatggtggtgtgggacgtcggcgactctggatcggtttacaactccctcctggatgtggcgacccaaagaggcttggacctctcaggggatttcagtgggtcaccggcgataacaacacctcttattcccggtgggcacgcctggaccttaatggggcccctctatgcggtcccctgtgtgttgccgtgtccgctgctgaggcaacggtgccaagcgagcctatatgggaagagcagcagtgcgaggtgaaagccgatggcttcctctgcgaatttcattttccagcgacttgtcgccctctggcagtagaacctggggcagccgctgcagccgtatccattacctacggtaccccctttgccgcacgtggtgctgacttccaagcgttgcctgtagggtcttctgccgcagtcgccccacttggactgcagcttatgtgtactgcgccacccggggccgttcagggtcattgggctcgcgaggccccaggggcatgggactgcagtgtcgaaaatggtggatgtgagcacgcatgtaacgcaatacccggggcgcccagatgccagtgtcccgccggggccgcgctgcaggctgacgggaggtcttgtaccgcttcggctacccagagttgcaacgatttgtgcgagcacttttgcgtgcccaacccagatcagccaggaagctacagttgtatgtgtgaaaccggctaccgccttgcagccgaccagcaccgttgcgaggatgttgacgactgcatcctggaaccaagtccttgtcctcaacgttgcgttaacactcagggcggtttcgagtgtcattgttaccctaattatgatcttgtggacggcgaatgtgtggagcccgtggatccttgttttcgcgctaactgcgagtatcagtgccagcccctgaatcaaaccagttacctctgcgtttgtgccgagggcttcgcacctatcccacacgaaccgcaccgctgccagatgttctgcaaccagacggcatgccctgcagactgtgatccaaatactcaggcctcctgtgaatgccccgagggttacattctggacgacggatttatctgcacggacatcgacgaatgcgaaaacggcggcttttgttctggcgtttgccacaacttgcctggcaccttcgaatgcatctgcggacctgactctgcattggcaagacacattggtaccgactgtgactcaggcaaagtagacgggggtgatagcggatctggagaaccaccgccaagtccaacacccggctcaaccttaactcctccagctgtgggcctggtacattccggcttacttatcgggatcagtatagcctctctgtgtttagtcgtggcgttgctggctctcctctgtcatctgcgaaagaagcagggcgcagctagggcgaagatggaatacaaatgcgcggccccatccaaggaggttgtgttgcagcacgtgaggactgaacgcaccccacagcgactg

SEQ ID NO: 19881 - DNA, 1725 bp, synthetic construct
  misc_feature 1..1725: note = source = /note="Description of Artificial Sequence: Synthetic coding sequence"
  source 1..1725: mol_type = other DNA
atgttgggagtgcttgtgcttggcgcgttggcgttggcaggactgggatttcccgccccagccgagccccagcctggcggaagccagtgcgttgagcatgactgttttgcactgtaccccgggcctgcaacttttcttaacgcctcacaaatttgcgacgggttgcgcggtcatctgatgactgtgcgcagctcagtggcagcagacgtgatctcgctgctcctcaatggagatggaggtgtgggtagacgcagattgtggattggccttcaattgccgccagggtgtggagatccgaaacgacttggtccacttaggggatttcagtgggtaaccggggacaacaacacctcctactcccgttgggcacgtcttgacctgaacggagcacctctttgcgggcccctctgtgtggccgtgtcggcagcagaagctaccgttcccagcgaaccaatttgggaagagcaacaatgtgaggtaaaggccgatggatttctctgtgaattccactttcctgcgacttgtcggccacttgcagttgaaccaggagctgccgcagcagcagtgtcaataacctatggcacccctttcgccgcaagaggggccgatttccaagcactgcccgtcggaagctcggcggctgtggcacctctggggctgcaacttatgtgtacggcacctcctggggcggttcaaggacattgggcacgtgaagctccgggagcctgggattgttcggtcgaaaacggcgggtgtgaacacgcgtgcaacgcgattccgggcgcccctaggtgtcagtgccccgccggcgccgcactgcaggcagatggacgtagttgtaccgcgtcggcaactcaatcgtgcaatgatctgtgtgaacatttttgtgtgccaaacccagatcaacctggctcctactcttgtatgtgcgagacgggatacaggttggcagccgatcagcacagatgtgaagatgtagatgactgcatcctcgaaccatcgccgtgtcctcagcggtgtgtcaacactcagggcggctttgaatgtcactgttacccaaattacgacctcgtggatggagaatgtgtggaaccggtcgatccctgtttccgagccaattgcgaataccaatgtcaacctctcaaccaaactagctacctgtgcgtgtgtgccgagggttttgcgcccattcctcatgaacctcaccgctgccagatgttctgtaatcagaccgcatgtcccgcagattgcgaccctaacactcaggcctcctgcgagtgccctgaaggatacatcctcgatgacggtttcatatgcaccgacatcgacgaatgtgagaatggaggtttttgttccggtgtgtgccataacctgccggggacttttgagtgtatctgcgggcccgattcagcgctggcgagacacattggtaccgattgtgactcgggaaaggtcgatggtggtgattccgggagcggcgagccaccaccatcgcctacgcctggttcaacgctgaccccaccagctgtgggtcttgtgcattccggtttgcttatcggcattagcattgcttcgctctgcctcgtggtggcactgctcgcacttctgtgtcatcttagaaaaaagcaaggagcagcacgggccaagatggaatacaagtgtgcagcaccatccaaagaagtcgtccttcagcatgtgagaaccgaaaggactccgcaacgactg

SEQ ID NO: 19882 - DNA, 1725 bp, synthetic construct
  misc_feature 1..1725: note = source = /note="Description of Artificial Sequence: Synthetic coding sequence"
  source 1..1725: mol_type = other DNA
atgttaggggtcctggttctaggtgcccttgcacttgccggcctgggatttcccgcccctgcggagcctcagcccggtggcagtcagtgtgtagagcacgactgtttcgcactctatccgggaccagcaacatttttaaacgccagccagatttgcgatggactgcggggtcacttaatgacggtgaggagtagtgtggcagctgatgtgatttcactcctcctgaacggggatggcggcgtcggccggcggcggctgtggatcgggttacagctcccacctggatgtggtgatcctaaacgcctcgggcccctaagaggattccaatgggtcacaggtgacaacaatacttcttatagtaggtgggccagactcgaccttaatggggcccctctatgtggacctttgtgtgttgcggtttccgctgctgaggccacagtgccttcagagcctatctgggaggaacaacagtgcgaagtgaaggccgatgggttcttatgcgagtttcattttcctgccacatgtcgtcctctggccgtggaacccggcgcagcagctgccgccgtcagtattacatatgggacacccttcgcagcacgcggagcagactttcaagcactgcctgttgggtcctcagctgccgtggcccctctaggactccagctgatgtgtaccgctcccccaggcgccgtgcaaggacactgggctagagaggctccaggcgcctgggattgttcagttgaaaacggtggttgcgagcacgcgtgtaacgccatcccaggagcccctagatgccagtgccccgcaggggccgccttgcaggcggatgggcgatcatgtaccgcaagcgccactcagtcatgcaacgacctgtgtgaacatttttgtgttcctaaccccgatcagccaggctcctattcgtgcatgtgcgagaccggatatcgtctcgccgccgatcagcaccgatgtgaagacgttgacgattgcattcttgaaccatcaccctgcccccagagatgcgtcaatacccagggaggattcgagtgccactgttacccaaattatgacctggtagacggggaatgcgtggagccagtcgacccttgtttccgagcaaactgtgaataccagtgccaaccgctaaaccagaccagctatctctgcgtgtgcgcagagggatttgcgcccatcccccacgagccccacaggtgtcagatgttctgtaaccagacagcatgccccgcagactgtgacccaaacacccaggcctcatgtgaatgccctgaaggttatatcttagatgacggattcatctgtactgacatagacgagtgcgagaacgggggattttgcagcggtgtttgccataatctaccaggcaccttcgaatgcatctgcggacccgacagcgcactggcaagacacatcgggactgactgcgacagtggcaaggtcgatggaggggattcaggcagcggggagcccccaccgagcccgaccccgggatctaccctcaccccaccagcagtcggcttagtgcactccggcctgctcattgggataagcatcgcaagtttgtgtctggtggtggcactgctggctctgttatgccatctacgtaagaaacaaggggccgccagagccaagatggagtacaagtgcgccgcgccctccaaggaggtggtgctccaacacgtccggaccgaacgaacacctcagcggtta

SEQ ID NO: 19883 - DNA, 1725 bp, synthetic construct
  misc_feature 1..1725: note = source = /note="Description of Artificial Sequence: Synthetic coding sequence"
  source 1..1725: mol_type = other DNA
atgctcggagtgctggtgctgggagctctcgctctggcaggcctgggatttccagcaccagctgaacctcaacccggaggcagccagtgcgtggagcacgattgtttcgcgctttatcccggcccagcaacatttcttaacgcgagtcagatctgtgacgggttgagaggccacctgatgaccgtccggagttccgtcgccgctgacgttatctcactccttctgaacggagatggcggagtgggccggagacggctctggattggcctgcagttgccccctggctgcggggatccaaagcggcttggacctctcagaggattccagtgggtgacaggcgacaacaacaccagttactctagatgggcccgcttggacctgaatggcgcgccactgtgcgggcctctgtgtgtcgcggtgagcgccgcggaggccacagtaccttcggagccaatctgggaagaacagcaatgtgaggtaaaggctgacgggtttctgtgcgaatttcactttcctgctacgtgcaggcccctggcagtggaacccggggctgccgcggctgctgtgagtatcacatatggtaccccatttgcagctcgaggagccgatttccaagcgttgcccgtgggttcaagtgctgctgttgcgcctttagggcttcagttaatgtgtactgccccccccggcgcagtccagggccattgggcccgggaggcacccggggcttgggactgcagcgtcgagaatggtgggtgcgagcacgcttgtaacgcaattcccggcgcacctcggtgtcagtgtcctgcaggagcagcgcttcaggccgatggccggtcgtgtacagcctcggctactcagtcttgtaatgatctgtgcgagcatttttgcgtacccaatccagaccagcctggctcttactcatgcatgtgcgaaaccggctacagactggcggctgatcagcaccgatgtgaggacgtggatgattgtatcctggaaccctctccctgcccccagagatgcgtgaacacacaaggaggctttgagtgccattgctaccccaactacgacctggtggatggcgaatgtgttgaacccgtggatccatgcttcagagccaattgcgagtatcagtgtcagcctctcaatcagacaagctatctgtgtgtgtgtgccgagggatttgccccgatcccacacgaaccgcacaggtgtcagatgttttgtaatcagacggcttgccccgccgattgtgatcccaacacccaggcaagctgcgaatgtcctgagggctatattctggacgatggcttcatatgcacggatattgatgagtgtgagaacggggggttctgttccggagtgtgccacaacctacctggaactttcgagtgcatatgcggcccagattccgctcttgcgcgccatatcggcaccgattgcgactcaggaaaagtggacggtggggacagcggaagtggcgagcccccacccagcccaacgccagggagcactctgactccacctgccgtcggactggtgcattccggcctgcttattggcatatcaatcgcctcactctgcctggtagtggcattactggcactactctgccacctgaggaagaagcagggtgccgccagggccaaaatggagtacaaatgtgccgccccatccaaagaggtggtgctgcaacatgtgcggaccgaacgtaccccgcagcgactg

SEQ ID NO: 19884 - DNA, 1725 bp, synthetic construct
  misc_feature 1..1725: note = source = /note="Description of Artificial Sequence: Synthetic coding sequence"
  source 1..1725: mol_type = other DNA
atgctgggagtgctggtcctgggcgctctggcgctggcaggactcggcttcccggccccggcagagccgcagccgggagggagtcagtgcgtggaacatgattgctttgccttgtatccgggacccgctactttcctgaacgccagccagatctgtgatggcctcaggggacaccttatgacggtcaggagctccgtcgccgccgatgtgatttcgctcctccttaatggagatggaggtgtgggccggaggcggttgtggatcggactccagttgcctccgggctgcggagatcccaaacgcctgggcccgctgagaggcttccagtgggtgaccggggacaacaacaccagctactcgagatgggctcggctggatctgaacggtgcgccgctgtgcggaccgctgtgcgtcgcggtgtcagccgccgaggctaccgtgccgtctgagccaatctgggaagaacagcaatgtgaagtcaaagcggatggattcctgtgcgagttccacttcccggccacctgccggccattggcggtggagccgggggccgccgccgcagccgtttccattacttacggaaccccattcgccgcccgcggcgcggactttcaggccctgccggtgggcagctcagccgccgtggctccacttgggctgcagttgatgtgcacggcgccaccgggcgccgtgcagggacattgggcgcgcgaggccccaggagcctgggactgttccgtggagaacggtgggtgcgaacacgcatgcaatgcgattccgggagccccgagatgccagtgccccgcaggagctgcgctgcaagcagacggacgcagctgcaccgcctccgccacccagtcctgcaacgatctctgtgaacacttttgtgtaccgaacccggaccaaccaggcagctactcctgcatgtgtgaaaccggataccgcctggcggctgaccaacacagatgcgaggacgtggacgactgtatcctggagccgtctccgtgccctcagaggtgcgtcaacactcagggaggcttcgagtgccactgctacccaaattacgacttggtggatggagaatgtgttgagcctgttgacccgtgcttcagagcgaactgcgaatatcagtgccagcctctcaatcagacttcctacctctgcgtgtgcgctgaaggtttcgcgcctattcctcacgaaccacacaggtgccaaatgttctgcaaccagaccgcctgcccagctgactgcgatcccaatactcaggcgtcgtgcgaatgcccggaaggctacatcttggacgatggtttcatctgtaccgacatcgatgagtgcgagaatggcggattctgctcaggagtgtgccataatctcccaggaactttcgagtgcatctgcggacccgacagcgctctcgcccggcacatcggaaccgactgtgattccggcaaggtggatggcggagactccggcagcggcgagccgccgccgtcaccgactccggggtcaactctgacgccgccagccgtggggcttgtgcattccggactgctgatcggaattagcatcgcttccttgtgtctcgtggtggcgcttctggctctgctgtgccatctgcgcaagaagcagggcgccgcaagagccaaaatggaatacaagtgtgccgccccatccaaagaggtggtcctgcaacacgtccgcaccgaaagaaccccacagcgcttg

SEQ ID NO: 19885 - DNA, 1725 bp, synthetic construct
  misc_feature 1..1725: note = source = /note="Description of Artificial Sequence: Synthetic coding sequence"
  source 1..1725: mol_type = other DNA
atgctgggagtgctggtgttaggcgcactagcccttgccgggctcggcttccccgcccctgccgaacctcagccaggtggatcacagtgcgtggagcacgactgctttgcactctatccaggccctgctacgttcttgaatgcatctcagatttgtgacgggctcagaggacacctgatgacagtccgttcgtccgtagcggccgacgtgatctccttgcttttgaatggagatgggggagtgggtcgccgaaggctgtggatcggcctgcagcttcctcctgggtgtggagatcctaagagattgggtcccctgcggggctttcagtgggtgaccggagataacaatacaagctactctcggtgggcaagactggatctgaatggagcccccttgtgcgggcctctctgcgtcgccgtgtctgcagcagaggcgaccgtaccatccgaacctatttgggaggagcagcagtgcgaggtgaaagccgacgggtttctgtgcgaattccatttccccgctacttgcagacccctggcggtggaaccaggagctgcagcagccgccgtcagcattacctatggcactccttttgcagccagaggggccgatttccaggctctgccggtgggttcttccgcagctgtggctccgttggggctccagctgatgtgcaccgcacctcccggggctgtccagggacactgggcccgcgaagcccctggagcctgggattgctctgtggagaacgggggttgtgaacatgcctgtaacgcgatccctggagccccacgctgtcagtgtccagcgggtgcggctctgcaggccgacggacgtagctgcaccgcaagcgccacccagagttgcaacgacctgtgcgaacatttttgcgttccgaatcctgaccagcccgggtcttattcgtgcatgtgcgagaccggctatcggcttgctgccgaccaacaccgctgcgaggatgtggacgactgtatccttgaaccctctccatgcccccagcgatgtgtgaatactcaaggtggatttgaatgccattgttatcccaattatgacctggtggatggagagtgtgtggagcccgttgatccttgcttccgggccaattgtgagtatcagtgccagccattgaatcagacgtcatacctttgtgtctgtgccgaaggctttgctcccatcccacatgagccacatagatgtcagatgttttgcaatcagaccgcctgtcctgcggattgtgaccctaatacacaagcctcgtgtgagtgccctgagggttatatacttgacgacggcttcatctgcacagacatcgacgagtgcgagaacgggggcttttgttcgggtgtgtgccacaatctgccggggacatttgagtgtatctgtggccccgacagcgcgctcgcgcggcacattggtacagattgtgattctggcaaagtcgatggtggagatagtggctccggcgagccccctccaagccccacacccgggtccacgctcacgcccccggccgtgggactagtccactctggactgcttattggcatctcgattgcgagcctgtgtctggtagtagcccttttggccctactttgccatctccggaagaaacagggcgccgcgcgggcaaagatggaatacaagtgcgccgcacctagcaaggaagtggtcctgcagcacgtgcggactgaacgaacacctcagcgcctg

SEQ ID NO: 19886 - DNA, 1725 bp, synthetic construct
  misc_feature 1..1725: note = source = /note="Description of Artificial Sequence: Synthetic coding sequence"
  source 1..1725: mol_type = other DNA
atgcttggagtccttgtgcttggagcgctggcactcgcgggtctggggttccctgcaccagcggaaccacagcctggaggttcccaatgcgtggagcacgattgcttcgcgctctacccggggccagcgaccttccttaacgcatctcaaatctgtgacggtctgagaggccatcttatgactgtccgatcatcggttgcagccgatgtgatttcgctcctgcttaacggtgacggtggtgttggacgcaggcgcctttggatcggactgcaactgccaccgggatgcggtgatccaaagcgcttgggacctctgagaggatttcagtgggtgactggcgataacaacacctcctatagcagatgggcacgtctggaccttaatggagcgcctctgtgtggacctctgtgtgtggcagtgtcggccgcagaggcaactgtcccctccgaacccatttgggaagaacaacagtgtgaggtcaaggcagatggatttctgtgcgaattccatttcccagcaacttgccggcctctcgcagtggagcctggagcagccgcagcagcagtgtctattacgtacggaaccccttttgcagcccgaggtgcggattttcaggcactcccggtgggatcttccgcagcagtcgccccattgggtttgcagctgatgtgtactgcaccacccggggcagtgcaaggtcattgggcaagagaggcaccaggcgcttgggattgttcggtggagaacgggggttgtgaacatgcatgtaacgcaatccctggcgcacctcgatgccaatgtccagccggggcagcgttgcaggcagatggtaggtcatgtactgcaagcgcaacccagtcctgtaatgatctttgtgaacacttttgcgtgcccaaccctgatcaaccgggttcatactcctgcatgtgtgagactggataccggttggcagcagatcagcacagatgtgaggatgtcgacgactgtatcctggaaccctcgccatgtccccagcggtgcgtgaatactcaaggtggatttgaatgtcattgttacccaaattacgatcttgtggatggagaatgtgtcgaaccagtggatccatgtttccgcgcgaattgcgagtaccagtgtcaacctcttaatcagacttcgtacctttgtgtatgtgcggaggggtttgctccaattccgcacgaacctcatcgctgtcagatgttttgtaaccagaccgcatgccccgccgattgtgatccaaacacccaagcatcctgtgagtgcccagagggatacatcctggacgatggattcatctgtacggacatagacgaatgtgaaaacggaggtttctgtagcggcgtgtgccataaccttccaggaacctttgagtgtatttgcggtcccgattctgcgctggcccgccatatcggcaccgactgtgattcgggaaaagtggatgggggtgatagcggcagcggcgaaccccctccatcgccaacccccggatcaacgcttaccccacccgcggtgggactcgtccattcgggacttctcattgggattagcattgcgagcctgtgcctggtggtggcactgcttgcattgctttgccatctgcgtaagaaacaaggcgcagcaagggcaaagatggaatacaagtgtgcagcgccaagcaaggaagtcgttctgcagcatgtgcgcaccgaacgtaccccacaaaggctc

SEQ ID NO: 19887 - DNA, 1725 bp, synthetic construct
  misc_feature 1..1725: note = source = /note="Description of Artificial Sequence: Synthetic coding sequence"
  source 1..1725: mol_type = other DNA
atgcttggggttcttgttctcggcgccttggcacttgccggccttggatttcctgccccagccgagccccagcctggaggcagtcagtgcgttgagcacgattgttttgctctttatccgggcccagcaacctttttgaatgcatctcagatttgcgatggtctgcggggtcatctgatgactgtcaggagtagcgtagcagccgacgtgatcagcctcttgctcaacggagacggcggcgttgggcgcagacgcctttggataggccttcaactgcccccaggctgtggcgacccaaaaagactgggtcccttgagggggttccaatgggttactggagataacaacacttcttactcacggtgggcgaggctcgatttgaacggggctcccttgtgcggaccgctttgcgtggctgtttccgcggctgaggctactgtaccgagcgaacccatatgggaggaacaacagtgtgaagtgaaggctgacggcttcttgtgtgagttccacttcccagcgacttgtcgcccactggccgtggagcccggggccgcagctgctgcggtaagtataacatatggcactccgtttgccgctcggggcgctgacttccaggccttgcctgtcggctctagcgccgccgtagcacccctggggctgcagctgatgtgcacagcaccaccaggcgctgtgcagggtcattgggctcgcgaggcacctggtgcctgggattgtagtgtggagaacgggggctgtgagcacgcttgcaatgccatacctggcgctccgcggtgccagtgccctgctggggcagccctccaggccgacggtcggtcttgtactgcctctgccactcagagctgcaatgacctttgcgaacatttttgtgttccaaaccctgatcagccaggcagttacagctgtatgtgcgaaaccggatatagactggctgctgatcaacaccgctgcgaggatgtcgacgactgtattctcgagccctcaccttgtccacagagatgtgtcaacacacaaggaggctttgaatgccattgctaccctaattacgacctggtggatggtgagtgcgtggaaccagtagacccatgcttccgcgcgaattgcgagtaccaatgtcagcctctcaaccagacatcatacctttgcgtgtgcgctgaaggtttcgcgcctattcctcatgaaccccacaggtgccagatgttttgtaaccagacagcctgccctgccgattgcgacccgaacacccaggcttcttgcgagtgccccgaaggatacattcttgatgatggctttatttgcacagacatcgatgaatgcgaaaacggaggcttttgtagcggggtatgtcacaatttgccaggcactttcgaatgcatttgcggtcccgattcagcgctcgcacgccatataggcaccgactgtgatagtggaaaggtagacggcggggactctggatccggcgaacctcctcccagccccactcccggcagtacgctcaccccccccgcggtgggccttgtacacagcgggctgctgattgggattagtatagcatccctctgtttggtcgtggccctgctggccctcctctgccacctccgcaaaaagcagggcgccgcacgggctaagatggaatataagtgcgccgctccaagcaaggaagtagtgctgcagcatgtcagaactgagcggaccccccagagactg

SEQ ID NO: 19888 - DNA, 1725 bp, synthetic construct
  misc_feature 1..1725: note = source = /note="Description of Artificial Sequence: Synthetic coding sequence"
  source 1..1725: mol_type = other DNA
atgctcggagtgcttgtgctcggagctctggcactcgccggacttggctttcctgcacctgcagaaccccagcccggaggctcgcagtgtgtcgagcatgattgttttgccctgtacccgggtcccgcaactttcctgaacgcatcccaaatatgtgatggcctcagaggtcatctgatgactgtccgcagctcagtggctgcggatgtcatatccctgcttcttaacggcgatggaggggtgggtcggcggcgcctttggatcgggctgcagcttccacctggatgcggtgatcctaagcggcttggacccctgaggggatttcagtgggtcaccggggataacaataccagctattctcgttgggcccgtctggacctcaatggagcacctctgtgtggtcctctgtgtgtggcggtgtccgccgcggaagcaaccgtgccgtcagagcccatttgggaggaacaacaatgtgaagtcaaagcggacggttttctttgtgagtttcattttccagcgacctgccgccccttggcagtcgaacccggtgccgccgccgctgcagtctcgatcacttacggcaccccttttgcggcccgtggagccgacttccaggcactccctgttgggagctcggccgcagtggcacctctgggtttgcagctcatgtgtacggcacctcctggggcggttcagggacactgggcacgcgaagcgcctggagcctgggattgttcggtggagaacggaggttgtgaacatgcttgtaatgcaatcccaggggcacctagatgccaatgtccagcaggtgccgccctgcaggcagatggcagatcttgtaccgcttcagcaacccaatcatgtaacgatctctgtgaacatttttgtgtacctaacccagaccaaccaggttcctactcgtgtatgtgcgaaaccgggtaccggcttgcggcagatcaacataggtgcgaagatgtggacgattgtatcctggaaccttcgccttgtccccaacgatgtgtgaatacccagggaggtttcgaatgtcactgctaccctaattacgacttggtggatggagaatgcgtggaaccggtggatccttgttttagagctaattgtgaataccaatgtcaaccactgaatcaaacctcgtacctttgtgtgtgcgcagaaggttttgcaccaatccctcacgaaccacacagatgccagatgttctgtaaccagaccgcctgccccgccgattgtgatcctaatacgcaagcatcctgtgaatgcccagaaggttacatacttgatgacgggttcatttgtactgatatcgatgagtgtgaaaatggaggattttgcagcggagtgtgtcacaatttgccgggtacttttgagtgtatatgcggtccagattccgcacttgcaagacacattgggactgattgtgattccggcaaagtggatggaggcgattcgggttccggagagccccctccctcgccgactcccggatcgactttgacccctccagccgtgggactggtccatagcggactcttgattgggatctcgattgcgtcgctttgtcttgttgtggccctgctggcactgctctgtcatcttcggaaaaagcagggagcagctcgagccaagatggaatacaagtgtgccgcaccttcgaaggaggtggtgctccaacacgtgagaaccgagagaactccccaacggctg

SEQ ID NO: 19889 - DNA, 1725 bp, synthetic construct
  misc_feature 1..1725: note = source = /note="Description of Artificial Sequence: Synthetic coding sequence"
  source 1..1725: mol_type = other DNA
atgctgggagtgctggtcctgggcgcactcgcgctggctggattgggcttccctgcaccagcagagccgcaaccgggaggatcgcaatgcgtggagcacgactgctttgcactgtacccaggcccagccactttcctgaacgcctcacaaatctgcgacgggctgagaggccacttgatgaccgttcgcagctctgtggccgcagatgtcatctcactcttgctcaatggtgatggcggagtgggaagaaggcgcctgtggataggcctccagctccccccgggatgcggagatcctaaacggttgggcccgctgcggggtttccaatgggtcactggagacaataacacctcgtactcgaggtgggcccggctcgatctcaacggagccccactctgcggaccgctgtgcgtcgccgttagcgccgctgaagcgacggtcccgagcgagcctatctgggaagagcaacagtgcgaagtgaaggccgatggattcttgtgtgagttccactttccggccacctgccgcccgttggcagtggaaccaggagccgctgccgccgccgtgagcataacttacggaactccattcgcagcgcggggagccgacttccaagccttgccggtgggttcatccgctgctgtcgccccactcggactccaactcatgtgcacggcgccaccaggtgcggtgcaggggcactgggcgagagaagcgcccggggcttgggactgctcggtggaaaatggaggttgcgaacatgcgtgtaatgcgatccctggggctccccgctgtcagtgtcctgcgggagcagcgctccaggcggacggaagatcctgcactgcctctgcgactcagtcctgcaatgacctgtgcgagcacttttgtgtgcctaacccagaccagccaggttcatactcatgcatgtgcgagactggataccgtttggccgcggaccagcatcgctgtgaggacgtggacgactgcattctggaaccatcgccttgcccgcagcggtgcgtcaatactcagggaggctttgaatgtcactgctaccccaactatgatcttgtcgacggggaatgcgtggaacccgtcgacccgtgtttccgggccaactgtgaatatcagtgccagcctttgaaccagacctcgtacctctgcgtgtgcgcggagggattcgccccgatcccgcacgaaccgcatagatgccaaatgttctgtaatcagactgcgtgcccggccgactgcgacccgaatacccaagccagctgcgaatgcccggaaggatacatcctggacgacggcttcatctgcaccgacatcgacgaatgcgaaaacggaggattctgcagcggggtttgccataacctgcccggcaccttcgaatgtatttgtggacctgactccgccttggccagacatatcggaaccgactgtgattccggtaaagtcgacggcggagacagcggaagcggagagccgccgccatcccctacccccggctcgaccctgacccctccagcagtcgggctcgtgcattccgggcttctgatcggcatcagcatcgcatccctttgtctcgtcgtcgctcttctggccctcctgtgtcacctgcggaaaaagcagggcgccgccagagctaagatggagtacaagtgcgcagcgccatccaaagaagtggtgttgcagcatgtccggaccgagcggaccccgcagcgcttg

SEQ ID NO: 19890 - DNA, 1725 bp, synthetic construct
  misc_feature 1..1725: note = source = /note="Description of Artificial Sequence: Synthetic coding sequence"
  source 1..1725: mol_type = other DNA
atgctgggagtgctggtgctgggagccttggcgctggccggtcttggcttccccgctccggcagagccgcaaccaggaggaagccaatgtgtggaacacgactgctttgcgctgtacccaggaccggccacctttctcaacgcctcccaaatctgcgatggtctgcgcgggcacctgatgacggtgcggtcgtcagtcgcagcggatgttatttccctgctgctcaatggtgatggaggagtcggacggcgcagactgtggatcggacttcagctgcccccgggatgcggcgacccaaagagattgggaccgctccgcggcttccagtgggtgactggagataacaacacttcttactcgaggtgggcccggctggacctgaatggagcgccgctgtgcggtcccctgtgtgtggccgtgtccgcggccgaggctactgtgccatcggaaccaatctgggaagagcagcagtgcgaagtcaaggcggacggcttcctgtgcgagttccacttcccggcaacctgtagacccctcgcagtcgagccgggagctgcagcagcagcggtgagcattacctacggcacccccttcgctgcgagaggagcggactttcaagcgctccctgtgggctcgagcgctgcagtcgcacctctgggccttcagctcatgtgcaccgcgcctcccggggccgtgcaagggcactgggccagggaggccccgggagcttgggattgctcagtcgagaacggaggatgtgaacatgcgtgcaatgcaatcccgggtgccccacgctgccagtgcccggcaggagccgcccttcaggcggacggaagatcgtgtaccgctagcgccacgcagagctgcaacgacctgtgcgagcacttctgcgtgccaaatccggatcaaccagggagctactcatgtatgtgtgaaacggggtacaggctggccgcagatcagcaccgctgcgaagacgtcgatgactgcattctggagccttccccgtgcccccagcggtgcgtgaacactcagggaggtttcgagtgccactgctacccgaactacgatctcgtggatggagaatgcgtggagccggtggacccttgttttagagcgaattgtgaatatcagtgtcagccccttaatcaaacttcctacctgtgtgtgtgcgcagagggtttcgccccgatcccacacgaaccgcacagatgtcagatgttctgcaaccaaactgcttgccctgccgactgcgacccaaacactcaagcatcctgtgagtgcccagaaggatacattctcgatgacggctttatctgcacggacatcgacgagtgtgagaatggagggttctgtagcggcgtctgtcacaacctgccgggaaccttcgaatgcatctgcggaccggactccgcgcttgcccgccacattgggactgactgcgattcgggaaaagtagacgggggtgactcaggctcgggagagccgccaccgtcgccaaccccgggatcaactttgactccccccgccgtcggcctggtgcacagcggactgcttattggaatctcaatcgcatcgctgtgccttgtggtggccctccttgctctgctgtgccaccttagaaagaaacagggcgcagctcgcgccaaaatggaatacaagtgcgctgccccaagcaaggaggtggtgctccagcacgttaggactgagaggaccccgcagcggctg

SEQ ID NO: 19891 - DNA, 1725 bp, synthetic construct
  misc_feature 1..1725: note = source = /note="Description of Artificial Sequence: Synthetic coding sequence"
  source 1..1725: mol_type = other DNA
atgctcggagttttggtcttaggagccctagccctcgcaggtctgggtttccctgctccggcagaaccccagcctggggggagccagtgtgtcgagcacgactgcttcgcgctgtatcccgggccagcaacattcctcaacgcgtcccagatttgtgacggcctccggggacaccttatgactgtccgctcttcagttgccgccgacgtgatctctctcctcttaaatggcgatgggggcgtgggccggcggagactgtggattggcctgcagctgccaccaggatgtggcgatcctaaacgtttaggaccactcagaggattccaatgggtgaccggggataataatacttcgtactctcgctgggctcgcctggatctgaacggtgcacccctgtgcgggcctctgtgtgtggccgtctccgcagcagaagccactgtgccaagcgagccgatttgggaagaacaacagtgcgaagtcaaagccgatgggttcctgtgtgaattccattttccagccacatgcagaccactggccgtggagccaggcgccgcagctgcggccgtctccatcacatacgggaccccctttgccgcccggggcgctgacttccaggcattacccgtcgggtctagtgccgcggtggcgccgctggggttgcagttaatgtgtacagcaccccctggcgcagttcagggacattgggccagggaggcaccaggcgcctgggattgtagcgtcgagaacggaggctgcgaacacgcttgtaatgcaattccaggtgccccacgttgtcagtgccccgctggggccgccctgcaggcggatggcaggtcttgcacggcaagtgcgacacagtcatgcaatgatttgtgcgagcatttttgcgttccaaacccagatcagccggggagctacagctgcatgtgtgagaccggttaccgactggcggccgaccagcacagatgcgaggatgttgacgactgtatcctagagccaagcccctgcccgcagcggtgcgtgaacacacaggggggcttcgagtgccactgttaccccaactacgatctcgtcgatggggaatgcgtcgagcccgtcgacccatgcttccgcgcaaactgcgaatatcagtgccaaccattaaaccagacttcctacctctgtgtctgcgccgaaggcttcgcgccaattccccatgaaccccacagatgccaaatgttctgcaaccaaacagcctgtcctgctgattgcgatccgaatacacaggcttcctgtgagtgtcccgaagggtacatcctcgacgacggctttatatgcactgatatcgacgaatgcgaaaacgggggattctgtagcggagtctgccacaatctccccgggacgtttgagtgcatatgtggtcctgactctgccctggcccggcatataggcaccgactgtgactccggcaaggtcgacgggggcgacagcgggagcggtgagccaccacccagccccaccccaggctctaccctcacgcctcccgcggtaggactggtccactccggtctactcatcggcatctcaattgcttccctctgcttagtagttgctctgctcgctctgctgtgccacctgagaaaaaagcagggcgctgccagggccaagatggagtacaagtgcgcagcaccgtctaaagaagttgtgctccaacatgtgcggacggagcggacaccccagcggctg

SEQ ID NO: 19892 - DNA, 1725 bp, synthetic construct
  misc_feature 1..1725: note = source = /note="Description of Artificial Sequence: Synthetic coding sequence"
  source 1..1725: mol_type = other DNA
atgcttggagtgctggtgcttggtgcactggctctggccgggctcggatttccagcacctgcggaacctcaaccaggtggatcgcagtgcgtcgaacatgattgttttgcgctttacccaggccctgcaactttcttgaatgcatcccaaatctgtgacgggctgagaggacatttgatgacggtgcggtcctcggtggcagcagacgtgatatcgcttctcctcaacggtgatggaggtgttggccgacgccgcctgtggatcggacttcagctcccgccagggtgtggtgatcccaaacgcctgggacctctgagaggattccagtgggtgaccggtgacaataacacgagctattcaagatgggcacgtctggatttgaatggagccccactttgtggacccctctgtgtcgcagtgtccgcggcagaagccactgtgccttcggagccaatctgggaggaacagcagtgcgaggtcaaggctgacggattcctttgtgaattccacttccctgccacctgtcggccccttgccgttgagccaggagcagcagcggcagcagtgagcattacttacggaacccctttcgctgcaagaggcgccgactttcaagcactcccggtgggctcctccgctgccgtggcacctcttggactccagcttatgtgcaccgcacctccaggggctgttcagggacattgggcaagggaggcaccgggagcgtgggattgtagcgtggaaaacggcggatgtgagcacgcatgtaatgcaatccccggcgcaccgaggtgtcaatgtcccgcaggggcagcacttcaagcagacggtcggagctgtactgcctccgctactcagtcatgtaatgatctgtgcgagcacttctgcgtcccaaaccccgatcaaccaggatcatattcatgcatgtgtgagactggatatagacttgcagcggatcagcataggtgcgaggacgtcgatgattgcatacttgaaccttcaccatgtcctcagcgttgtgtcaacactcagggcggtttcgagtgtcattgttacccaaactacgatcttgtggacggagagtgtgttgagcctgtagacccttgttttcgcgcgaactgtgagtaccaatgtcaacctctgaaccaaacctcctacctctgcgtgtgtgcagaagggtttgcgccgattcctcatgagccccatcgctgtcaaatgttttgtaaccaaaccgcttgtcctgcagattgtgatccaaacacccaagcctcatgtgagtgtccagaaggatacattctcgatgacggttttatctgtactgacattgatgagtgcgaaaacggagggttttgttcgggggtgtgtcacaacctgcctggaacctttgagtgcatttgtggccccgattcagcacttgctcggcatatcggaactgactgtgattcgggtaaagtcgacgggggagatagcggaagcggagaaccgcctccatcgcctacccccgggagcaccttgactccacccgcagttggccttgtccattcaggccttttgattggaatttcaattgcatcgctgtgccttgtcgtggcgctgttggctttgctgtgccatctccgaaaaaagcaaggcgccgccagagcaaagatggagtacaagtgtgcggcaccctcgaaggaagtggtgcttcagcatgtcaggaccgagagaaccccgcagagactt

SEQ ID NO: 19893 - DNA, 1725 bp, synthetic construct
  misc_feature 1..1725: note = source = /note="Description of Artificial Sequence: Synthetic coding sequence"
  source 1..1725: mol_type = other DNA
atgctgggagtgctcgttctgggcgctttggctctggcaggtctgggctttccggctcccgccgagcctcagcctggcggatcacagtgtgtagagcatgactgttttgctctgtatcctggacccgctaccttcctgaatgcgagccagatatgtgatggacttagaggacatctcatgacggttcgctcttccgttgcagccgacgtgatctcactcctcttgaacggggacggcggtgtgggacggcgacgcctgtggattggtttgcagttgccacccggctgcggggatccgaaaaggttgggtccactcagagggttccagtgggtaactggtgacaacaatacttcatatagtcgatgggctcggcttgacctcaatggagcgcctctgtgcggacctctgtgtgtcgccgtgagcgctgccgaggcaactgtccctagcgagccaatctgggaggaacagcaatgcgaagtgaaggctgacggcttcctctgcgagttccactttcccgccacttgcaggcctttggccgttgaacccggtgctgcagcggcagctgtgagcatcacttatgggacaccattcgccgctcggggcgccgattttcaagcattgcccgttggcagcagcgcagcagtggcaccgttgggacttcagctgatgtgcactgcaccgcctggcgctgtgcagggccattgggcgcgcgaggcacccggtgcatgggattgttccgtggagaacggcggttgtgagcacgcctgtaacgcgatacccggtgcaccccgatgtcagtgccccgccggggccgctctccaagccgacggcagaagctgtactgcgagcgccacccaatcctgtaatgatctctgtgagcacttttgtgtgcccaatccagaccagcctggttcttatagttgtatgtgtgaaactgggtaccgattggcagcggatcagcacaggtgcgaggacgtcgacgattgtatcctggagcccagcccatgcccccagaggtgcgttaatactcagggtggctttgaatgtcactgctacccgaattacgatctcgtcgacggggagtgcgtagagccagtcgatccctgttttcgggctaactgcgaataccaatgccagcctctgaaccaaacctcatatttgtgcgtctgtgcagagggcttcgcgccgataccacacgagccgcacaggtgccagatgttctgtaatcagactgcgtgcccagctgactgtgatccaaacactcaggcctcatgtgagtgcccagagggatatatcctggatgacgggttcatttgcactgacattgatgagtgcgaaaacggcggcttctgcagcggggtgtgtcacaacctgcctgggacattcgagtgtatttgtgggcccgactctgccctcgcacggcacattgggacagactgcgactccggcaaagtggacgggggcgactcaggtagtggggaacccccacctagcccgacgccaggatcaaccctgactccgcctgcagtcggcctggtgcatagcggactcctcattggcatttctattgcgtccctgtgtctggtggtggccctgttggctctgctgtgtcacctgcggaagaagcagggagccgcgcgagccaagatggagtataaatgtgcagcccccagcaaggaggtggtcttgcagcatgtacgaacagagaggacaccccagcgcctg

SEQ ID NO: 19894 - DNA, 1725 bp, synthetic construct
  misc_feature 1..1725: note = source = /note="Description of Artificial Sequence: Synthetic coding sequence"
  source 1..1725: mol_type = other DNA
atgttgggagtgctggtattgggggcactggctctcgctggtctgggatttccggcaccggcggagccacagccgggaggatcccagtgcgtcgaacacgactgtttcgccctctatccgggcccggcaacctttctgaatgccagccagatctgtgacggcctccgggggcaccttatgaccgtcagatcgtcggtggcggcagatgttatctccctgcttctcaacggagatggaggagtcggaaggaggcgcctgtggatagggctccaactgcctccgggatgcggggaccccaagcggctgggcccgctgcggggattccagtgggtgactggtgataacaacacttcgtactccaggtgggcaaggctcgacctcaatggcgcgccgctttgtggaccgctgtgcgtggcggtttccgccgcggaagcaaccgtgccatccgaaccaatttgggaggagcagcaatgcgaggtgaaggcagacggcttcctgtgtgaattccactttccagccacttgccgacctttggccgttgaacctggtgccgctgccgcagcggtcagtatcacctacggaaccccatttgctgctcgaggagcggacttccaagcgctgccggtggggagctcggctgctgtagcacctctgggtctgcagttgatgtgtacggcaccccctggggccgtgcagggccattgggcccgcgaagctccgggggcgtgggactgctcggtggaaaatggcggttgcgagcatgcatgcaatgcgatcccaggagcgcctcgctgtcagtgtccagcaggagcagcgcttcaggcagatgggcggagctgtaccgccagcgcaacccagtcgtgtaacgacctgtgcgaacatttctgtgtgcctaacccggatcaacccggctcctacagttgcatgtgcgaaaccggataccgcctggccgcagaccagcatcgctgcgaggacgtggacgattgcatcctcgaaccttcgccgtgcccgcagcggtgtgtcaatacccagggtgggttcgaatgccactgctacccaaactacgatctggtcgatggagaatgtgtcgaaccggtcgacccgtgcttccgcgccaactgcgaataccaatgccaaccgctgaaccagacctcatacttgtgcgtctgtgccgaaggattcgcaccgatcccccatgaaccacacagatgccaaatgttctgcaaccagactgcctgtccagcggactgcgaccccaatacgcaggcttcgtgtgagtgcccggaaggctacatcctggacgacggattcatttgcaccgacatcgacgagtgcgagaacggaggattctgcagcggcgtgtgtcacaatctgccaggaacgtttgagtgcatctgcggacccgactctgctctggcgaggcacattgggactgactgcgactccggcaaggtggacggaggggattcagggtccggagaaccgccgcccagccctaccccgggatccaccctgactccaccggcggtgggactggtgcattcagggctcctcattggaatctcgatcgcttccctgtgcttggtggtcgcgctgctcgccctgctgtgccacctgcgcaaaaagcaaggagctgcccgggccaaaatggagtacaagtgcgctgcaccctctaaggaggtcgtgctccagcacgtgcgcactgagagaactccgcaacggctc

SEQ ID NO: 19895 - DNA, 1725 bp, synthetic construct
  misc_feature 1..1725: note = source = /note="Description of Artificial Sequence: Synthetic coding sequence"
  source 1..1725: mol_type = other DNA
atgctgggggtcctggtccttggtgcactcgctcttgcaggactgggattccctgcacctgcagaaccacagcctggcgggtcccagtgtgtggaacatgactgctttgcactctatcccggtcctgctacttttctcaacgcaagccaaatttgcgatggactccggggacatctgatgaccgtccgatcatcggtggctgcggacgtgattagccttctcctgaacggagatggaggggtcggccggaggcggctgtggatcggtttgcagcttccacctggttgcggtgatcccaagcggcttggaccacttcgtggcttccaatgggtgaccggtgacaacaatacctcgtactctcgctgggcgaggcttgatctcaatggagcccctctgtgcgggcccctttgcgtcgcagtgtcagctgctgaggcgaccgtcccttcggaacccatatgggaagaacaacaatgtgaggtgaaggccgatggttttctgtgtgagtttcattttcctgcaacctgccgacctcttgctgtggaaccaggagcagccgccgcagcagtgagcatcacctacggaaccccttttgcagcacgaggtgcagactttcaagcgcttcccgtgggttcgagtgccgctgtggcaccgttgggcttgcaacttatgtgtaccgccccaccaggagcagtgcaaggacattgggcaagagaagccccaggtgcatgggattgttcagtggagaacggaggatgtgagcatgcttgtaacgcaatcccgggcgctcctcggtgtcaatgtccggcgggcgcagccctccaggcagatggtcgatcgtgtaccgcctcagcaactcaatcgtgcaacgatctttgcgaacacttctgcgtgccaaacccggatcagccaggatcgtacagctgtatgtgcgaaaccggatatcgtctggcagcagaccagcataggtgtgaggatgttgacgactgtatcctcgagccatccccttgtcctcaaagatgtgtgaacactcaaggcggatttgagtgtcattgttaccctaattacgatcttgttgatggcgaatgtgtggaaccagtcgatccatgttttcgagcgaactgcgagtaccagtgtcagccgctgaatcaaacgagctacctgtgcgtctgtgcagaaggattcgcccccattcctcatgagccgcaccggtgtcaaatgttctgcaatcaaactgcctgcccggcagattgtgatcccaacactcaagcatcctgtgaatgtcccgagggatatatcctggatgatggcttcatctgcactgacattgatgaatgtgaaaatgggggattctgttccggtgtgtgtcataacttgcctggaacgtttgaatgtatttgtggtccagactcggcacttgcaagacatatcggaactgactgtgatagcggcaaagtggacgggggagattccggatcgggagaacctcccccatcccctactccaggctctacccttactccgcctgcagtggggctggtccattctggactgctgataggtatttcgatcgcatctctctgtctggttgtggccctcctggcattgctgtgtcaccttagaaaaaagcaaggagccgcaagagcaaagatggaatacaagtgcgctgcgccttctaaggaagtcgtccttcagcatgtgcgcactgagcggacccctcagcggctc

SEQ ID NO: 19896 - DNA, 1725 bp, synthetic construct
  misc_feature 1..1725: note = source = /note="Description of Artificial Sequence: Synthetic coding sequence"
  source 1..1725: mol_type = other DNA
atgctcggtgtcttggtgcttggtgcactggcactcgcagggctgggattccccgctcccgccgagccacaacctggaggatcccaatgcgtggaacacgattgctttgcactttatcctggacccgcgacctttctcaatgccagccagatttgtgacggtcttagaggtcatctgatgaccgtgagatcgtcagtcgcggccgacgtcatttcgcttttgcttaacggtgatggtggagtcggacggcgcagactttggattggcttgcaactgcctccagggtgtggtgatcccaagagactgggacctctccgcggttttcaatgggtaactggtgataacaacacttcatactccagatgggcacgtcttgatctcaacggagcccctctgtgcggtcctttgtgtgttgcggtgtcagccgcggaggcaactgtcccgtccgaacctatttgggaggaacaacaatgcgaagtgaaggctgacgggtttctgtgcgaatttcatttccctgcgacttgcaggccgcttgccgtggaacctggagcagcggcagcggcggtgtcgattacctacggaacccctttcgccgcacgcggggctgacttccaagcacttcccgtgggtagctccgcggccgtcgcaccactggggctccagcttatgtgcaccgcgccacctggtgcagtgcaggggcattgggcacgcgaggcccccggtgcatgggattgctcagtggaaaacggaggttgcgaacatgcctgcaacgcgatcccgggcgcacccaggtgtcaatgtccagccggggcagcactccaggccgacggaagatcgtgcaccgcatcggccacgcaaagctgtaacgatctttgcgaacatttttgtgtgcctaaccctgatcaaccaggttcttactcctgtatgtgcgaaactggataccggctcgcagccgatcaacacagatgtgaagatgtggatgactgtatactcgaacccagcccatgtccacagcgttgcgtcaacacccaaggcggatttgagtgtcattgttaccctaactacgacctggtcgacggcgaatgtgtggagcccgtcgatccctgctttagagccaattgtgaataccagtgtcagccactgaatcagactagttacctgtgtgtgtgcgcagagggttttgcacctatcccacatgaaccccatcggtgccaaatgttctgtaaccagactgcatgtccagcagactgcgatcctaacactcaagctagctgtgagtgccctgaagggtacattctcgatgatggttttatctgtaccgacatcgatgaatgcgagaacggcggtttttgtagcggagtgtgccacaatttgccaggaaccttcgaatgtatttgtggacccgattccgctctggcccgacatatcggaaccgactgtgatagcggtaaggtggatggcggggactccggaagcggggaaccaccaccttcgccaaccccagggtcgacgttgactccaccagcggtgggacttgtgcattcagggcttcttattggtatttcgatcgccagcctctgcctggtcgtggcacttctggccttgctgtgtcatcttagaaagaagcaaggggcagcgagagcgaagatggaatacaagtgcgcagcaccatcgaaggaagtggtcctgcaacacgtgcgaaccgaaagaactccacagcgcctg

SEQ ID NO: 19897 - DNA, 1725 bp, synthetic construct
  misc_feature 1..1725: note = source = /note="Description of Artificial Sequence: Synthetic coding sequence"
  source 1..1725: mol_type = other DNA
atgctgggtgtgctcgtgctgggtgctctggccctggcgggcctcggattcccggctccggccgagccgcaaccgggcggctcccaatgcgtggagcatgactgtttcgcactgtacccaggccccgcgaccttcctcaatgcttcgcaaatctgtgacggactccggggacacctgatgactgtgagatcctcagtggccgccgacgtgatcagcctcctgctcaacggcgacggcggagtcggccggcggcggttgtggatcggcctgcaacttccaccgggatgcggcgatccgaaacgcctgggtccattgagaggtttccaatgggtgactggagacaacaatacgagctactcccggtgggccagactggacctgaatggcgcgcccctgtgcggaccgctgtgcgttgccgtatcggccgcagaggcgactgtcccatcagagcccatctgggaggagcagcaatgcgaagtgaaggcagatggatttctctgtgaattccacttcccagcaacctgcagaccgctggcagtggaaccgggggccgccgctgcagccgtgtcgattacgtacggaactccattcgcggccaggggcgccgatttccaggcacttcctgtgggtagctccgcggcggtggcaccgctcgggctgcagttgatgtgcactgccccgccaggagccgtgcaaggacactgggcgcgggaagcacctggtgcctgggactgctcggtcgaaaacggcggatgcgaacacgcgtgcaacgctatcccgggagctccacgctgccaatgcccggcgggggctgccctccaggctgatggcagatcctgcactgcatcggctactcagagctgcaacgacctgtgtgagcatttttgcgtgccgaatccagatcagcctggaagctactcatgtatgtgcgaaaccggctaccggttggcagccgaccaacaccggtgcgaggatgtggatgattgtatcctggaaccgtctccgtgccctcagcggtgtgtgaacacccagggaggattcgaatgccactgctatccgaactacgatctggtggacggtgagtgcgttgagccagtggacccctgctttcgcgcgaactgcgagtaccaatgccagcctctcaaccagacctcctacctctgtgtgtgcgcggagggatttgcacccatcccgcatgagccgcacaggtgccagatgttctgtaaccagactgcgtgtcctgcagactgtgatccgaatacccaggcatcctgtgaatgccctgagggatacatccttgacgatgggttcatttgtaccgacatagacgaatgcgaaaacggaggtttctgctcaggtgtgtgccataacctccctggaactttcgaatgcatctgcggtcctgatagcgcgctggcacgccacatcggcacggattgtgattcgggaaaagtggacgggggagactcgggctccggcgaaccgccgccaagcccgactccaggatcaactctgactccgccggcggtgggcctcgtgcattccgggctgctgatcggcatctccattgcctcgttgtgtctggtggtcgcgctgctggcgctgttgtgtcacctgaggaagaaacaaggagcggcacgtgcgaaaatggagtacaaatgcgccgcccctagcaaggaggttgtcctgcaacacgtgagaaccgagcggacgccacagcggctg

SEQ ID NO: 19898 - DNA, 1725 bp, synthetic construct
  misc_feature 1..1725: note = source = /note="Description of Artificial Sequence: Synthetic coding sequence"
  source 1..1725: mol_type = other DNA
atgctcggagttctcgtcctgggtgctctggcgctggctggcctcggatttcccgccccagcagaacctcagcccggaggatcacaatgcgtggaacatgattgctttgctttgtaccccggaccagctacctttctgaatgcttctcaaatctgcgatggcctgagaggacacttgatgacagttcgttctagcgttgcggcagacgtgataagcctccttcttaacggggatggaggcgtcggccgccgacggctgtggatcggacttcagttgccccccggatgcggcgaccctaagcggcttggccctctgagagggtttcagtgggtgacaggagataacaataccagttacagcagatgggccaggctcgacctcaatggtgcccccctgtgcgggccactttgcgtcgctgtgtctgcagcagaagctaccgtgccttccgaaccaatctgggaggagcaacagtgcgaggtaaaagctgacggtttcctgtgtgaattccacttccctgccacttgccgaccccttgcagtggagccaggcgctgcagccgctgcagtcagcatcacctatggcaccccattcgctgctaggggcgccgattttcaagctttgccggtcggcagctctgccgcagtcgctcctctgggactccaacttatgtgcaccgcgccacctggagccgtgcagggccattgggctcgggaagcaccaggcgcgtgggattgtagtgttgagaacggcggctgcgagcacgcatgcaatgcgatccctggcgcgcccagatgtcagtgtccagccggagcagcacttcaagctgatggcagaagttgcactgccagcgcaacacaatcttgcaatgacttgtgcgaacacttttgtgttccaaaccctgatcagcccgggtcttacagttgcatgtgcgagaccggatacaggttggccgccgaccagcataggtgtgaggacgtcgacgactgcatcctggaaccctctccatgcccacagagatgtgtgaacactcaaggcggatttgagtgtcattgctacccaaattatgatctcgttgacggcgagtgtgtggagccagtcgacccatgcttccgtgccaattgcgagtaccaatgccagcctctcaatcagacctcgtacctctgcgtttgtgcagagggcttcgctcctattccacacgagccacataggtgccagatgttctgcaaccagactgcttgccccgcagactgcgaccctaacacccaggcatcttgcgagtgccctgaaggatatattctagacgatggcttcatctgtacagacattgacgagtgtgaaaacggcgggttttgcagcggggtctgccacaacttgccaggaacattcgagtgcatctgtggacctgactccgctctggcgcgccacatcgggaccgattgcgactctggaaaagtggacggaggagattccggcagcggtgagcccccaccaagtccgaccccagggtctactctcaccccacccgccgttgggctggtacacagtggactgctgatcggaatatccatcgcctccctgtgtttggtagtcgctctcctcgcactgctttgccaccttagaaagaaacagggcgctgcacgtgctaaaatggagtataaatgtgcggccccctccaaggaggtggttcttcagcacgtcaggaccgagagaaccccgcagcgcctt

SEQ ID NO: 19899 - DNA, 1725 bp, synthetic construct
  misc_feature 1..1725: note = source = /note="Description of Artificial Sequence: Synthetic coding sequence"
  source 1..1725: mol_type = other DNA
atgctgggagtgcttgtgcttggagcgctggcccttgccggcctcggcttcccagccccagcggaaccacagccgggcggctcccagtgcgtggaacacgattgtttcgccctgtacccagggccggccaccttcctgaacgcctcccagatctgcgacgggctgcggggacacttgatgaccgtccgctcgtcggtggctgctgacgtgatctcattgctgttgaacggtgatgggggagtgggccgccggcgcttgtggatcggactgcaactcccacctggatgtggggatccaaaaagacttggaccactgcgcggtttccagtgggtcactggcgacaacaatacttcttactcgcgctgggcaagactcgatcttaatggagcgccgctctgcggtcctctctgtgtcgcagtgtctgcggctgaagccactgttccgtccgaacccatctgggaagaacagcaatgcgaggtgaaagccgacggctttttgtgcgagttccatttcccggcgacctgccgcccgctcgctgtcgagcctggagctgcagcggccgcggttagcatcacctacgggactcctttcgcagcccggggagccgattttcaagcacttccggtgggaagcagcgcagcagtggcccccctgggcctgcagctgatgtgtactgccccgccgggagctgtccagggacactgggccagagaagcgccaggagcttgggactgctccgtggaaaatggtggatgcgaacacgcgtgcaacgccatcccgggcgccccgaggtgccaatgtccggccggtgcagcactgcaagcagacggccgcagctgtactgcatccgccactcagtcatgcaatgacttgtgcgaacatttctgcgtccctaatcctgaccagccaggatcatactcatgcatgtgcgaaactggataccggctggcagccgaccagcatagatgcgaagatgtcgacgattgtatcctggaaccctccccctgcccccaacggtgtgtcaacacgcaaggtggatttgaatgccattgttaccccaactatgacttggtcgatggggagtgtgtggagccagtggatccgtgcttcagggccaactgcgaataccagtgccagcctctgaaccagactagctacctctgcgtgtgcgctgagggattcgctcccatcccacatgaaccacaccgatgccagatgttctgtaatcaaaccgcctgcccggcggattgtgacccgaacacgcaagcgtcttgcgaatgcccagaggggtacattctggacgacggatttatctgtacggatatcgacgagtgtgaaaacggaggattttgttccggcgtgtgccacaatctgcccgggacgtttgaatgcatttgcggtcctgattcggcactggcgcgacatatcggcactgattgcgactctgggaaggtggatggaggtgatagcgggagcggcgagccgcccccaagcccaaccccaggcagcactcttaccccgccggcggtcggactcgtccactcgggcctgctgatcgggatctcgattgcctcactgtgtctggtggtcgctctgctggcccttctctgccacctgcgtaagaagcaaggagccgcgcgggccaagatggaatacaaatgcgctgcaccgtcgaaggaggtcgtcctccaacatgtgcgcaccgagcggacgcctcagcgcctg

SEQ ID NO: 19900 - DNA, 1725 bp, synthetic construct
  misc_feature 1..1725: note = source = /note="Description of Artificial Sequence: Synthetic coding sequence"
  source 1..1725: mol_type = other DNA
atgctgggcgtgctcgtgctgggtgccctggcactggcggggctgggtttcccggcgccggccgaaccgcaacctggaggatcacagtgcgtcgaacacgactgtttcgcactgtaccctggcccagcgactttcctcaatgctagccaaatttgtgatggtttgcggggacacctgatgactgtccggtcgtccgtcgccgcggacgtaatcagcctgctcctgaacggagatgggggagtcggccggagaaggctctggatcgggctgcagctgcctccaggatgtggggaccccaagcggctgggtccactgcgcggtttccagtgggtgaccggagacaacaacacttcgtactccagatgggcccggttggacctgaacggcgctccactgtgtggaccactctgcgtggctgtgtcagccgctgaggcgaccgtcccgagcgagccgatctgggaggaacaacaatgtgaagtcaaggcagacggtttcttgtgcgaattccacttccccgccacgtgccgcccattggccgtggaaccgggagccgccgccgcagcagtgagcatcacctacggaacgccattcgcagccagaggcgctgatttccaagcattgccggtcggatcttccgccgcggtcgccccattgggcttgcaattgatgtgcactgcaccacccggagccgtccagggacattgggcgcgcgaggcacctggagcctgggactgttcggtcgagaacggaggctgcgaacacgcctgcaacgccattccgggagcaccaaggtgccagtgcccagcgggtgccgccctccaggcggatggccgttcctgtactgcctcagcgacccagtcatgcaacgatttgtgcgagcacttttgcgtgccgaatcctgatcaaccaggatcctacagctgcatgtgcgagactggatacagactggcggctgaccagcaccgctgcgaggatgtcgatgactgcatcctcgaaccatccccctgcccgcaaagatgcgttaatacccaaggcggcttcgaatgccactgctaccccaattacgatctcgtggatggcgagtgcgtggaacccgtggatccatgttttagagccaactgcgaataccagtgccagcctctgaatcagacctcgtatctgtgcgtgtgtgccgagggattcgctcccatcccacacgaaccgcatcgctgccaaatgttctgtaaccagaccgcctgtcctgccgattgcgacccgaacactcaggcgtcctgcgagtgccctgaaggatacattcttgacgacgggtttatctgcacggatatcgatgaatgcgaaaatggaggtttttgctcgggtgtgtgtcacaatctgccgggaacctttgaatgtatctgtgggccagatagcgcactcgcgcggcatatcgggaccgactgcgattccggtaaggttgatggcggagattccggatctggcgagccccctccgagcccaactccaggatcgactcttactccacctgccgtgggactcgtgcattcaggacttctcatcggcatcagcatcgcatcgttgtgtctggtggtggctctgctcgctttgttgtgccacttgcggaaaaagcaaggagccgcccgcgcaaaaatggagtacaaatgcgcggcgccaagcaaggaagtcgtcctgcagcatgtcaggactgagcgaaccccacagagactg

SEQ ID NO: 19901 - DNA, 1725 bp, synthetic construct
  misc_feature 1..1725: note = source = /note="Description of Artificial Sequence: Synthetic coding sequence"
  source 1..1725: mol_type = other DNA
atgctcggagtgcttgtgctgggagctctggctttggcaggacttggctttccagcaccagcagaaccacaacctggtggttcgcaatgcgtcgagcacgactgcttcgcactgtaccctggacctgccaccttcctcaacgccagccaaatctgtgacgggctgcgaggacatttgatgaccgtgagatccagcgtggccgcggatgtgatatcacttctcctgaacggggacggtggtgtcggaaggcgcagactttggattggactgcaactgcctccgggctgtggtgacccaaagaggctgggccctctgagaggattccagtgggtgaccggagacaacaatacttcgtactcgcgatgggcaagactggatctcaacggcgcacctctctgtggtcccctttgtgtggcagtgtcggcagcagaggccaccgtgccctcggagcccatatgggaagagcaacaatgtgaagtcaaggcagatggattcctgtgcgaattccatttccctgccacctgccgtccacttgccgtggaaccaggagccgcagcagcagctgtgtccattacctacggaaccccttttgccgcccggggagcggattttcaagccctgccagttggatccagcgcagcagtcgcacccctcggactgcagcttatgtgcactgcaccgcccggcgcagtccaaggtcattgggcaagagaggcaccaggcgcatgggactgcagcgtggaaaacggcggctgtgaacatgcgtgtaacgctattcctggcgcaccccgatgccaatgtccagcgggggccgctctgcaagcggatgggagaagctgtaccgcatccgctacccaatcatgtaacgatctttgtgaacatttttgcgtccccaaccccgaccaacccggtagctactcctgtatgtgcgaaacggggtaccgcctggcggcggaccagcacaggtgtgaagatgtggatgattgtatactcgaaccatcaccctgtccacaaaggtgtgtgaacacccagggcggtttcgaatgtcattgttaccctaattacgatcttgtggatggtgaatgcgtggaacccgtggacccttgtttccgggcaaactgtgaataccaatgtcaaccccttaatcagacctcgtatctttgtgtctgcgcagaaggatttgcacccattccacatgaacctcataggtgccaaatgttttgtaaccagactgcctgtccagcagattgtgacccaaacactcaagcatcgtgtgaatgcccagagggatacatcttggatgatggatttatctgcactgatatcgacgaatgcgaaaatggaggtttctgttcaggtgtttgccataatctgccgggtaccttcgagtgtatctgcgggcccgactcggcccttgctcggcatatcggaactgattgtgattccggcaaggtggatggaggtgacagcggctcaggagaaccacctccatcacccactcctggatcaacgcttacccctccagccgtcggtcttgtgcatagcgggctgctcattgggatctcaattgcatccctttgcctggtcgtggctctcctcgcactgctttgccatcttcgaaagaaacagggtgctgcaagagcaaagatggagtataagtgcgcagcgccttctaaggaggtggtgctccagcatgtcagaactgagcggacccctcagaggctg

SEQ ID NO: 19902 - DNA, 1725 bp, synthetic construct
  misc_feature 1..1725: note = source = /note="Description of Artificial Sequence: Synthetic coding sequence"
  source 1..1725: mol_type = other DNA
atgcttggagtgctggtgctgggtgcgctggcattggcagggcttggcttccccgcaccggccgagccccagcccggcggatcacagtgcgtcgaacacgattgctttgcgctttaccccggcccagcaacctttctcaacgcctcacagatatgtgatggactgagaggccatctcatgactgtgcggtcgtcggtggcagccgatgtcatttcgcttctcctcaatggtgatgggggagtgggtagacgacgactctggattggactgcaactgccgccaggttgcggtgacccaaagcgactgggacctctcagaggatttcagtgggtcactggtgacaacaatacgagttactccaggtgggccagactcgaccttaatggtgcacccctctgcggtccactttgtgtcgcagtgtccgcggcagaagcgactgtaccgtcggaacctatttgggaggaacaacagtgtgaagtgaaggcggacggattcctttgtgaattccattttccagcaacttgtagacccctggcagttgagcctggagcagcagcagcggctgtcagtattacttacggaaccccctttgccgcacgtggcgcagattttcaagcccttcctgtgggttcctctgctgcagtcgcacctctgggattgcagcttatgtgtaccgccccacctggagccgtgcagggacactgggcgagggaggcccctggtgcatgggattgctcggtggaaaacggcggttgtgaacacgcctgcaatgcaatacctggtgctcctaggtgtcaatgcccagctggagcagcccttcaagctgatggtagaagctgtacggcatctgctactcaatcctgtaacgatctttgtgaacatttctgtgtgccaaaccctgatcagccaggctcttattcctgtatgtgcgaaaccggatacagactggccgctgatcaacatcgatgcgaagatgtggacgattgtatcctcgaaccttccccttgtccacagagatgcgtgaacacgcagggaggatttgagtgccattgttacccgaattacgacctggtcgacggtgagtgtgtggagcccgtcgacccatgcttcagagcaaactgcgaataccagtgtcagccacttaaccaaacctcctacctgtgtgtctgtgcagaggggtttgcacctataccacatgagccgcatagatgccaaatgttctgcaaccagactgcatgtcctgccgactgcgatccgaacacccaggcctcatgcgaatgtcccgaaggatacattctggacgacggttttatctgcaccgacatcgatgaatgtgaaaatggggggttctgctcaggtgtgtgccataacctcccaggtactttcgagtgtatttgtggacccgattcggcactggctaggcatatcggaaccgattgtgattcgggtaaggtggatggaggagatagcggtagcggagaacctcccccaagcccaacccccggctcgacccttactcctcccgcggtgggtttggtgcactcaggcctgttgataggaatctccattgcgtcgttgtgtcttgtggtggccctccttgcgcttctgtgccacctgagaaaaaagcaaggcgcagcgcgagcaaagatggaatacaaatgtgcagcaccctcaaaggaggtggtgcttcagcacgtgcgaacggaacggactccacagcgtctg

SEQ ID NO: 19903 - DNA, 1725 bp, synthetic construct
  misc_feature 1..1725: note = source = /note="Description of Artificial Sequence: Synthetic coding sequence"
  source 1..1725: mol_type = other DNA
atgctcggggtgttggtgctgggcgcgttggcactcgctggccttggtttcccggcgccggcagagcctcagccggggggaagccagtgcgtggaacacgactgctttgccctgtatcctggtcctgctactttcctcaacgcgtcgcaaatctgtgacggccttcgcggacacctcatgacggtaaggagtagcgtggccgcggacgtgatctcgctgctgttgaacggcgacggcggagtgggccggagacggctgtggatcggcctgcagctgccaccgggttgcggtgatccgaaacggttgggaccactgcgtggattccagtgggtgactggggacaataacacgtcctactcacggtgggcccggctggatctgaacggggccccgctgtgcggaccgctgtgcgtcgctgtgagcgccgccgaagccacggtgccgtccgaaccgatttgggaagaacaacagtgcgaggtcaaggcagatggattcctctgcgaatttcactttcctgccacttgccggccgctggccgtcgaacctggagctgccgcagcagcggtttccatcacctacggaaccccgtttgccgcaaggggggcagatttccaagccctgccggtgggatcgagcgccgcagtggcacccctcgggctgcagcttatgtgcactgcaccccctggagcagttcagggacattgggctagagaggccccaggagcctgggattgctcggtcgagaacggtggctgcgaacatgcctgcaacgcgatccctggcgcaccacggtgccagtgtccggcgggagcggccctgcaggctgacggacgcagttgcacggcatcggccactcagtcgtgtaacgatctttgcgaacacttctgcgttccgaatccagatcaaccgggctcgtactcctgtatgtgcgagactggataccgactcgcagccgaccagcaccgatgcgaggacgttgacgattgcattctcgagccgtcaccgtgcccacagagatgtgtgaacacccaaggaggattcgaatgccactgctaccctaattacgatctcgtcgacggtgaatgtgtcgaaccggtggacccttgtttccgggcaaattgcgaataccaatgccagcccctgaaccagacgagctacctctgcgtgtgcgccgagggatttgcgccaattccacatgagccccatcggtgccaaatgttctgcaaccaaaccgcctgcccagctgactgcgaccctaatacccaagctagctgtgagtgtccagagggctacatcttggacgacgggttcatctgcaccgacatcgacgagtgcgagaacggaggattctgctccggtgtgtgccataacttgcccggtactttcgagtgcatctgcggcccggattcggcgctggcccgccatataggtacggattgtgacagcggaaaggtggacggaggagattcgggtagcggagaaccgccgccgtcgccaaccccgggatcgactctgacccctcccgctgtcggtcttgtgcactcgggcctgctgatcggaatctcaatcgcttccctctgtctcgtcgtggctcttctggcattgctgtgtcacctgcggaaaaagcagggagccgcccgagcgaagatggaatacaaatgcgctgcgccatccaaggaagtcgtgctccagcacgtgaggacggagcgcaccccacagcggttg

SEQ ID NO: 19904 - DNA, 1725 bp, synthetic construct
  misc_feature 1..1725: note = source = /note="Description of Artificial Sequence: Synthetic coding sequence"
  source 1..1725: mol_type = other DNA
atgttgggagttctggtgctgggagcccttgcactcgccgggctcggattcccagcccctgcagagccacaaccaggaggtagccaatgcgtggagcacgattgttttgcgctctaccccgggcctgcaacttttctgaacgcatcgcagatttgtgacggccttaggggacatcttatgactgttcgaagctccgtggcggcagatgtgatctcactgcttctgaatggtgatggaggagtcggtagacggcgcctgtggatcggattgcagctccccccagggtgcggggacccgaagagactcggtccacttcgtggatttcaatgggtgaccggtgacaacaatacctcctactccaggtgggcaagacttgacctgaacggagcccccctgtgtggtccactttgcgtggctgtctctgcagccgaagccaccgtgccctcagaaccaatatgggaggaacaacaatgcgaagtgaaagcagatggatttctttgcgaatttcatttccctgcgacctgtagacctctggcagtcgaaccaggggcagccgcagcagctgtgtcgatcacttacggtaccccttttgcagctagaggagccgactttcaagcgctgcctgtcggatcctccgccgcggtggcgcctcttggcttgcaactgatgtgcactgccccgcctggcgcagtgcaggggcattgggcacgggaggcacctggagcgtgggactgttcggtcgaaaacggtgggtgcgaacatgcttgtaacgcgatccctggtgcaccaagatgccagtgtccagcaggtgcagcattgcaggcagatggacgcagctgtaccgcgtcggcaactcaatcgtgtaatgacctttgtgaacatttctgcgtaccaaaccctgatcaaccaggatcgtactcctgtatgtgtgagactggataccgccttgcggcagatcagcatcgctgcgaggacgtggatgactgtattcttgaaccaagcccatgcccacagaggtgtgtgaatacgcagggaggattcgaatgccattgctaccctaactacgatctggtggacggggaatgtgtggaacctgtggatccttgttttcgcgcaaactgcgagtatcagtgtcaacctctgaatcagaccagctacttgtgtgtctgtgcagagggttttgcgccaattccacacgagcctcatagatgtcaaatgttttgcaaccaaaccgcatgtcccgccgactgtgatcccaacacccaagcctcctgtgaatgccctgaagggtacattctcgacgatggtttcatttgcactgatatcgatgaatgcgagaacggaggattctgttcaggtgtgtgtcataaccttcctggaaccttcgagtgcatctgcggcccagattccgccctcgcacgccacattggaactgattgcgattcgggaaaggtggatgggggtgattcgggatcaggtgaaccaccaccaagccctactcctggttccacccttacccctcctgcagtgggactggtgcatagcggccttttgatcggtatttcgattgcaagcctttgtttggtcgtggcgctcctggcactcctgtgccatctccgaaaaaagcaaggtgctgcacgcgccaagatggaatacaagtgtgcagcaccatctaaggaagtggtgctgcagcatgtccgcaccgagcgtactccccagcgcctt

SEQ ID NO: 19905 - DNA, 1725 bp, synthetic construct
  misc_feature 1..1725: note = source = /note="Description of Artificial Sequence: Synthetic coding sequence"
  source 1..1725: mol_type = other DNA
atgctcggagtgctggtgttgggcgcattggcgctggccggcttgggcttccctgccccagcagagccacagcctggggggtctcagtgcgtggagcacgactgcttcgcactttatccaggaccagccacattcctgaacgccagtcagatctgcgacggcctaagaggccacctgatgactgtccgctcttcggtcgccgcagatgttattagccttctcttaaatggggatggaggagtagggaggcggcgtctgtggatcggtctccagctgccacccgggtgcggcgaccctaaacggctgggccctttgcgcggattccagtgggtcaccggcgataataataccagttactctaggtgggctcggctggatcttaatggcgcaccactctgtggacctctttgtgttgctgtctcagctgcagaggccactgtaccatccgagcctatctgggaagagcagcagtgtgaggtaaaagctgatggattcctgtgtgagttccacttcccagcaacctgtcggccattagccgtcgaacctggcgcagccgccgcggccgtctccataacctacggtactccctttgccgccaggggagctgactttcaggcgcttcctgtaggatcatccgctgcagttgctcccctgggacttcagctgatgtgcactgctcctcccggggccgtgcaggggcattgggccagagaggcccccggagcttgggattgttcggttgaaaacggaggatgtgagcacgcctgcaatgctattcccggcgctccccgctgtcagtgccccgccggagcagcgctgcaggcagatggcaggagctgtaccgctagtgccacacagtcgtgcaatgacctatgtgaacatttctgtgtgcctaatcccgatcagccaggctcctatagctgcatgtgcgagaccggttacaggttagcggccgatcagcatagatgtgaagatgttgatgattgtatactcgagccctccccatgcccccaaagatgcgtgaacacacagggcgggttcgaatgtcattgctatccaaactatgacctcgtggatggagagtgcgtcgaaccagtggatccttgctttagggctaactgtgaatatcagtgtcagccgctgaaccagacttcatacctttgcgtgtgtgcagaggggtttgcccccatcccacacgagccccaccgctgccagatgttctgcaaccaaaccgcttgtcctgcagattgcgacccgaacacgcaggcttcttgtgagtgtccagaggggtatatacttgacgatggatttatatgcacggacattgacgaatgtgaaaatggcggtttctgttcgggggtgtgtcacaacctgccagggaccttcgagtgtatatgcggcccagactctgcactggccaggcacatagggacagactgtgattccggaaaggtcgatgggggagacagcggttctggtgagccaccaccctcccccaccccgggaagcactctcactccccctgctgttggtctagtgcatagtggattgctaataggaatatccatcgccagcctgtgcctggtggtggcactccttgcgctgctgtgccacctgcgcaagaaacaaggtgcagcccgggccaagatggagtataagtgcgcagcccctagcaaggaggtcgtactccagcacgtccggaccgagcgcacaccccaaagactt

SEQ ID NO: 19906 - DNA, 1725 bp, synthetic construct
  misc_feature 1..1725: note = source = /note="Description of Artificial Sequence: Synthetic coding sequence"
  source 1..1725: mol_type = other DNA
atgctgggagtgctggtcctcggtgcactggcactcgccggtctgggtttcccggctccagcagagccgcaaccagggggatcccagtgcgtggaacacgactgcttcgcgctgtatccagggcccgccaccttcctcaacgcctcacaaatttgcgatggactccggggacatctgatgaccgtgcgatcatccgtcgccgccgacgtgatcagcctgctcctcaacggagacggaggcgtgggccggcggcgcttgtggatcggactgcagctgccgcccggctgcggggacccgaagcgcctgggaccccttagaggattccagtgggtgactggagacaacaatacgtcctacagccggtgggccagactggacctgaacggagccccgctgtgtggcccgctgtgtgtcgcggtgtccgccgcagaagccaccgtgccaagcgagcccatctgggaagagcagcaatgtgaggtgaaggcggacggctttctgtgtgaattccatttccccgcaacttgtcgccccctcgcggtcgaaccaggcgcggccgccgcggccgtttccatcacttacggcaccccattcgcagcaagaggagcggactttcaagcgctgcccgtgggctcctcagcggcggtggccccccttgggctgcagctgatgtgcactgccccgccaggcgctgttcagggtcactgggccagagaagccccgggcgcttgggactgctcagtcgaaaacggaggatgcgagcatgcgtgtaatgctatcccaggagctccgcgatgtcaatgccctgccggggccgcgttgcaagccgacggcaggtcctgtacggcctccgccactcagagctgtaacgatctgtgcgagcatttttgtgtacctaaccctgatcagccggggagctactcctgtatgtgcgagactggataccgccttgctgcagatcaacaccggtgcgaagatgtcgacgactgcatcctggagccgtccccatgccctcaacgctgtgtgaacacccagggcggatttgagtgccactgttacccgaattacgatttggtggacggagaatgtgtggaaccggtcgatccatgctttcgcgccaattgcgaataccagtgccagccgctgaatcagacctcgtacctgtgtgtctgcgcggagggcttcgcccctatcccacatgagccgcaccgctgccagatgttctgtaaccagaccgcgtgcccagcagactgcgatccgaacacccaagcgagctgcgaatgtcctgaaggctacatcctggatgatggattcatctgcactgatatagatgagtgcgaaaacggtggattctgttccggagtgtgccacaatctgcccggcaccttcgagtgtatctgcggaccggatagcgcacttgcaaggcacatcggaactgactgcgacagcggcaaagtcgacggtggagatagcggctcgggagaacccccgccgtcaccgactccaggatcgactctgactcccccagctgtcggactggtgcatagcggcctgctgatcggcatctccatcgcgagcctgtgtctggtggtggctttgctcgctctgctgtgccatctgcggaagaagcagggagctgcacgcgccaaaatggaatacaaatgcgctgcgccgagcaaggaagtggtcctgcaacacgtgcgcactgagagaacgcctcaaagactg

SEQ ID NO: 19907 - DNA, 1725 bp, synthetic construct
  misc_feature 1..1725: note = source = /note="Description of Artificial Sequence: Synthetic coding sequence"
  source 1..1725: mol_type = other DNA
atgctgggtgtgttggtgctgggtgccctggcgctcgcaggactgggcttcccggcaccggctgagccccagccggggggctcgcagtgcgtcgagcatgactgctttgcgctttacccaggaccggcaacttttctcaacgccagccagatttgcgatggactccggggacacctgatgaccgtgagatcctcagtcgccgcagacgtgatcagcttgctcctcaatggagacggaggagtgggacgccggcgcctttggatcggtctgcaactcccaccggggtgcggcgacccaaaaaggctcgggcctttgcgcggatttcagtgggtgaccggagacaataacacgtcgtactcgcggtgggctaggctcgacctgaatggagccccgctgtgtggcccactctgcgtggctgtctccgcggccgaagcgaccgtcccgagcgaaccgatctgggaagagcagcagtgcgaggtgaaggccgacggcttcctgtgcgagtttcacttccccgcaacttgtcgcccgctcgcagttgagccgggagccgccgccgccgcggtgagcattacctatggaactccctttgccgcccgcggcgcggatttccaggcgctgccggtcggatcctccgcggcagtggcccctctcggcctgcagctgatgtgcaccgctccgcccggagctgtgcaggggcattgggcccgggaggccccgggggcgtgggactgctcagtcgaaaacggaggatgtgagcacgcatgcaatgcaattccaggcgctccacgctgccagtgccctgcgggtgcggcccttcaggctgatggacgatcgtgtaccgcaagcgcgactcaatcctgtaatgacctctgcgagcacttttgcgtgccgaacccggatcagccaggaagctactcgtgcatgtgcgagactggatacaggttggcagcggatcaacacagatgcgaggacgttgacgactgcatcctggagccttccccttgcccgcaaagatgtgtgaacacccaggggggcttcgaatgccactgctacccaaattacgacctcgtggacggcgaatgcgtggagccagtcgatccatgtttccgcgccaattgcgagtaccagtgccagccgctcaaccagacttcgtacctgtgcgtctgcgccgaaggtttcgcgccaatccctcacgaaccgcatcgatgccaaatgttctgcaaccagactgcgtgtccggcagattgcgaccctaatactcaggcctcgtgtgaatgtccggagggttatatcctcgatgacggattcatctgcacggacatcgacgagtgcgaaaacggcggattctgctccggagtctgtcacaacctgccgggaaccttcgaatgcatttgcggaccggatagcgcactggcccggcacattggaaccgactgcgacagcggcaaagtcgatggtggtgactcaggttcaggagagccgcctccgtcgccgaccccgggatcgaccctcactcccccggcggtgggtcttgtgcactccggcctgctgatcggcatttccatcgcctctctctgcctcgttgttgcgctgctcgcgttgctgtgccatctccgcaagaagcagggagctgcgcgggcgaaaatggaatacaagtgcgcggctccgtcaaaagaggtcgtgctccaacacgtgcgcacggaacgcaccccgcagcggctg

SEQ ID NO: 19908 - DNA, 1725 bp, synthetic construct
  misc_feature 1..1725: note = source = /note="Description of Artificial Sequence: Synthetic coding sequence"
  source 1..1725: mol_type = other DNA
atgctgggtgttcttgtactgggagcgttggcactcgctggcctgggtttccctgctcccgcagaaccacaacccggtggtagccagtgcgtagagcacgattgttttgctctgtatcccggacctgctaccttcttgaacgcttcccagatctgtgacggacttcgcggacatctcatgacggttcgcagctcagtcgcggctgacgttataagcctgctcctgaatggagacggcggagtcggtagaaggcgcctttggataggattgcagctgcctcctggttgtggcgacccgaagagactgggtcctcttaggggattccagtgggtcactggtgacaacaacacatcttacagtagatgggccaggttggacctcaatggagctcctctgtgtggtcccctgtgcgtggccgtctccgctgcggaggccaccgtgccctctgaacccatctgggaggagcagcagtgtgaggtaaaagcggatggtttcctgtgtgagttccattttcctgccacatgccgcccccttgcagttgagcccggagcagcagctgctgctgttagcatcacctacggaactccttttgcagccagaggcgccgacttccaggcgcttcccgtgggttccagtgctgcagttgctccgctcggactgcaactgatgtgtacggcaccgcctggagctgtacagggacattgggcgcgcgaggctcccggcgcttgggactgctctgtggagaacggtggctgcgagcacgcatgcaatgctattcccggagctccgaggtgccaatgccccgccggcgctgcacttcaggctgacggtaggagttgtaccgctagcgctacgcaatcttgtaatgacttgtgcgagcacttctgcgtacctaacccagatcaacccggatcctatagttgcatgtgtgagacgggatataggttggcagcagatcagcacaggtgcgaggacgttgacgactgcattcttgagccctctccttgcccacagagatgcgtgaatacgcagggaggcttcgaatgccattgctaccctaactacgaccttgtcgatggagagtgtgtggaaccagtggacccatgttttagagccaactgtgaataccaatgtcagcccctgaaccagacctcatacctgtgtgtttgcgcggagggattcgcgcccatcccacatgaaccccatagatgtcagatgttttgtaaccaaactgcctgccccgcagactgcgatcccaacactcaggcctcctgcgagtgccctgagggatatatcctcgacgatggctttatttgtacagatatcgacgagtgtgagaacggcggattctgctccggcgtgtgtcataacctgcccggcaccttcgagtgcatttgcggaccagactcagcactcgctaggcacatcggcacggactgcgacagcggcaaggtggatggtggcgactcaggttccggcgaacctcccccatccccgacccccggctcaactttgactccccccgcagtaggtttggtgcattccggattgttgattggcatctccattgctagcctgtgcttggtcgtcgcgctcctcgcactgctttgtcatctgcgcaagaagcagggcgctgccagggctaagatggagtataaatgtgccgctcccagtaaggaagtagtgctgcagcacgttaggaccgagcgcacccctcaacgcctg

SEQ ID NO: 19909 - DNA, 1725 bp, synthetic construct
  misc_feature 1..1725: note = source = /note="Description of Artificial Sequence: Synthetic coding sequence"
  source 1..1725: mol_type = other DNA
atgctcggggttctggtcctgggcgcgctggctctagcgggcttgggcttccccgctcccgctgagcctcagcctggcggaagccagtgtgtggaacacgactgttttgccctgtaccccggtccggcaacgtttctcaacgcttctcaaatttgtgacggcttgcggggccatctcatgacggtgcgctcgtccgtggcggcagacgtcattagcctgctgttaaacggggatggcggggtgggacggaggaggttatggatcgggctacagcttccaccgggatgcggggaccctaaaaggctcggacccctcagaggatttcaatgggtgacgggagacaacaacacctcctatagcaggtgggctcgcctggacttgaatggagcgcccctatgcggcccactgtgtgtggctgtatccgccgccgaggcaaccgtgccaagtgagccaatttgggaggagcaacaatgcgaagtgaaagcagatgggttcctttgcgagttccatttccctgcgacctgtcgtccacttgctgtcgagcccggtgctgccgcagccgcagtgagtattacatatggcactccattcgccgctagaggggccgacttccaagccttgccagtgggatcatctgctgccgtggccccactggggctacagttaatgtgtacagctccaccaggagcagtccagggccattgggctagagaagcaccaggagcttgggattgctctgtcgaaaacggaggctgcgaacacgcctgtaatgccatcccaggcgcccccaggtgccagtgccctgccggggctgccctacaggccgatggccgatcatgcactgccagtgcaacgcagtcatgcaacgacctctgtgagcatttttgcgtacccaacccagaccagcccgggtcctacagctgcatgtgcgaaactgggtacagactggccgccgatcagcatcggtgcgaggacgtggatgattgtatcctagaacccagtccttgtcctcagcgatgcgtgaatactcagggaggctttgaatgtcactgttaccctaactacgacttggtggatggtgaatgcgtggagccggttgatccttgctttcgcgccaattgcgaataccagtgccagcctctgaatcagacatcttacctttgtgtctgcgctgaaggattcgcgcctatcccccatgaaccacacagatgccagatgttctgcaaccagacggcctgccccgcggattgcgatcctaacacccaggctagctgtgagtgtccagaaggttatattttggacgacggctttatctgtacagatatcgacgagtgcgagaacggcggcttctgttctggcgtttgtcataaccttcccggaacgtttgagtgcatctgcggcccagatagcgcactggcccggcatatcggtaccgactgcgacagtggcaaagtagatggtggcgacagcggttccggagaacctcctccttctcccactcccgggtcaacactcacaccccctgccgtgggcttggtgcactcaggacttcttatcggtattagcatcgcaagcctgtgccttgttgtggccctccttgccctgctctgccaccttaggaagaagcagggggcagcccgtgccaaaatggagtacaaatgcgccgccccttctaaggaagtggtgcttcaacatgttcgaaccgagcgaactccccagcgtctc

SEQ ID NO: 19910 - DNA, 1725 bp, synthetic construct
  misc_feature 1..1725: note = source = /note="Description of Artificial Sequence: Synthetic coding sequence"
  source 1..1725: mol_type = other DNA
atgctgggtgtgctggtgctgggtgccttggccctcgcaggtcttggttttccggcccccgctgaaccccagcccggaggatctcagtgtgtcgaacacgactgctttgctttgtaccccgggccggccacgtttctaaacgcttctcaaatttgtgacggattgagggggcacctgatgacagtgcggtcatcggtggcagccgacgttataagtttactcctgaacggggatggtggcgtgggacgcaggagattgtggattgggttgcagcttccccctggctgtggcgaccccaagcggcttgggcctctccggggattccagtgggtcacaggggacaataacacttcatacagccgctgggctcgactggatcttaacggagcaccactgtgcgggccactctgcgtcgcagtgtctgctgccgaggctacagtgccgagtgagccaatctgggaagagcagcagtgtgaggtgaaagccgacggcttcctatgtgaatttcacttcccagctacatgtagaccacttgctgtggagcccggagccgcagcggcagccgtgtcaataacctacggtacacccttcgccgcaagaggcgccgattttcaggcgctgcccgtggggtccagcgccgccgttgctccgttaggcttgcagctcatgtgtacagcccccccgggcgctgttcagggtcattgggctcgagaagcacctggagcatgggactgcagtgtggaaaatggaggatgtgagcacgcttgcaatgcaatccctggggctccccgatgccagtgtccggccggcgccgcattgcaagcggatggaaggtcatgtactgcttccgcgacacagagctgcaatgatctctgcgagcatttctgcgtgccaaatcctgaccagccgggcagttattcttgtatgtgtgagaccggctaccgcctggctgcagatcagcaccgatgcgaggacgtggacgactgtatcttagaaccgtccccatgtccccagaggtgtgtcaacacacaaggagggttcgagtgtcattgttatccaaactacgacctggttgacggcgaatgtgtagagccggtagacccttgttttcgagctaactgtgaatatcagtgtcagccgttgaatcagacaagctatctctgcgtttgtgcagaaggcttcgcccccattccccacgaaccacaccgatgtcagatgttctgtaatcagactgcttgcccagccgactgtgatccaaacactcaagcctcctgtgaatgccccgagggctatatcctggacgacggattcatttgcaccgatatcgacgaatgcgagaatggcggtttttgctcgggggtgtgccacaatctgccagggacatttgagtgtatctgcggcccagattcagccctagcccggcacatcggcacagactgtgacagcggtaaggtcgacggaggggactccgggtccggtgagccgccgccatctcctactccaggatctacgcttacacccccagccgttggattagtgcacagcgggctgctgataggtatttccattgccagcttatgcctcgttgtggctctgctagcactcctgtgtcacctccggaagaagcaaggtgcggcccgcgctaaaatggagtataaatgcgccgctccgagtaaggaggtggtgctgcagcacgtgcggacagaacgaacgccacagaggttg

SEQ ID NO: 19911 - DNA, 1725 bp, synthetic construct
  misc_feature 1..1725: note = source = /note="Description of Artificial Sequence: Synthetic coding sequence"
  source 1..1725: mol_type = other DNA
atgttgggtgtgctcgtcctcggcgcgttggccctcgcgggactggggtttccagcaccggccgagccgcagccgggtggatcccagtgtgtcgagcatgactgcttcgcgctgtaccccggaccggccactttcttgaacgcctcacagatttgcgatgggctgaggggacatctcatgaccgtgagaagctcagtggcggccgacgtgatctccctcctgctcaacggagacggaggcgtgggaaggcgcagactctggatcgggcttcaactgccacctggatgtggcgatcctaagcgcctgggaccactccgtggatttcagtgggtcactggggataacaatacctcctattcgcgctgggccaggcttgacctcaatggggcccccctgtgcggaccactttgcgtcgctgtctcggctgccgaagccaccgtgccatcggagccgatttgggaagaacaacagtgcgaagtgaaagcggacggattcctgtgcgaattccattttccggcgacctgccggccgttggccgtggaacctggagccgccgccgcggccgtctctatcacctacggcacgccgttcgcggctagaggcgctgatttccaggccctgcctgtgggatcctccgctgctgtggcgccgctcggactccaactgatgtgcaccgcccctcctggcgccgtgcagggccactgggcaagagaggccccaggagcatgggactgctcagttgagaacggaggctgcgaacacgcttgcaatgcaatcccaggggcgccgcggtgccagtgtccggcgggtgctgccctgcaagccgacggacgctcttgtaccgcaagcgccacccagagctgcaacgatctgtgcgaacatttctgcgtgccaaacccagaccagccgggatcctactcgtgcatgtgtgaaactggataccgcctcgctgccgatcagcaccgctgtgaggatgtggacgactgcatccttgagccttcgccgtgtccgcagagatgtgtgaatacccaagggggatttgagtgtcactgctacccaaactacgatctggtggatggcgagtgcgtggaaccggtggacccatgcttccgggccaactgtgagtaccaatgccagccgctgaaccagacgtcgtacctgtgcgtctgcgccgaaggattcgcgccgatacctcatgaaccccatcggtgccaaatgttctgcaaccagactgcatgtcccgctgactgtgaccccaacactcaagcgagctgcgagtgtccagaaggatacatcctggacgatggcttcatctgcaccgacatcgacgaatgcgaaaatggaggtttttgctcgggcgtgtgccacaatctgccagggactttcgagtgtatctgcggaccggactcggcacttgcacggcacatcggcactgactgcgatagtggaaaggtggacggtggtgattcaggaagcggtgagccccctccttcaccgactccgggcagcactctgacgcccccggcagtaggcctggtccactccgggcttctgatcggtatctccattgctagcctgtgcttggtggtcgcactgctcgcactcctgtgccacctgcgaaagaagcaaggagcggcacgggccaaaatggagtacaagtgcgcagcgccgtcaaaggaagtcgtgctgcaacacgttcggaccgaacgcactccacagcgcctg

SEQ ID NO: 19912 - DNA, 1725 bp, synthetic construct
  misc_feature 1..1725: note = source = /note="Description of Artificial Sequence: Synthetic coding sequence"
  source 1..1725: mol_type = other DNA
atgttaggagttttagttttaggagctttagctttagcaggattaggattcccagcaccagcagagccacaaccaggagggtctcaatgtgtcgaacatgattgttttgcactatatccaggtccagctacatttttaaatgcttcacaaatttgtgatggtttgagaggacatttgatgacagttagatcttcggtagctgcagatgttataagtttattgcttaatggtgacggtggagtaggacgaagaagactatggattgggttacaattaccacctggatgtggagatccaaagagacttggaccattaagaggatttcaatgggttacaggtgataataatacttcatattctcgatgggctagattagatcttaatggtgcaccactttgtggtccactatgtgttgcagtttcagctgctgaagctacagttccatcagaaccaatttgggaagaacaacaatgtgaagttaaagcagatggatttttatgtgaatttcattttcctgctacatgtagaccactagcagtagaaccaggtgcagcagctgccgcagtcagtattacatatggaacaccatttgcagcaagaggagctgatttccaagcattaccagttggatcctctgctgcagtagccccattagggttacaacttatgtgtacagctccaccaggagcagttcaaggacattgggcaagagaagcacctggagcatgggattgttctgtagaaaatggaggatgtgagcatgcatgtaatgctattcctggagcaccaagatgtcaatgtcctgctggtgcagcattacaagctgatggtagatcttgtacagcaagtgctactcaatcttgtaatgatctttgcgaacatttctgtgtgccaaatccagatcaaccaggaagttatagttgtatgtgtgaaactggatatcgtttagcagcagaccaacatagatgtgaagatgttgatgattgtatcttagaaccatcaccatgtccacaaagatgtgtaaatacacaaggaggatttgaatgtcattgttatccaaattatgatttagtagatggagaatgtgttgaaccagttgatccatgttttagagcaaattgtgaatatcaatgtcaaccactaaatcaaacatcatatctttgtgtttgcgctgaaggatttgcacctataccacatgaaccacacagatgtcaaatgttctgtaaccaaaccgcatgtccagctgattgtgatccaaatactcaagcatcttgtgaatgtccagaaggatatattttagatgatggatttatatgtactgatattgatgaatgtgaaaatggaggattttgttctggtgtttgtcataatttgccaggaacattcgaatgcatatgtggtccagacagtgctttagccagacatattggaactgattgtgattctggaaaagttgatggaggagattcagggtctggagaacctccaccatcaccaactccaggatcaacattaactcctccagctgtaggtttagtacatagtggattacttattggaatttctatagcaagtttatgtcttgtagtggcattgttagctcttttatgtcatttacgtaaaaagcaaggagcagctagagcaaaaatggaatataaatgtgcagctccatcaaaagaagtagttttacagcatgttagaacagagagaactccacaaagactt

SEQ ID NO: 19913 - DNA, 1725 bp, synthetic construct
  misc_feature 1..1725: note = source = /note="Description of Artificial Sequence: Synthetic coding sequence"
  source 1..1725: mol_type = other DNA
atgcttggggtgctggtgttgggcgccctggcactcgccggactgggattcccagcccccgcagagccacaacctgggggaagccagtgtgtggaacacgactgtttcgcactgtaccccggtcccgcaaccttcctcaatgctagccaaatctgtgatggacttcgcggacatcttatgaccgtgcggtcatcggtggccgctgatgtgatttcgctcctgctgaatggagatggaggggtgggtagacgcagactgtggatcgggctgcaacttcctccaggatgtggagatcccaaaaggctgggcccgctgagaggttttcaatgggttaccggagacaacaatacttcgtactcaaggtgggcccggcttgatctgaatggagcacctctgtgtggacccctctgtgttgcagtgagcgcagcggaggccaccgtgccatctgagcccatatgggaagagcagcagtgtgaggtcaaggccgatggattcctctgtgaatttcattttccagcgacctgtcgcccgcttgcggtggagccgggagcagccgcagccgcagtgtcgattacctacggaaccccttttgcggcacgaggtgcagattttcaggcattgcctgtgggatcgagcgccgcggtcgcaccacttggtttgcaactcatgtgtaccgcccctcctggagcggtgcaagggcattgggcaagagaagcacccggggcatgggattgctccgtggaaaatgggggctgtgaacatgcgtgtaatgcaatccctggggcgcctcgctgccaatgtccagcgggagcagcactgcaagcagacggacgttcatgtacggcatccgcaactcagtcttgtaacgatctttgcgaacatttttgtgtgccaaaccctgatcagcctggatcctactcgtgtatgtgtgagactggatacagactcgctgcagatcagcatagatgcgaagatgttgatgactgtattctggaaccttctccatgtccgcaacggtgtgtgaacacccaaggaggctttgagtgtcactgttacccaaactatgatctcgtcgacggtgaatgcgtggagccagtcgatccctgttttagagcaaactgtgagtatcaatgccagccactgaaccaaacctcctacttgtgtgtctgtgccgaaggattcgcaccgattccgcacgagcctcaccgatgccagatgttctgcaaccaaaccgcatgcccagcagattgtgaccccaatacccaagcatcctgcgaatgtcctgaagggtacattttggatgatggtttcatttgcacggatatcgatgagtgcgaaaatgggggattttgctcaggagtgtgtcataatctgccaggaacctttgaatgtatttgtggtcccgacagcgcacttgcccgtcatattggcaccgactgtgactccggcaaggttgacggcggtgattcgggctccggagagcctccaccatcacctactcctggatcgactctgacccctcctgcggtgggtcttgtgcattccggacttcttatcggaatctcaattgcatcgctgtgcctcgtggtggcactgctggcactcctttgtcatctgcgaaagaagcagggagcagccagagccaagatggagtacaagtgtgcagcaccttccaaggaagtggtgctgcaacacgtgcgcactgagcggaccccacaaaggctg

SEQ ID NO: 19914 - DNA, 1725 bp, synthetic construct
  misc_feature 1..1725: note = source = /note="Description of Artificial Sequence: Synthetic coding sequence"
  source 1..1725: mol_type = other DNA
atgctcggagtgctcgtgttgggagcactcgcactggccggactcggtttccctgcgccagccgagcctcagccaggaggctcacagtgcgtggaacacgactgttttgccctgtatccaggacccgcgaccttcttgaatgcatctcagatctgtgatggcctgcggggccacctgatgactgtccgatcttcggtggcggccgatgtcatctcgctgctgttgaatggcgacggaggggtgggaaggcgccggctctggatcggcttgcaactgccgccggggtgcggagatcccaagagattgggcccgctgagaggtttccaatgggtgactggagataacaacacctcgtactcccgatgggctcgcctggacctgaacggggctccgctttgcggacctctgtgcgtggcagtctcggccgccgaggctaccgtgccgagcgagccgatctgggaagaacagcagtgtgaagtaaaggccgacgggttcctttgtgagtttcacttccctgccacctgcaggccgctggccgtggaaccaggagcagccgccgccgcggtgagcatcacgtacggaaccccgtttgctgctagaggtgctgacttccaagcactgccggtaggatccagcgcagcagtcgccccgctgggactgcaactcatgtgcaccgcaccacctggggcggttcaaggtcactgggcccgggaggctccgggcgcatgggattgctctgtggagaacggcggatgcgagcatgcatgtaatgcgattcccggagccccgcgctgccaatgccctgcgggggcggctcttcaggccgacggccggagttgcaccgcgtccgccactcagtcctgcaacgacctgtgtgaacacttctgcgtaccaaacccggatcagcccggctcatactcatgcatgtgcgaaaccggttatcggctggcagctgatcagcaccgctgtgaggacgtggacgactgcatactcgaaccttctccgtgcccccagagatgtgtcaatactcagggaggattcgaatgccattgttaccctaactacgacctggttgacggcgaatgcgtcgaaccggtggatccctgtttccgcgccaattgtgagtaccagtgccagccactgaaccaaacgtcctacctgtgcgtgtgcgcggaaggcttcgctccgatcccgcatgagccacaccgctgccagatgttttgcaaccaaactgcttgccctgcagactgcgatcccaacactcaggcctcctgcgagtgcccggagggttacattctcgacgatggattcatctgcactgatatcgacgaatgcgaaaatgggggattttgctcaggagtgtgtcataacctgccgggtaccttcgaatgcatttgcggtccagactcggcgctcgcacggcatatcggcactgactgtgactcgggcaaagtcgatggaggagattcgggatccggggagcccccacccagcccaaccccaggatccactctcaccccgccagcggtgggcctggtccactcggggctgctcatcggcatctcaatcgcgtcgctgtgcttggtggtggcgctgcttgctcttctctgtcatctcagaaagaaacaaggagcagccagggctaagatggagtacaagtgcgcagctccatcaaaggaagttgtccttcagcacgtgcggacggagcgcactccccaacgcctt

SEQ ID NO: 19915 - DNA, 1725 bp, synthetic construct
  misc_feature 1..1725: note = source = /note="Description of Artificial Sequence: Synthetic coding sequence"
  source 1..1725: mol_type = other DNA
atgcttggcgtgctggtcttgggggcactcgctctggcaggcctgggctttccagcacccgccgagcctcaacctggcggttcccaatgtgtggagcatgactgttttgctttgtaccctggaccagcaaccttcttgaacgcatcccaaatctgcgatggtctgcgggggcatcttatgacggtccgtagttctgttgcggcagatgtcatttcactgcttctcaatggggacggaggggtaggacgcaggcgcctttggataggacttcagctgcctccaggttgtggagatccaaagcggctcggcccactgaggggattccagtgggtgaccggtgataacaatacttcgtattcgcggtgggcacgcctcgatctgaacggagcaccactttgcggacctttgtgtgtcgcggtgtcggcagcagaagccactgtcccctcagaacctatttgggaggagcagcaatgcgaagtgaaggcagatggatttctttgtgagtttcacttccccgctacctgcagaccgctggcagtcgaacctggggcagcagccgccgcggtgtccataacttatgggactccttttgcggcaagaggcgcagactttcaggctctgccagtcggttcctccgcggcggttgcaccacttggtttgcagctcatgtgcaccgcgcctcccggtgcagtgcagggacactgggcaagggaagcgcccggtgcctgggattgctcggtggagaacggaggctgtgagcatgcatgcaacgcgattcctggggcccctagatgccagtgtccagccggtgcagcacttcaagccgatggccgcagctgtaccgcctcagcaacccagtcctgtaacgatctttgtgaacacttctgcgtacccaatcccgatcagccgggtagctactcgtgtatgtgtgaaaccggctacagactggcggcagaccaacaccggtgtgaagatgtcgacgattgtatactcgaacctagcccttgtccgcagcgttgcgtcaatactcaaggaggttttgaatgtcattgttaccctaactacgacctcgtcgacggagaatgtgtggaacccgtggatccatgttttcgggccaactgtgagtatcaatgtcaaccgctcaaccaaacctcgtacctgtgcgtgtgtgcggaaggattcgcccctattccacacgagccacacaggtgtcaaatgttttgtaaccagaccgcctgtccggccgattgtgatcctaatactcaggcctcgtgtgaatgtccggagggatacatccttgacgacggatttatctgcaccgatattgacgaatgtgaaaatggaggtttctgttccggagtgtgtcataaccttcctggcacctttgaatgtatttgcggacccgattcagctcttgcccggcatataggcactgattgtgattcagggaaagtggacggaggggattcaggaagcggtgaacctcctccttcacctactcctgggtcaaccctcacgcccccagcagtcgggctggtccacagcgggcttctcattggaatctctattgcatccctgtgtctggtggtcgcccttctcgccctcctgtgccatcttcgcaagaagcaaggcgctgcacgggcaaagatggaatacaagtgtgcagccccatccaaggaggtcgttcttcaacacgtcagaaccgagaggacgcctcaacggctg

SEQ ID NO: 19916 - DNA, 1725 bp, synthetic construct
  misc_feature 1..1725: note = source = /note="Description of Artificial Sequence: Synthetic coding sequence"
  source 1..1725: mol_type = other DNA
atgctaggcgtactcgtattgggggccctggcactcgctggactggggttccctgcacctgcagaacctcagcctggtggatctcagtgcgtggaacatgactgctttgccttgtaccctggccctgctactttcctgaatgcctcccaaatctgcgacggtctgcgtggccacctgatgactgtgaggagcagcgtagccgctgatgtgattagtctgctcctcaatggagatggtggggttggccggagacgtctctggatcggcctgcagctgccccccggatgcggagatccaaaaagactggggccactgcgcggatttcagtgggtgactggcgacaataacacatcctacagcagatgggcaagactggacctgaacggcgcgccgctctgtggtcctctttgtgtggccgtttccgctgccgaggctacagtgccctcggagcccatttgggaggaacagcaatgcgaggttaaggccgacgggtttttatgcgagttccattttccggcaacttgccgacccctggccgtggagcccggcgctgcggcagcggcagtctctataacatacgggacgccttttgctgcccgaggtgccgacttccaagccttgcctgttggctcctctgccgctgtggcccccctgggcttgcagctgatgtgtaccgcgccgcccggcgcggtgcaaggacattgggccagagaggcgcctggggcctgggactgcagcgttgaaaatggaggctgcgaacacgcgtgcaatgccattcccggcgcaccacggtgccagtgtcccgccggcgccgccctccaggctgacggacgcagctgtaccgccagtgcgacacaatcttgcaatgatctctgcgaacatttctgcgtgcccaatcctgaccaacccggctcttacagttgtatgtgtgagaccggttatcggcttgctgccgaccagcaccgatgtgaagacgtggatgattgtatactcgagccatcaccatgcccccagagatgtgtgaacacgcaagggggtttcgagtgccattgttatcccaactacgacctggtagacggtgagtgcgtggaacctgtagatccctgttttagagccaattgtgaataccaatgtcagccactgaatcagacatcctacctatgtgtgtgtgcggaggggtttgcgccaattccacacgagcctcacaggtgccagatgttctgtaaccagactgcctgccccgcagattgtgacccaaatacacaggctagctgtgaatgcccagaaggatatattcttgacgacggctttatctgtacggacattgacgaatgcgaaaatggcggcttctgtagtggagtttgtcataacctgcccggcacttttgagtgcatctgcggacccgacagtgccctcgctcgccatattggtacggactgtgattctgggaaagtagatgggggcgactccggatcaggcgaacctccaccttcccccactccagggtcgacactgaccccacccgcagtgggcctggtccacagtggtctcctgataggcatttctatagcgtctttatgcttggttgtcgcactgctcgctctgctgtgccacttaaggaagaaacagggcgccgcccgggcgaagatggagtacaagtgcgccgcccccagtaaagaggtcgttctgcagcatgtcaggaccgaacgcactcctcagcgcctt

SEQ ID NO: 19917 - DNA, 1725 bp, synthetic construct
  misc_feature 1..1725: note = source = /note="Description of Artificial Sequence: Synthetic coding sequence"
  source 1..1725: mol_type = other DNA
atgcttggcgtccttgttttgggcgccctcgcactggctggactgggctttcctgctcccgcagagcctcagccaggcggctcccagtgtgtggagcacgactgcttcgcactctatccaggacccgcaacttttctgaatgcgagtcagatatgtgacggccttcgggggcatctcatgactgttaggtccagcgtcgcagctgacgtcataagcctgcttcttaacggcgacgggggagtgggccggcgtcgcttatggattgggctgcagcttccaccagggtgtggcgaccccaagaggctgggacctctgcggggcttccagtgggttaccggagacaataacacttcatacagcaggtgggctcgcctggatttgaacggagccccgctgtgcgggcctctctgtgtggcggtgagtgccgccgaagcaacagttccctctgagcccatatgggaagagcaacagtgcgaagtgaaagccgacggctttctgtgtgaattccacttccccgctacttgccgccccctcgcggtagagcctggggccgccgccgccgcagtaagcataacatacggaacgccgtttgcagcccgaggcgctgatttccaggcattaccggtcggatcctcagccgcggtggctccactgggccttcagctaatgtgcacagctcctcctggggctgtgcagggtcactgggcccgagaagcgcctggggcctgggactgctccgtcgagaatggcggctgcgaacatgcctgcaatgcaatccctggcgcgccgcggtgtcagtgtcccgccggtgctgctctgcaggcagatggccggagctgtactgcgtccgcgactcagtcgtgcaatgatctgtgtgaacatttctgcgtgcctaatccagatcagcctggctcctactcctgtatgtgcgagacaggttacagattggcagcggatcagcatcgctgtgaagatgtggacgactgcatcctggagcctagcccctgtccccaacggtgcgtcaatacgcaggggggcttcgagtgccactgctaccccaactacgacctagtggacggcgagtgtgtggagccggtggatccttgcttccgcgctaactgtgagtaccagtgtcaaccactcaatcagacctcttatctgtgtgtttgtgctgagggctttgcgccgataccgcacgaaccccaccgttgtcagatgttttgcaatcaaacggcatgccccgccgactgcgaccccaacacccaagcatcctgcgagtgtcctgaaggctacatcctcgacgatggattcatctgtactgacatagacgaatgcgagaatggtggcttttgctcaggcgtttgccataacctccctggcacgttcgagtgcatctgcggaccagattcagctctcgcccggcacattgggacagactgcgatagtggaaaggtggatgggggtgactctggaagcggtgagccgcccccatcccctacccccggctccacactgactcctccggccgtggggctggtccactccggccttctgatcggcatctcaattgcgtctctgtgtcttgtggttgccctcctcgcgctgctgtgtcacttgcggaaaaagcagggagcggctcgagctaagatggagtacaaatgtgctgctccctctaaagaggtcgtccttcagcatgtgaggaccgagaggaccccacagcgtctg

SEQ ID NO: 19918 - DNA, 1725 bp, synthetic construct
  misc_feature 1..1725: note = source = /note="Description of Artificial Sequence: Synthetic coding sequence"
  source 1..1725: mol_type = other DNA
atgctgggggttctcgtcctgggggcattagccctggcaggcctgggctttcccgccccggccgaaccccaacctgggggctcccaatgtgtggagcatgactgtttcgcactataccccggaccagcgaccttcctaaatgcctcacagatttgcgacggcttgagaggccatcttatgactgtgaggagttctgttgcggctgacgttatcagtttgctgcttaatggggatggcggagttggacggcggcggctgtggattggactccagctgccccccggctgcggtgaccctaagaggcttggacccctgaggggttttcagtgggtgacaggggacaacaacacaagttactcccgatgggcgcgtttggatctaaacggggcaccactatgcggccccctgtgtgtggctgtgagcgctgccgaagcaactgtgccatctgagcctatttgggaggaacagcagtgcgaagtgaaggccgacggttttctatgtgagtttcacttccctgctacatgtcgccctctggcagttgagcccggtgccgccgccgctgcagttagcattacttacgggaccccctttgcggctaggggagcagattttcaggccctgccagtgggttcatctgccgctgtggcccccctgggtctgcagctaatgtgtactgcgccaccaggggccgtgcaaggccattgggcccgggaggcgcctggagcgtgggactgttctgtggaaaacggcggatgtgagcacgcatgcaacgcaattccaggggccccaagatgtcagtgtccagccggagctgctttacaagccgatggaagaagctgcactgcgagcgctacccagtcatgtaatgacctctgtgaacatttctgcgtgccaaaccccgatcagcccggttcttacagctgcatgtgcgagactggatatcgtcttgccgcagaccagcatcgctgtgaagacgttgatgactgtatcctggaacccagcccatgccctcagagatgtgtcaacacacaaggcggttttgagtgtcattgctacccaaactatgaccttgtggacggcgagtgtgtggagccagtagatccttgcttcagagccaactgcgagtaccagtgtcagcccctcaaccaaacgtcatacctgtgtgtctgcgctgagggatttgcccccattccacacgagccccaccgctgccagatgttttgcaatcaaaccgcatgcccagctgactgcgatcctaatacacaggcctcatgcgaatgtcccgaaggctatattctcgacgatgggtttatctgtaccgacatcgacgagtgcgaaaatggcggcttctgctcgggagtgtgccacaacctccctggaacgtttgagtgcatttgtggccccgattccgccctggcgagacacattggtactgattgcgacagtggaaaggtggacgggggcgatagtgggagtggggagccaccacccagcccaactccagggagtacgctgacacccccagctgtgggcctggtccactcaggtttgctgataggaatctctatagcatcactatgccttgttgtggcattactcgccctgctgtgccatctgagaaagaaacagggcgccgcccgcgcaaagatggagtataagtgtgctgctccaagcaaggaagtcgttctgcagcacgtccggactgagcgcacaccacagcgcctc

SEQ ID NO: 19919 - DNA, 1725 bp, synthetic construct
  misc_feature 1..1725: note = source = /note="Description of Artificial Sequence: Synthetic coding sequence"
  source 1..1725: mol_type = other DNA
atgcttggagtccttgtcctcggcgcactggcccttgcaggcctgggattcccagccccggccgaaccgcaaccaggaggctcacaatgtgtcgagcacgattgttttgcgctctacccaggtcctgccacctttctcaatgcttcacagatttgtgatggacttaggggacatctcatgactgtgcgttcgtcggtggctgcagacgtgatttcccttctgctgaacggtgatggtggggtgggtcgacggcgcctgtggatcggccttcaactgcctcccgggtgtggcgatcctaagcgcctgggaccattgcgaggttttcaatgggtgactggagacaataacacgtcctattcgcgttgggcacggctggacctgaacggagccccgctctgtggccccctgtgcgtggcagtgtcagccgccgaagccactgttcctagcgagcccatctgggaagagcaacaatgtgaagtcaaagctgacggtttcctgtgtgaatttcactttcctgccacctgtcgaccactggccgttgaacccggtgccgccgcagccgcagtcagcataacttacggtacgccctttgcagcacgtggagccgatttccaggcacttccagtgggtagcagcgcagcggtcgcacctttgggactgcaactgatgtgtaccgcaccacccggagcagtgcaggggcattgggcacgtgaagcaccaggtgcctgggattgcagcgtcgaaaacggtggatgtgagcatgcctgcaacgcgattcctggagcaccaagatgtcagtgtcctgctggggcagccctgcaagccgatggaaggtcttgtactgcatccgccactcagtcgtgtaacgatctttgtgagcacttttgtgtacctaaccccgatcaaccaggaagctacagctgcatgtgtgaaactggataccgtctggccgcagatcagcatagatgtgaagatgtggatgattgtattcttgagccctccccatgccctcaaaggtgtgtcaacacgcagggaggattcgaatgccactgttaccctaactacgacctggtggacggggaatgcgtggaaccagtggatccctgcttccgcgcgaactgcgaataccaatgccagccacttaaccaaacctcgtatttgtgtgtgtgcgcagaaggttttgcgcctattccacacgaaccccatcgctgtcaaatgttctgtaatcaaaccgcatgtcctgccgactgtgatcctaacacccaggcgtcgtgtgagtgtccagaaggttacattctggacgacggcttcatttgtactgatattgatgaatgtgaaaatggcggcttctgttccggagtctgtcataacctccccggtacttttgagtgtatttgcggacctgattccgcactggcacgccacattggaaccgattgtgattcaggcaaggtggatggaggtgattcgggtagcggtgaacctcctcctagcccaactcctggaagcacgctcactccacctgcagtgggactggtgcattccggacttctgattgggatttcaatcgcgtccctgtgtttggtggtggccctcttggcactgctctgccatctgcgcaagaagcaaggagccgcaagagcaaagatggagtacaaatgtgcagcaccgtccaaagaggtggtgctccagcatgtgcggactgagagaaccccccaacggctt

SEQ ID NO: 19920 - DNA, 1725 bp, synthetic construct
  misc_feature 1..1725: note = source = /note="Description of Artificial Sequence: Synthetic coding sequence"
  source 1..1725: mol_type = other DNA
atgcttggtgttttggtcctgggggcattggccctcgccggcctggggtttcccgcgccggcggagccgcagccaggtggctcgcagtgtgtcgaacacgactgctttgcgctctacccgggcccagcgactttcctgaacgcatcacaaatctgcgatggtctgcgcggccacctgatgaccgtgcgctcatctgtcgcagctgacgtgatctcactgctgctgaacggcgacggcggcgtggggcgtcgcagactgtggattggtctgcaactcccaccgggctgtggcgaccctaagagattggggcccctgcgcgggttccagtgggtgaccggcgacaacaacacttcgtatagccgatgggccagactggacttgaacggagcaccgctctgcggccctctgtgcgtggccgtgtcagcggcggaagcaactgtcccatccgaaccgatttgggaagagcagcaatgcgaagtgaaggccgacggattcctgtgcgagtttcatttccccgcgacctgccggccactcgctgtggagccgggtgctgctgccgcagcagtgtctatcacttacggaaccccctttgccgcgcggggggccgacttccaagcgctgcccgtggggtcatccgccgccgtggccccactgggactgcagctcatgtgcactgctccaccgggagctgtgcagggtcactgggcccgagaggcacctggagcttgggattgctcagtcgagaatggtggctgtgagcatgcgtgtaatgccatcccgggagccccacgctgccagtgccctgcaggagctgccctccaagccgatggccgctcgtgcacggcttcggctacccagtcctgtaatgatctgtgcgaacatttctgcgtcccaaacccggaccagccagggtcgtacagctgcatgtgcgaaaccggataccgcctcgctgccgatcagcacagatgtgaagatgtggatgattgcatcttggagccaagtccatgcccgcagcggtgcgtgaacactcagggagggttcgaatgccattgctaccccaactacgaccttgtggacggagaatgtgtggagccggtggacccgtgcttcagagctaactgcgaataccagtgtcaaccactgaatcagacctcctacctctgcgtctgtgcagagggatttgcaccgatcccccacgaaccacacagatgccagatgttctgcaatcagacggcatgcccggctgattgtgatccaaatacccaagcctcctgcgaatgcccggaagggtacatcctggacgacggatttatctgtaccgacatcgacgagtgcgagaacgggggtttttgttccggggtttgccataacctccccggcactttcgagtgtatttgcggaccggattcagcactggcacggcatatcggtactgactgcgattctggaaaggtggacggaggagatagcggatcgggagaaccacccccgtcccctacgccggggtcgaccctgactccgcctgcggttggactggtccactcgggactgctcatcggaatcagcattgcgagcctgtgcctggtcgtggccctgctcgcactgctctgtcacctgcgcaaaaaacagggtgcggcccgcgcgaaaatggagtacaagtgcgccgcaccatcgaaagaggttgttctccaacatgtgcgcaccgaaagaaccccacaacgattg

SEQ ID NO: 19921 - DNA, 1725 bp, synthetic construct
  misc_feature 1..1725: note = source = /note="Description of Artificial Sequence: Synthetic coding sequence"
  source 1..1725: mol_type = other DNA
atgctcggagttttagtcctgggagccctggcccttgccggattgggatttcccgcaccagccgaaccacaacccggggggagtcagtgtgtcgagcacgattgctttgctctctaccctggaccagcaacgttcctgaacgcttctcagatctgcgatgggctgagggggcatctcatgactgtccgctcatccgttgccgccgatgtgatctcgctgttacttaacggagacgggggggtcggaaggaggaggctatggatcggattgcagctgcccccagggtgcggggatcccaaaagactggggcccctgagagggtttcagtgggttactggagataacaacacttcttacagtcgctgggcaaggcttgatctcaatggggcacccctatgcgggcccttatgcgtggctgtgtctgccgcggaggcaacggttccaagtgagcctatttgggaagaacaacagtgcgaagttaaagccgatggattcctttgtgagttccacttccccgctacatgtagacccctggctgtcgagcccggggccgctgcagctgctgtttccataacgtacgggacaccttttgctgccagaggggcagactttcaggcactgcccgttggatcatcagcggcggttgctcccctagggctccagcttatgtgtactgcaccaccaggggccgtccaggggcactgggctcgggaggctcccggagcttgggactgttctgtggagaacggaggatgcgaacacgcctgcaatgcgatcccaggggctccacgctgtcagtgtcctgctggagccgcccttcaggcagatgggcggtcatgtacagcctcagccacacagtcatgtaatgacctctgtgaacatttctgtgtacccaacccagatcagcctgggagttattcttgtatgtgtgagacagggtatcgacttgctgcagatcagcaccgctgtgaggatgtcgatgattgtatcttagaaccatctccttgtccccagcgctgcgttaatactcagggggggtttgagtgtcactgctaccccaactatgatctggtggatggggaatgcgtagaacccgttgatccctgtttcagggccaactgtgaatatcagtgccagccactgaaccagacatcttatctctgcgtgtgtgctgaaggattcgcacctatcccccatgaacctcatagatgtcagatgttctgcaaccaaacagcctgcccagcagattgtgatcctaatacacaagcaagttgtgaatgcccagaaggatatatactggatgacgggtttatttgtacagatatagacgaatgcgaaaacggggggttctgcagtggagtctgtcacaatcttcccgggacatttgaatgcatatgcggacctgactctgctctcgccagacacataggaacagattgtgattcggggaaagtggatgggggagattctggatctggagaacctccccccagtcctactcctgggtccacactgactccacccgccgtggggcttgttcactcgggacttctcataggaatatcaatcgctagtctctgtctggtggtagccctattggccttactgtgccacctcagaaaaaagcagggggccgctcgcgcaaagatggaatataaatgcgcagcaccctccaaggaagtggtcctccagcatgtgaggacagagcggacaccacaacggcta

SEQ ID NO: 19922 - DNA, 1725 bp, synthetic construct
  misc_feature 1..1725: note = source = /note="Description of Artificial Sequence: Synthetic coding sequence"
  source 1..1725: mol_type = other DNA
atgctcggcgtcctggttctgggagccttggctcttgctggattaggctttcccgctcctgcagagcctcagccaggcggctcccaatgcgtcgagcatgactgctttgctctgtacccgggccctgctaccttcctgaacgcttcacaaatctgcgatggtcttagggggcatttgatgacagtgaggtcttcggttgctgcagatgtaatttctctgctgctgaacggagacggaggagtgggcagaaggaggctgtggatcggtctccaactcccacccgggtgtggagaccccaaacgcttagggcccctccgaggcttccaatgggtgacaggcgacaataataccagctatagtagatgggccaggctcgacctcaatggcgcccccctctgcggaccgctgtgcgtagcggtatcagcagctgaagcaaccgttcctagcgagccaatttgggaggaacagcaatgcgaagtgaaagctgatggcttcctgtgtgagttccactttccagctacgtgcaggccactcgcagtcgagccgggcgcggccgccgctgccgtctctattacctacggaacaccattcgccgcgcggggagcagacttccaggctttgccggttggaagttctgctgcagtggcacccctgggattacagcttatgtgtaccgcccctcctggggctgtccagggccactgggctcgcgaggctcccggcgcttgggattgcagcgtggagaatgggggctgtgagcacgcgtgcaacgccatccctggcgcacccaggtgtcagtgccctgcgggcgctgccctgcaagccgatggaaggtcttgcactgctagcgctacccaaagctgtaacgacctttgcgaacacttctgcgtccccaatccagaccaacccggaagctacagctgcatgtgcgaaacaggctaccggcttgctgccgaccagcacagatgcgaagatgtagatgattgcattctggagccttctccttgcccacaaagatgtgtgaacacccagggagggtttgaatgccattgctatccgaactacgatcttgtggacggtgagtgtgttgagccggttgatccatgctttcgagccaactgtgaataccaatgtcagcccttgaaccagacctcctatctgtgcgtctgcgccgagggattcgcgcccatccctcacgagccgcaccgctgccaaatgttttgtaaccagacagcttgtccagctgattgcgacccaaatacccaagccagctgcgaatgccccgagggctatatcctggacgatggttttatttgtacagatatcgacgagtgtgaaaacgggggcttctgctccggtgtgtgtcacaaccttcccggcacattcgaatgcatttgtggtccggactcagcgctggctaggcacatcggcacagactgtgattctggcaaagtcgacgggggcgactccgggtcaggggaaccacctccatcgcccaccccagggtcaacccttactccccctgcggtcggtttggtgcatagcggcctgttaattggtatcagcattgccagtctttgcttagttgtcgccctgctagcccttctttgccatcttcggaagaaacaaggcgccgccagggcaaaaatggaatataaatgcgccgccccctctaaagaggtagtgctacaacacgtccgcaccgagagaaccccccagaggttg

SEQ ID NO: 19923 - DNA, 1725 bp, synthetic construct
  misc_feature 1..1725: note = source = /note="Description of Artificial Sequence: Synthetic coding sequence"
  source 1..1725: mol_type = other DNA
atgctgggagtcctggttctgggagctttggctcttgccggtcttggatttcccgcgcctgccgagcctcagcctggtggaagtcagtgcgtagagcatgactgttttgctctctatccgggtcctgcgacgttcctgaacgcctcccaaatctgcgatggcctgagggggcacctgatgacagtgaggagttcggttgccgccgacgtcattagtctcctgctcaatggagatggcggagtcgggcggcgccgcctgtggataggattgcagctcccccctggctgtggagaccccaagaggctggggcccttaagaggcttccaatgggttacaggcgataataatacttcctatagccgctgggccaggctggacctgaatggggcccctttgtgcggaccattatgcgtcgccgtgtccgccgcagaagctactgtcccatctgaacctatctgggaggagcagcaatgtgaggtgaaggccgatggatttctgtgcgagtttcactttccggccacttgtaggccactggccgtcgagccaggagcagcagctgcggctgtgagcattacatatggcactcccttcgccgccagaggcgctgacttccaggcattgccagttgggtccagtgccgcagttgcccctctgggtctccaactcatgtgcactgcaccacccggcgccgtccagggacattgggccagggaagccccaggagcatgggattgctccgtggagaacggcgggtgtgaacatgcctgtaatgctatcccgggcgctccgcggtgccagtgccccgctggtgctgcactccaggccgacggtcgctcctgcacagcaagcgccacacagtcttgcaacgatttgtgcgaacatttttgtgtgccaaaccctgaccagcccgggagctactcctgcatgtgcgaaactgggtatcgactggctgcggaccaacaccgttgcgaggacgttgatgactgtatcctcgaaccttcaccatgtccgcagcgctgcgtcaatactcaaggaggctttgagtgtcactgttatccaaattatgatctggtcgacggcgaatgtgtagagccagttgatccctgttttagagctaactgcgagtaccagtgccagccccttaaccaaaccagttacctatgtgtgtgcgcagaagggtttgctcctattccacatgaaccacataggtgtcagatgttctgcaaccaaacagcctgtcccgcggactgtgatccaaatacgcaggcctcttgcgagtgccccgaaggttacatccttgatgacggttttatttgtactgacatagacgaatgtgaaaatggaggcttctgttccggcgtgtgccataatctcccaggaacatttgagtgcatttgtggcccagacagtgccttggctaggcatatcggaaccgattgcgactctggaaaggtcgatggcggggacagtggatctggtgaaccaccgccaagccctacacctggctccactcttacgccccccgccgtcggcctcgtgcatagcggacttttgatcggcatcagcatagccagtctgtgcctggtggttgccttgctggcactcctgtgtcatctgaggaaaaagcagggggcagcacgggctaagatggaatacaagtgcgccgccccatctaaagaggtggttctacagcacgtaagaactgaaaggacgccccagcgtctg

SEQ ID NO: 19924 - DNA, 1725 bp, synthetic construct
  misc_feature 1..1725: note = source = /note="Description of Artificial Sequence: Synthetic coding sequence"
  source 1..1725: mol_type = other DNA
atgttgggagtcctggtgcttggagcacttgctcttgcaggacttgggtttccagcaccagctgagcctcaaccgggaggctcacagtgcgttgaacatgattgttttgctctttacccgggacctgctacttttcttaatgccagccagatatgcgatggacttcgtggtcatctaatgactgtaagaagctctgtggctgctgatgtgatctcactccttcttaacggcgatggtggcgtagggcgacgacgtctctggattggtctgcagttacccccaggatgcggagatccaaaacgacttggaccactacgtgggttccaatgggtaaccggagataataacacgtcgtacagtcggtgggctagactggatcttaacggcgcgccgctgtgcggtccactatgcgtcgcagtttcggccgctgaggctaccgtgccctcagaacctatttgggaagagcaacaatgcgaagttaaagctgatggtttcctatgtgaatttcatttcccggcaacatgtcgaccgttagcggtggaaccaggagctgccgctgcagctgtgtcaatcacttacggcacaccattcgctgctcgaggcgcagattttcaggcgcttcctgttggttcgtcagccgcagttgcgccgttgggactacagctcatgtgtactgccccaccaggtgctgtgcaagggcactgggccagagaagcccctggagcatgggactgttccgtggagaatggtggatgcgaacatgcttgcaacgccatacctggcgccccaaggtgccaatgtccggctggtgccgcgctacaagcggatggacgatcttgtacagcttcagctactcaaagctgtaacgacctatgtgaacacttctgtgtgcctaatccagatcaaccgggcagctattcctgtatgtgtgagactggataccggttagccgcagatcaacatcgttgtgaagatgttgacgattgtattttagaaccgtcaccatgcccacaaagatgtgtaaatacccaagggggattcgaatgccattgctatcctaattatgatcttgttgatggtgaatgtgtagagcctgtcgatccatgctttagagccaactgtgaatatcaatgccaacccctaaatcaaacttcatatctctgcgtatgtgctgaaggatttgcaccaattcctcacgaaccgcatcgctgtcagatgttctgtaatcaaacggcgtgtccggctgattgcgatccgaatacacaagcctcctgtgaatgtcctgaggggtatatactcgacgacggttttatatgcacagatatcgacgagtgtgaaaatggaggattctgttcaggagtctgccataatctacctggtacttttgagtgcatttgcgggcccgactcggctttagctagacatattgggaccgattgtgactctggaaaagtcgatggtggcgattcaggttcaggggaaccgccgccatcgccgactcccggaagcacgcttactccaccagctgttggacttgtacatagtggccttttgattggaatttctattgcatcgctctgtctcgtggtggcactgctagctttgttgtgtcacttacgaaaaaaacaaggcgctgcacgagcaaaaatggaatataagtgtgcagcgccaagcaaagaagtcgtcctccaacatgtacgtactgaacgtacgccgcaacgtctt

SEQ ID NO: 19925 - DNA, 1725 bp, synthetic construct
  misc_feature 1..1725: note = source = /note="Description of Artificial Sequence: Synthetic coding sequence"
  source 1..1725: mol_type = other DNA
atgttgggcgtcttagtgttgggtgccctagcactcgcgggactcgggttccctgctccggcggagcctcaacctggaggcagccaatgtgtcgagcacgattgctttgctctgtatcccggacccgccacatttctgaatgcatctcagatatgcgatggcttgcgtggacacttgatgacggtccgatcatctgtggcagccgacgtgatctccctcttgctcaacggtgacggaggagtggggcgccgcagactgtggatcggactccaactccctcctgggtgcggagaccctaaaaggttgggacctctgaggggatttcaatgggtgactggagataacaacacaagttatagcaggtgggcccggcttgaccttaatggcgctccgctctgcggccctctgtgcgtggccgtgagcgcggccgaggctaccgtcccgtccgaaccaatctgggaagaacagcagtgcgaggtcaaggcagatggatttctctgcgagtttcatttccctgctacttgtaggccactggccgtggaaccaggggcggccgctgctgcggtgagcattacctacggcacccctttcgccgcccggggagccgattttcaagctcttcctgttgggtcgtctgcggcggtggcaccattgggtctccagttgatgtgcaccgctccaccgggagcagtgcaagggcactgggcccgagaagcccctggggcttgggattgttccgtcgagaatggaggttgcgagcacgcctgtaacgccatccccggcgccccaagatgccagtgccctgctggcgccgccctgcaggcggacggtcgtagctgcacagcgtctgcaacccagtcctgtaatgatctgtgcgaacacttctgcgtccctaatccggaccagcctggaagttactcctgtatgtgtgagacgggatatcgactggccgctgatcagcatcgatgtgaagacgtggatgactgcatcttagaaccgtcaccatgccctcagaggtgcgtcaacacacaggggggcttcgagtgccactgttaccccaattacgacctggtagatggcgaatgcgtcgaaccggtagacccttgtttcagagcaaactgtgaataccagtgccagcccctcaaccagacgagctatctttgcgtatgcgctgaggggttcgcccccatcccacacgagcctcatcgatgtcaaatgttctgcaatcaaacagcctgccccgccgactgtgaccctaacactcaagcctcttgtgaatgtcctgagggctacatcttagacgacgggtttatttgtaccgatattgacgaatgtgagaacgggggattctgctcaggcgtctgtcacaatcttcccgggaccttcgagtgtatttgcggcccagacagcgccctggcccgccacatcggaactgactgcgactctggtaaagttgatggaggagattcaggatctggagaaccgccacccagcccaacgcctggttcaactctgactcctccagctgtcggcctggtgcacagcggcctgctgatcgggatttccatagcttccctatgtctggtcgtcgccctgctcgctctgctttgccatttgcgcaaaaagcagggagcggcacgtgctaaaatggaatataagtgtgccgccccatctaaggaggtcgttctgcagcacgtgcgcaccgagcggaccccccaacgactc

SEQ ID NO: 19926 - DNA, 1725 bp, synthetic construct
  misc_feature 1..1725: note = source = /note="Description of Artificial Sequence: Synthetic coding sequence"
  source 1..1725: mol_type = other DNA
atgttgggcgtactggtgctgggtgccctcgccctggcgggcttgggattccccgcacccgccgagccccagcctggtggctcacagtgcgtggaacacgactgcttcgctctctacccaggcccagccacttttctgaatgcgtcgcagatctgtgatggccttagggggcatttgatgacggtgcgatcatcagtcgccgcagatgtgataagcctcctacttaacggggacggaggagtcgggaggcggcggttgtggattggccttcagcttccaccaggttgtggcgacccaaagaggttaggcccattgagaggattccagtgggtcaccggagataacaacactagttacagtcgatgggcaaggttggatctgaatggagctccattgtgcggcccactctgtgtggctgtgtctgctgcggaggccaccgttccctcagagcctatttgggaggaacagcagtgcgaggtgaaggccgatggcttcttatgtgagtttcacttccctgcgacgtgtagaccgctggctgttgaacccggggcagccgctgcggctgtatccattacttatggcacacctttcgcggcccggggagctgattttcaagcgcttccagtgggctcttccgccgctgtggcacccctcgggctgcagctcatgtgcaccgcaccccccggagccgtccaaggtcactgggcaagagaggctcctggagcctgggactgtagcgtggagaacggcggctgcgaacatgcgtgcaacgctatacctggcgcccctaggtgccagtgccccgcaggagctgccctccaggctgatggtcgaagctgcacggcaagtgccacacagagctgcaatgatttgtgcgaacacttctgtgtccccaacccagaccagccgggatcttattcatgcatgtgtgagactgggtaccgcctggcagctgatcagcatcggtgtgaggatgtggacgactgcattttggaacccagcccctgtcctcagcgctgtgtgaacacccagggcggctttgaatgccattgttatcctaattacgatctggtggatggagaatgtgtggagcccgtggacccttgtttccgggcaaattgcgagtatcaatgccagcctctgaaccaaacatcctacctttgcgtatgtgccgagggcttcgctcctatcccacatgagcctcaccgctgtcagatgttctgcaatcagactgcctgcccagccgattgcgaccccaatacccaagccagttgtgagtgcccggaaggttatatcctcgacgacggctttatctgtactgatatcgacgagtgtgaaaacggtggattctgctctggcgtgtgtcataatttgccgggcacctttgagtgtatttgcggccctgacagtgccctcgccagacatataggaactgattgcgactctgggaaggtggatggaggcgattcaggttcaggcgagcctcccccaagtcccacacccgggtcaacgctgaccccgcctgccgtggggctggtgcactcgggacttctgattgggatctcaatcgcctcattatgcttggtggtggctctcctcgcactgctctgtcacttgaggaagaagcagggggccgcgagggcaaaaatggaatacaaatgcgctgcgcccagcaaggaggtggtgttgcagcacgttcgcactgagcggacaccccagcgccta

SEQ ID NO: 19927 - DNA, 1725 bp, synthetic construct
  misc_feature 1..1725: note = source = /note="Description of Artificial Sequence: Synthetic coding sequence"
  source 1..1725: mol_type = other DNA
atgctgggagtcctcgtccttggcgcactcgccctggcggggctggggtttccggccccggcggagccgcagcctggtggctcccagtgcgtggaacatgattgcttcgctttgtacccgggtccggccactttcctgaacgcgagccagatctgcgacggattgaggggccacctgatgactgtcagatcctcggttgcagcggacgtcatctcactcctgctgaacggtgacgggggagtcgggcggagacgcctctggatcgggctgcagctgccgcccggatgcggggaccccaaaaggctgggacctttgagaggctttcaatgggtgactggcgacaataacacctcgtacagcaggtgggcacggctcgacttgaacggcgcgccactgtgcgggccgttgtgcgtcgcagtctccgcggcggaggccaccgtcccgtcagaaccgatctgggaagaacagcagtgtgaagtgaaggccgacggatttctgtgcgaattccatttcccggctacgtgcagacctcttgctgtcgaaccaggggcagccgccgctgctgtcagcattacctacggcacccctttcgccgcccgcggagcggatttccaggccctgcctgtgggaagcagcgcagcagtcgcccctcttggcctgcaactcatgtgcacggccccgccgggcgcggtgcagggacactgggccagagaggcccccggggcctgggactgttcggtggaaaatggaggatgcgagcacgcctgcaacgcaatcccaggcgctcccagatgccagtgtccagccggcgcggcgctgcaggccgacggtcgctcttgcaccgcctcggccactcagtcatgtaacgacctctgtgagcatttttgtgttccaaacccggaccagcccgggagctactcgtgcatgtgcgaaaccggctaccgcctcgcagcggaccaacacaggtgtgaagatgtcgatgactgtatcctggagcccagcccatgccctcagcgttgtgtgaatacgcaaggtggattcgaatgccactgctaccctaactacgacctcgtggacggagaatgcgtggagccggtggacccatgcttccgcgcgaattgtgaataccagtgccaacctttgaaccagacttcttacctgtgtgtgtgcgctgaaggcttcgcgcctatccctcacgagccgcatcggtgccagatgttttgtaaccaaactgcctgcccagcggattgcgatcctaacacgcaagcatcctgcgagtgccccgagggatatatcttggacgatgggttcatctgcacggatatcgacgaatgcgaaaacggcggcttctgttcgggagtgtgccacaatctgccgggtaccttcgagtgtatctgcgggccagactcggcccttgcccgccacatcggtactgattgtgatagcggtaaggtcgatggcggcgactccggaagcggcgagcctccgccctccccgacgcccggatcgacgctcaccccgcccgcggtgggactggtgcattccggccttctgatcgggatatccattgcaagtctgtgcctggtggtcgcccttctcgccctgctgtgtcacctgcgcaaaaagcaaggagccgcccgcgcgaagatggaatacaagtgcgccgcgccatcgaaggaggtcgtgctgcagcatgtgagaaccgagcgcaccccgcaacgcctc

SEQ ID NO: 19928 - DNA, 1725 bp, synthetic construct
  misc_feature 1..1725: note = source = /note="Description of Artificial Sequence: Synthetic coding sequence"
  source 1..1725: mol_type = other DNA
atgctgggtgtgctcgtgctgggtgcactcgctctggcaggtcttggcttccctgcccccgctgagccccagcccggtggatcccagtgtgtcgaacatgactgcttcgccctgtaccctggcccagcaacctttctcaatgcttctcagatctgtgatggtttgagaggccaccttatgaccgtgcgcagctccgtggccgctgacgtgatttctttgctcctcaatggtgacggcggtgttggccgtcgtaggctgtggataggtctccagctcccccccggttgcggcgaccccaagaggctgggtcccctgcgtggttttcagtgggtaaccggtgacaataatactagctattctaggtgggctcgcctggatctgaacggcgctcccctctgcggaccattgtgtgttgccgtcagcgccgcagaagccactgtgccttctgagcctatttgggaggaacaacaatgcgaagttaaagcagacggctttctgtgcgaattccacttcccagctacctgtcgtcctttggcagtcgagcctggtgccgctgctgctgcagtgtccataacatatggaactcctttcgccgcacgcggcgccgacttccaggcattgcccgtaggttcttccgcagcagtcgctcccctcggactgcagttgatgtgcaccgcccccccaggagccgtgcagggccattgggctcgtgaggctcccggagcctgggactgttcagtggagaacggcggctgcgagcacgcttgcaatgctatcccaggagctcctagatgtcagtgtcctgcaggtgctgccctccaggctgacggacgttcttgtaccgctagtgctactcaatcttgcaacgacctttgtgagcacttctgcgtacctaatccagatcagcctggctcctactcttgcatgtgcgaaaccggctaccgcctggccgccgaccagcaccgttgcgaagacgtcgatgactgtatcctggaacccagcccctgtccccagcgctgcgttaacactcaaggaggatttgaatgccactgttaccctaactatgacttggtggacggtgagtgcgtagagccagtggacccatgttttagagcaaactgcgagtaccagtgccagcctctgaaccagacttcttacttgtgtgtgtgcgctgaaggcttcgcacctataccacatgagccccacaggtgtcaaatgttctgcaaccagaccgcatgtccagcagactgtgaccctaacactcaagctagttgtgagtgtcccgagggatacatcctggatgacggcttcatctgtaccgacattgacgaatgtgagaacggtggtttctgttccggtgtgtgtcacaacctcccaggtacattcgagtgcatctgcggaccagactccgccctcgcccgtcatataggtactgattgcgatagcggcaaggtggatggtggtgatagcggaagtggtgagccaccacctagtcctacccctggttccactttgacaccccctgctgtcggtcttgtccactccggtctcttgatcggaatcagcatcgcttcattgtgtctggttgtggctctgttggccttgttgtgccacctccgcaagaaacagggcgcagcacgtgctaagatggagtacaagtgcgccgcacccagtaaagaggttgttctgcagcatgtcaggacagagagaactccacagcgtttg

SEQ ID NO: 19929 - DNA, 1725 bp, synthetic construct
  misc_feature 1..1725: note = source = /note="Description of Artificial Sequence: Synthetic coding sequence"
  source 1..1725: mol_type = other DNA
atgttgggtgtccttgtattgggcgccttagctcttgcaggtcttggcttcccggcccctgcagagccccagccaggtggatcacagtgcgtagagcacgactgtttcgccctgtaccccggacctgctacatttctgaacgcgagccaaatctgcgacggcctgcgtggtcatcttatgactgtccggtcctcagtcgccgccgatgtgatctcattgttactgaacggagacggcggcgtgggcaggaggcggctttggataggattgcagctcccgcctggatgcggcgacccaaaaagactggggcccttgagaggtttccagtgggttaccggggacaataatacaagttattcgcggtgggcacggctcgatttgaacggagcccctctttgtggtccactgtgcgtggcggtatccgccgcagaagccacagtacctagtgagccaatttgggaagagcagcagtgcgaagtgaaagccgacggattcctttgcgagtttcactttcccgcaacatgccgacctctggcagtggagcccggcgccgccgccgcagccgtgtcgatcacatatggcaccccatttgctgctcggggcgctgactttcaggccttgcctgtcggaagctcagctgctgtcgcccctcttggtttacagctaatgtgcaccgcaccacccggtgcggttcagggccattgggcgcgggaggcacccggtgcttgggattgcagcgtggaaaacggcggatgtgagcatgcctgcaacgctattccgggcgcccctcgctgtcagtgtcctgctggcgccgctctgcaagcggatgggagatcatgcaccgcttcggccacacagagttgcaatgatctctgcgaacacttttgtgtgcccaatcccgatcagccagggagctactcctgtatgtgtgagaccggttaccgtctcgcggcggaccagcacagatgtgaagatgtagatgattgcattctcgagcccagcccctgtccccagcggtgtgtgaacacgcagggtggcttcgagtgccattgctacccgaactacgacttggtggatggagagtgcgttgagcctgttgacccgtgctttcgggctaactgtgagtatcagtgtcagcccttgaatcagacttcctacctttgcgtctgcgccgagggtttcgccccaataccccacgagcctcacaggtgccaaatgttctgcaaccaaactgcatgcccagcagattgcgatcccaatacccaggctagctgcgaatgtccagaaggatacatcctggatgacggatttatatgcacagatatagatgaatgtgagaacggcgggttctgctccggagtgtgtcataatctgcccggtactttcgagtgcatttgtggccccgattctgcacttgcgcggcacatagggactgactgcgattccggtaaagtcgacgggggagactctgggtcaggcgagcctcccccaagccccactccgggcagcactctgacgccccccgccgtgggactggtacatagcggccttctaatcggaatcagcattgcgagcctgtgcctcgtcgtggctttgttagccttgctctgccacttaaggaagaagcaaggagccgcgcgcgccaagatggagtacaaatgtgctgccccaagcaaggaagtggtgctccagcacgttcggacagagcgcacaccacaacgccta

SEQ ID NO: 19930 - DNA, 1725 bp, synthetic construct
  misc_feature 1..1725: note = source = /note="Description of Artificial Sequence: Synthetic coding sequence"
  source 1..1725: mol_type = other DNA
atgctgggcgtcttggtcctaggcgcccttgcccttgcgggcctgggctttcccgctcccgctgaaccgcagcccgggggctcacaatgcgtggaacatgattgctttgccttgtaccccggccccgctacatttctgaatgcgtcgcaaatttgcgatggccttaggggtcacctgatgacagtcagaagctccgttgccgccgatgtgatcagtcttctgctgaatggcgacgggggagtcgggcgtcgccgcctgtggattggactgcagctgccgccgggctgtggtgaccctaaacgcctggggccgctccggggcttccaatgggttactggagataataacacgagttattcccgatgggcccgcttagaccttaatggcgcccccctctgcggaccactgtgcgtcgccgtatctgccgccgaggccacggtgccctcggagcccatctgggaagagcaacagtgcgaagtgaaggctgatgggttcttatgtgaatttcattttccagccacctgtcgcccactggccgtggagccgggcgccgccgcggccgccgtctccataacttacggcaccccctttgctgcacggggcgcagattttcaggctctccccgttggaagctctgcagccgtggctccgttgggacttcagcttatgtgcaccgcaccaccaggcgcggtgcaaggccattgggcacgtgaggcaccaggcgcttgggattgcagcgttgagaatggaggctgcgaacacgcttgcaatgcaatcccgggcgccccccgctgccagtgcccggccggcgccgcattgcaggcggacggccgctcgtgtacagcgtccgctacccaatcttgcaacgacctgtgcgagcacttttgcgtgccaaacccagaccaaccgggttcttattcatgcatgtgcgaaacgggatatcgcttagctgccgatcagcaccgctgcgaggacgttgatgactgtatcctagagcccagcccgtgcccccagcgatgtgtgaatacacagggaggcttcgaatgccactgttatcccaactatgacctggtggacggcgagtgcgtggaaccggtcgacccatgttttcgggccaactgcgaataccagtgccaaccactgaaccagacctcgtatttgtgcgtttgcgccgagggattcgcccctataccccatgagccacaccgatgccaaatgttttgtaatcaaacagcttgtccagctgattgtgaccctaacactcaagccagctgcgagtgtcccgagggctacatacttgatgatggattcatctgtactgatatagacgagtgcgagaacggtgggttctgttcaggagtctgccacaatttgccgggtacctttgagtgcatttgtggaccagatagtgcgcttgctaggcacatcggaacggattgtgacagtggtaaggtggatggaggcgacagtggctcgggagagccaccgcctagtccaactccaggatctacacttactccgccagccgtcgggctcgtgcacagcggactgttgattggcatctccatcgccagcctgtgcctcgtagtagcgctgctggcgctgctctgccacctgaggaaaaagcaaggggccgcccgcgcgaagatggagtataagtgcgcagcccctagcaaagaggtggtgctgcagcacgtacgcaccgaacgcacgccccagcggctt

SEQ ID NO: 19931 - DNA, 1725 bp, synthetic construct
  misc_feature 1..1725: note = source = /note="Description of Artificial Sequence: Synthetic coding sequence"
  source 1..1725: mol_type = other DNA
atgctcggcgtcttggtcttgggggcacttgccctggcaggcttgggctttccggcgccggcagagcctcagccgggcggatctcaatgtgttgaacatgactgctttgcactttatccgggaccggctacctttcttaatgccagtcagatctgcgacggcctgcgtggccatttgatgacggtgagaagtagcgtggcggccgacgttattagcttgctgttgaatggcgatggcggggtcggccggcgtaggctgtggattggactgcaactgcccccggggtgcggggatccgaagcgtttagggccattgcgcggctttcagtgggtcacaggcgataacaacacaagctactcgcgctgggccagacttgatctcaacggtgcgccgttatgcggacccttgtgtgttgctgtaagcgcggccgaagcaacagttccgtctgaaccgatctgggaagaacagcagtgtgaggtgaaagcagatggctttctgtgtgagtttcatttcccggctacgtgtcgtcctctcgcagttgaaccaggggccgcggccgcggcggtcagtatcacatatggaacgccttttgccgcacgcggggctgattttcaagccctcccggtcggatcttcagccgcggtcgcgcctctcggcctgcaacttatgtgtactgctcctccaggggctgtgcagggacattgggctcgagaagcgcctggggcttgggattgtagcgtcgaaaatggcggttgtgagcacgcttgcaatgctatcccaggggctccgcgatgccaatgtccggcgggtgccgcactccaggccgatgggcgctcatgtaccgcatccgctacacagagctgcaatgatttatgcgaacacttttgcgtacccaatcctgaccagccaggctcatactcatgtatgtgtgagacaggttatcgtttagcagcagatcagcaccgatgtgaagacgtagatgattgtatattggaaccttctccttgtcctcaaaggtgtgtcaatacgcagggaggcttcgagtgccattgttatccgaactatgatcttgtagatggcgagtgtgtcgagccggtggacccgtgctttcgcgcaaattgtgagtatcagtgtcaaccattgaatcaaacgtcatacctttgtgtatgcgcggaggggtttgcaccaatcccacatgaaccgcatcgctgtcaaatgttttgcaatcaaactgcgtgtccggcagactgcgatcctaacacgcaagcgtcttgtgaatgtccggaaggttatattcttgatgatggctttatttgcacagatattgatgaatgtgagaacggcggcttttgctctggtgtttgccataatttgccgggcaccttcgaatgtatttgcggaccagattcagcccttgcgagacatattggcacagactgtgatagcggaaaggtagatggcggcgattctggtagcggggaaccgccgccgagccctacaccgggttctacgctgacgccgccggcagtcggccttgtacattcggggcttttaatcggcatttcaattgcttctttatgtctggttgttgcactgctggcactcctctgccacctgcggaagaaacaaggcgccgctcgggctaaaatggaatataaatgtgcagcgccatctaaagaagtggttctgcaacatgtgcgaactgaaagaactccacagcgttta

SEQ ID NO: 19932 - DNA, 1725 bp, synthetic construct
  misc_feature 1..1725: note = source = /note="Description of Artificial Sequence: Synthetic coding sequence"
  source 1..1725: mol_type = other DNA
atgctaggagtgctggtgttaggggcactggcactggcaggattgggctttcctgcccctgcggaaccccagcctggggggtcccagtgcgtggaacatgattgtttcgctctgtatccagggccagcaacgttcttgaatgcctcacagatttgcgacgggcttcgcggccacctgatgacagtgcgctccagcgtggccgcagacgtgatttctttactacttaacggagacgggggcgttggacgcaggcgattgtggattggtctccagctcccaccaggatgcggagaccccaaaagattggggcccctgcgcggtttccaatgggtgaccggggacaacaataccagttatagtagatgggctcgattagacctgaacggtgcccccctctgtggtcctctgtgcgtggcagtttctgctgccgaggccaccgttccgtccgagcctatttgggaagagcaacagtgcgaagtgaaggcagacggattcctgtgtgagttccactttccggcaacatgccgaccactcgcagtggaacccggcgcggccgcagccgctgtcagtattacatacggcacacctttcgcagcccggggggcggatttccaagctctgcccgtcggaagttctgctgccgtggcacccctaggccttcagctgatgtgtactgctccgccaggtgccgttcagggccactgggctagggaagcccccggagcatgggactgtagcgtagaaaacggcggctgcgaacacgcatgtaacgcaataccaggggccccgagatgccagtgtcctgcaggcgctgccctgcaggcagatggaaggtcctgtacggcaagtgcaacacagagttgcaatgacctctgtgagcacttttgcgtgccaaacccggaccagcctgggagctattcttgcatgtgtgagaccggctataggctcgccgccgatcagcatcgctgcgaagacgtggatgattgcatcctggagccgagcccgtgccctcagcgatgcgtgaatacccagggaggtttcgagtgtcactgctatcctaactacgatctggtcgacggcgaatgtgtggaacccgtggacccctgctttagggccaattgtgaataccagtgtcagccactgaaccagacctcgtatctgtgcgtttgtgccgaggggtttgcgcccatccctcacgagccacaccgctgccagatgttttgcaaccaaaccgcctgccctgccgactgcgacccaaatacccaggctagctgtgagtgtccagaggggtacatccttgatgacggatttatatgtacagacatagatgaatgtgaaaacggcggattttgcagcggcgtgtgccacaacctacccgggacttttgaatgcatttgcggtccggactccgctcttgccagacacattgggactgactgtgatagcggtaaggttgatggaggcgactctgggtctggcgagccacccccctcacctaccccgggctccaccctgactccccctgcagtcgggctggtgcatagtgggttgctgattggcatcagcattgcatctctctgtttggtggttgccctgctagccctgttgtgccatctgcgtaagaaacaaggagccgctagagcaaagatggagtataaatgcgcggcgccgtccaaggaggtcgtattgcagcatgtgcggacagaacgcacccctcagcgcctc

SEQ ID NO: 19933 - DNA, 1725 bp, synthetic construct
  misc_feature 1..1725: note = source = /note="Description of Artificial Sequence: Synthetic coding sequence"
  source 1..1725: mol_type = other DNA
atgttgggagtcctggtcctgggtgcccttgcgctcgccggccttggtttcccggctcccgccgaaccacagccgggcgggtcccaatgtgttgaacacgattgtttcgctctgtaccccggacctgccacattcctgaatgccagccaaatctgtgatggcctgcgagggcatcttatgactgtacgctcatccgtggcagctgatgtcatttccctgttgcttaacggggacggcggtgttgggcgacggaggctgtggattggcctgcagctgcctccaggatgcggtgacccaaaaagactcggacccctccgggggttccagtgggttaccggggacaataacaccagctacagtcgatgggcaaggctggacctgaatggggcccctttgtgtggtcccctctgcgtggcagtttctgccgctgaggccacagtgcctagcgagcctatctgggaggagcagcagtgcgaagtcaaagccgatggttttctctgcgaatttcactttccagcaacgtgtcgccctctggcggtggagcccggagccgcggctgcagcagtcagcatcacctatggcaccccttttgctgccagaggcgcggatttccaagctctgcctgtgggttcttctgcggctgtcgcgcctcttggcttgcaattgatgtgcactgctccccctggcgcggtgcagggccattgggcgcgcgaggccccaggcgcttgggattgtagcgtggagaacggagggtgtgagcatgcttgcaatgccatacctggcgctccacgctgccaatgtcccgctggggccgcactgcaggccgacgggcgcagctgcaccgcctcagctacccaaagttgtaacgacctctgcgaacacttctgtgtgcctaaccctgatcagcccggctcatactcatgcatgtgtgaaacaggctaccggctggctgccgaccagcacaggtgtgaagatgtggacgattgtattcttgaaccttccccctgcccccagaggtgcgtcaatacacaaggcggttttgagtgccattgctaccctaattacgatctggtggatggcgaatgcgttgaaccggtggatccgtgctttagggctaactgtgaatatcagtgccaaccactcaaccagaccagctacctgtgcgtctgcgcggaggggttcgccccaattccccacgaacctcatcggtgtcagatgttttgtaatcaaaccgcctgccctgcagattgcgacccaaatacacaggccagctgcgagtgtccagagggctatattctcgacgacgggttcatttgcacagatatcgacgagtgcgagaatggcggattctgtagtggtgtgtgccacaacctccctggcaccttcgaatgtatctgcgggcccgactccgccctcgcaagacacatcgggactgattgtgatagcggcaaagtggacggcggcgatagtggctctggcgaaccgccaccgtcccctactcctggatccactcttactcctccagccgtgggactggtgcattctggactgcttattggcatcagtatcgcctcactttgcttggttgttgccttgttggcactcctgtgccacctgcgaaagaaacagggggcagctagggccaaaatggagtacaagtgcgccgcaccatcaaaggaggtggtcctccagcacgtcaggaccgaacgcactcctcagcggctc

SEQ ID NO: 19934 - DNA, 1725 bp, synthetic construct
  misc_feature 1..1725: note = source = /note="Description of Artificial Sequence: Synthetic coding sequence"
  source 1..1725: mol_type = other DNA
atgctcggggtgctggtcctgggggccctggcgttagcaggcctcggatttcccgcgcccgccgagccccagcccggcgggtctcagtgcgtcgagcatgactgttttgccctttatcccggtcctgccacctttctgaatgcctcacagatttgtgatggactgcgaggccacctgatgactgtgcggtcaagcgtggcggccgacgtgatttccttgcttctgaatggggacggaggcgtcggtagaagacgactgtggattgggctacagttgccccccggttgcggagaccctaagcgtctcgggcccctcagaggctttcaatgggtgacgggagacaataatacatcttattctaggtgggcgaggttggacctcaatggtgctcctctttgtggccctctttgtgtggccgtcagtgctgccgaggctaccgttccatccgagcctatatgggaagagcaacaatgcgaagtcaaggccgacggcttcctgtgcgaatttcattttccagccacatgtcgccctctggcagtcgagcccggtgccgcggcagccgccgtcagcatcacctacggaacaccatttgccgcccgaggcgctgacttccaggcactgcctgtgggctcctcagcagccgtagcccctctgggtctgcagttgatgtgcacagctccaccaggcgccgtgcaagggcactgggccagggaggctccgggggcctgggactgtagtgttgaaaacggaggatgtgagcacgcatgcaacgccattcctggagcacctagatgtcagtgcccagccggcgcagctttgcaggcagatggccgtagctgcaccgccagcgctactcagtcgtgcaacgatctctgtgagcatttttgcgtgcctaaccctgaccagccaggatcttactcctgcatgtgtgaaactggctacaggctagcggctgatcaacacagatgtgaagatgtggacgactgcatcctggaaccctccccatgcccccagcgctgtgtgaatactcaagggggcttcgaatgtcactgctatcccaattacgacctagtggatggagagtgtgtcgaacccgtggacccatgctttcgagccaactgcgaatatcagtgtcagcccctgaaccagacttcttatctctgcgtatgtgctgaaggatttgcacctattcctcatgagccacacagatgtcaaatgttttgtaaccagactgcctgccccgctgattgtgacccaaatacacaggcatcatgtgaatgtccagaagggtacattctggacgatggtttcatctgtacagatatcgacgaatgcgaaaacggaggtttttgcagtggcgtgtgccacaacttacctgggactttcgaatgtatttgcggccctgacagtgccctggcgaggcatataggcacggactgcgactctggaaaggtggacgggggggactcgggatccggcgaacccccacctagtccgacccctggcagtactctgacgcctccagctgtgggactagtccattccggactcctgatcgggatcagcatcgccagcctgtgcctggtggtagcactgcttgcccttctctgccacctacgaaaaaaacagggcgccgcccgagccaagatggagtataagtgtgccgcgcctagcaaagaggtggtcctgcagcatgtaaggaccgagagaaccccacagcgattg

SEQ ID NO: 19935 - DNA, 1725 bp, synthetic construct
  misc_feature 1..1725: note = source = /note="Description of Artificial Sequence: Synthetic coding sequence"
  source 1..1725: mol_type = other DNA
atgctgggggtgctcgtcctgggagcccttgcattggcgggtctgggtttccccgcacctgcagagccacagcctggagggagccaatgcgtggagcatgactgttttgcactttacccagggccagcaactttcctgaatgcatcacaaatttgcgatggattgcgcggtcatcttatgaccgtgcgaagcagcgtggcagccgatgtgatttcgctccttcttaatggagacggaggcgtgggtcgacggcggctgtggatcgggctgcagctcccaccgggatgtggcgatcctaagcgactcgggcccctgagaggattccaatgggtgactggagataacaacacttcctactcgaggtgggcaagactggaccttaacggagcccctctttgcggtcctctttgcgtggcggtgtcggccgccgaagcaaccgtgccctccgaaccgatatgggaagaacaacaatgcgaagtaaaggcagatggctttctttgcgaattccattttccggccacttgccgccccctggcagtggaacccggcgcagcggcggcagcagtctctattacgtacggtaccccgtttgcagcccgaggagcagactttcaagcgcttcctgtaggttcctccgcagcagttgcgccccttgggcttcagttgatgtgcactgcaccgccaggtgcagtgcaaggtcattgggctcgtgaagcaccgggtgcgtgggattgttcagtcgaaaacggtgggtgcgaacatgcgtgtaacgccattccaggggcacctcgttgccaatgtcctgcgggagccgcgctccaggcagacggacggtcgtgcaccgcatccgcaacccagtcttgtaatgacctttgcgaacatttttgcgtgcctaatcccgatcaacctggatcctattcctgtatgtgtgaaaccggatacagactggcagctgatcagcatcgctgtgaggatgtggatgattgtattcttgaacctagcccgtgtcctcaaaggtgcgtgaacacccaagggggatttgaatgtcactgttaccctaactacgacctcgtggatggcgaatgtgtcgaacctgtcgatccttgttttcgagcaaactgcgagtaccagtgccaacctctgaatcaaactagctacctgtgtgtgtgcgctgaaggtttcgctcctatccctcacgaacctcataggtgtcagatgttctgtaatcagaccgcttgtcctgcggactgcgacccaaacactcaggcttcgtgtgagtgtcccgagggatacattcttgacgatggctttatctgtaccgacatcgatgaatgtgagaatggcgggttttgctcgggtgtctgtcacaacctccctggtactttcgagtgtatctgcggcccagactcggcattggcgagacatatagggactgattgcgacagcggcaaagtcgacggaggtgactcgggatcaggggagccaccaccatccccgactcccggttcgaccctcaccccaccagcagtgggattggtgcatagcggtttgcttattggaatttccatcgcgtcactttgtcttgtggtggcgctgctcgcactgctttgtcacctgaggaagaagcaaggagcggctagagcgaaaatggaatacaagtgtgcggctcccagtaaagaggtcgtgcttcagcatgtcagaaccgagcgcacgccacaacgactg

SEQ ID NO: 19936 - DNA, 1725 bp, synthetic construct
  misc_feature 1..1725: note = source = /note="Description of Artificial Sequence: Synthetic coding sequence"
  source 1..1725: mol_type = other DNA
atgctgggagtgctggtgctgggagcactggcgctggctggactgggcttcccagcgccggctgagcctcagccgggaggttcgcaatgcgtggaacacgactgctttgcgctctacccgggacctgcaacctttctgaacgccagccaaatctgtgatggcttgcggggccacctgatgactgttagatccagcgtcgcggcggatgtcatatcgctccttctcaacggagacggaggagtagggcgacgccgactctggatcgggttgcaactcccgccgggctgtggtgacccgaagcgcctgggacctctccggggctttcaatgggtgaccggagacaacaatacgtcgtactcgagatgggcccggctggatctgaatggcgctccactgtgtgggcctctctgcgtggcagtctcggcggctgaggcaaccgtgccatccgaaccaatctgggaggagcagcagtgcgaggtcaaggccgatgggtttctttgtgaattccacttcccggccacttgtcggccactggcggtagagcccggcgcggcagcggcggctgtgtcgatcacgtacggaactccgtttgcagccaggggcgccgacttccaagctctgcctgtgggctctagcgcggcggtggcccccttgggtttgcagctcatgtgcacggcgccgccaggtgccgtgcaagggcactgggcccgggaggcgccaggagcctgggactgtagcgttgagaatggaggctgcgaacatgcttgcaacgcaatccccggagcccctcggtgccagtgcccagcaggcgcggccttgcaagcagacggaaggtcatgtaccgcgtcggctacccagtcctgcaacgacctgtgcgaacacttctgcgtgccaaacccggaccagccaggctcctactcctgcatgtgtgaaaccggataccgcttggctgcagatcagcaccgctgcgaagatgtcgatgactgcatcctcgaaccgagcccgtgcccgcaacgctgtgttaatactcagggaggcttcgaatgtcactgttaccctaactacgatctggtggacggagaatgcgtcgaacccgtggacccgtgtttccgggccaactgcgagtaccagtgtcagcctctgaatcaaacttcctatctgtgtgtgtgcgcagaaggtttcgccccgatcccccacgaaccgcatagatgccagatgttctgcaatcagactgcatgtccggcagactgcgaccctaacacccaggcctcctgcgagtgccctgagggctacatccttgatgatggattcatctgcactgatattgacgaatgcgagaacggagggttctgctcaggagtgtgccacaacttgccaggaactttcgagtgcatctgcggacctgattctgcgctcgcgcgccatatcggtacggattgcgactcaggaaaagttgacggtggagactcaggatccggggaaccgcccccgtctccaaccccgggttcgaccctcactcctcccgctgtggggttggtgcatagcggcctgcttattggaatcagcatcgcctcattgtgccttgtggtcgctctgctcgctctgctctgccatctcaggaaaaagcagggagcagccagagccaagatggaatacaagtgcgccgccccgtcgaaggaggtggtactgcaacatgtgcgcacggaacgtaccccccagcggttg

SEQ ID NO: 19937 - DNA, 1725 bp, synthetic construct
  misc_feature 1..1725: note = source = /note="Description of Artificial Sequence: Synthetic coding sequence"
  source 1..1725: mol_type = other DNA
atgctaggggtgctggttttgggcgcgttggcattggccggtctgggcttcccggctccggcagagcctcaaccgggaggatctcaatgcgtggagcacgactgtttcgcgttgtatcctggccctgcaacattcctgaacgcgagccaaatctgcgatggtctgcgcggacacctcatgaccgttcgctcttccgttgcggcagatgtgattagcctgctgttaaacggtgatggtggcgtcggccgccgccgactgtggatcgggttgcagctgccaccaggttgtggggacccaaaacgccttggtccgctaagaggctttcaatgggtgacgggcgataacaacacaagctacagccgctgggcgcgcctggatctcaatggtgctccgctgtgtggcccattgtgtgtggcagtctctgctgctgaggctactgttccgagcgaacctatttgggaagaacagcaatgcgaagttaaagcagacggctttttgtgcgagttccacttccctgccacgtgtagaccgttggccgttgagccaggggccgcagccgcggctgtgtctatcacttacggcacccctttcgctgcacggggcgccgactttcaggctctgccagtgggttccagcgcagcagttgcgccactgggtctgcagttgatgtgtaccgcacctccaggtgccgtgcaaggccattgggcgagggaggcaccgggtgcatgggattgctctgtcgaaaacggaggatgtgagcacgcctgcaacgcaatcccaggcgcccctaggtgccaatgccctgcgggtgccgcgctgcaggcggatggtcgatcatgcacagccagcgcaacacagagctgtaatgatctctgcgagcacttctgcgtgcccaaccctgatcaacctggctcatactcatgcatgtgtgagaccggctatcgcttggcggctgaccagcatcgttgcgaagatgtggacgactgcatcctggaaccttcgccgtgcccgcaacgctgcgtcaatacccagggtgggttcgaatgtcattgctatcctaattacgacctggtggacggcgaatgtgtggagcctgtcgatccttgttttcgtgcgaattgcgagtaccagtgccaacccctgaatcagaccagctacctgtgtgtctgcgccgagggttttgcgcctattccacatgagccacacaggtgccagatgttttgcaaccagaccgcatgcccggccgactgcgatccaaacactcaggcaagttgtgagtgcccggaaggttacatcttggacgatggctttatctgtaccgatatagatgagtgtgagaatggtgggttctgcagcggagtttgtcataacctgccaggtacttttgaatgtatttgtggtccagacagcgcactggcccgccacatcggaaccgattgtgatagcggtaaggtcgacggtggtgatagcggctccggggaaccaccaccaagccctaccccgggttctaccctcaccccaccggccgtcggactggttcatagcggtctgctcatcggcatctctatcgctagcctctgtctggttgtggccctgctagcattgttgtgtcacctgaggaagaagcagggcgcggcccgcgccaaaatggaatataaatgcgcagcaccgagcaaagaggttgttttgcagcacgttagaacagagcggacgccacagagactg

SEQ ID NO: 19938 - DNA, 1725 bp, synthetic construct
  misc_feature 1..1725: note = source = /note="Description of Artificial Sequence: Synthetic coding sequence"
  source 1..1725: mol_type = other DNA
atgttgggcgttttggttcttggtgcacttgccctcgctggcctaggatttcctgcacccgctgaaccacaacctgggggatcgcagtgtgttgaacacgactgctttgccctctaccctgggcctgctacatttttgaacgcttcacagatttgcgatggacttagaggacaccttatgactgttcgcagcagtgttgcagctgatgttatttctcttcttttgaacggggatggtggcgtcggtagaagaagactgtggatcggtttgcagctgccaccaggatgtggtgatccgaagaggctcggtcccctccgtggctttcaatgggttacaggagataacaacacctcttacagtcgttgggcaagactagatctgaatggggcaccactatgcggaccactctgtgtcgctgtctctgctgctgaagctactgttccctcggaacccatctgggaggaacagcagtgtgaggtcaaggcagatggattcctctgtgaatttcactttcctgctacatgtagacctctggcagttgagccaggggctgctgccgctgcagtttcaattacatatgggacaccttttgctgctagaggcgcagacttccaagctttgcctgtgggtagcagtgcggctgttgcaccattgggcctgcaacttatgtgtaccgctccgcccggcgccgtacaggggcattgggcccgtgaggctcctggtgcttgggattgttcagtggagaatggtggatgtgaacatgcttgcaacgcgattcccggtgccccacgttgccagtgtccagctggagctgcacttcaagccgatggacgaagctgtaccgcgtccgcaactcaatcatgtaacgacctttgtgagcatttttgtgttcccaatcccgaccagccagggtcttatagttgcatgtgcgaaacaggttaccgtctggctgctgatcagcacaggtgcgaggatgtggacgactgtatcttggagccttccccgtgcccacaacgatgtgtaaatacacaagggggcttcgagtgtcactgctacccaaactacgacttggttgatggagaatgcgttgaaccagttgatccatgtttcagagcaaactgtgagtatcaatgtcagccgctcaaccagactagctatctctgtgtatgtgcagaggggttcgctccaattcctcatgaacctcaccggtgccaaatgttttgcaatcagacggcttgtccagctgattgtgatcctaatacacaggcgtcttgcgaatgtccggagggatatatattggacgatggattcatttgtacagatattgatgaatgtgagaatggaggcttttgcagcggcgtgtgtcataatctgccaggtaccttcgaatgcatatgcggtcctgactcggcgcttgctcgtcatattggcactgattgtgactctggtaaggtggatgggggtgactctgggtcaggagagcctcctccttcgcctacgccgggatccacattaacaccacccgctgttggcctcgttcattccggacttctgattggtatttctatcgcctccttgtgcctcgtggttgctcttttggctcttctttgccatcttaggaagaagcagggcgcagcaagagctaaaatggagtataaatgtgctgcccctagtaaggaggtagtgctacagcatgtccgaaccgagaggactcctcaaaggctg

SEQ ID NO: 19939 - DNA, 1725 bp, synthetic construct
  misc_feature 1..1725: note = source = /note="Description of Artificial Sequence: Synthetic coding sequence"
  source 1..1725: mol_type = other DNA
atgttgggagtgctggtcctgggggctctggcacttgcaggactgggattccctgcaccggccgaaccgcagccgggaggatcccaatgtgtggaacatgactgcttcgcactttacccgggcccagccaccttcttgaacgctagccaaatctgtgatggactccggggccatctgatgaccgtcagatcatccgtggccgccgacgttattagcctccttttgaatggagacggcggggtgggtagacgcagactgtggatcggactgcagcttcctccgggatgcggtgatccaaagaggctgggcccactgcgcggattccaatgggtgactggagacaacaatactagctactccaggtgggctaggctggacctcaatggagccccgctgtgcggcccactgtgcgtggccgtgtcagcggccgaagcgacggtccctagcgagccgatctgggaggagcagcagtgcgaagtgaaggcggacggattcctctgcgaattccattttccggccacttgccggccgctggcagtggagccaggagccgcggccgcagcggtgtcgatcacgtacggaactccgttcgccgcccgcggagctgactttcaggccctcccggtcggatcaagcgccgctgtggccccgctcggactccagttgatgtgcaccgccccgcctggcgcggtgcagggacactgggcccgcgaagcgccaggtgcatgggactgctccgtggaaaacggcggctgcgagcatgcctgtaacgccattccgggagcgcctcgctgccaatgccccgccggagccgccctgcaagcggatggtcggtcctgcaccgcctccgccacccagtcgtgtaacgatctgtgcgaacacttctgcgtcccgaaccctgaccagcccggatcctacagctgtatgtgtgagactggatacagactggcggccgaccagcataggtgcgaggacgtggatgattgcatcctggagccctctccttgtcctcaaagatgcgtgaacacgcaagggggattcgaatgccactgttacccgaactacgacctcgtggacggggagtgcgtggagccggtcgacccttgcttccgggcgaactgcgagtaccagtgccagccgctgaaccaaactagctatctgtgcgtctgcgccgaaggattcgctccgatcccgcacgagccacatcggtgccagatgttctgcaaccaaaccgcgtgtccggccgattgtgacccaaatactcaggcgtcttgcgaatgccccgaaggttacatcctggacgacgggttcatttgcactgacattgatgaatgcgaaaacggagggttctgcagcggagtgtgtcacaatttgcctgggaccttcgaatgcatctgcggacctgatagcgccctggctcggcacattggaactgattgtgactcaggaaaggtggatggaggagactcaggatccggagaaccgcccccatcaccgacccctggatccaccctgactcccccagctgtcggtctggtgcactcgggactcctgatcggaatctcgatcgcaagcctttgcctggtggtcgcactcctggcactcctgtgccacttgaggaagaaacagggagctgcccgcgccaaaatggaatacaagtgtgcggccccgtccaaggaagttgtgctgcaacacgtgcggaccgagcggactccgcaaaggctt

SEQ ID NO: 19940 - DNA, 1725 bp, synthetic construct
  misc_feature 1..1725: note = source = /note="Description of Artificial Sequence: Synthetic coding sequence"
  source 1..1725: mol_type = other DNA
atgttgggagtgttggtgcttggagcactggcactcgcagggttaggattccctgctcccgcagaacctcagcccggagggtctcagtgtgttgaacatgattgtttcgccctgtacccagggcctgccacattcctcaacgcttctcagatctgtgatggactccgaggacacctaatgacagtgcggagttccgttgctgcagatgtgatttcccttctcctcaacggagacggaggagtgggacgtaggaggctttggataggactccagctccctcctgggtgtggggatcctaagcgactggggcctctgagggggttccagtgggtaactggagataacaatactagttattctagatgggctcgactagatctaaatggagccccactatgtgggcccttatgtgtggccgtatcagccgcggaagcaacagtaccttcagaacccatatgggaagaacagcagtgtgaagtgaaggcagatggattcctgtgtgagtttcacttccccgccacttgcaggcctcttgccgtagaaccaggggcagctgcagcagcagtctctatcacttatgggactcccttcgccgcacggggagctgatttccaggcgctccccgtgggaagtagtgcagctgtagcccctctagggcttcagttaatgtgtacagcacctcctggagcggtgcagggacactgggcaagagaagcgcctggggcttgggattgtagtgtggaaaacggggggtgcgaacacgcatgtaatgcaatccccggggcaccaaggtgtcagtgcccagccggagctgctctgcaggctgatggacggtcctgcacagcatctgccacacagtcctgtaacgatctgtgcgaacatttctgcgtgcctaaccctgatcagcctggatcttatagttgtatgtgtgaaacgggatatcgcctcgctgccgatcagcatagatgcgaagatgtcgatgattgcatactcgaacccagtccatgtccacagcggtgtgtgaacacacagggagggttcgagtgccattgctatcccaactacgatctagtggatggggagtgcgtggaacccgtagatccatgctttagggcaaattgcgaataccagtgccagccactcaaccagacttcctatctctgtgtttgcgcagaagggttcgcgcctataccacatgaaccgcatcggtgccagatgttctgtaaccagacagcctgccctgccgattgcgatcccaatacacaggcctcatgcgagtgtccagaaggatatatcctggatgatggattcatctgcacagatatcgatgaatgcgaaaatggagggttttgttccggggtctgtcataacttacctgggacatttgagtgtatttgtggaccagactccgctctggctaggcacatcggaactgattgtgattctggaaaagtggatgggggggattccgggtcaggagaaccaccccctagtcccactcccggaagtactctcacacctcccgccgtaggactcgtgcattccgggctcctcataggaatatcaatcgcctctctatgtctcgtggtggctctacttgcccttctgtgccacctgcgaaaaaaacagggggctgccagagccaaaatggagtataagtgtgctgccccatctaaagaagttgtattgcagcatgtcaggacagaacgaacaccacagcgtctc

SEQ ID NO: 19941 - DNA, 1725 bp, synthetic construct
  misc_feature 1..1725: note = source = /note="Description of Artificial Sequence: Synthetic coding sequence"
  source 1..1725: mol_type = other DNA
atgctgggtgtgctggtgctgggtgcactggcgctcgctggactgggcttccccgctccagctgagccccaaccaggcgggtctcagtgcgtcgaacacgactgctttgctctgtatcctggtcccgctacatttttgaacgcctctcagatctgtgatggcctgcggggtcatttaatgacagttcgctcgtccgtcgcagcggatgttatatccttgctgcttaacggcgacggaggcgtaggcaggcgacgcctctggatagggctgcaactcccgccgggttgcggagatccaaagcggctcggtcccctgcgagggtttcagtgggttactggagataacaacacgagttactcccgctgggctcggctcgacctgaatggggcacccctgtgcgggcctctgtgcgtcgctgtcagtgcagccgaggctacagttcctagcgaacccatttgggaggagcaacagtgtgaggtgaaagccgacggctttctgtgtgaatttcacttccccgctacttgccgaccattagctgtggaacctggtgcggccgccgccgccgtgagtattacttatgggactccgtttgcggcgaggggagcggattttcaggctctccccgtcggctcctctgctgccgttgcacccctgggtctgcagctgatgtgcacagccccccctggagctgtacagggacactgggctcgtgaggccccgggtgcctgggactgtagcgttgagaatggaggctgcgaacacgcttgcaacgccatccctggcgcgccacggtgccagtgccccgcaggggccgcattgcaggcagacggtaggagttgtactgccagtgcaacccaatcctgcaatgatttatgcgaacacttttgcgtaccaaaccccgaccagcccggatcttactcatgtatgtgtgaaacgggctatcgcttagcagctgaccagcatcgctgtgaggatgtcgacgactgcatcctggagccgtcaccctgcccccagagatgcgttaatacacagggcggcttcgagtgccactgttatcctaactacgacctggtggatggcgaatgtgtagaaccagtggatccctgcttccgtgccaactgtgaataccagtgccaacctctgaaccagacatcttatctgtgtgtgtgtgctgaaggttttgctccaattccccacgaaccacataggtgccagatgttttgtaatcagaccgcttgtccagccgactgcgatcctaacacgcaggcttcgtgcgagtgccccgaagggtatattctggacgatggctttatttgcactgacatcgatgagtgcgagaacggcggattctgcagcggagtgtgtcacaatttacctggcaccttcgagtgtatctgtgggcccgactccgcattagccagacacataggaaccgactgtgacagtggaaaggtagatgggggtgactccgggtcaggagaaccgccaccgtcaccaacgcccggtagcactctgacaccccccgccgtgggactggtgcattccgggctgctgatcggaatctccatagcgagcctttgccttgtggtagccttgctggcactattgtgccacctgcggaaaaaacagggagcggcccgagccaaaatggaatacaagtgtgcggcgccttctaaagaggtggtgttacagcatgtaaggaccgagagaacacctcagcgactc

SEQ ID NO: 19942 - DNA, 1725 bp, synthetic construct
  misc_feature 1..1725: note = source = /note="Description of Artificial Sequence: Synthetic coding sequence"
  source 1..1725: mol_type = other DNA
atgctaggcgtgctcgtccttggcgccctggccctcgcaggcctggggttccccgctcccgccgagccccaacctggtgggtctcaatgcgtggagcatgattgtttcgccctctatcctggccctgctacttttctgaacgcaagccagatctgcgatggtctacggggacacttgatgacagttcgcagctccgtggctgcagacgtgatttctctcttgctgaacggggatggaggggtgggcaggcggcggctgtggatcggactacaattgcctccgggttgtggggatcctaaacggttaggccctttgagggggttccagtgggtcactggcgataacaacacctcgtactctcggtgggcccgccttgatctgaatggcgcaccattgtgtggccccttatgcgtggcagtctctgctgcagaggcaacagtcccaagcgagcccatatgggaagagcagcagtgcgaagtcaaagcggacgggttcctctgcgaatttcattttccagctacctgccgtcccctggccgtcgaacctggagcagctgcagcggctgtgtccattacttatggcacccccttcgcggccaggggagccgattttcaggccttgcccgttggaagctccgctgccgtggctccattggggcttcagctcatgtgcacagcgcctcctggcgcggtccaaggtcattgggcacgggaagcccctggcgcgtgggattgttcagttgaaaacggcggttgcgagcacgcttgcaacgccattccaggggcccctcgctgtcagtgccctgccggggccgccctccaagctgatgggagatcctgcaccgcctctgcaactcagtcatgtaatgatttatgtgagcacttttgcgttccgaaccctgaccagcccgggtcatactcttgcatgtgtgagacaggttatcggctagctgcagatcagcacaggtgcgaggacgtagacgattgcatactggagcccagcccctgcccccagaggtgcgtcaatacacaggggggcttcgagtgccattgctaccccaactacgacctcgtcgacggcgagtgcgtggagcccgttgacccatgctttcgggcgaactgtgagtatcaatgccagccccttaatcagacctcctatctgtgcgtgtgtgccgagggcttcgcgccgataccccatgagccccatcggtgccagatgttctgcaaccagactgcctgtccggccgactgcgatccaaatactcaagcctcctgtgagtgccccgaaggctatatactagacgacggttttatttgcacggatatcgatgaatgtgaaaacggtggcttctgttcaggcgtctgccacaacctgcctggaaccttcgagtgtatttgtgggcccgattccgctctggctaggcatattggaactgactgcgacagcggcaaagtggacggcggagattctggctcgggcgaacccccaccgtctccaacgccaggcagcactctaaccccacccgccgttggcctcgtgcactctggcttgttgataggaatttccattgctagtctgtgtctggtcgtggccttgcttgcgctcctctgtcatctgagaaagaaacagggagcggcccgtgccaagatggaatataaatgcgcggcgccatcaaaggaagtggtactgcagcatgtgcgcactgaacgaacaccccagaggctg

SEQ ID NO: 19943 - DNA, 1725 bp, synthetic construct
  misc_feature 1..1725: note = source = /note="Description of Artificial Sequence: Synthetic coding sequence"
  source 1..1725: mol_type = other DNA
atgctcggggtactggtgctgggtgctcttgccttggctggcttgggcttcccggcccctgcggaaccacagccaggcggctcccagtgcgttgagcacgattgcttcgccctttatccaggccctgccaccttcctgaacgcgtcgcagatttgcgatggtctgcggggccaccttatgactgtgcgctcgtctgtcgccgctgatgtgatctccctgctcctcaacggcgacggtggcgtgggtcgccggcgtctgtggatcggacttcagctacccccaggttgcggcgatcctaaacgtttgggtcccctccgcggcttccagtgggtcaccggcgataacaacacctcttacagccgctgggctcggctcgacctcaacggagctcccttgtgcggccccctctgcgtcgccgtgtccgctgccgaggccaccgtcccttccgagccaatttgggaggagcaacagtgcgaggtcaaggctgatgggtttttgtgcgagttccatttccccgctacctgccgcccactggctgttgagcccggtgcggccgcggccgctgtcagtattacttacggaactcccttcgctgctcggggcgccgacttccaggccttgccggtcgggtccagtgcggctgtggctcccttgggactgcagctgatgtgtacagccccacccggcgccgtgcagggtcattgggcccgggaggctcctggagcttgggactgctccgtcgagaatggcggttgcgagcatgcctgcaacgccatccccggtgctccgcgctgccagtgcccagctggcgctgctctgcaagctgacggtcgatcatgcacagcgtctgccacccagtcctgcaacgatctctgcgagcatttctgcgttcccaaccccgaccaacctggcagctatagttgcatgtgcgaaacgggctaccggcttgccgccgaccagcaccgctgtgaggatgtggacgattgtatcctagaacccagcccctgcccgcagcgttgtgtcaacacccagggaggatttgagtgtcactgctacccgaactatgacctcgtcgatggcgagtgtgttgagcctgtcgatccctgcttccgtgcgaattgtgaataccagtgtcagcccctgaatcaaacttcttacctctgtgtgtgtgctgagggctttgcccctattcctcacgagccccaccgctgccagatgttctgcaaccagaccgcttgcccagccgactgcgaccctaacacccaggcatcgtgtgagtgccctgagggctacatcttggatgacggctttatttgcaccgacatcgacgagtgcgagaacggtggcttctgtagtggtgtatgtcacaatctccccggtactttcgagtgcatctgcggccccgactccgccctcgccagacatatcggaaccgattgcgattctgggaaggttgatgggggcgattccgggtccggagagccgcctccaagtcctactcccgggtctactttgactcctcccgcagtgggccttgtccacagtggtttgcttatcgggattagcatcgcatctctctgccttgtggtggcccttttggccctactttgccacttgcgtaagaaacagggagccgcccgcgcaaagatggaatacaagtgcgccgccccctccaaggaggtcgtcctccagcacgtgcggaccgaacgtaccccgcagcgtctc

SEQ ID NO: 19944 - DNA, 1725 bp, synthetic construct; identical to SEQ ID NO: 19891
  misc_feature 1..1725: note = source = /note="Description of Artificial Sequence: Synthetic coding sequence"
  source 1..1725: mol_type = other DNA

SEQ ID NO: 19945 - DNA, 1725 bp, synthetic construct
  misc_feature 1..1725: note = source = /note="Description of Artificial Sequence: Synthetic coding sequence"
  source 1..1725: mol_type = other DNA
atgcttggtgttctcgtgctgggggctttggcactggcaggccttggatttccagccccagcagagccacagcccggcggatcacaatgtgtcgaacatgattgctttgccttgtacccagggcctgcgactttcctgaacgcatcacaaatatgcgacggcctgcgtggacatttgatgactgtgagatcatccgtggccgccgacgtcatctctcttctccttaatggtgacggtggcgttggccgccgaaggctgtggattggcctgcagttgcccccggggtgtggggatcctaagagactgggaccactgcgcggattccaatgggtgaccggtgacaataacacctcgtactctcgctgggcaaggttggatcttaacggagcaccactttgtggacccctgtgtgtcgcagtctcggccgcggaagctactgtgccgtcggagcctatttgggaagaacagcaatgtgaggtgaaagcagacggattcctttgcgaattccacttcccagccacctgccgccccctggcagtcgaacccggcgcagcagcagctgcagtgtccataacttatggcaccccttttgcggccagaggggcagactttcaagcgctgcctgtcggatcatcggctgcagtcgcaccacttggactgcaactgatgtgtacggcgccccccggtgcggtgcaaggtcactgggcaagggaggcacctggagcatgggactgtagcgtggagaatggcgggtgtgaacatgcatgcaatgccatcccaggggcccccagatgccagtgcccagccggtgctgctctccaagctgatggacgctcctgcacggcttctgcaacccagagctgtaacgacctgtgcgagcacttttgtgtgcctaacccagatcagcctggcagctactcctgcatgtgtgaaaccggctaccgcctcgcagcagatcagcatcgttgtgaggatgtggatgattgtattctcgaaccttccccgtgtcctcagagatgcgtgaacacgcagggaggatttgaatgccactgctaccctaactatgatctggtggatggagagtgcgtcgaaccggtggatccgtgtttcagagcaaactgtgaataccaatgtcaacctctcaatcaaacctcatacctctgtgtttgtgccgaaggattcgcacccatcccgcatgaacctcatagatgtcaaatgttttgtaaccagactgcgtgccctgctgattgtgatcctaacacgcaagcatcttgtgagtgtccggaaggctacattcttgacgacggctttatctgcactgacatcgatgaatgtgaaaacggaggattttgttcgggtgtgtgtcacaatcttcctggaacctttgaatgtatttgtggtccagactcagcacttgcgcggcacattggaaccgattgtgattcggggaaggtggatgggggagactctggttccggtgagccgccaccgagccctactccaggtagcactctgacgccacctgccgtgggcttggtgcatagcggacttctcattgggatatcaattgcatccctgtgcctcgtcgtggcactcctggctctgctttgccatctgcgcaagaagcaaggggcagcccgggcgaagatggagtacaaatgtgccgccccttccaaggaagtggtgcttcagcatgtgcggactgagcgaactccccagcgtttg

SEQ ID NO: 19946 - DNA, 1725 bp, synthetic construct
  misc_feature 1..1725: note = source = /note="Description of Artificial Sequence: Synthetic coding sequence"
  source 1..1725: mol_type = other DNA
atgttgggggtcttagtgcttggcgctttagctcttgccggcctgggatttccagcacccgcggaaccgcagccgggaggttcacagtgcgtcgagcatgattgcttcgctctataccccggtccggccactttcttgaatgcttctcagatctgtgacgggctcagaggacatctgatgacggtccgatcgtcagtcgcggctgacgtaatttctctgcttctcaacggcgacggcggcgtgggacgtcgccgactatggattggcctacagcttccgccggggtgcggtgatcctaagcgactaggccccctgcgcggattccagtgggtgacgggagacaacaacacgagctattctcgctgggccaggctcgatctgaatggggcccctctttgcggaccactctgcgtggccgtgtctgctgccgaggcaaccgttccttccgaacctatttgggaggagcaacagtgtgaggtcaaggcggatggttttctgtgtgagtttcatttccccgcgacctgtcgacctctcgcggtcgagcccggggctgccgcagctgccgtgtccattacatatgggacaccttttgccgcccggggggcggactttcaagcactgccggtcggctcgagcgctgctgtcgctcccctgggactacaactcatgtgcacagctcctccgggggccgtgcagggacactgggcacgagaagctcccggcgcctgggattgttcagtcgagaacggaggctgcgagcatgcctgtaacgccatccctggtgcaccacggtgccagtgtccagccggtgcggccctgcaagcagacggtcgatcttgcacagcgagcgccacccagagctgcaatgatttgtgtgaacacttttgcgtacctaacccagatcaacccggaagctacagctgcatgtgcgagacgggatacaggttggcagcagatcagcatcgatgcgaagatgtcgatgattgcattctggaaccgagtccgtgtccacaacgatgtgtcaacactcaggggggctttgagtgtcattgttatccaaactacgatcttgtcgacggggaatgcgtcgaaccagttgacccctgtttcagggctaactgcgagtaccagtgtcagccgttgaatcagacttcttatctttgcgtttgtgccgaaggcttcgctccaatcccgcatgagcctcacagatgccagatgttctgtaaccaaacagcttgcccagcggactgcgatcccaatacgcaagcgtcatgtgaatgccctgagggatacattctcgatgacggattcatttgcaccgatatcgacgaatgcgaaaatggcggtttttgctcaggcgtctgccataatctaccaggtacgttcgaatgcatttgcggcccagattcagcgttagctcgacacatcgggacagattgcgattcgggaaaggttgatgggggagacagcggtagtggcgaacctccgccctcaccaactccaggaagcaccctgacacctcctgccgttggcctggttcactcgggccttctcatcggtatctcaatcgccagcctttgcctggttgtcgctctattggccctcttgtgccatcttcgaaagaaacaaggcgctgcaagggctaagatggagtacaaatgtgctgcaccgagcaaggaagtcgtcctacagcacgtacgcaccgaacgcactccgcagcgcctc

SEQ ID NO: 19947 - DNA, 1725 bp, synthetic construct
  misc_feature 1..1725: note = source = /note="Description of Artificial Sequence: Synthetic coding sequence"
  source 1..1725: mol_type = other DNA
atgctgggagtgctggtgcttggagccttagcgctagctggactgggcttcccggcccctgcggagccgcagcctggtggatctcagtgtgttgagcatgattgcttcgccttataccctggacctgccacctttctcaacgccagccagatttgtgacggcctcagggggcacttgatgactgtgcggtcctcagttgctgcagacgtcatttccttactgctcaacggggatggtggcgtgggccgacgccgactgtggattgggttacagttgccccctggctgcggtgatcctaaaagactgggccctctgcgtggttttcagtgggtgacaggggacaacaacacttcctacagccgctgggcccgattggatttgaatggagcacccctttgtggccctctctgcgtcgctgtgagcgccgctgaggcgactgtgccgagtgaaccgatctgggaagaacaacagtgcgaggttaaagctgatggctttctgtgtgaattccattttcccgccacgtgtcgtcctttggccgtggaacccggtgccgccgccgcggccgtgagcatcacttatggaacccccttcgctgcaagaggagccgacttccaggctctcccagtggggagcagcgccgctgtggcaccactcggattgcaattaatgtgtaccgctcctccaggggccgtgcagggacactgggcgcgagaagctcctggggcctgggattgttccgttgaaaacggaggatgtgagcacgcatgtaatgcaatacccggggcaccccggtgtcaatgccctgctggagcagccctacaggccgacggcaggagttgcacagcgtcggctactcaaagctgcaatgatttgtgtgaacatttctgtgtgcccaatcctgatcagccggggtcctattcgtgcatgtgcgagacgggttacagacttgccgcggaccagcaccgttgtgaggatgtggatgattgtatactcgagccatctccatgcccacagcgctgcgtcaacacacaaggtggattcgagtgccactgttaccccaactatgacctcgtggacggggagtgtgtggagccagtggacccctgtttccgggcgaactgtgagtatcagtgccagcccttaaaccaaacctcatatctttgcgtctgtgctgaaggatttgcccccattccacatgaacctcataggtgccagatgttttgcaatcaaactgcctgcccagctgattgtgaccccaacacccaggcgtcgtgtgaatgtccagagggttatattctggacgatggctttatctgcacagacatagacgagtgtgagaacggtgggttctgcagcggagtgtgtcataatttgccaggcacatttgagtgtatttgcgggcccgactctgccttggctaggcatatcgggacggattgtgatagcggtaaagtcgacggtggcgatagtggctccggggagcctcctccctcaccaaccccaggaagcaccctgaccccccctgctgtaggtctggtgcacagcgggctgttgattggtatcagcatcgcaagcctctgtctggtggtcgccctgctggcactgctctgtcacctccgtaaaaaacagggggccgcacgggctaaaatggaatacaagtgtgcggcgccatcaaaggaggttgtgctgcagcacgtaaggaccgagcggacccctcaacgattg

SEQ ID NO: 19948 - DNA, 1725 bp, synthetic construct
  misc_feature 1..1725: note = source = /note="Description of Artificial Sequence: Synthetic coding sequence"
  source 1..1725: mol_type = other DNA
atgcttggagtgctggtgcttggagcccttgcacttgccggactcggatttcctgcacccgcagaacctcagccgggcggatcccagtgcgtggaacatgattgctttgcactttaccctggaccggcgactttcttgaatgcatcacaaatctgtgacgggcttcgcggccaccttatgaccgtccgttcctccgtggccgctgacgtcattagcctgctgcttaatggagacggcggtgtcggacgtagacgactctggattgggcttcagctgcccccgggatgtggggaccctaagagattgggccctctccgtggttttcagtgggtaaccggtgataacaatacttcctattcccggtgggcaagactggatcttaacggggcccctctgtgcgggcctctttgtgtggccgtgagcgcagccgaggcaacggtgccttctgaacccatatgggaagaacaacagtgcgaggtcaaggccgatggatttttgtgcgagtttcattttcctgcaacgtgtaggcccctggcggtggaacccggggcagcagcggccgcagtctcgattacctacggaactcctttcgctgcgaggggagcagattttcaagccctgccagtggggtcctcggcagcagttgccccgctcggactgcaattgatgtgtactgctccgccgggcgcagtgcaaggacattgggcacgggaagcaccaggtgcgtgggattgtagcgtcgagaatggcggctgtgagcatgcatgtaacgcaataccaggagccccccgctgccaatgccctgcgggagcggcacttcaagcggacggaagaagctgcactgcaagcgctactcaatcatgtaacgatctgtgtgaacacttttgtgtgccaaaccctgaccagccggggagctactcctgcatgtgcgaaacgggctacagacttgcagcagatcaacatagatgtgaagatgttgatgattgtattctggagccgtcgccttgtccacagcgttgtgtgaatacccaaggtggatttgaatgccattgttaccctaattacgaccttgtggatggcgaatgtgtggaaccggtggatccttgcttccgagcaaactgtgagtaccagtgtcaacctctcaaccagactagctacctgtgcgtgtgtgccgagggattcgcacctattccacacgaaccccacaggtgccaaatgttctgtaaccagactgcttgtcctgctgattgcgatcctaacacccaagcatcatgtgaatgcccagagggctatatcctggacgatgggttcatatgtaccgacatagatgaatgtgagaacggtgggttttgctcaggcgtgtgtcataaccttcccggaactttcgaatgtatttgtggcccggattccgcactcgcgagacatattggaaccgattgtgactctgggaaggtggatggaggcgactcgggatcgggtgaacctccaccatcgcctacccccggatcaacccttactccacccgcggtggggctggtgcactcaggactgctcattggcatctccattgcatccctctgtcttgtagtggcacttttggccttgctctgtcacttgcgcaaaaaacagggggctgccagggctaagatggaatacaaatgtgctgcgccctcgaaggaggtggtccttcaacatgtgcggaccgagagaacccctcaacgcctc

SEQ ID NO: 19949 - DNA, 1725 bp, synthetic construct
  misc_feature 1..1725: note = source = /note="Description of Artificial Sequence: Synthetic coding sequence"
  source 1..1725: mol_type = other DNA
atgttgggagtcctcgtgctgggagcgcttgctctggcgggactggggtttccagcccccgccgaaccgcagccaggaggttcgcaatgcgtggaacacgactgttttgccctctaccctggcccagccactttcctcaatgcgtcgcaaatctgtgacgggttgaggggacacctgatgactgtgagatcctctgtggccgcagacgtgatctcactgctgctgaatggagatggaggtgtcgggagacggcggctgtggatcggacttcaactgccgccagggtgtggcgacccaaagcgccttggaccgctcagaggatttcaatgggtcaccggagataacaatacgtcttactctcggtgggcgcgactcgacctcaacggcgcaccgttgtgcggaccgctctgtgtggccgtgtcggcggccgaagccaccgtgccgagcgagcccatttgggaggagcagcagtgcgaagttaaggcagacggctttctgtgtgaattccattttcccgcaacctgtcgcccgctggctgtggaaccgggtgccgctgcggccgccgtcagcatcacttatgggaccccattcgccgctcgcggagcggatttccaagccttgcctgttggcagctccgcggcggttgctccactgggactgcagctcatgtgcaccgccccgcctggtgcggttcaaggccactgggcccgcgaagccccaggggcttgggactgctccgtggaaaatggtgggtgtgagcacgcgtgcaacgcaatccccggagcgccgcgctgccagtgccccgctggagctgcgctgcaagcggatgggcggtcgtgtacggcttcagctacccaaagctgtaacgacctctgtgaacatttctgcgtccccaacccggatcagccgggtagctactcctgtatgtgcgaaactggataccggctggccgcggaccagcatcgctgcgaggatgtggatgattgtatcctggaaccatcgccgtgcccccagaggtgtgtcaacactcaaggtggcttcgaatgccactgctaccctaactatgacctggtggatggagagtgcgtggaaccagtggacccttgtttccgtgccaattgtgaataccaatgccaaccgctgaaccaaacctcatatctctgcgtctgcgcagagggtttcgcccccatcccgcacgagccgcatcggtgtcagatgttctgcaaccagaccgcctgccccgcagattgtgacccgaacacccaggcctcatgcgagtgcccggagggatacatactcgacgacggattcatctgcactgacattgatgagtgcgagaacggcggcttctgctccggagtgtgccacaatctccctgggactttcgagtgcatctgcggacctgattcggcgttggcgcgccatatcggtaccgactgcgactccgggaaggtcgatggaggcgattcaggctcgggagagcctccgccatcgccaaccccgggttcgactctgactccgcccgctgtgggactcgtccactcgggactgctcatcggaatctccattgcctctctctgcctggtggtggctctgcttgcgctcctgtgccatctgagaaaaaagcagggagccgcaagagccaagatggagtacaagtgcgccgccccaagcaaagaagtggtgcttcagcacgtgagaacggagcgcacccctcagaggttg

SEQ ID NO: 19950 - DNA, 1725 bp, synthetic construct
  misc_feature 1..1725: note = source = /note="Description of Artificial Sequence: Synthetic coding sequence"
  source 1..1725: mol_type = other DNA
atgctcggagtccttgtgctcggagcgctcgcacttgccggacttggttttccagcccccgccgaacctcagccaggtggttcacaatgcgtggaacatgactgtttcgcactttacccggggcctgccactttcctgaatgcatcccagatatgtgacgggctccggggtcatcttatgaccgtgcgatcatccgtcgcagcagacgtgatttcgttgctgcttaacggtgacggtggcgtggggagacgacgcctctggatcggacttcagctgcccccgggttgtggagatccaaaaagacttggacctcttagaggatttcaatgggtgaccggagataacaacacctcatactccagatgggcacgcctggatctcaacggagcacccctgtgtggtccactttgtgtggcagtgagcgcagcagaagcaactgtgcccagcgagcctatttgggaggaacagcaatgtgaagtgaaggcagacgggtttctgtgtgaattccatttccctgcaacgtgtcgtccactggcggtggaacctggcgcagcagctgcagcggtgtcaatcacgtacggtaccccttttgcggccagaggagcggatttccaagcactcccagtcgggtcgtcggcagcagtcgcacccctcggactccaacttatgtgtactgcaccaccaggagccgtgcaaggtcactgggcacgcgaagcacccggcgcatgggattgttcagtggaaaatggtggatgtgaacatgcctgcaacgcaatcccaggagcaccacgatgccaatgtccggcaggtgcagctctccaggcagacggccgctcgtgcactgcatcagccacccagagctgtaatgatctgtgcgaacatttttgtgtgcctaatcctgatcagccggggtcctactcttgcatgtgtgagactggttacaggctcgctgcagaccaacaccgctgtgaagatgtggatgattgcattctcgagccatcaccttgtccacagcggtgcgtcaatacccagggagggttcgaatgtcattgttaccctaactacgatctcgtcgacggggagtgcgtggagccagtcgacccttgttttcgtgcaaattgtgagtaccaatgtcagccacttaatcaaacgtcgtacctctgtgtgtgcgcagaaggcttcgcgcctattcctcacgagcctcacaggtgtcagatgttttgtaaccagactgcgtgtccagcagattgtgatccaaacacgcaagcgtcctgtgaatgcccagaagggtacattctcgacgatgggttcatttgcaccgatatcgatgagtgtgagaatggaggattttgtagcggagtctgtcataatctgccgggcacgtttgaatgtatttgcggccctgattcggccttggcgaggcacatcggcaccgattgtgactccggtaaagtcgacggtggggatagcggaagcggagagcctcctcccagccctactccaggatcgacgctgactcctcctgcagtgggactggtgcattccggacttctgataggaatcagtattgcctcgctgtgccttgtggtcgcactcctggcactgctttgtcaccttcgcaagaaacaaggggcagcacgggcaaagatggaatacaagtgtgcagcaccttccaaggaggtggtgctccaacatgtgcgtactgaaaggactcctcagagactc

SEQ ID NO: 19951 - DNA, 1725 bp, synthetic construct
  misc_feature 1..1725: note = source = /note="Description of Artificial Sequence: Synthetic coding sequence"
  source 1..1725: mol_type = other DNA
atgctgggtgtgctcgtgctgggcgccctggcacttgccggattggggttcccagcacctgcggagccccagcccgggggaagccagtgtgtagaacatgattgtttcgctttgtacccagggcctgctactttccttaatgcatcccaaatatgtgatggcttgcgaggccacctcatgacagtgagaagtagcgttgccgcggatgtcattagcttgttgttaaacggcgatgggggggtgggacgtcgccggttgtggataggactgcaactgcctccaggatgtggggaccctaaacgtctgggaccactccgggggtttcagtgggtgacaggggacaataacacaagttactcaagatgggctcggcttgacctgaatggcgccccattgtgcggccctctgtgtgtggcagtgtccgccgcagaggccactgtgcccagtgagccgatttgggaagaacagcagtgtgaagtcaaagccgacggcttcctttgcgaatttcatttccctgccacttgtcggcccttggctgtggaaccgggagctgctgccgccgctgtgagtattacctatggaacaccctttgctgcaagaggtgccgattttcaggccctgccagtgggatccagcgctgcggtggctcccctgggactccaactgatgtgcactgctcccccgggagccgttcaaggccattgggccagagaggcccctggggcttgggattgtagcgtagagaacggagggtgtgagcatgcatgtaatgccatcccgggcgcaccgcgctgccagtgtcccgcaggggctgccctgcaagcggacgggaggagctgtaccgcgtcagctacccagtcctgcaatgatctgtgcgaacacttttgcgtgccgaaccccgatcaaccaggcagttatagctgtatgtgcgagactgggtatagacttgctgccgaccagcacagatgcgaagacgtggacgattgcatcttggagccctctccgtgcccccagaggtgtgtcaacacccagggcggtttcgaatgccactgttacccaaactatgaccttgtggacggcgaatgcgtggaacctgtcgacccctgtttccgggctaattgcgagtatcagtgccagccccttaaccagacctcctacttgtgcgtctgcgccgagggcttcgcaccaatcccgcacgagcctcataggtgtcaaatgttttgtaaccagactgcttgccccgctgactgtgacccaaacacccaagcctcctgtgagtgtccagaaggttacatccttgatgatggttttatttgtaccgatattgatgaatgcgagaacgggggcttctgttcgggggtgtgccacaatctgcctggaacgttcgagtgcatctgtggtccggattccgccctggctcgccatataggaacggactgcgactctggaaaggtggacgggggtgacagcggttcaggagagcctccgcctagcccgaccccagggagtactctgacaccaccagccgttggtttggtgcacagcggcctcctgatcggaattagcatcgcctccctgtgcctggtggtggcattgcttgccctcctgtgccacctccggaagaaacagggggctgccagagccaagatggagtataaatgtgcggctccatccaaggaggttgtgctgcagcatgtgagaaccgagagaacaccccagcggctg

SEQ ID NO: 19952 - DNA, 1725 bp, synthetic construct
  misc_feature 1..1725: note = source = /note="Description of Artificial Sequence: Synthetic coding sequence"
  source 1..1725: mol_type = other DNA
atgcttggggttctggttttaggagccctggctctggctggcctgggctttccagccccggctgaacctcagcctggaggctcccagtgcgtagagcatgactgctttgcgctgtacccaggcccagccacgtttctgaatgcatcccagatatgtgatggattgcgggggcacctgatgacggtccgcagctccgtcgcggctgacgtgatttctcttctgctcaatggtgacgggggcgtgggaaggcgccgtctgtggatcgggctgcagctgccccctggctgtggggatccaaaaagacttggacctctgcgaggcttccagtgggtcacaggagacaacaatacaagctactcaagatgggcccgcctggacctgaatggtgctccactttgcggtccattgtgtgtcgcagtgtctgccgccgaagccacagttccttccgagccaatttgggaggaacaacagtgtgaagtgaaggccgacgggttcttgtgtgagttccactttcccgcaacgtgtagacccttggccgtggagccaggtgccgctgccgctgctgtgtccataacgtacggaaccccattcgcagccagaggagcagattttcaagctttgcccgtggggtcatctgcagcagtcgcccccttaggcctgcaattgatgtgtacggcacctccgggcgccgtccaaggacactgggctagggaggcccctggtgcctgggactgtagcgtcgagaacggaggctgtgagcacgcatgcaacgccatccctggagcaccccgctgtcaatgccccgcaggtgccgccttgcaggcggacggcagatcttgcaccgcgagcgcaacccagagttgcaacgatttgtgcgagcatttttgtgtgcccaatcctgaccagcctggctcctatagttgcatgtgtgagacgggctatcggttggctgctgatcagcatcgctgcgaagatgtcgacgactgcatcttggagccatcaccctgtccccaaagatgcgtgaatacacagggcggatttgaatgccactgctatccgaattacgaccttgtagacggggaatgtgtcgaaccagttgacccatgtttccgggctaattgcgagtaccagtgccagcccctgaatcagaccagctatttgtgcgtctgcgccgaaggctttgcaccgataccccacgagccgcatcgttgtcagatgttttgcaaccaaacagcctgtccggccgattgtgaccctaacacacaggccagttgcgaatgccccgagggttatatcctggacgatggcttcatctgtaccgatatcgatgaatgcgagaacggcggcttctgttccggcgtttgccacaatcttcctggcacattcgagtgtatttgcggccccgactccgccttagcccggcacatcggaacagattgtgactctggcaaggtcgatggaggggactctggatctggggaaccacctcctagccccactccaggcagcacgctgactccccccgccgtgggcctggtacattctgggctgctaattggcatttcaatcgcatccctctgcttggtagtggctctcctggcacttttatgccatttacgaaaaaaacagggagctgctagggccaaaatggaatataagtgcgctgcgccttctaaggaggtggtgctgcagcatgttaggactgaaagaacaccacaacggcta

SEQ ID NO: 19953 - DNA, 1725 bp, synthetic construct
  misc_feature 1..1725: note = source = /note="Description of Artificial Sequence: Synthetic coding sequence"
  source 1..1725: mol_type = other DNA
atgctgggtgtcttggtgctgggggcgctggccctggcaggactgggcttccccgctccagcagaacctcagcccggaggaagtcagtgtgtggaacatgattgttttgcactgtatcccggacccgcgacattcctcaatgctagccagatctgcgacggccttaggggtcatttgatgacggtacgtagttctgtggcagcagatgtgatttcccttcttttaaacggagatggaggggtgggccggaggcgcttgtggatcggattgcagctgccccctggatgtggagaccccaagagattgggacctctcagaggattccaatgggtgaccggagacaacaacacctcttacagccgctgggcgcgactcgacttaaatggagctcctctgtgcgggcccctgtgcgtcgccgtgagtgccgccgaagctaccgtcccgtctgagcctatctgggaggaacaacagtgtgaggtgaaggcagatggctttttgtgcgaattccacttccccgctacgtgtcggcccctggcagtagagccaggtgccgccgctgccgctgttagtattacatacggtaccccattcgctgcccggggcgcagacttccaggccctgcccgtgggatccagtgcagccgtggcccctctgggtctgcagctcatgtgtaccgctccccctggcgctgtccagggacattgggcgagggaagctcctggagcctgggactgcagcgtcgaaaatggcggctgtgaacacgcatgcaacgctatcccaggggccccgcgatgtcagtgtccagccggcgcggccctgcaggctgatggcagatcctgtactgctagcgcaactcagtcgtgtaacgatctgtgtgagcacttctgtgtgcctaacccggaccaacctggttcctacagttgcatgtgcgaaacaggctaccggcttgccgccgatcaacataggtgcgaggatgtggacgattgcattttagaaccaagtccatgtccccagcggtgcgtgaatacacagggtgggttcgagtgtcattgttatccaaactacgatctcgtggatggggagtgtgtggaaccagtggacccgtgttttagggcaaattgcgaataccaatgccagcctctgaaccagaccagctacctgtgcgtgtgcgcagagggtttcgccccaatcccccacgagccgcaccgctgccagatgttttgtaatcagaccgcatgcccggccgactgcgatcccaacacccaagcgagttgtgaatgccctgaagggtatatccttgatgatgggttcatttgcacagatattgacgagtgcgagaacggaggattctgctctggggtatgtcacaacctgcctggcacatttgaatgtatctgcggcccagacagcgcgctcgcacgccacatcgggacagactgcgattctggtaaggtggatggaggggatagcggctcaggagagccaccaccctcacctacaccaggttcaacattgactccacctgccgtgggcctggttcactccgggcttctaattggcataagcattgcttccctttgccttgtggtggccctgttggccttactgtgtcatctccgaaaaaagcaaggtgccgctagagcgaaaatggagtataaatgtgccgctcctagcaaagaggttgtcttgcagcatgttcggaccgaacggactcctcagagacta

SEQ ID NO: 19954 - DNA, 1725 bp, synthetic construct
  misc_feature 1..1725: note = source = /note="Description of Artificial Sequence: Synthetic coding sequence"
  source 1..1725: mol_type = other DNA
atgctaggtgtcctggtgcttggcgcacttgctctggccggcctgggcttcccagctcctgccgaaccgcagcctggcggcagccagtgcgtggagcacgattgtttcgccctgtaccccgggcctgcaacctttttgaatgccagccaaatttgcgacggcttgcgtggacatctgatgacagtgcgctcgtctgtggcagctgacgtaatttctctactgttgaatggagacgggggggtagggcgcaggcggctatggatcgggttgcagttacctcctggctgcggtgacccgaagaggctggggcctctgcgaggatttcaatgggtcacaggggacaacaacacttcgtattcacgatgggctagactcgacctcaatggagcccctctgtgtggcccgctgtgtgttgcggtttctgccgccgaggccacagtcccaagtgagcccatctgggaagaacagcaatgcgaagtgaaagcggacggatttctctgtgaattccactttcctgcaacttgccgaccattagcagtagagccaggggcagccgccgcggcagtgagtataacttacggaactccttttgcggctaggggtgcggatttccaggctctacctgtgggctcctcagctgctgtggccccactgggcctgcagttgatgtgtacagctccacccggcgccgtgcaggggcactgggcgcgggaagctcccggggcatgggattgctccgtcgagaacgggggctgtgagcacgcctgcaacgccatcccaggagctcctcgatgccagtgccctgccggagctgcactgcaggcggacggcaggtcttgcactgcatcagcaactcagtcttgcaacgacctctgcgagcacttttgtgttcctaatcccgatcagcccggctcatactcatgtatgtgcgaaacaggctaccgtctagccgcagatcagcatcgttgtgaggatgtcgatgattgcatcctagaaccaagtccctgtccacagagatgcgtgaacactcaggggggcttcgagtgccactgttatcctaactatgatctagttgacggggaatgtgtagagcccgtcgacccatgcttccgagcgaattgcgagtaccaatgtcagcctttgaatcagacatcctacttatgcgtctgtgctgaaggtttcgcccctattccgcatgaacctcaccgttgccagatgttctgcaatcagactgcttgtcccgcagactgcgaccccaatacccaggccagctgtgagtgtcccgaaggctatatattggatgacgggtttatttgcacagacattgacgaatgcgagaacgggggattttgctccggcgtttgccacaatctgcccggtacattcgagtgcatctgcggccccgattctgcactggcccgccacattgggaccgattgcgattcaggaaaagtggatggaggggatagtggatcgggcgagccacctccgagccctactcctggtagcaccctgacacccccagcagttgggctggtccacagcggtttgctgatcggaataagcatcgcctctctgtgtcttgtagtagctctgctggcgctgttatgtcacctccggaaaaagcaaggagcagcccgggccaaaatggaatacaagtgtgctgcaccttccaaagaagttgtgcttcagcacgtgcgcaccgagaggacccctcaacgtctc

SEQ ID NO: 19955 - DNA, 1725 bp, synthetic construct
  misc_feature 1..1725: note = source = /note="Description of Artificial Sequence: Synthetic coding sequence"
  source 1..1725: mol_type = other DNA
atgttgggcgttctcgtgctcggcgctctggccctcgctggactcggcttccccgctcccgcagagccacaacccggcgggtcccaatgcgtcgagcacgactgtttcgccttgtaccctgggcccgcaactttcttgaatgccagtcagatctgcgacggcctgcggggacacttaatgaccgttagatcctccgtcgctgccgatgtgatctcactcctgttgaatggagatggaggcgtcggccgccgccgcctgtggatcggattgcagctgcccccagggtgcggtgatcctaagcgcctcgggcctctccggggttttcagtgggtgacaggtgacaacaatacctcttactctcggtgggctcgtctggacctgaatggcgcccccctctgtggcccactgtgtgtggcagtgagtgccgccgaggccacagtgccctccgagcccatttgggaagaacaacagtgtgaggtaaaagcagacgggtttctttgcgaatttcatttcccggctacatgccgccctctcgcggtggagccaggagctgcggctgctgccgtatcaatcacatatggcactcctttcgcagctcgtggcgccgacttccaagctctcccggtaggatccagcgcggccgtggcacctctgggactccagcttatgtgcacggctccacccggggcagtgcagggacactgggctagagaggcccccggtgcttgggactgcagcgtggagaatgggggctgtgagcacgcctgtaatgccattcctggcgctccaagatgccagtgtcctgcgggagcagctttgcaggcagatggacgatcttgcaccgccagtgccactcagagttgtaatgacctttgtgagcatttctgcgtgccaaatcccgaccagcctggctcatattcgtgcatgtgcgagacgggatatcggcttgccgctgaccagcatagatgtgaggacgtggacgattgtatcctggagccgagcccatgtccccaacgctgcgtcaatacgcagggcggcttcgagtgtcattgttaccctaactatgatctcgttgatggtgaatgcgtcgagcccgttgatccatgtttccgcgcgaattgcgagtaccagtgtcagcccctcaaccagacgagctacctctgcgtgtgtgctgagggtttcgctccgattccacacgagcctcaccgatgccagatgttttgtaatcagacagcctgccctgcagattgcgatcccaatacacaggcttcttgcgagtgtcccgaggggtacatcctcgacgacggattcatctgcaccgacattgacgagtgtgagaatggcggcttttgttctggggtttgtcataatttaccaggcacattcgagtgtatatgtggcccagattctgcactggcacggcatattggaacagattgtgattctggcaaagttgacgggggtgatagtgggtccggagaaccgccgcctagtccaacccccggatccaccttaacaccccctgctgtaggtctggtgcatagcggcctcctgattggtatttcaatagcttctctgtgtctcgtcgtagccctgctggcgctgctgtgtcacctgcgcaagaagcagggggccgcccgggctaagatggaatacaaatgtgccgctccatctaaggaggtggttctgcagcacgtgcggacggagcgaactccacaacgtttg

SEQ ID NO: 19956 - DNA, 1725 bp, synthetic construct
  misc_feature 1..1725: note = source = /note="Description of Artificial Sequence: Synthetic coding sequence"
  source 1..1725: mol_type = other DNA
atgctaggagtactggtgcttggagccctggcccttgcaggtctggggttccccgcccctgctgaaccacagccaggcggatcccagtgcgttgagcacgactgcttcgccctgtacccgggacccgcaacattccttaatgcctcgcaaatttgtgacggactgcgcgggcacctgatgactgtaaggagcagtgtggctgccgatgttataagcctgctcctgaacggagatggcggagtcggacggcgacgcctgtggattggcctgcagctgcccccgggctgcggtgatccgaagcgtttgggccctcttaggggttttcaatgggttaccggagacaataacacaagctacagcaggtgggcacggttagacctcaacggcgctccattgtgtggaccgctttgtgttgcagtgagtgctgctgaagctactgtgccctctgagcctatctgggaggaacagcaatgtgaggtcaaggccgacgggtttctatgtgaatttcatttccctgccacttgccgcccactggcagtcgagcctggggctgccgcggcagccgtgagcattacttacggcactccatttgccgcacgaggcgcagacttccaggctctgcccgtagggagcagcgccgccgttgccccactaggattgcaactgatgtgcaccgcccctccaggagccgtgcagggccactgggcacgcgaagcacccggtgcttgggattgcagcgtcgaaaatggtggctgcgagcatgcctgcaacgctatacccggcgcccctagatgtcaatgccctgcaggagctgcactccaagccgatggaagatcctgcacagcatcagctacgcagagctgcaacgacctatgcgagcacttctgcgtgccaaaccccgatcaacctggcagttactcctgcatgtgcgagaccggatacaggcttgcggcggatcagcatcggtgtgaggatgtcgacgactgtattttggagcctagtccgtgtcctcagaggtgtgtaaacactcagggcggtttcgaatgccactgttaccctaactatgatctggtcgacggggagtgtgtagaacccgttgatccatgctttcgcgccaactgtgaataccagtgtcaacccctgaaccaaacctcgtacctgtgcgtgtgcgccgaagggttcgcccccatcccccacgaacctcaccgttgtcagatgttctgtaatcagaccgcgtgccctgcggactgtgatccaaacacgcaagcctcatgtgagtgcccagagggctacattttggacgatggctttatctgcaccgatatcgacgaatgcgagaacgggggcttttgttccggcgtgtgtcataacctgcccgggaccttcgaatgcatttgtggcccggattcagctttagcccgccacatcggcacagactgtgactcaggcaaagttgacgggggcgattctggctctggggagcctccaccctcccccacccctggatcgaccctcaccccacctgctgttggtctcgtgcactctgggctgctcatcggaatctccattgcctcattgtgtttagtggtcgcattgttggccctgctgtgtcacttgagaaaaaaacaaggcgcggcacgagcgaaaatggagtataaatgcgccgccccatctaaggaggtggtactgcagcatgttagaaccgaacgtaccccccaaaggctc

SEQ ID NO: 19957 - DNA, 1725 bp, synthetic construct
  misc_feature 1..1725: note = source = /note="Description of Artificial Sequence: Synthetic coding sequence"
  source 1..1725: mol_type = other DNA
atgcttggagttctggtgctcggcgcattggcactggcaggactgggcttccctgcacctgcagagcctcaacctgggggatcgcagtgtgtggagcatgactgtttcgcgctctatccgggaccggcaaccttcctgaatgcttcgcaaatttgtgacggactgcgtggtcacctgatgaccgtcaggtccagcgtggccgcggatgttatatcattgctgctgaatggggatggaggagtgggacggcgcagactctggattggtttgcaactcccgcccggttgcggagatcctaagcgtctgggaccactccgggggtttcaatgggtgaccggtgataacaacacttcgtatagtcgctgggcgcgcctggatcttaatggggcaccgttgtgtgggccgctctgcgtggcggtgtcagctgccgaagcaaccgtcccaagcgaaccaatctgggaagagcaacagtgtgaggtgaaggcagacggattcctttgtgaatttcattttccagcaacttgcagaccactggcagtggaacctggcgctgccgcagccgcagtctcgattacttacgggacgccgtttgccgcacgcggtgcagattttcaagcgcttcccgttggttcgagcgccgccgtggctccgctgggtctgcaacttatgtgcacggcaccaccaggtgcagtccaaggtcattgggctcgcgaagccccaggagcttgggattgctcggtggaaaacggaggatgcgaacatgcttgcaacgccattcctggagcgcctcggtgccagtgtcccgcaggtgctgcacttcaggccgacggacgttcatgtactgcgtcagcaacccagtcctgtaatgatctttgcgaacatttttgtgtgccaaacccggaccaaccaggatcatactcctgtatgtgtgaaaccggttaccgtctggcggctgaccaacatcgctgtgaagatgtggacgattgtatcctcgagccatccccttgtccacagcggtgcgtaaacacccaaggcggtttcgaatgtcactgctaccccaactacgatttggtggatggtgaatgtgtcgaacctgtggacccttgcttccgtgcaaactgtgagtaccaatgtcagccactgaatcaaacttcgtacctttgtgtgtgcgccgaaggatttgcccctattccacatgaaccccatcgttgtcagatgttttgtaatcaaactgcgtgtccggcggattgtgaccccaacacgcaggcatcctgtgagtgtcctgaggggtacattctggatgacggattcatatgcactgatatcgacgaatgcgagaacggaggcttttgtagcggcgtgtgccataacctgcctggaacttttgagtgcatttgcggaccagattccgcactcgcgcgacacatcggcaccgactgtgactcgggaaaagtggatggaggggattccggtagcggggaaccaccaccatcgccaacgccgggatcgacccttactccccctgcggtgggattggtgcatagcggactgctgattggaatcagcatcgcctccctttgtctggtcgtggcccttttggcactcctctgtcacctgaggaagaagcagggtgcagctagagcaaagatggaatacaaatgcgctgccccatcgaaagaggtggttcttcagcacgtgcgcaccgagcggactccacagaggctt

SEQ ID NO: 19958 - DNA, 1725 bp, synthetic construct
  misc_feature 1..1725: note = source = /note="Description of Artificial Sequence: Synthetic coding sequence"
  source 1..1725: mol_type = other DNA
atgttaggtgtattagttttaggtgcgctagcgttagcgggtctaggttttccggcgccggcggaaccgcaaccgggtggttcgcaatgtgttgaacatgattgttttgcgttatatccgggtccggcgacgtttttaaatgcgtcgcaaatatgtgatggtttacgaggtcatttaatgacggtacgatcgtcggttgcggcggatgttatatcgctactattaaatggtgatggtggtgttggtcgacgtcgactatggataggtctacaattaccgccgggttgtggtgatccgaaacgtttaggtccgttacgtggttttcaatgggttacgggtgataataatacgtcgtattcgcgttgggcgcgtctagatttaaatggtgcgccgctatgtggtccgttatgtgttgcggtttcggcggcggaagcgacggttccgtcggaaccgatatgggaagaacaacaatgtgaagtaaaagcggatggttttctatgtgaatttcattttccggcgacgtgtcgtccgctagcggttgaaccgggtgcggcggcggcggcggtttcgataacgtatggtacgccgtttgcggcgcgtggtgcggattttcaagcgctaccggtaggttcgtcggcggcggttgcgccgctaggtttacaattaatgtgtacggcgccgccgggtgcggtacaaggtcattgggcgcgtgaagcgccgggtgcgtgggattgttcggtagaaaatggtggttgtgaacatgcgtgtaatgcgataccgggtgcgccgcgatgtcaatgtccggcgggtgcggcgttacaagcggatggtcgttcgtgtacggcgtcggcgacgcaatcgtgtaatgatttatgtgaacatttttgtgttccgaatccggatcaaccgggttcgtattcgtgtatgtgtgaaacgggttatcgtttagcggcggatcaacatcgatgtgaagatgttgatgattgtatactagaaccgtcgccgtgtccgcaacgttgtgtaaatacgcaaggtggttttgaatgtcattgttatccgaattatgatttagttgatggtgaatgtgtagaaccggtagatccgtgttttcgtgcgaattgtgaatatcaatgtcaaccgctaaatcaaacgtcgtatctatgtgtatgtgcggaaggttttgcgccgataccgcatgaaccgcatcgttgtcaaatgttttgtaatcaaacggcgtgtccggcggattgtgatccgaatacgcaagcgtcgtgtgaatgtccggaaggttatatattagatgatggttttatatgtacggatatagatgaatgtgaaaatggtggtttttgttcgggtgtttgtcataatttaccgggtacgtttgaatgtatatgtggtccggattcggcgttagcgcgtcatataggtacggattgtgattcgggtaaagtagatggtggtgattcgggttcgggtgaaccgccgccgtcgccgacgccgggttcgacgttaacgccgccggcggttggtctagttcattcgggtttactaataggtatatcgatagcgtcgctatgtttagttgttgcgttactagcgctactatgtcatttacgtaaaaaacaaggtgcggcgcgagcgaaaatggaatataaatgtgcggcgccgtcgaaagaagttgtattacaacatgtacgaacggaacgaacgccgcaacgtcta

SEQ ID NO: 19959 - DNA, 1059 bp, synthetic construct
  misc_feature 1..1059: note = source = /note="Description of Artificial Sequence: Synthetic coding sequence"
  source 1..1059: mol_type = other DNA
atggagctgaccgagctgcttctggtcgtaatgctgctgttgactgccagactgactctctcctcacccgccccaccagcttgtgatcttcgcgtgctgagcaagctccttagggactctcatgtattgcattctcgattgagccaatgcccggaggtccacccacttcctacgccggtgctgctgccagcagtggacttctccttgggcgagtggaaaacacaaatggaggagacaaaggcgcaggacattctaggagcagtgacactattgttggaaggcgtgatggccgcacgcggccaacttggcccgacctgtctgtccagcctgttgggacaactctctgggcaggtgagactgttactcggggccctgcagtccttactgggcacccagctcccacctcagggcagaaccacggcacacaaagatcccaatgcaatattcctgagctttcagcacctgctgcggggaaaagttcgctttctgatgctggtgggcggctcaacgctgtgcgttcggagagccccgcccactaccgctgtcccgagcaggacgtccctggtgctaaccttaaacgaactgcctaaccgcaccagcgggctgctggagacaaatttcaccgcaagtgccagaaccactggctcaggcctcctgaagtggcaacagggcttccgggccaagatccccggcctgttgaaccagaccagcaggagcctggaccagatacctggttacctgaacaggatacacgagctcctgaatgggacccgcgggttgttcccagggcctagcagacgtacgttgggcgctccagacatctcttcaggcacctccgacaccggatccctgcctccgaatctacaacccggttactcacccagtcccacacacccaccgaccggacaatatacactcttcccactgcccccgacactgcccaccccagttgtgcagttacacccgctcttgcccgatccctctgcccccactcccacccccacgagtccactgctcaatacctcctatactcattcacagaacctctcacaagagggt

SEQ ID NO: 19960 - DNA, 1059 bp, synthetic construct
  misc_feature 1..1059: note = source = /note="Description of Artificial Sequence: Synthetic coding sequence"
  source 1..1059: mol_type = other DNA
atggagctcaccgaactgctgctcgtagtcatgttactactgactgcacggctcacactctcatctcccgcaccaccggcatgtgacttgagagttttatccaaattgctgcgggatagtcatgtactgcactcgagactgagtcagtgcccagaggtgcatcccttaccgacccctgtgttactgcctgccgttgatttttcattgggcgaatggaagacacagatggaagagaccaaggcccaggatattttgggagccgtgactctgttgctggaaggcgtcatggccgccagagggcagctcggcccaacgtgtctctcctcgctactgggccaactttcgggacaagtgcgattgctgttaggagccttgcagtccttactgggaacccagctgcccccccagggaaggacaactgcccacaaggaccctaatgcgatatttttgtctttccaacatcttctgcggggaaaggtgcggttcctgatgttggtcggtggatccactctgtgtgtcaggcgcgctcctccaaccactgctgtgccctcgcggacctcactggtgttgacccttaatgagttacctaacagaacttccggtctgctggagactaattttaccgccagtgcccggacaacagggagcggtttgctaaagtggcagcagggattcagggccaaaattccaggactcctgaaccagacctctcgctccctcgaccagatcccaggttatctcaaccgcatacacgaactgcttaatggaacgaggggtctctttccaggcccaagtcgacgcactcttggagccccagatatctcttcaggtacatctgatacaggctcactccctccaaacctgcaacctggctattccccctcacctactcacccacccacaggccagtacacactgttccctctgccccccaccctgcccacacccgtggttcaactgcacccccttcttccagacccaagtgcacctacaccaactcccacgtctccccttttgaatacgagttatacacatagtcagaatctctcgcaggaaggt

SEQ ID NO: 19961 - DNA, 1059 bp, synthetic construct
  misc_feature 1..1059: note = source = /note="Description of Artificial Sequence: Synthetic coding sequence"
  source 1..1059: mol_type = other DNA
atggagctcacagagttgcttctggtggtgatgttgctgctgacagcacgactgacgttgtcctcccccgcgcccccagcctgcgatttacgtgtgctgagcaagctgctccgggacagccacgtactgcacagcagactcagtcaatgtccagaggttcacccactgcctacacccgtcctgctgcccgcggtcgatttcagcctgggagagtggaagacacagatggaggagactaaagctcaggatatcttgggggctgtaaccctacttctggagggcgttatggccgcccggggccagctggggcccacctgtctgtccagtctgctagggcagttaagtggccaggtgaggctccttttgggggcccttcaatccctgctcgggacacagttgcccccccagggaaggactactgcacacaaggatcctaacgctatctttctgagcttccagcacctacttcgtggaaaggttcgcttcctgatgctggtgggcgggtcaactctctgtgtgaggagagcaccgcccaccaccgcggtgccaagtcgcacctcccttgtcttgaccctcaacgagttgcctaatcgaacaagcggactcctggagacaaatttcacagcctctgctcgaacaacgggaagcggcttgttgaagtggcagcaaggctttagggctaagattcctgggttgctgaatcaaacttcacggtccctggatcagatcccgggttacctcaataggatacacgagcttctgaacggaaccagggggttgtttcccgggccatcacggcgcacactgggcgcccctgatatcagttccgggacatcagacacaggaagtttaccgccaaacctgcagccaggatatagcccttcaccaacccatccgcctacagggcagtacactttattcccacttccccccacattgcccaccccggtggtgcagctgcaccctctcctccccgacccatccgccccaacacctacacccacatctccacttttaaacacttcctatacccactctcaaaacctttcccaggaaggc

SEQ ID NO: 19962 - DNA, 1059 bp, synthetic construct
  misc_feature 1..1059: note = source = /note="Description of Artificial Sequence: Synthetic coding sequence"
  source 1..1059: mol_type = other DNA
atggaattaactgagctgttgcttgtggtgatgttgcttttaactgccaggctaacattgagcagtcctgctcctcctgcttgtgatttgcgggtgctatccaaactgttgagggattctcacgtgcttcatagtcgcctgtcacagtgtcccgaggttcacccacttccgactcctgtacttctccccgccgttgacttcagcttgggcgagtggaaaacccagatggaagagaccaaagcacaagatatactgggggctgtaaccctgctgctcgaaggcgtgatggccgccagggggcagcttggtcctacatgtttgtcttcattgctcggccagctgagtggccaggtacgactgttgctgggagcattgcagtcgctactaggcactcagttgcccccccagggtcgtacaactgcgcataaggaccccaatgcgatcttcctctcgtttcagcatctcctccgagggaaggtccggttccttatgctggtgggcggatctacactgtgcgtacgccgagccccacccacaaccgctgtccccagtaggacaagcctagtactgaccctgaatgaactgccgaatagaaccagcggcctgctggagacgaattttacagctagtgcacggactaccggctccgggctgctcaaatggcagcagggcttccgggctaaaatccccggactgttaaatcagacctccagatctctggatcagattcctggctacctgaatcgaatccatgagcttttaaatggcacccgaggtttgttccccgggccatcccgaaggacgctaggagcacccgatataagtagcggaacctccgacaccggaagtctgccccctaacctgcagcccgggtatagtccctcacccacacatcccccaacaggacagtacacgctctttcccttacccccaacgcttcccacaccagtagtgcagctacatccactgctccctgatccgtctgccccgaccccaactcctacaagcccacttcttaatactagctacactcactctcagaatctgagccaggagggg

SEQ ID NO: 19963 - DNA, 1059 bp, synthetic construct
  misc_feature 1..1059: note = source = /note="Description of Artificial Sequence: Synthetic coding sequence"
  source 1..1059: mol_type = other DNA
atggagctgactgagctgctcctagttgtgatgctgttgctgactgctcggctgactctcagtagtcctgccccgcccgcatgcgaccttagagttctcagtaagctgctcagagatagccatgtgctccactcaagactgtcacagtgccctgaggtgcaccctctgccaactccagtgctcctgcctgcggtcgacttctcattgggggagtggaagacgcagatggaagaaactaaagcccaagacattctgggggccgtcacattacttctggagggcgtaatggctgcccgagggcagctcggaccgacctgcctgtcttcactgttaggtcagctcagcggccaggtcaggctactactaggagcactgcaaagcctcttgggaactcagctgcctcctcagggaagaactacggcccacaaagatccgaatgctatttttctgagcttccagcacctattgaggggaaaggtcaggttcctgatgctggtgggaggctcgacactgtgcgtcagacgagcccctccgaccaccgcggtgccctcccggacctcactggtgctcaccctgaatgagttaccaaacaggacatcgggtttattggaaaccaattttactgctagcgcccgcacaacaggcagtggcctcctgaaatggcagcagggcttccgggccaaaatccccgggctgctgaatcagactagccgatcattggatcagatccccggatatctaaatcgcatccacgagctcctcaacggcaccaggggtctgtttcccggaccctcgcgacggactctgggggctcccgacatctcaagcggcacgagcgacacaggcagtttgcctccaaacttgcagcccgggtactcaccctcacccactcacccacctaccgggcagtacaccttgtttccgcttcctcctacacttcccacacccgtggttcaattgcacccactgctcccagatcccagtgcgccgactcccaccccgacatcgccacttctgaatacttcctacacgcacagccagaatctctcgcaggagggg

SEQ ID NO: 19964 - DNA, 1059 bp, synthetic construct
  misc_feature 1..1059: note = source = /note="Description of Artificial Sequence: Synthetic coding sequence"
  source 1..1059: mol_type = other DNA
atggaacttactgagctgttgctggtggtcatgctcctgctgaccgccaggctgactctttcttcaccagccccaccagcctgtgatcttcgcgtgctgtccaagttgcttagggattcccatgtcctccactcacggctgagtcagtgtcctgaggtgcatccactgccaacgccagtgcttcttcctgcagtggatttttcactgggcgaatggaaaacgcagatggaggaaaccaaggctcaggatattcttggtgctgtgacccttctgttggagggcgtgatggcagccaggggccaacttggcccaacttgtctgtcatcgctccttggacagctgtcgggacaagtgcggctgctcctgggcgcacttcagtcactcctcggaacccagttgccgcctcagggtcgaaccacggcccataaggaccctaatgcaatattcctgagctttcaacatctgctgcgaggaaaggtcagatttctgatgctggtgggaggatcaaccctttgcgtgagacgggcacctcccactactgcagtgccctccaggacctcgctggtgctgactcttaacgaactgccaaacagaacttcgggtctgctggaaaccaatttcaccgcctcggctagaaccactggatccggactgttgaagtggcaacaaggctttcgtgccaaaattcctggccttctcaatcaaacttcgcgatcgttggaccagattcccgggtaccttaatcggatccacgaactgctgaatggtactagaggacttttccctggaccgagcagaagaactctcggtgcaccagatatctcctccggtaccagcgacaccggaagccttcctcctaaccttcagcccggatactccccgagccctactcacccgcctaccggacaatacacgctgtttccacttcctccaaccctccccacccctgtggtccaactccatcctctgctgcccgacccctcagcacctacccctaccccaacctcgcctctgctgaacaccagctacactcactcccaaaatctctcacaagaaggt

SEQ ID NO: 19965 - DNA, 1059 bp, synthetic construct
  misc_feature 1..1059: note = source = /note="Description of Artificial Sequence: Synthetic coding sequence"
  source 1..1059: mol_type = other DNA
atggaacttaccgagttgcttctcgtcgtgatgcttctccttaccgcacgcctgactctttcgtcaccagcccctccagcatgtgatctgagggtgctgagcaagctgcttagagattcacatgtcttgcactcccgactctctcaatgccccgaggtccacccgctccctactcccgtgttgctgcctgctgtcgacttctctctgggagaatggaaaacccagatggaggaaaccaaggcacaggacattctcggagcggtgactctcctcctcgagggtgtgatggcggcccgtggccaacttggacctacttgcctgtcgagcctcctcggtcagctttccggccaggtgagattgctgctcggtgctctgcagtcactgctcggaacccagctgcctccacaaggaagaacgacggcccataaggacccgaacgccatctttctgtcctttcaacatttgctgagggggaaggtccgttttcttatgctggtgggcgggtcaaccttgtgtgtgagacgggcacccccgactactgcagtaccatccagaacttccctggtgctgacgctgaacgaacttccaaatcgaaccagcggcctgctggaaactaatttcaccgcaagcgcacgcactaccggaagcggattgctgaagtggcaacagggattccgggccaaaatcccaggactgcttaaccaaacctcacggtccctcgatcaaattcctggctaccttaatcgaattcacgaactgctgaatggtaccagaggtctgtttcccggtccgagccgcaggaccttgggggctcctgatataagctcgggcacgtcagatactgggagccttcccccaaaccttcaaccgggttattcgccatccccaactcatcctccgaccgggcagtacactctttttccgttgccgcctaccctcccaacgccagtggtacaactgcatccactgctccccgatccctccgcacctacgccaactcctacctcgcctcttctcaacacctcatacacccatagtcagaacctttcccaagaagga

SEQ ID NO: 19966 - DNA, 1059 bp, synthetic construct
  misc_feature 1..1059: note = source = /note="Description of Artificial Sequence: Synthetic coding sequence"
  source 1..1059: mol_type = other DNA
atggagcttaccgagttgcttttggtagtcatgctcctgctgactgccaggctcaccttgagcagtccagcacctcctgcttgcgatctcagggtgctgtcaaagcttctccgcgactctcatgtcctccattccagactcagccagtgtcccgaagtccatcccctccctacaccggtgctcctgcccgcagttgactttagccttggcgagtggaagactcagatggaggagacgaaggctcaggacatcctgggggcggttaccttgttgttggaaggtgtgatggctgctagggggcagctggggcccacctgccttagctccctccttggtcagcttagcggtcaggttcgattgctgctcggcgctctgcagagtctgctgggcactcagctccctccccagggacgcacaacggcacacaaagatcctaacgcaatttttcttagcttccagcacttgctccggggtaaagtgcgatttctcatgctcgtcgggggcagtacactgtgtgtaagacgcgccccccccaccaccgcagtgccatcaaggacatcactggtgctgacgctgaatgagctgcccaatcgaacaagtggtttgctggagacgaattttaccgccagcgcaagaacaacaggctctgggctgctgaagtggcagcaggggtttagggctaagatccctggccttctgaatcaaacttctaggtccctggaccaaattcctggctatctcaacaggattcacgaactgctgaatggtacacgagggctgttccccggcccgtcccggagaactctgggggccccggacataagcagcggtacgtctgatacaggctccttgcctccaaacctgcagcccggatactcacctagcccaacacaccctccgaccgggcaatacacccttttccccctgccgccgactcttcccaccccagttgtccagcttcaccccttgttgccagacccctccgcccccacgccaactcctacctccccactccttaacacgagctacacccattcacagaacctgagccaggaggga

SEQ ID NO: 19967 - DNA, 1059 bp, synthetic construct
  misc_feature 1..1059: note = source = /note="Description of Artificial Sequence: Synthetic coding sequence"
  source 1..1059: mol_type = other DNA
atggagctgaccgagttattgctggtggtaatgctgctcttaacagcaagacttactctaagctctccagcccccccagcttgtgaccttcgcgttctgtctaaactgctgagggattcccacgtgctccactctaggctttcccagtgtccagaggtccaccctttgccgactcccgttttactccctgccgtggacttctctctcggcgagtggaaaacacagatggaggaaacaaaagcacaggacattctaggcgctgtcacactgctgctggagggcgtcatggcggcccgagggcagcttgggcctacgtgtctcagcagcttgcttggacaactgtccggtcaggtccggctcctgctgggagctctccaaagtctgctgggaacccagctgccacctcagggcaggaccacagcccacaaggatcctaacgccatcttcctgagcttccaacacctcttaagagggaaggtccgattcctgatgctggtcggtggatccacactgtgtgtgcggcgggcaccccccactacggccgtccctagcaggacctctttagtcttgactctaaacgagctgcccaatcggacttccggattacttgagacaaattttacagcgagcgctcggacaacaggttctggactcttgaagtggcagcagggattcagggcgaaaataccgggcctactgaatcagacgtcccggagccttgatcagattccagggtatcttaatcggatccacgaactcctgaacgggacacgcggattgttccctggtccctctcgccggactctgggtgctccagatatctcttctggcacgtcagacaccgggtcgttgcctcctaatttacagcctggctattcaccatcacctactcaccctcccactggacagtacacccttttccctctgcccccaactctaccaaccccagttgtccagctccatccgttactgccggatccctccgctcccacacccaccccaacatcacctctgttgaacacatcatacacacactcacaaaacctctcccaagaaggc

SEQ ID NO: 19968 - DNA, 1059 bp, synthetic construct
  misc_feature 1..1059: note = source = /note="Description of Artificial Sequence: Synthetic coding sequence"
  source 1..1059: mol_type = other DNA
atggaactcaccgaacttctgctggtcgtgatgctcctccttactgccagactgactctttcatctcccgctccaccggcgtgtgacctgagggtgctcagcaagctgcttcgcgactcccacgttctgcactcccggctttcgcaatgcccggaagtgcacccgctgcccactccagtcctccttccggccgtcgacttctcactgggagaatggaaaacccagatggaagaaactaaagcgcaggacatcctcggcgctgtgactctcttgctggagggagtgatggcggcgagaggacaactgggcccaacgtgcttgtcgtcactgttgggacaactcagcggccaggtgcggctgctgctcggagcactgcagtcgctcttgggaacccagctgccgcctcagggacgcaccaccgcccataaggatccgaacgcaattttcctgtcattccaacatctgctgcggggaaaggtgcgcttcctcatgctggtgggcggttccactctttgcgttaggagagcgccccccaccacggctgtgccatcacggacctcactggtgctgacgctcaatgagctcccgaaccgcacctccggcttgttggaaaccaactttaccgcatcggctcggaccaccggcagcggtctgctgaagtggcagcaaggtttccgcgcaaaaatcccgggacttttgaaccagacttccagatccttggatcagatccctggctaccttaatcggatacacgagctgctgaatgggacccggggattgttcccgggaccgtcgaggaggactctcggagcgccagatatctcctccggcacgtccgatacgggaagtttgccaccaaacctgcaaccaggatacagcccgtcccctacccacccgcctaccgggcaatacactctgttcccactcccgccgaccttgccgaccccggtcgtccagttgcatccgcttcttcccgaccctagcgccccgacgccgacccctacctccccactgctgaacacctcttacacgcattcccaaaacttgtcgcaggaggga

SEQ ID NO: 19969 - DNA, 1059 bp, synthetic construct
  misc_feature 1..1059: note = source = /note="Description of Artificial Sequence: Synthetic coding sequence"
  source 1..1059: mol_type = other DNA
atggagctgaccgaactgctgctggtggttatgctcctactaacagctagactgaccctctcctcacctgcccctcccgcctgtgatcttcgcgtgctgagtaagctattgcgagattcgcacgtcctccactcccggctgagtcagtgtcctgaagtacaccccttgccaactcccgtgctgctccccgcggtagattttagtttgggtgaatggaagacccaaatggaggagacaaaagcacaagacatcctgggagccgtgactctgcttctggaaggggtgatggctgctcgaggacagttaggcccgacgtgtttgagctccctgctaggccagctcagtggccaggtacggctgctcttaggcgccctgcaaagcctgctcggaacccagctgcctcctcagggaagaactaccgcccacaaagacccaaatgctatcttcctgagtttccagcatttactgcgagggaaagttcgatttctgatgctcgtcggcggctctaccttatgtgtaaggagagcccctcctacaactgctgtgcctagccgcacatctcttgtgctcactctgaatgagttgccaaaccggacgagcgggctgctcgaaacaaatttcactgccagcgcgcgaactacgggaagcgggctgctgaaatggcagcaaggtttccgagccaagatccctgggctgctcaatcaaacctcacgaagtttggaccaaattcccgggtacctgaatagaattcacgagctgctcaatggcacaagaggcctgttccccggcccgagtagacggactctcggggcgcccgacataagctctggtacctctgatacaggtagcctgccaccaaatctgcagcccggttacagcccaagtccaactcacccacccaccggccagtacactctgttccctcttccacccactcttcccacacctgtggttcagctgcaccccctgctgcccgatccttcggctcccacccctacaccaacaagccccctactgaacaccagttacacccattcgcagaatttgtcccaggaggga

SEQ ID NO: 19970 - DNA, 1059 bp, synthetic construct
  misc_feature 1..1059: note = source = /note="Description of Artificial Sequence: Synthetic coding sequence"
  source 1..1059: mol_type = other DNA
atggagcttactgaattacttctcgttgtcatgcttctgttgactgccagactcacacttagcagcccagcccctccagcctgcgatctgagagtgcttagcaagctcttgagagacagccacgtactgcacagtaggctgagccagtgtcccgaagtacatcctcttccaaccccagtcctcctgcctgcggtcgacttctcactcggggaatggaagacccagatggaagaaaccaaagcacaggacatactgggagcagttacgctgcttctggaaggggttatggccgcaaggggccagctgggccctacatgcctgagctctctgctggggcaactgagtggtcaggtccggctgcttctgggggccctgcagagtcttttagggactcaattgcccccacagggccgaaccacagcccataaagaccctaacgcgatatttctttcttttcagcacctactgcgtgggaaggttaggttcctgatgcttgttggaggtagtaccctttgcgtgcgcagggcacctcccacaaccgctgtcccatcccggacatcactagtgctcactctgaacgaacttcccaaccgcacatccggccttctggagaccaatttcaccgccagcgcgcgcactaccggcagcggattgctcaagtggcagcagggcttccgggccaagattccaggccttctgaaccagacaagcaggtcactggaccaaatcccgggctatctcaaccggatccacgagctgctcaatggaactagaggcctgttccctggtcccagtagacggaccttaggagctccagatatctcctccggaaccagcgataccggatcccttccgccgaacctgcaaccagggtatagccctagtcccactcaccctcccacaggacagtatacgttgtttccgctccccccaacattgcccactccagtagtgcagctgcacccactcttaccggacccgagtgccccaaccccaacacctactagccctctgttgaacacaagctacacccattcacaaaatttgagccaagaaggc

SEQ ID NO: 19971 - DNA, 1059 bp, synthetic construct
  misc_feature 1..1059: note = source = /note="Description of Artificial Sequence: Synthetic coding sequence"
  source 1..1059: mol_type = other DNA
atggagctgaccgagctcctgctggtggtgatgctgctgctgaccgccagactgaccctcagctccccagcgcctcctgcttgcgatctcagagtgctgtctaaattgctgcgggattctcacgtgctgcactcccggctgtcgcagtgtcccgaggtgcacccgttgccaactccggtcctgctgcctgcagtcgacttctcccttggggagtggaaaacccaaatggaggaaactaaggctcaggacatcctcggcgcagttaccctgctcctggaaggcgtcatggccgccagaggacagctcggaccgacttgcctgtcatcgctgttgggacagctgtcaggtcaagtgcgcctcctcctgggcgcgctgcagtccttgcttggaacccagctcccaccccagggacgcacgaccgcccataaagatcccaatgcgattttcctttcttttcagcacctgctgcgcggaaaggtgagatttctcatgctcgtgggaggatccactctgtgcgtgcgtcgcgcccctccgactactgcggtgccgtcgaggacgtcgctggtgctcactctcaacgaacttcctaataggactagcggactcctggagactaacttcactgcctccgcgcgcaccaccggtagcggcttgctgaagtggcagcagggattccgggctaagatacctggcctcttgaaccagacttcgagatcattggaccagatcccggggtacctcaatcgcatccatgagctcctcaacggaacgcggggactgtttccggggccatccagaaggactctgggagcaccagatatctcatcaggaacgtcggatactggatccctgccgccgaacctgcagccgggatactccccatcaccaactcacccgccgactggacaatatactctgttcccgctccccccgacccttccgaccccagtggtccagttgcacccgctcctgccggacccttccgctccaacccccaccccgacctcgccccttctgaatacgtcgtacacccacagccaaaacctttcccaggagggc

SEQ ID NO: 19972 - DNA, 1059 bp, synthetic construct
  misc_feature 1..1059: note = source = /note="Description of Artificial Sequence: Synthetic coding sequence"
  source 1..1059: mol_type = other DNA
atggagctcacagagctgttactggtggtgatgttgttgcttaccgctcgtctcacattatcctcaccggcgcccccagcttgcgacttgcgggttctatctaaactgcttagagatagccatgttttacactcacgactttcacagtgtcctgaagtgcacccactgcctacgcccgtgctgctgccggctgtcgattttagcctcggtgaatggaagacccagatggaggaaactaaagctcaggacatcttgggcgccgtcaccttgttattagaaggtgtcatggccgctcggggccagctggggccaacctgcttaagctctttgttgggacaattgtccggacaagtccggcttctgctgggagctctacagagtctcttggggacacagctacctcctcagggcaggaccactgctcacaaggatcccaatgccatcttccttagttttcaacaccttttacgaggaaaggttcggttcctgatgcttgtgggagggtcaacgctttgcgtgagacgcgccccccccactaccgctgtgccctcacgaacaagtttggttctgacgctaaacgaattgcctaaccggacgtctgggctgctcgagacgaatttcactgcttccgcccgcactacaggcagtggcctgctaaaatggcagcaagggttccgtgctaaaataccaggcctgttgaatcagaccagcagaagtctggaccagatacctgggtacctcaataggatccacgagcttctgaatggcactcgaggactttttcccggtccatctcggcgcacactgggggctccagacataagttcaggcactagcgatacgggcagtctgcctcccaatttgcagccaggttacagtcctagccccacccacccgccaaccgggcagtatactctgttccccctccccccaaccctccctacacctgttgtgcaactgcatcccctattacctgacccctccgcacctacacccacccctaccagtccgttgctgaacacctcatacacccacagccagaacctgagccaagagggt

SEQ ID NO: 19973 - DNA, 1059 bp, synthetic construct
  misc_feature 1..1059: note = source = /note="Description of Artificial Sequence: Synthetic coding sequence"
  source 1..1059: mol_type = other DNA
atggaacttaccgaactgcttttggttgtcatgttgctgttgaccgcaaggctgactctgtcctctcccgcacctcccgcatgcgacctccgtgtactctctaagctgctgagagacagtcacgtgctccactcaaggctgtctcagtgcccagaggtccatccactgcccactcccgtcctcctcccagcagtggatttcagcctcggagaatggaaaacccagatggaagagactaaggctcaggatattctgggtgcagtaactttgcttcttgaaggagttatggctgccagaggccagctcggaccaacctgccttagcagcctcttgggacagctgtccggtcaggtaagactcctgcttggcgcactccagtcccttttgggcacccaattgccccctcagggacgcactacagcacacaaggatccaaatgccatctttctcagtttccagcatctgcttaggggaaaggtccgcttcttgatgctcgtgggcggatctaccctttgcgtgaggagagcacctcctactactgctgttccatccagaaccagtttggtgctcactttgaacgagctccccaaccgtacttctggtcttctggaaaccaatttcactgcctcagctcgcactactggttccggcctgctgaagtggcagcaaggatttcgcgctaagatccccggactcctcaaccagactagccgtagtcttgaccagatcccaggatatcttaaccgcatccatgagcttttgaacggaacacgcggtttgttcccaggacccagcaggaggaccctgggtgcacctgacattagttcaggcactagtgacaccggtagtctgcctcctaaccttcagccaggttattctccttcacccacccaccccccaactggtcagtatactctcttccctctgcctcctacacttccaacacccgtcgtgcaattgcacccccttcttcctgacccatcagcacctacacctactcccacttcccccttgttgaacacctcctacacccattcccagaacctttctcaagagggc

SEQ ID NO: 19974 - DNA, 1059 bp, synthetic construct
  misc_feature 1..1059: note = source = /note="Description of Artificial Sequence: Synthetic coding sequence"
  source 1..1059: mol_type = other DNA
atggaactgaccgagctcctgctggtggtcatgctgctactgacggcccgattgacactgtcaagtccagcccctccagcctgcgatctgcgcgttctctctaagctgctcagagattcccacgtgctgcactctagactctcccagtgtcctgaggtccatcccttacccacaccggtgctcttacctgcagtggactttagccttggagagtggaaaacccagatggaggagaccaaggcacaggatatcttgggcgccgtgacattgctattggagggggtaatggctgcccgtggccaactaggacccacttgcctgtctagcctacttgggcaactttccggtcaggttaggctccttcttggggccctacagtctttactgggtacacagcttcctcctcagggacgcaccacggcccataaggacccaaacgcgatcttcctgtcctttcagcatctgcttcggggaaaagtgcgctttttaatgttggtgggcgggtctaccttgtgtgttcgtcgtgcccctccaaccacagctgtgccatctagaacttctctggtgttgaccctcaatgaacttccgaatcgaacgtctgggctcctggagactaacttcactgcaagtgcaaggaccaccggcagtggcctactgaaatggcagcagggcttcagagctaagatccccggtttactgaaccaaacatccaggtccctggaccaaattcctggctacctaaaccgcatccacgagctgctgaacgggaccaggggactgttccctgggccatcgcggcgcaccctcggtgcgcccgatatcagtagtggcacttctgacacaggctccctgccccctaacctgcagcctggctacagtccgtctcccacacaccccccaactggacagtatacactgttcccgctgcctccaaccctgccaacccctgttgtgcagctgcaccctctactccctgacccaagcgccccgactcccacaccaacctcgcccttgctgaatacgtcttacactcattcacagaacttaagccaagagggg

SEQ ID NO: 19975 - DNA, 1059 bp, synthetic construct
  misc_feature 1..1059: note = source = /note="Description of Artificial Sequence: Synthetic coding sequence"
  source 1..1059: mol_type = other DNA
atggagctaactgaattactgctggtcgtcatgcttctcctgacagcccgcttgacgcttagttcaccagcgccacccgcatgtgacctgcgggtcctgagtaagttgctacgcgacagtcacgtgttgcactcaaggctgagtcagtgccctgaggtgcatcctctgcctacgccagtcctgctgccagccgtagacttcagtctgggggaatggaaaacacagatggaggaaaccaaggcccaggatatcctgggagcagttactctgctcctcgagggagtcatggccgcccgggggcagcttgggccaacttgcctatcgagtctgcttggccaactttcaggtcaagtgcgactgctattgggggctcttcagtcactcctgggaactcagctcccccctcaaggcaggacaaccgcccacaaggaccccaatgcgattttcctgagcttccagcacttgctcaggggtaaggtgcgcttcctcatgctcgttggagggtccactctctgtgtgaggagagcaccaccaactaccgctgtgccttctcgcacttctctggtgctcaccttaaacgagctgcccaacagaactagcggcctgctcgaaaccaatttcacagcctctgcacgcaccactggttctggcctcttaaagtggcagcagggctttagagcaaaaatccctggcctattgaatcagaccagtagatctctggatcagatcccaggttacctcaatagaattcatgaactcctcaatgggacccgtggcctgttccctggacctagtagaaggactctgggtgcacctgatatatctagtggaacaagcgacacagggagcctgcctcctaatctgcagcccgggtattccccatcccctactcaccctcccaccggtcagtacacactgttcccattgcccccgactctcccaaccccggtggtccagctgcatccactactacccgaccccagcgccccgacacccaccccaacaagcccattgttgaacacttcatacacgcactcacaaaatctctcccaggaagga

SEQ ID NO: 19976 - DNA, 1059 bp, synthetic construct
  misc_feature 1..1059: note = source = /note="Description of Artificial Sequence: Synthetic coding sequence"
  source 1..1059: mol_type = other DNA
atggagcttacggaactgctgctggtcgttatgctgcttctgactgctcggttgactttgtcaagcccggcacccccggcctgcgacctgagggtattaagcaagctcctcagggattctcacgtgctgcatagccggctgtctcaatgccctgaggtgcacccacttcctactccggtattgcttcccgccgtggatttctctcttggagagtggaaaacacaaatggaggaaacaaaagcccaggatatccttggtgctgtgacactccttctggagggcgtgatggcggcccgggggcagctgggccctacttgcctgtccagcctgctgggacagctgagcggccaggtgaggctgctgctgggcgctctccagtccctcttaggcacacagttaccgccacagggaaggaccaccgctcacaaagatccaaacgcaatttttctgtcttttcagcatctgttaagagggaaggtgagatttctgatgctggttggtgggagcacactctgtgtgagaagggcccccccaacaacagccgtgcccagccgcacctccttggtactgacgctcaacgaacttcccaaccgaacctctggactacttgagaccaatttcactgcctccgcaaggacaaccgggagcggtctgctgaagtggcagcagggttttagagcaaaaattcccgggctgctgaaccagacgagtcgttcgctcgaccagattccaggatacctgaaccgaatacatgagcttctgaatggcacacgcgggttgtttcccgggccctccagacgtacgcttggtgcccctgacatcagttccggtaccagcgatacaggtagtctgcccccaaacctacagcccgggtactcaccttctccgacccatccccctacaggccaatataccctgtttcctcttcctcctaccctgccaacacccgttgtgcagctgcacccccttttaccagatcccagcgcaccaaccccgactcccacctcacctctgctcaacacgagctatacacattctcaaaacttatcacaggaaggc

SEQ ID NO: 19977 - DNA, 1059 bp, synthetic construct
  misc_feature 1..1059: note = source = /note="Description of Artificial Sequence: Synthetic coding sequence"
  source 1..1059: mol_type = other DNA
atggagcttactgaattattactcgtagtgatgcttcttctaactgcacgtcttaccctttcttctcctgctcctccggcttgcgatcttagagttctttctaaacttctccgagattcacacgtgttgcattctcgtcttagccaatgcccagaagtgcatcctcttcccactccagtgctgttgccagccgttgatttctcactaggtgaatggaagacacaaatggaagagactaaggcacaagatatcctaggtgccgttactcttctccttgaaggtgtgatggcagctcgagggcaactcggaccaacttgcttgtctagtctccttgggcaactctctggccaggtccggttactgttgggtgcacttcagtccctccttgggacacagttgcctcctcaaggtaggactacagcccataaagatccaaacgcaatttttcttagcttccaacacctcctgagggggaaggttcgctttcttatgttagttggtgggagtacactctgcgttaggagagcaccacccactactgctgtgccttctcgtacatcattagttctgactctaaatgagttgcctaacaggacttctggattgttggagactaactttacagcttccgcaagaactactggttcgggtttgcttaagtggcaacagggatttagggcaaagattcctggtcttctcaaccagacttccaggtctcttgatcagatccctggatatctaaatcggatccatgaattgctcaacggcactaggggtctgtttcctggaccatctcggaggactttgggtgctcctgatatcagtagtgggacgtcggacactggtagtctccccccaaatctgcagccggggtatagcccaagtccaacccacccgcctacaggtcaatatacattgtttcctcttccgcctacattaccaactccagttgtccagcttcatcctctacttcctgatccatccgctcctacacccacccccaccagcccgctcttaaatacctcttacacccattcacagaatttatcacaggaagga

SEQ ID NO: 19978 - DNA, 1059 bp, synthetic construct
  misc_feature 1..1059: note = source = /note="Description of Artificial Sequence: Synthetic coding sequence"
  source 1..1059: mol_type = other DNA
atggagctcaccgaactcctgctcgttgtgatgctgcttctgacggcccggctgacccttagctcgcccgcgccaccagcctgcgacttgagggtgttgtcgaagctcttgcgcgattctcatgtgctgcactcgcggctctcgcagtgtccagaagtgcacccgctcccgaccccggtcctccttcctgcggtggacttctccctgggagaatggaaaacccaaatggaggaaaccaaggcccaggacattctgggggctgtgaccctgctgctcgaaggagtgatggcagcacggggacagctcggccccacctgcctgtcatccctgctgggacaactctcagggcaggtgagactgctcctgggtgcactgcagtcactcctcggaacccagctgcctccgcagggtcgcaccactgcccacaaggatccgaacgcgatcttcctgagctttcagcacctgttgcgggggaaggtgcgctttctgatgctggtgggcggatcgaccctttgcgtccggcgcgccccacctaccactgctgtccctagccgcacctcgctcgtcctgaccctgaatgaacttccgaacaggacctcgggcctgctcgagacgaacttcaccgctagcgcacgcactactggatccgggctcttgaagtggcagcaaggtttccgagcgaaaatccctggactgttgaaccaaacgtccagatcgctggaccagatccctggctacctgaacagaatccatgagctgctcaacggcacgagaggcctgttcccgggaccgtcccggcgcactctgggagcccccgacatctcctcaggtacctcagatactggatctctgcccccaaatctccaacccggctacagcccgtccccgactcatccaccaactggacaatacaccctgttccctctgccgccaactctgccaactccggtggtccaactccatccgttgcttccggatccaagcgcccctaccccgactccgacttccccgcttctgaatactagttacactcactcgcagaatctgagccaggaggga

SEQ ID NO: 19979 - DNA, 1059 bp, synthetic construct
  misc_feature 1..1059: note = source = /note="Description of Artificial Sequence: Synthetic coding sequence"
  source 1..1059: mol_type = other DNA
atggagctgactgagctgctcttggtcgttatgctgctgctcactgcccgtctgacattgtcatcgcctgcacctccagcctgcgacttgcgcgtgctttctaaactgctccgagattcacatgtactccattctcggctttctcagtgtcccgaagttcaccctctgccaactccagtgttgcttcctgcagtggatttctcacttggtgagtggaaaacacagatggaggaaactaaggcgcaggatatcctgggcgctgtaacccttttactggaaggagtgatggcggctcgcggccagctagggcctacttgtctgtcttcactgctgggccagctcagtggccaggttaggctgctgctgggagctctccaaagtctccttggtacccagttacccccacagggcaggaccacagcccataaggacccgaatgctattttcctaagtttccagcatctcctgcggggcaaagtgaggttcctgatgctggtaggaggctctacactgtgtgtacgccgcgccccacctactaccgctgtgccatcacgtacctcgctggttcttactctgaacgaactgcccaatcggaccagcggactgttggagactaattttaccgccagcgcacgaactactggctctggattgttgaagtggcagcagggtttcagggcaaagattcccggcctgctgaaccagacgagtcgtagtcttgatcaaattcctggatatcttaatcgcattcacgagctacttaatgggacccgcggtctgtttccaggcccttcgcggcggacgttaggcgctcccgacattagttccggtacatccgataccgggagcctccctccaaatttgcaacctggctatagtccatcccctacacacccccctacgggccaatatacgctctttcctctccctcccactttgcctacacctgtggtgcagctccatccactgcttcctgatcccagcgcacctacgcctacaccaactagccccttgcttaacaccagctatacgcacagccagaacctttctcaggaggga

SEQ ID NO: 19980 - DNA, 1059 bp, synthetic construct
  misc_feature 1..1059: note = source = /note="Description of Artificial Sequence: Synthetic coding sequence"
  source 1..1059: mol_type = other DNA
atggagctcactgaactcttgctcgtagtcatgttgcttttgactgcccgcctcaccttgtcctcccccgcacccccagcatgcgatctgcgtgttctctccaagctcctgcgggattcgcacgtgctgcattcaagattgtcgcaatgccctgaagtccatccactgcctactcctgtgttgcttccagcagtggatttttcacttggtgaatggaaaacccagatggaggaaaccaaagcacaagacatacttggagccgtgactctgttgctcgaaggcgtcatggcagcgcgcggacaactcgggccaacctgcctgtcctcactgctcggacagctttccggacaggtgcggctgcttctcggagcccttcaatcacttctggggactcagctgccaccccaagggagaactaccgctcacaaggatccaaacgcgatatttctgtcgttccagcatcttctgcgagggaaagttcgatttctcatgctggtgggtggatcgaccctttgtgtgcgaagagcacctccaaccaccgctgtgcctagccgcaccagcctcgtcctgactcttaacgagcttcctaaccgaacttccggtctgctggaaacgaactttaccgctagcgcacggaccacgggatccgggcttcttaagtggcaacaaggctttcgggccaaaatccccggactgcttaatcaaactagcaggtcgcttgaccagattcctgggtacctgaatcgcatccacgaacttcttaacggaaccagagggcttttccctggtccttcccggaggactctgggagcgccagacatttcgagcggaacctccgatactggtagccttccacctaatctgcagccaggatacagccctagccctacccacccacccaccggtcaatacactctgtttcctctgcctcctactctgccaaccccagtggtgcaattgcatccactgcttccagacccatcagcacctactccgactcctacttcgcctctgctgaacactagctacacccactcccagaatctgtcccaggaggga

SEQ ID NO: 19981 - DNA, 1059 bp, synthetic construct
  misc_feature 1..1059: note = source = /note="Description of Artificial Sequence: Synthetic coding sequence"
  source 1..1059: mol_type = other DNA
atggaattgacagagctgcttctggtcgtcatgctgcttctgaccgcccgacttaccctcagctcgcccgccccacccgcgtgcgacttgagggttttaagcaaactgctgagggacagccacgtcctgcactcgagactgtcccaatgcccagaagtgcatccgctccccacacctgttctgctgcctgcggtcgacttctctcttggcgagtggaaaacacaaatggaggaaactaaagcacaggacattttgggtgcggtgacattgctcctggagggggtgatggcagctagaggccagcttggccctacctgcctgtcctctctgctgggccagctgtccgggcaagtacgtttactactgggagcgctacagtcactcctggggacccagctccccccccagggaaggactactgcccacaaggaccctaatgctatctttttgagttttcagcacctcttgaggggaaaagtcagattcctgatgttagtcgggggcagcacgctgtgtgtccggagagctccacccactaccgcggtgccttcccggactagcctggtgttgacattgaacgaactgccgaatcggacttctgggctgctagaaacgaatttcactgcaagtgctaggaccacaggatccggcctgctgaagtggcaacaggggttccgagccaaaatacccggcttgctgaaccagactagtaggagcctcgaccagatccccggctatctcaaccgcatccacgagcttctgaatgggacaagggggctgttccctggcccttcacgtaggaccctgggagctcctgacatttcgagtggcacgagcgacacaggtagcctgccccccaatttgcaacctgggtatagcccctcccctacacaccctcccacaggacagtataccctattccccttacctcccaccttacccactccagtggttcagttgcatcctctgctcccggatccaagtgcgcctactcctaccccaacctcccctctcttgaatacgagctacactcactcgcagaacctgtctcaggagggc

SEQ ID NO: 19982 - DNA, 1059 bp, synthetic construct
  misc_feature 1..1059: note = source = /note="Description of Artificial Sequence: Synthetic coding sequence"
  source 1..1059: mol_type = other DNA
atggaattgaccgaactcctgcttgtggtcatgctgcttctcaccgcacggcttacccttagctctccggcacctccagcctgtgatctgcgagtgctgtcgaagctgctgcgagattcgcatgttctgcactcccgcctctcccagtgtccagaagtccatccactgcctacgccagtgcttctgcctgccgtggatttttcactgggggagtggaaaacccagatggaagaaactaaggcgcaagacattcttggcgcagtgaccctgctgctcgagggcgttatggccgcaagagggcaattgggccccacctgcctgtcatcactgctgggtcaactgtccggtcaagtcagactgctgctcggagcactgcagtcgctccttggtacccagttgcccccacaaggaaggactacggcccataaagacccaaatgctatcttcctttcgtttcagcacttgctgaggggcaaggtccgttttctcatgcttgtgggtggctcgactctttgtgtgagacgggcaccccccaccaccgcagtgccttcgcgtacttctctggtcctcactctgaatgagctcccaaataggacctccggattgctcgaaactaactttactgcatcggcccggaccactgggtcaggacttcttaagtggcagcagggattcagagccaagattccgggacttctgaaccagaccagcagatccctggaccagattcctggatatctgaaccggatacatgaactgctcaacgggacccgagggctcttccctggcccctcaaggcgcacgctgggagcccctgatatctccagcggtacttctgataccggatcccttcccccaaacctccaaccaggatactccccttcccctacgcatccgccaactggccaatacaccttgtttccactgccacctactcttcctacccctgtggtgcaattgcatccactgttgcctgacccctccgctccgacccctactccaactagccctcttctgaatacttcatatacccactcgcaaaatcttagccaagagggc

SEQ ID NO: 19983 - DNA, 1059 bp, synthetic construct
  misc_feature 1..1059: note = source = /note="Description of Artificial Sequence: Synthetic coding sequence"
  source 1..1059: mol_type = other DNA
atggaacttactgaattattattagttgttatgttattattaacagccagacttactcttagttcaccagcaccaccagcttgtgatcttagggttttaagtaaattacttagagattctcatgtgcttcattcacgtttatcacaatgtccagaagtacatccacttccaactccagtcttattaccagctgtagatttctcccttggagaatggaagacacaaatggaagaaacaaaagcacaagatattttaggagcagttactcttttgttagaaggtgttatggctgctagaggacaattaggaccaacatgtttgtcttctctattaggacagttatctggtcaagttcgacttttattaggagctttacaatcattgttaggaacacaattaccaccacagggacgaactacagctcataaagacccaaatgctatttttttatcatttcaacatcttttaagaggtaaggtcagatttcttatgcttgtaggagggtcaacattatgtgttagaagagcaccacctactaccgcagtaccatcacgaacatcattagttttaacacttaacgaacttccaaacagaacctctggattgttagaaactaatttcactgcatcagcaagaactacaggatctggattacttaaatggcaacaaggatttcgtgcaaaaattccaggattgcttaatcaaaccagtcgttctttagaccaaataccaggttatttaaatagaattcacgaacttttaaacggaactagaggtttatttccaggaccatctagaagaacacttggtgcaccagatattagttcaggaacatcagatacaggtagtttgccaccaaatcttcaaccaggttattctccatcaccaacacacccaccaacaggacaatacacattatttccactaccaccaacacttccaacacctgttgtacaacttcatcctcttttaccagacccttcagcaccaactccaacaccaacatcaccattgttaaatacatcatatacacattctcaaaatttatcacaagaagga

SEQ ID NO: 19984 - DNA, 1059 bp, synthetic construct
  misc_feature 1..1059: note = source = /note="Description of Artificial Sequence: Synthetic coding sequence"
  source 1..1059: mol_type = other DNA
atggaattaactgaactgctgctagtcgtgatgctgctgctgaccgcaagactgaccctgtcctctccagcccctccagcctgtgatttaagagtgctatccaaactgctgcgggattctcacgtgctgcactcacggctgtctcaatgcccagaagttcacccattaccaaccccagttctgctgccagctgttgatttcagcctgggagagtggaagacccagatggaagaaacaaaggctcaggatattctcggagccgtgactctattactggagggggtgatggctgctcgtggccaactaggaccaacatgtctgagctccctgttgggccagctctccggccaggttcgcttactactgggcgcactgcaaagcttgcttggcacacagctaccccctcagggtaggactaccgctcataaggacccaaatgctatctttctgtccttccagcatttactgagggggaaggttcggtttctgatgctcgttggtggcagcacactgtgcgtcaggagagctccaccaactactgccgtgcctagcagaacttctttggtcttgacattaaatgaattaccaaaccggaccagtggcctgctggagaccaatttcaccgcctctgccaggaccactggatctgggctgttaaagtggcagcagggcttcagggctaagatacccggactattgaaccaaaccagccgctccctggaccagataccagggtatctgaatcggatacacgaactgctgaacggcacacggggcctgttccctggaccaagtcgccgtactctgggggccccagacattagcagtggaaccagtgacaccggttccctacccccaaatctgcagccaggctatagcccaagccccacccaccctccaacaggccaatacacactgtttcccctcccccccacactcccaaccccagtggtgcagctgcaccctctgctgcccgacccttcagcaccaacccctacaccaacatcccctctgttgaacacttcctacacccattctcaaaacctgtcacaggagggc

SEQ ID NO: 19985 - DNA, 1059 bp, synthetic construct
  misc_feature 1..1059: note = source = /note="Description of Artificial Sequence: Synthetic coding sequence"
  source 1..1059: mol_type = other DNA
atggagctgactgaactccttctcgttgtcatgctactgcttacagcacgacttaccttgtccagtcccgcgccaccagcctgtgatctgagagttctgtccaaactgcttcgagacagccatgtcctccactctcgactgagtcagtgccctgaggttcacccgctcccgacacctgtcctgctcccagctgtggattttagcctaggagagtggaagacccagatggaagagaccaaggctcaggatattctgggcgccgtgacccttctcttagaaggggttatggcagccagaggccagttgggaccaacctgtctctctagcttgttggggcaactgtctggacaggttaggctcctgctaggtgctcttcagtccctcctggggacacagctacccccacaagggagaacaaccgcccataaggatccaaatgccatcttcctcagtttccagcacctgctgagggggaaggtacgctttttgatgctcgtcggtgggtccaccttgtgcgtgcgaagagcgcctcctactactgctgtcccctctcgaacatctctggtgctcaccctcaatgagttacccaatagaacctccggtttgctcgagacaaattttacagcctcagctcggactacaggttccgggctgcttaaatggcagcaggggttcagggcaaaaataccaggtttgctgaatcagactagtcgatccctggaccagatacccgggtatctcaatagaatccacgaattgctgaacggtacccgaggtctctttcccggcccaagtcgacgcacactgggggccccagacatatctagtggcaccagtgacaccggctcccttcctcctaacctccagccgggatattccccctcacccacacaccctccgacaggccaatacaccttatttcctttacctccgactcttcctacgccagtggttcagctgcacccgttactgccagaccccagtgctcccacccccactcccacctccccactcttgaatacatcctacacacactcacagaatctgtcccaggaaggg

SEQ ID NO: 19986 - DNA, 1059 bp, synthetic construct
  misc_feature 1..1059: note = source = /note="Description of Artificial Sequence: Synthetic coding sequence"
  source 1..1059: mol_type = other DNA
atggaactgacagagttactcctggtggtgatgctgcttttaaccgctcgtctgacgctgagctcaccagccccccccgcctgcgacttgcgtgttctctccaagctgttgagggattctcacgttcttcacagtcgactgtctcaatgtcctgaagttcatcccctgccaacccccgtgctcttgccggcagtggattttagcttaggcgaatggaaaactcagatggaagagaccaaagcacaggatatcttgggcgcagtaacccttctgcttgaaggtgtcatggccgcgaggggccagctggggcccacttgcctttcctccctgttagggcaactgtctggtcaggtcagactgctgttgggggcactccaaagtctcctgggaacgcagttacctcctcaaggccgaactacggcccataaagatcctaacgccatattcctttcattccaacacttgctgaggggaaaggtccggttcctgatgctggtggggggttcgaccctttgtgtcagacgtgctcccccaactactgccgtaccctctaggacatcacttgtgcttacactgaacgaactccccaatagaacgagtggcctgcttgagactaacttcacagcgtcggcccgaaccaccggatccggactcctaaagtggcagcagggtttcagggctaaaattccgggtctcctcaatcagacatcgcgcagcctagaccagataccaggatatctcaaccggatccacgaattgctgaacggcacccgcgggctgttccccggaccttccagaaggacactcggcgcgccggacatatccagtggtacctctgacaccggcagccttcccccaaatctgcaacctggctattccccatctcccacgcatcctcccaccggacagtatacactctttccgctcccacccaccttgccaacgccagtggtccaactgcaccccctactacctgatccttctgctccaacacctacccctaccagccccctactgaatacatcgtacacccattcacaaaatttgagtcaggaaggt

SEQ ID NO: 19987 - DNA, 1059 bp, synthetic construct
  misc_feature 1..1059: note = source = /note="Description of Artificial Sequence: Synthetic coding sequence"
  source 1..1059: mol_type = other DNA
atggagctgaccgaactgttgctcgtcgttatgctgctcctcacggcgcggctgaccttgtcctcgccggctccgccggcgtgcgatcttcgcgtgctctcgaagctgctccgcgattcccatgtgcttcattccaggctgtcgcaatgccctgaggtgcacccactgccgacgcccgtgctccttcctgcggtcgacttttctttgggggaatggaaaactcaaatggaggagactaaagctcaggatatactcggagccgtgactctgctccttgaaggtgtgatggccgcacgcggccagctcggccccacctgcctttcctcactgctgggacagttgagcgggcaagtccggctgttgcttggagccttgcagtcattgctcggtactcaactgccaccacagggccgcaccacggcacacaaggatcctaacgcaatcttcctgtcgttccagcacctcctgagaggaaaggtccggtttctgatgctggtcgggggatccactctgtgtgtcagacgggctccgccaaccaccgcagtgcctagtcggacgagcctcgtgttgaccctgaacgaactgccgaatagaacctcaggactgttggaaaccaacttcacggccagcgcccgcactaccggatcaggcctcctgaagtggcaacagggtttccgagccaagattcctgggctgttgaatcagacctcacggtcgctcgaccagatccctgggtacctcaacagaatccatgaactgctcaatggcaccagaggactcttccctggaccctcccgtaggaccctgggtgcgccggacatttcgagtggaacctccgacactggtagccttccgccgaacctgcaaccggggtacagcccaagcccgactcatcccccaactggccaatacaccctgttcccacttccgcctactcttcctactccagtggtgcagctccaccccctgctgcctgacccctcggcaccgaccccaactccaaccagtccgctccttaacacctcgtacacccactcgcagaatctgtcacaggaggga

SEQ ID NO: 19988 - DNA, 1059 bp, synthetic construct
  misc_feature 1..1059: note = source = /note="Description of Artificial Sequence: Synthetic coding sequence"
  source 1..1059: mol_type = other DNA
atggaattgaccgaactcctgctggtggtgatgctgctgctcactgctcggttgaccctgagctcgccagccccgccagcttgcgacttgcgggtcctgtcaaagctgctccgcgactcgcacgttttgcatagtcggttgtcgcaatgcccagaagtgcacccgttgccgactccggttctgctcccggcggttgattttagcctcggcgagtggaaaactcagatggaagagactaaggcccaagacatcctgggagcagtgaccctcctgcttgagggagtgatggcggccagggggcagctgggaccgacgtgcctgagctcccttttgggacaactgtccggacaagtgagacttctcctgggggcacttcagagcctgctcggaacccaactgccacctcagggacggaccaccgcccataaagacccaaacgctattttcctttcattccaacacctccttcggggtaaggtcagattccttatgctggtcggaggctcaactctctgcgtgagacgggcaccacctactactgctgtgccctcgcgaaccagcctggtgttgactctgaatgaactgccgaaccgcacttcgggcctgctggaaaccaatttcaccgcctcggcacgcactactgggtcgggacttctgaagtggcagcagggatttcgcgccaagatccctggtctgctgaaccaaaccagcagaagcctcgaccagatcccgggatacttgaaccggatccacgaactgctgaatggtaccagaggactgtttccaggaccgtcacggcgcactctgggtgcgccagatatctcctccggaacttcagatacgggaagccttccgccgaacctgcagccaggatactcgccttctccaactcatccgccaaccggtcaatatactttgttccccctgccgcccactctgccgaccccggtggtgcagttgcacccccttctgccagatccgtcggcgccaactccaaccccgacctccccgttgttgaacacctcctacactcacagccagaatctgtctcaagaggga

SEQ ID NO: 19989 - DNA, 1059 bp, synthetic construct
  misc_feature 1..1059: note = source = /note="Description of Artificial Sequence: Synthetic coding sequence"
  source 1..1059: mol_type = other DNA
atggagctgacggagctgctgcttgtggtgatgctccttttgacagccagacttaccctgtcatcacctgccccaccagcctgcgacctgagggtgctgtctaaacttctcagggactctcacgtcctgcacagcaggttgtcacagtgtcccgaagttcaccccctgcccacacccgtgcttcttccagcagtggatttcagtttgggcgagtggaagacccagatggaagagaccaaagcacaggacattctgggtgcagttacactcctgctggaaggtgtcatggcggctcgaggacagctggggcctacctgcttgagttccttgctcggccagctgtcaggccaggtgcgcctgctgctgggggccctgcaaagtctgcttgggacccagttgcctcctcaggggagaaccacagcccacaaggaccctaacgctatttttttgagtttccagcatctgctgcggggtaaggtgcggtttctcatgctggtcggagggtccacgctctgcgtcagaagagcccccccgacaacagccgtcccatccaggacatccttggttcttactctgaatgagctgcctaacaggacttccgggctgttggagacgaatttcacggcatccgccaggacaacagggagtgggttgctgaagtggcagcaggggtttcgggcaaaaatccccgggctgctcaatcagacatcaagaagcctcgatcaaatccccggatatctgaatagaatccatgagttgctcaatggcacgaggggtctgttccccggcccctcccggaggactctgggagcccctgatatttccagcggcacatccgatacagggagcctgccgccgaatctgcagccaggttacagcccgagcccgactcaccctccaaccgggcagtacacactgttccccctgccaccgacgttgcccacacccgtggttcaattgcacccacttttgccagaccctagcgctccaacaccgacacctacttctccgctgctgaataccagctacacccattctcagaacctttcccaagagggc

SEQ ID NO: 19990 - DNA, 1059 bp, synthetic construct
  misc_feature 1..1059: note = source = /note="Description of Artificial Sequence: Synthetic coding sequence"
  source 1..1059: mol_type = other DNA
atggaactgactgaactgcttcttgtcgtgatgctgcttctgactgcgcgcctgactctgtcatcgccagcaccgccagcttgcgatctgcgggtcctgtccaagctgctgcgcgattcacatgtgctgcactcgcgcctgtcccaatgtcctgaagtgcatccgctgccgaccccggtcttgctgccagcagtcgatttctcactgggagaatggaaaacccagatggaagaaactaaggctcaggacatcctgggggcggtgactctgttgctcgagggcgtcatggctgcgagaggacaactggggccgacgtgcctcagctcactcctcgggcagctctcgggtcaggtgcgcctgctccttggagccctccagtcgctcctgggcacccagctccctccacaaggccgcaccacggctcataaggatccgaacgccatctttctgtccttccaacacttgctgcggggaaaagtgaggttcctgatgctggtgggcggcagcacgctgtgcgtcagacgcgcgccccctacgaccgcggtcccttcaaggactagcttggtgctgactctcaatgaactgccgaaccggacctctggactgttggaaacgaacttcaccgcgagcgcacgcactaccggctcgggcctccttaagtggcagcaaggattccgcgctaagattcctggcctgctgaaccagacctcacgcagcctggaccagatcccggggtacctcaatagaatccacgaactgctcaacgggactcggggactgtttccaggaccgtcccgccggactctcggagcaccagatatctcctcggggacttccgatactggttcgctgccccctaacttgcaaccaggctactcgccgtcgccaactcatccgccaaccggacaatacactttgtttccgcttccaccaaccctgccgacccctgtggtgcaactgcaccctctgttgccggacccgagcgctccgacgccgacccctactagcccgctgctcaatacttcctacactcactcacagaacctgtcgcaggaggga

SEQ ID NO: 19991 - DNA, 1059 bp, synthetic construct
  misc_feature 1..1059: note = source = /note="Description of Artificial Sequence: Synthetic coding sequence"
  source 1..1059: mol_type = other DNA
atggaactcacagagctgttgttggtcgtgatgctgctactgacagccagactaacattatcctcacccgcccctcccgcctgcgatttgcgagtgctgagtaagctcctgcgggatagccacgtgctccattcccgtcttagccagtgtcctgaggttcaccccctgcctactccagtgctactgccagctgtagactttagccttggagaatggaaaacccagatggaggaaacgaaggcccaagacatcctcggagctgtgacattattgctcgaaggcgtgatggcggcaagggggcagctgggtcctacttgcctgtctagccttctcggccagttatcaggccaggtgcgcctcctgctaggtgctctccaatccctcttgggaacacaattgccacctcagggcagaaccaccgcccacaaggatcccaatgctatcttcctgtcctttcagcacctgctgcgggggaaagtgcgattcctgatgctcgtcggaggatccactctctgtgtaagacgcgccccaccaaccactgctgtgccaagccgcacatccctggtgctgacactgaacgaattgcctaatcgcactagtggcctgctggagaccaacttcacagcatcagccagaacgaccggtagcggcttgctcaagtggcaacagggattccgggctaaaatccctgggcttctgaatcaaactagtagaagtctcgatcagatccctggctatctgaataggatccacgagcttctaaacggaactcgcgggctctttcccgggccttccagaaggacactgggcgctcccgacatatctagcggtacctccgatactggctccctgccgcctaacctgcagcctgggtacagcccttcccctacccatcctcccaccggccagtatacactattccccctcccacccacactcccaacgcctgttgtgcagctgcaccccctcctgccggatccctccgctccaacacctacacctactagtccactcctgaacacatcatacacacactcgcagaacctatcccaggagggc

SEQ ID NO: 19992 - DNA, 1059 bp, synthetic construct
  misc_feature 1..1059: note = source = /note="Description of Artificial Sequence: Synthetic coding sequence"
  source 1..1059: mol_type = other DNA
atggaattaaccgaactgctgttggtggtgatgctgctgttgacggctcgattgaccttgtcttccccagcgccacctgcctgtgacctccgagtattatccaaacttttgagagatagccatgtactccacagtcggctctcacagtgtccagaggtgcatccgctcccgactcccgtgctacttcctgccgtggatttcagcttgggggagtggaagacgcagatggaggagaccaaggcgcaggacatacttggcgctgtcaccttgttactggaaggcgtgatggctgcgcggggccagctgggcccaacatgcctatccagtctgctgggacagctgtctggccaggttcgccttctgttgggcgcactccaatctctgctcggaacacaattgcccccccagggcaggacaactgctcacaaggatccaaacgctattttcctaagctttcagcacctgctgagaggaaaggttaggttcctgatgctggtgggtggctcgaccctatgtgtgaggagggctccccctaccacagccgtaccctccagaacatctctggtgctgaccctaaacgagttgcccaatcggacctctggactgctcgaaactaattttacagcctccgctcgtaccactggttcgggacttctgaagtggcagcagggctttagagccaagataccaggattactcaatcagacttctcgaagcctggaccagatccctgggtacctgaatagaattcatgagctcctgaacggcactagaggtctgttccctggaccttctcgtcgtactctcggagccccggacatcagctccggtacgtccgataccggaagtctgccacctaatctccagccagggtattcaccgagccccacccatccccccactggtcagtacactctattccctctgccgcctaccctgccaacacctgtagttcagctgcaccctcttctccccgaccccagcgctcctaccccaacgcctacatctcccttgctgaacacctcatacactcactcccagaatttatcccaggagggt

SEQ ID NO: 19993 - DNA, 1059 bp, synthetic construct
  misc_feature 1..1059: note = source = /note="Description of Artificial Sequence: Synthetic coding sequence"
  source 1..1059: mol_type = other DNA
atggaactgacggagctcctgctggtcgtgatgctgctcctcaccgcaagacttactcttagcagcccagcacctcctgcctgtgatttgagagtgctgtcgaagctgcttagagactctcatgtgcttcattcccggctgtcccaatgcccagaggtgcacccactgcctactccagttctccttcctgccgtggacttttcgctgggcgaatggaaaactcaaatggaggagactaaagcccaggatatactgggagcagttactcttttgctcgaaggggtcatggcagcccgcggtcaattgggacctacctgtctctcctcactccttggacaactttctggtcaagtgcgtttgcttctgggtgcactgcagtcgctgctgggtacgcagctgccgccacagggacgcactacggctcataaggatccaaacgccatcttcctgtcgtttcagcatcttcttcggggtaaggtgcgattccttatgcttgtgggtggttcaaccctgtgcgtgagaagggctcctccgactaccgccgtgcctagccgcactagcctggtgctgaccctgaacgaactgccaaatcggacttcgggacttttggaaaccaactttaccgccagcgccagaaccactggttcgggactgcttaagtggcagcagggttttcgagcaaagattcccggacttcttaaccaaacgtcgcgatcactcgaccagatccccgggtatctcaaccggatccatgaactgctgaatggcaccagggggctgtttcccggaccttcgagacggacgcttggagcacccgatatctctagcggcacttcggatactggaagcctgccacccaacctgcaaccaggctacagcccaagccccactcatccgccaactggacagtacactcttttccctctgcctcccactcttccaaccccagtggtgcaactgcatcctctgttgccagatccttccgcgccaacccctacccccacttccccactgcttaatacttcatatacgcactcacagaacctttcacaggaagga

SEQ ID NO: 19994 - DNA, 1059 bp, synthetic construct
  misc_feature 1..1059: note = source = /note="Description of Artificial Sequence: Synthetic coding sequence"
  source 1..1059: mol_type = other DNA
atggaactgactgaactgctgctggtcgtcatgttgctgctgaccgctagattgaccttgtcaagtccggctcctcctgcctgtgaccttagggttctgtctaagctgctcagagacagccacgtccttcacagccgcttgagtcagtgtccagaggtccatcctctgcctacccctgttctgctccctgcagtcgactttagcttgggagagtggaagactcagatggaggagaccaaggctcaagacatcctgggcgctgtgacccttctcctcgaaggtgtgatggccgcaagagggcagttgggaccaacctgccttagttccttgctcggtcagctctcaggacaagtgaggctgctcttaggggcattgcagagtctcctcggaacacagcttccccctcagggacgcactacagcacacaaggatccgaacgccatcttcctgtcatttcagcaccttctcagaggtaaggtgaggttcctgatgctcgtcggagggagcaccctgtgcgtccgtcgcgctccacccactacagcagtaccaagtcggacgtctctggtgctgacactcaatgagttgcctaacaggaccagcggcttgttggaaaccaattttaccgcttcagctcgcacaaccggctcaggattgcttaaatggcaacagggtttcagggcaaagatcccaggactgttgaaccagacctcacggtccctcgaccaaatccctgggtacttgaacaggattcacgaactgctgaacggcacccgtggtctgttccctggcccatcccggaggacgctaggagcacccgatatcagcagtggcacttctgatacaggatcgctgccacccaaccttcaacccggttacagcccttctccaacccaccctccaactggacagtacacactgtttccacttccacctacccttccaacaccagtcgtccagctgcaccccttgttgccagatcccagcgctcctacccccacgccgacctctcctttgttgaatacaagctacacccatagccaaaacttatctcaagagggg

SEQ ID NO: 19995 - DNA, 1059 bp, synthetic construct
  misc_feature 1..1059: note = source = /note="Description of Artificial Sequence: Synthetic coding sequence"
  source 1..1059: mol_type = other DNA
atggaattaacggagttactgcttgttgtgatgcttctcctgaccgcacgactgacgctgtctagtccggcacccccagcttgcgatttgcgtgtcctcagcaagctcctccgtgatagtcatgttcttcactctcgtttatcacagtgcccagaggttcacccactgccgacccccgtgctcctgccagccgtagacttttcattgggtgagtggaaaactcaaatggaagaaaccaaagctcaagatattcttggagcagtaactcttctgttagaaggagtgatggcagcaagaggacaactcggacctacatgtttatcttcactccttggccaattgtcaggtcaagtgaggctccttttaggcgctcttcaaagtcttctgggaacacagcttcccccgcaaggacgtactactgcacacaaggacccaaatgcaatcttcttgagctttcaacatttattgcgaggaaaagttcgatttttgatgctagtcggtggaagtaccctctgtgttcgacgggctccaccaaccacagcggttccgagccgtacttcacttgttctcaccttgaatgaactgccaaataggacctcaggacttttggaaacgaattttacagccagtgcccgaacaactggttcgggcctgttgaaatggcagcaaggattccgcgctaaaatcccagggcttctcaaccaaacgagtcgcagtcttgatcaaatcccaggatatctcaatcgcatccacgaactgcttaatggaacgagaggattatttccaggaccgagtcgaagaactttgggagcaccggatatatcctctgggacttctgacaccggatcccttccgcctaatttacagccaggatatagtccgagtccaacacacccaccaacaggccaatatacccttttccctttaccaccaacattgccaactcctgttgtgcaattgcacccacttcttccagatccttccgctccaactcctacaccaacatcaccactgttgaatacttcttacacacactctcagaatctcagtcaagaagga

SEQ ID NO: 19996 - DNA, 1059 bp, synthetic construct
  misc_feature 1..1059: note = source = /note="Description of Artificial Sequence: Synthetic coding sequence"
  source 1..1059: mol_type = other DNA
atggagctgaccgagctactattagtggtgatgttgctcctgacggcccgtctgacactcagctcccccgctccccctgcctgtgatctgagagtactcagcaagcttctgcgggactcgcacgtgctgcactcgcggctttcccaatgcccagaggtgcacccgctgcctacaccagtgctgctgcccgccgtcgatttctctttgggcgaatggaaaacgcaaatggaagaaacaaaagcacaagacatcctgggagccgtgaccctgcttctcgagggggtgatggctgcccgcggacagctggggccgacctgcctatcaagcctactgggccagctgtcaggtcaggtccgcctgctgctgggagccttgcagagtctgctcggaacccagctgccaccacaaggacggacgacagcccataaagacccgaacgcaatatttttgagtttccaacacctgctgcgcggcaaagttaggttcctgatgctagtaggcggtagtactctgtgtgtcaggcgcgcccctcctactacagcggtccccagccgaaccagcttggtgctaaccctgaatgagctccctaacaggacttccggactgcttgagactaatttcactgctagtgcacgtacgactggctcaggattgctgaagtggcagcagggatttagggctaaaatcccaggactgttgaaccagacaagtcgctctcttgaccagatccccggctacctgaataggattcatgaattactgaacggtacccggggactgttccccgggccatccagacgcacccttggagcaccagacataagcagcggaactagtgacacaggatctctgcctcctaatctccagcctggctattcccctagtccgacgcacccccctacgggtcagtacactcttttcccactgccgcccactctgccgacaccagttgtccagctacatccattacttcccgacccatcagccccaactccgacccccacctctcctctgctgaacacctcatatactcacagtcagaatctgtctcaggaaggc

SEQ ID NO: 19997 - DNA, 1059 bp, synthetic construct
  misc_feature 1..1059: note = source = /note="Description of Artificial Sequence: Synthetic coding sequence"
  source 1..1059: mol_type = other DNA
atggagcttaccgagctgttgctggttgtgatgttgctgctcactgcccgactgacactgtcttcgcctgcccctccggcgtgtgacctgcgtgtgctgtcgaagctgttgagagactcccacgtgcttcactcaagacttagccaatgtccggaagtccaccccttgccgacgccggtcttgctccctgcggtagacttctcacttggtgagtggaagacccagatggaggaaacaaaagcacaggatattctgggcgcggtgacgctgctgcttgagggcgtaatggcagctcgcggtcagctgggtccgacatgcctgtctagcctgctgggtcagctgagcggtcaggtgagactgctgctcggcgccctgcagtccttgctgggtacccaactaccgcctcaaggtcgaacgaccgctcacaaagatcctaacgctatcttcctgtccttccagcaccttctgcgcggtaaagttcgatttctgatgttggtcggcggcagcacgctgtgcgttcgccgtgcgccgcctaccactgcagtgcccagtcgcacgagcctagtgttgactctgaatgagctgcctaaccgcacttctggcctgttagaaactaactttaccgcctctgcgcgtacgacgggtagcggtctgctgaagtggcagcaaggctttcgcgctaagatccctggtctgttgaaccagacaagccggtcgctggatcaaattcctggttatttgaatcgaattcacgaattactgaatggtacgcgcggcttattccccggccctagtcgccgcaccctgggagcaccagacatctctagcgggaccagcgataccggcagcctgcccccgaacttgcagccaggatatagcccctctcctacccacccaccgaccggtcagtacaccttgtttccactgcctcccactctgccgaccccagttgtgcagctgcacccgctgctgccagaccctagcgcacctactccaaccccgacctcaccattgctgaataccagttacactcatagccagaatctctctcaggaaggc

SEQ ID NO: 19998 - DNA, 1059 bp, synthetic construct
  misc_feature 1..1059: note = source = /note="Description of Artificial Sequence: Synthetic coding sequence"
  source 1..1059: mol_type = other DNA
atggagctgactgaactcctgttggtggtgatgctgctccttactgctagactgaccctgtccagcccggcaccgccggcgtgcgacttgcgcgtgctttcgaaactcctcagagacagccatgtgctccacagccgcttgtcgcaatgccctgaagtgcacccgctgccgactccggtgctgctccctgcggttgacttctcactgggagagtggaaaacccagatggaggaaaccaaggctcaggacattctcggtgccgtcactctgctcctggagggagtaatggccgccaggggccaactgggaccgacttgcctttcttccctgctcggacagctgtcgggccaggtgcgcctgctgctgggggccctccagtccctcctgggcacccaactgccaccccaaggtagaaccactgctcataaagatccgaacgcaatcttcctgtcatttcaacatcttcttcggggaaaagtcagattcctcatgctggtgggaggaagtactctctgcgtgagacgcgcccctccaactactgcagtgccctcgagaacttcccttgtgttgacgctcaatgaacttccaaatcgcacgtcaggcctgcttgaaacgaactttacggcgtccgctcggaccactggttccggcttgctgaaatggcagcagggattccgcgccaagatcccgggactcctgaaccagaccagccgatcactcgaccagatccctggatacctgaaccgcatccatgagctgctgaacggcaccagaggacttttcccaggtccgtcgcgccgaaccctgggcgcacccgacatctcctctgggactagcgatactgggtcgctgccgccgaatttgcaaccgggctattccccctccccgactcacccacccaccggacaatacacgctcttccctctcccgcctactcttcccactccggtcgtgcagctgcatccgctgctgcctgacccatcggcaccgacccctactcctaccagcccgttgctgaacactagctacacccattcgcaaaatctgtcgcaggagggc

SEQ ID NO: 19999 - DNA, 1059 bp, synthetic construct
  misc_feature 1..1059: note = source = /note="Description of Artificial Sequence: Synthetic coding sequence"
  source 1..1059: mol_type = other DNA
atggagctcactgaattgctcctggtggtgatgctgcttctgactgccagactgactctgtctagcccggcgccgccagcatgtgacctgagggtgctgagcaagctgctgcgcgactcacacgtcttgcactcccggttgagccaatgtcctgaagtgcatccgttgccgaccccagtcctgctgccagccgtcgacttctcgctgggtgaatggaaaacgcaaatggaagaaaccaaagctcaggacatcctcggcgctgtcactctgctgttggagggagtgatggccgcgagaggacagctgggcccgacctgcctctcgtcattgctgggccagctgtcgggacaagtgcgcctgttgcttggtgctttgcagtcactgctggggacgcagctgcctccgcaggggagaactaccgcacacaaagatcctaacgccatcttcctctctttccagcatttgctcaggggcaaggtgagattcctcatgctcgtgggcggaagtactctgtgtgtgcggcgggcgcctcctactaccgcagtgccttcaagaacctcactggttctgactctgaacgagttgcctaatcgcacttccggactgctggaaaccaactttaccgcctcggcgcggaccaccggatccggattgctgaagtggcaacaggggttccgcgcgaagattccaggcctgctcaatcaaacttcccgctccctggatcaaattccgggatacctgaatcggatccacgaactgctcaacgggacgaggggactcttcccaggtccttcgcgcagaaccttgggagccccggatatctcgtccgggactagcgataccggatcgttgccgccgaatttgcagcctggctactcgcccagcccgacgcatccacccacgggacagtacacccttttccctctcccgccaacgctgccaacccctgtggtgcagttgcacccactcctcccagatccttcagcgccgaccccgactccaacctcaccgctcctcaacacttcatacacccactcgcagaacctgtcgcaggaggga

SEQ ID NO: 20000 - DNA, 1059 bp, synthetic construct
  misc_feature 1..1059: note = source = /note="Description of Artificial Sequence: Synthetic coding sequence"
  source 1..1059: mol_type = other DNA
atggaacttacagaattacttctggttgtgatgctgttacttaccgcgagacttaccctttcgagtccggcgccccccgcttgcgacctaagggtgctcagtaagctcttaagggatagccatgtgctacactcaagactgtcccagtgtcctgaggttcaccccttgcccacgcctgtcctgttgcccgccgtagatttttccctaggtgagtggaagacacagatggaagagaccaaggcccaggacattctaggcgccgtcactctgctcctggaaggcgtgatggcagctcgcggacagctggggcccacttgtctgtccagcctccttgggcagctgagtggccaggttagattacttctaggggctctccaaagtctgttggggacccaactgcctccccaaggccggactactgcccataaagaccccaatgccatattcctgagtttccagcacctgcttagggggaaagtgaggtttctcatgctggtcgggggctccaccttatgcgtccgacgagcgccccctaccactgcagtcccatcgcgcaccagtctcgtactgacgctcaatgaacttcctaaccggacatcggggctgcttgaaacgaacttcaccgctagtgcccggactacgggaagcggactgcttaagtggcagcaaggcttcagagcgaagatcccaggtctgttgaaccaaacgagcaggagtttagatcagattcctggctacctcaaccgcatccatgagctgcttaacgggacacgcgggctgttcccagggccatcacggcgcacactgggggcgccagatattagttccggaaccagtgacacgggttctttacctcctaacctgcaacctggttacagtcctagccccacacatccaccaaccggccagtacacgttatttcctctccctcccacacttccaactccagtagtccaactacaccccctattgcccgatccatccgctcccacgcctacccctacgagtcccttactgaacacatcttatacacacagtcagaacctgagccaagaggga

SEQ ID NO: 20001 - DNA, 1059 bp, synthetic construct; identical to SEQ ID NO: 19972
  misc_feature 1..1059: note = source = /note="Description of Artificial Sequence: Synthetic coding sequence"
  source 1..1059: mol_type = other DNA

SEQ ID NO: 20002 - DNA, 1059 bp, synthetic construct
  misc_feature 1..1059: note = source = /note="Description of Artificial Sequence: Synthetic coding sequence"
  source 1..1059: mol_type = other DNA
atggaacttacggagctccttctcgtggtcatgctcctgctgaccgcacgtcttaccttgtcatcaccagcgcccccagcctgtgacctccgagtcttgtcaaaactcctgcgagacagccatgtgctgcattcaagactcagccaatgcccagaagtgcatccgctgcccacccccgtgctgcttcctgccgtggatttctccttgggtgagtggaaaacccagatggaggaaactaaagcacaggacattttgggtgccgtgactcttcttcttgagggcgtgatggcagcacgcggacaactcggtcctacttgtctttcgtcgctgcttggacagctgtcgggacaagtgagactgcttctgggagcactgcagagcctgctcggaacccaacttccgccccaaggtcgtactactgctcacaaggatcctaacgcaatctttctgtcgtttcaacatctgttgagggggaaggttagattccttatgcttgtcggcggatcaactctttgtgttcggagagcacctcctaccactgcggtgccttcacgcacctccttggtgctgaccctgaatgaactgcctaatcgtaccagcggcctgcttgagacgaactttaccgcgagcgcacgcaccaccggttcagggctcctgaagtggcaacaggggttccgggcaaagatccccggactgctgaatcaaacctccaggagcctcgatcagattcctgggtacctgaacaggatccatgaacttttgaacggaacccgtggcctttttcctggcccttccagaaggactttgggcgcaccagatatttcctcgggtacctcggacactggatccttgcctccaaacctgcagccgggctactccccttcacctacccacccacccactgggcagtacaccctgttcccgcttccacctactcttcccaccccagtcgtccagctgcacccccttttgccggatccttctgcaccaactccgacgccaactagccccctgcttaatacttcgtacacccattcacaaaacctctcacaggaagga

SEQ ID NO: 20003 - DNA, 1059 bp, synthetic construct
  misc_feature 1..1059: note = source = /note="Description of Artificial Sequence: Synthetic coding sequence"
  source 1..1059: mol_type = other DNA
atggagctgactgaactcctgctcgtggttatgcttctccttacggcccgcctcaccttgtcgtctccggctcccccggcctgcgatctcagggtcctgtccaaactgttgcgtgatagccatgtcttgcactctcggctgtcccagtgtccggaagtccacccgttgcctacccctgtgctgctgcctgcagtggacttctccctcggcgagtggaaaacccaaatggaagagactaaggcccaggacatcctcggggctgtcactctcctgctcgaaggtgtcatggccgctcgcggccaactcggaccgacctgcctgtcctcactcttgggtcaactgtctggccaagtgcggctgcttttgggtgcactccagtcccttctcggcactcagctgcccccacaagggcgcaccactgctcacaaggatccaaacgcgatctttctttccttccagcacctgctgcggggcaaggtgcggtttctgatgctggtggggggatccactctctgcgttcgccgggccccgccaaccactgcagtcccgtcgcgcaccagccttgtcctgaccttgaacgagctgcctaataggacctcaggcctcctggaaaccaatttcacggcctccgcgagaactactggctcgggactgttgaagtggcagcagggatttcgcgccaagatcccaggactgcttaaccagacctcaagatcgctggaccaaatcccaggatacctgaacagaatccacgaacttctcaacggaactagaggactgttcccgggaccttcaagacgtactctcggagcgcctgatattagcagcggaaccagcgacacgggatcactgccgccaaatctccagccgggctactcgccctcgccgacgcatccgccgactggtcagtacaccctcttccccctcccaccgactttgccgacgccggtcgtacagctgcatcctcttctcccagacccatctgcacccactcctaccccgacctccccattgctgaacacttcctatacccattcacaaaatctgtctcaggaggga

SEQ ID NO: 20004 - DNA, 1059 bp, synthetic construct
  misc_feature 1..1059: note = source = /note="Description of Artificial Sequence: Synthetic coding sequence"
  source 1..1059: mol_type = other DNA
atggaactaacggaactattactagttgtaatgctattactaacggcgcgtttaacgttatcgtcgccggcgccgccggcgtgtgatttacgagttctatcgaaattattacgagattcgcatgtattacattcgcgattatcgcaatgtccggaagtacatccgttaccgacgccggtattattaccggcggttgatttttcgctaggtgaatggaaaacgcaaatggaagaaacgaaagcgcaagatatactaggtgcggtaacgttattattagaaggtgttatggcggcgcgaggtcaattaggtccgacgtgtttatcgtcgttattaggtcaactatcgggtcaagttcgactattattaggtgcgctacaatcgttattaggtacgcaattaccgccgcaaggtcgaacgacggcgcataaagatccgaatgcgatatttttatcgtttcaacatttactacgtggtaaagttcgttttctaatgttagtaggtggttcgacgctatgtgtacgtcgagcgccgccgacgacggcggtaccgtcgcgtacgtcgctagtattaacgttaaatgaactaccgaatcgtacgtcgggtttactagaaacgaattttacggcgtcggcgcgtacgacgggttcgggtctattaaaatggcaacaaggttttcgtgcgaaaataccgggtttattaaatcaaacgtcgcgatcgttagatcaaataccgggttatttaaatcgtatacatgaactactaaatggtacgcgtggtttatttccgggtccgtcgcgtcgtacgctaggtgcgccggatatatcgtcgggtacgtcggatacgggttcgctaccgccgaatctacaaccgggttattcgccgtcgccgacgcatccgccgacgggtcaatatacgttatttccgctaccgccgacgttaccgacgccggtagtacaattacatccgttactaccggatccgtcggcgccgacgccgacgccgacgtcgccgttactaaatacgtcgtatacgcattcgcaaaatctatcgcaagaaggt

SEQ ID NO: 20005 - DNA, 1059 bp, synthetic construct
  misc_feature 1..1059: note = source = /note="Description of Artificial Sequence: Synthetic coding sequence"
  source 1..1059: mol_type = other DNA
atggaattgactgagctactgttagtggtgatgctgttgcttacggcccggctcacgctgtccagtccagctcctcccgcatgcgacttgagggttttatctaagttgcttcgggattctcacgttctccacagtcgcctctcccagtgccccgaggtgcaccccctgccaacaccggtcctacttcccgcagtcgactttagcttgggcgagtggaagacccagatggaggaaacaaaagcgcaggacatcctgggcgcagtgactttgcttctggagggagtcatggccgcaaggggtcagctcggccctacctgcctatcaagcttactgggccagttgagcggacaggtccgcctgctgcttggggccttacagtctctgttgggcacgcagttaccgccacagggcagaactaccgcacacaaggatcccaatgcaattttcctgtctttccagcatttgctccggggaaaggtgagatttctcatgcttgttggaggttctacgctatgtgtgagaagagccccacccacgaccgccgtgccctcccgcacctctctcgtcctgactctcaatgaacttcccaaccgcacttccgggttgttagagaccaatttcaccgctagcgctaggacgacaggtagcggactgcttaaatggcagcagggcttcagggctaaaatcccaggcttgctgaatcagacaagccgaagtctggaccagattcccggctatctcaatcggattcatgagctgctgaatggcacgcgaggattgttccccgggcccagtagaaggacgctgggagctccggacatcagcagtggtacctccgacacaggaagcctgccaccaaatctacagcctggctattctcctagtccaacacacccccccaccggacagtacactctcttcccactgccacccacacttcccacaccagtggttcagctccatcccctgctgcctgacccaagcgccccaacccccacaccgacatcacctttgctaaatacttcgtacacccacagccagaatctctctcaggaggga

SEQ ID NO: 20006 - DNA, 1059 bp, synthetic construct
  misc_feature 1..1059: note = source = /note="Description of Artificial Sequence: Synthetic coding sequence"
  source 1..1059: mol_type = other DNA
atggagctgacggaactgctcctggtggtgatgcttctactgactgccagactgactctttcttcacccgcgccgccggcttgcgacttgcgtgtgctgtctaaactgttaagggatagtcatgtgctgcacagtaggctcagtcagtgccccgaagtgcacccccttcctactccagtgcttctgcccgctgttgatttttccctaggcgaatggaaaactcagatggaggagacgaaagcacaagacatcctcggcgctgtgacactccttttagagggcgtgatggcggcaagaggacagctgggccctacctgcctaagttccctgctgggacagctgagcggtcaagtccgtctgctgttaggcgcccttcagagcctgcttggcacccagctgccgcctcaaggacgcactacagcccataaggacccgaacgctatatttctgtcttttcagcacctgctgcgggggaaagtgaggtttctgatgcttgtgggcggctctactctgtgtgtgcgtcgggcccctccaacaacggccgtcccaagtcgaacgtccctggtcttgaccttaaatgagctcccgaatcgaacctccggtctgctggaaacaaactttacggcatctgcccgcacaactggctcggggctattaaaatggcagcagggttttcgggctaaaatccctggcttactaaatcagacttctcggtcactggatcagatacctggatatcttaaccgcatccacgaactgctcaatgggacccgagggctgtttccgggaccctctcgacggacactgggcgccccagatatatcctccgggaccagcgacacaggaagcctacccccaaacctgcagcctggatactccccttcacccactcaccctcctactggccaatacaccctattcccgcttcccccaacactgcctacacccgtcgtacagctgcatccactactgccagatccctccgcccctacaccgacgccaacttccccgctgcttaatacgtcctatacacacagtcaaaatctgagtcaggaagga

SEQ ID NO: 20007 - DNA, 1059 bp, synthetic construct
  misc_feature 1..1059: note = source = /note="Description of Artificial Sequence: Synthetic coding sequence"
  source 1..1059: mol_type = other DNA
atggagctgactgagctcttgctggtcgtgatgctcctcctgaccgctcggttgactctgtcgtccccggcacctccagcctgcgatctgagagtgttgtcgaagctgctgcgtgattcgcacgtgctccactcgcggctctcccagtgcccagaggtccacccccttccgacccctgtcctgctcccagccgtggacttttcgttgggagagtggaaaacccaaatggaagaaactaaggcacaggacatcttgggggcagtgaccctgctcctcgaaggagtgatggctgcccgaggccagctcggaccgacgtgtttgtcatccctcctggggcagctttccggccaagttcgccttctgctgggggcgctgcaatcacttctggggacgcaactgccaccgcagggaagaaccactgcccacaaggacccaaacgcaatcttcctctcattccagcatcttctgagaggaaaggtgcggttcctcatgttggtcggaggcagcaccctctgcgtgcgcagagcgcctccgaccaccgctgttccttcgcggactagcctggtgttgacccttaacgagctgccgaaccgcacttcgggattgctggaaactaacttcactgcgtcggcaaggaccaccggatctggtctgctcaagtggcagcagggctttcgggccaaaatccccggcctccttaatcaaacctcacgcagcttggaccagatcccaggatacctgaaccgcatccatgaattgcttaatggtactcgagggctgttccctggaccttcaagacgcactctcggagccccagacataagcagcggtacttcagacactggaagcctccccccgaatttgcagccgggctactccccttcgccgacccacccccctactgggcagtacactctgttccccctgcctccaaccctgccgactccggttgtgcagctgcatcctctgttgccagatccgtccgctccgaccccgaccccgacgtcacccctgctcaatacttcgtacacgcattcgcagaacctctcccaagaagga

SEQ ID NO: 20008 - DNA, 1059 bp, synthetic construct
  misc_feature 1..1059: note = source = /note="Description of Artificial Sequence: Synthetic coding sequence"
  source 1..1059: mol_type = other DNA
atggagctgactgaacttctcctggtcgttatgctgcttctgaccgctagactgactctgtcctcgccagccccaccggcatgcgacctgcgtgtcctgtcaaagctgctgcgcgattcgcacgtgttgcatagcagactgtcccaatgcccagaggtgcacccgctccccactccggtgcttttgcccgcagtggacttctccctgggcgagtggaaaactcagatggaggaaaccaaggcccaggatatccttggagccgttaccctgttgctggaaggggtcatggcagctcggggacagctcgggccgacgtgcctctcctccctgctgggacaactgtccggtcaagtgcgcctgctcctcggagctctgcagtccctgctcggaacccagctgccacctcaaggaagaacgaccgcccacaaggatccgaacgcgatctttctctcattccaacacctgttgagaggaaaagtgcgctttctcatgcttgttggggggagcactctctgcgtgcgccgggcaccgccgaccaccgcggtgccatcgcgcaccagcctggtgctgactctgaacgaactgccgaatcggacttcggggctgctggaaaccaactttaccgcgtccgcccggaccactggctcgggactcctgaagtggcaacagggattccgcgcaaagatcccaggactcctcaaccaaaccagcaggtcgctggaccaaatcccgggatatctgaaccggatccatgagctgctgaacggaacccgcgggctgttccccggaccgtcgcggcgcactctgggtgcgccggacatcagctcaggcactagcgacactggctccttgccgcccaacctccaacctggatactctccatctcccactcatccgccaaccgggcagtacacgctgtttcctctgcctccgactctgccaactcctgtcgtccagctgcatccgctgttgcctgacccgtccgcccctaccccaaccccgacgtcacccctgctgaatacgtcgtacacgcactcgcagaatctgtcacaggaaggc

SEQ ID NO: 20009 - DNA, 1059 bp, synthetic construct
  misc_feature 1..1059: note = source = /note="Description of Artificial Sequence: Synthetic coding sequence"
  source 1..1059: mol_type = other DNA
atggaactcaccgaacttctcctggtcgtgatgctccttctgaccgcccgccttaccctctccagcccagcacctcctgcatgcgatctcagagtcctgagcaagttgctgcgtgatagccatgtgttgcattcacgactgtcccaatgtccagaagtgcatcccctgccgactccagtgctcctgcctgcagtggacttctcactcggtgaatggaaaactcagatggaggagactaaagcccaagacattttgggtgctgtcaccctgttgctcgaaggtgtaatggcagcgcggggccaacttggccccacttgtctttcgtccctgcttgggcaactttctggccaagtgcgacttcttctcggtgcactccaatcccttctcgggacccagctgcctcctcagggacgtaccaccgcgcacaaggatcctaatgctattttcctgtcatttcaacatctgctgcgggggaaagtcagatttctcatgcttgtgggcggcagcacgttgtgtgttcggagagcgcctccaacgacggcggtcccttcacggacttccctcgtgctgactcttaacgaacttccaaatagaacttcgggacttctcgagacgaactttaccgcatccgcaagaactaccggcagtggtctgctgaagtggcagcaggggtttcgggcaaagatccccggactgcttaatcagacttcgcgctcacttgatcagataccaggataccttaaccgtatacacgagcttctgaacggaactaggggtctgtttcccggaccatcccgacgaaccctcggtgcacctgatatttcgagcggcaccagtgataccggatcacttccgccgaaccttcagcctggatatagtccttcgccaacccatccacccactggacaatacactctcttcccccttccccccaccttgccaactcctgtggtgcaacttcaccccttgctgcccgacccgagcgccccaacgcctactcctacttccccactgctgaacacctcatacacccattcgcaaaacttgtctcaggaagga

SEQ ID NO: 20010 - DNA, 1059 bp, synthetic construct
  misc_feature 1..1059: note = source = /note="Description of Artificial Sequence: Synthetic coding sequence"
  source 1..1059: mol_type = other DNA
atggagttgactgaactgctgctggtggtgatgctgcttctgaccgcgcgtctgaccctctcgtctccagcgcctcctgcttgtgatttgcgcgtcctcagtaagctcttgcgcgattctcatgtcttgcactcgcgtctgtcccagtgcccggaggtccacccactgcctacccccgtgctgttaccggccgttgacttctcgctcggtgagtggaagacccagatggaagagacaaaggcccaggatatcctgggtgccgttacactgttgttggagggtgtgatggctgcccggggccagctggggcctacgtgtctgtcttccctgctgggccagttaagcggacaagtgcgtcttcttctcggcgcgctacagtcgctcctgggtacccagctgcctccccaaggccggaccaccgcccacaaggacccgaatgctatcttcctgtctttccagcatctcctgcgaggcaaggtgcgcttcctcatgttggtcggcggctccaccctctgcgtccgccgggccccccccacaaccgcagtaccgagccgcacttccctggtcttgacccttaatgagctgcctaaccgtacttccggattgctcgagacaaatttcaccgcttccgcccgtaccacgggcagcggattgctcaagtggcagcagggcttccgtgccaagatccccggactgttgaaccaaacgtccagatcattggatcagatcccaggttacctcaaccgaatccacgagttacttaacggtacccgcggccttttccctggtccaagtcgtaggacgctcggcgctcctgacatctcctcgggtacttccgataccggatctctgccccccaacctacagccgggctactccccctctcccacgcatccgcctacgggccagtatactctgttcccactgcctcctaccctcccaacgccggtcgtacagctgcaccccctgctccccgatcccagcgctcccacccccacaccgacgagcccgctcctgaacacgagctacacccacagccaaaacctgagccaggagggc

SEQ ID NO: 20011 - DNA, 1059 bp, synthetic construct
  misc_feature 1..1059: note = source = /note="Description of Artificial Sequence: Synthetic coding sequence"
  source 1..1059: mol_type = other DNA
atggagctgactgagctcctgttggtggtcatgctgctcttgactgcccggctgacgctctcgagccctgccccgccagcgtgcgacctcagggtgttgtccaaactcctccgcgattcccatgtcctgcactcgagactctcccaatgcccggaagtccacccactgccgactccggtgctgctccctgctgtagacttctcgcttggcgaatggaaaactcagatggaggaaactaaagcacaagatatcctgggcgccgtgactctcctgctcgaaggcgttatggctgcgcgggggcaactgggaccgacttgtttgtccagcctcttgggacagctgtctggacaggtgcgcctcctcctcggcgccctgcaatcgttgctgggaacccagcttcctccacagggaagaaccactgctcacaaggaccccaacgccatcttcctgtcgtttcaacacctgctgcggggtaaggtgagattcctgatgctcgtcggcggttctaccctctgcgtgcgccgcgcgccgccgacgactgcggtgccgtcgagaacctcactcgtcctcactctgaatgaactccctaaccggacttcaggactcctggaaaccaacttcaccgcctccgcccgcactactggcagcggactgctgaagtggcagcaaggcttcagagccaagatcccaggacttctcaatcagacttctaggtccctggaccagatccccgggtacctgaaccgcattcatgagctgctgaatggaactcgcggcctcttccctgggccatcaaggcggacgctgggcgctcctgatatttccagcggaacctcggacactggaagcctgccgcctaacctgcagccagggtactccccttcgccgactcacccgccgaccgggcaatacaccctcttcccgctccctccaactctcccaacccctgtggtccagttgcatccgctcctgccggatccgagcgcccctacgccgacccctacgagccctcttctgaacacgagctacacccactcacagaacctgtcccaggaagga

SEQ ID NO: 20012 - DNA, 1059 bp, synthetic construct
  misc_feature 1..1059: note = source = /note="Description of Artificial Sequence: Synthetic coding sequence"
  source 1..1059: mol_type = other DNA
atggaacttaccgagctgctgctggtggtgatgctgctcctgacggcgcgccttaccctctcgagccccgcgccacccgcgtgtgatctgcgagttctttcaaaacttcttcgggattcacatgtgcttcactcgaggctctcacaatgcccagaagttcatccacttccaacccctgtactgctgcccgcagtcgatttttcgttgggtgaatggaaaacgcaaatggaagagactaaggcacaagacatcctgggcgcagtgactctgctcctcgaaggtgtgatggcagcaaggggacaattgggacctacttgtctgtcctcgctgttgggtcagctgtcgggacaggtgagacttctgcttggggcccttcagtcactgctcgggacccaactgcctccccagggtaggactacggctcataaggaccctaatgctatattcttgtcctttcaacatcttcttaggggcaaggtccggtttctcatgctcgtgggcgggtcgaccctttgtgtgcgtcgcgctcctcctactacggcagtgccatcgagaacttcgcttgtgctcacccttaacgaattgccgaaccgcacttcggggcttctcgagactaatttcaccgcatccgcaaggactaccggctcgggccttcttaagtggcagcaaggattcagagcaaaaatccctggacttttgaaccaaacttcccggtcactggatcagatccctggttacctcaaccgcatccacgaacttcttaatggtaccagaggacttttccctggaccctccagacgaaccctgggtgctccagatatatcatccgggacctccgacaccggtagcctgccacccaatctccaaccagggtacagcccatcgccgacgcaccctccaacgggacagtacactctctttccactgccacccactcttccgactcccgtggtccaactccatcctctgctgcctgatccttccgcgccaaccccaacgccaacgtccccgctcctgaacacctcatacacgcacagccaaaacctgtcacaggagggt

SEQ ID NO: 20013 - DNA, 1059 bp, synthetic construct
  misc_feature 1..1059: note = source = /note="Description of Artificial Sequence: Synthetic coding sequence"
  source 1..1059: mol_type = other DNA
atggaactaacagaactgctcctagtagtaatgctgctccttacagcacgattgactttgtcatcccctgctccaccagcatgcgacctgagggtgttgtcaaaacttctgcgcgattcccacgttttacatagtaggctgagtcagtgtcccgaagtacaccctctacccactcctgtcttgctccctgcagtggatttctcactaggggagtggaaaacacagatggaggagacaaaagctcaggatatcctgggggctgtgactcttcttctggaaggggtgatggctgctagaggacagcttgggccaacttgccttagttcactgttaggacaacttagtggacaggttaggttactcctgggagcactccagtcactccttgggactcagctcccaccccaggggcgaactactgctcataaagatccaaatgctatcttcctcagtttccagcacctgctacgggggaaagtgaggtttctaatgcttgtgggagggtctactttatgcgtgcggagagctccccctactacagcagtgccgtcaagaacatcgcttgtgctcactctgaatgagctacccaacaggacttcagggctcttagaaacaaacttcacagcatctgcaagaactactgggagtgggctactaaaatggcagcaggggttcagagctaaaatacccgggctactgaaccagacttccaggtccctggatcaaataccagggtatctgaatcgtatccatgaactgctaaatgggacacgggggctgttccccggaccttctagacggactctcggggctccggatatttcttctgggacatccgatactggaagtctgccaccaaacctgcagcctgggtactctccctcccctacacatcccccaactgggcaatatactctttttcctctaccaccaactctacctacacctgtagtccagctgcatccacttctccctgacccttcagcccctactccaactcctacttcccccctcctcaacactagttacacacactcacaaaatctttctcaggaagga

SEQ ID NO: 20014 - DNA, 1059 bp, synthetic construct
  misc_feature 1..1059: note = source = /note="Description of Artificial Sequence: Synthetic coding sequence"
  source 1..1059: mol_type = other DNA
atggagctgaccgaacttctgctggtcgtgatgctgctactgacagcacgtttgacgctgagctcccctgcccctccagcctgtgacctccgggtgctttccaaactcctgcgcgactcccatgtcttacacagtcgcctttcccaatgccctgaggttcaccccctgccgactcctgtgctgctccccgcggtggacttctcactcggggagtggaagacccagatggaggaaaccaaggcacaggatatcctgggagccgtaacactattgttggagggcgtaatggctgctagaggacagctaggaccaacctgtctcagctctctcctgggtcagttgagcgggcaggtgcggctgttactgggcgccctgcagtcactactgggcacacagttacccccccagggccgcactactgcccataaagatcccaacgccatctttttaagcttccagcacttgctcagggggaaagtgcgattcttgatgctggtcgggggttccacactttgcgtgaggagagccccccccaccacggcagttcccagtcggactagcctggtgttgacattgaatgaactgcctaaccgcacttcgggcctgctggagacgaatttcacggcttcagctagaaccaccggctcggggctgctcaaatggcagcaaggctttagggccaagattcctggcctactcaaccagacgagcagatcgctggaccagatcccggggtatctgaatcgtattcacgaacttctcaacggaactaggggtcttttcccaggcccttctcgaagaaccctcggcgctcccgatatcagttccggcacgagcgatacgggttcacttcctccgaatctgcagccaggctactctcccagtcctacgcaccccccgaccggacagtataccctttttcctctgccgcccactctgccaacccctgttgttcagttgcacccactccttcctgatcccagcgcacccacacctacccccacttctccactgctgaacacaagctacacgcactcccaaaatctatctcaggaggga

SEQ ID NO: 20015 - DNA, 1059 bp, synthetic construct
  misc_feature 1..1059: note = source = /note="Description of Artificial Sequence: Synthetic coding sequence"
  source 1..1059: mol_type = other DNA
atggagctcactgagcttctgctggtggtgatgctgctcctgaccgcacggctgactctctcttcgccggcaccaccagcgtgcgacctccgggtcctctccaagctgcttcgggactcccacgtcctccactcccgcctgtcacagtgtcctgaagtgcatcctctcccgacgcctgtcctgctgccagccgtcgacttctccctcggagagtggaaaacgcagatggaagagactaaggctcaagacattctgggagcggttactctgctgcttgaaggagtcatggccgcgcgcggacagctcggaccaacctgcctctcgtccttgctggggcagctgtcgggacaagttcgccttctgctgggggctctgcaatcgctgctcggcacccagttgcccccgcaggggagaaccaccgcgcacaaggatccaaacgcgatattcctctcattccagcacctgctgcgcggaaaggtgcgcttcctcatgctggtgggaggctcgactctgtgcgtgcggcgcgcgcctccaactaccgcagtgccgagccgtacctcactcgttctgactcttaacgagctgcctaatcgcacgtccgggctgctcgagactaactttaccgcctcggcaagaaccaccggctccggattgctgaagtggcagcagggatttcgggccaagatcccaggcctcttgaatcagacttcgcggtcgctcgatcaaatccccggatacctgaaccggatccatgagctgttgaacggtactcggggactcttccccggaccgtcccgccgcactctgggagcgccggacatcagcagcggtaccagcgatacgggatcgctgccgccaaatctccagccgggctacagcccgtcaccgactcatccgcccaccgggcagtacaccctgtttcctctcccgcccactctgcccactcctgtcgtgcagctgcatccactgttgccggacccgtcagcgccgaccccaacgccaacgtcaccgctccttaatacttcatacacccactcgcagaatctctcccaagagggg

SEQ ID NO: 20016 - DNA, 1059 bp, synthetic construct
  misc_feature 1..1059: note = source = /note="Description of Artificial Sequence: Synthetic coding sequence"
  source 1..1059: mol_type = other DNA
atggagttgaccgaactgctgttggtagttatgctcttgctaactgccaggttgacactgagctcccccgctccccccgcgtgtgacctgcgagtactctccaaattattgcgtgactcccacgtccttcacagccggttgtcccagtgccctgaggttcatcccctaccgacgccagtgttgctacctgccgtagacttctcccttggggaatggaagacacaaatggaggaaaccaaggcgcaggatatcctaggggcggtcactctcctccttgagggcgttatggcagcgcggggacagctgggccccacctgcctctcctccctccttggacaactatccggacaagtccgtttactgctaggcgcgttacaatcattgcttggtactcagctcccaccccaagggagaacgacagcgcataaagacccaaacgcaatattcctctcctttcagcacctgttgcgagggaaagtccgttttcttatgttggttggggggtcaacgctgtgtgtcaggagagcgccgcccacaaccgcagtaccgagtcgaacatcactggttctcacgctaaatgagctccctaatagaacctctggtctgcttgagaccaacttcactgcttcggcgaggaccactggctctggcctgcttaagtggcagcagggtttcagagcaaaaatacccgggttgctgaaccagacttctcgcagtctggatcagatccctggttacttgaatcgcattcacgagttgctaaatggcacccgcgggttatttcctggtccttcgcgaagaacactaggggcacccgatataagttcgggcacaagtgacacgggatcactccctccaaatctccaaccaggctactcgccgtcgccaacgcacccgccgacagggcagtacactttgttccccctaccaccaacgctccccacccctgtggttcaactgcaccccttgcttccggacccttccgcacccactcccacgcccacctccccgcttttgaatactagctatacgcatagccaaaatctttctcaagagggt

SEQ ID NO: 20017 - DNA, 1059 bp, synthetic construct
  misc_feature 1..1059: note = source = /note="Description of Artificial Sequence: Synthetic coding sequence"
  source 1..1059: mol_type = other DNA
atggaactgaccgagctgcttctggtggtcatgctgcttctgaccgccaggttgaccctttcgtcgccagcgccgccagcgtgcgacctgcgggtgctgtcgaagctgctgcgggatagccacgtgctgcactctcgcctgtctcaatgtccggaggtgcatccgctgcctacccctgtgctcctcccagcagtcgacttctctctcggagaatggaaaacgcaaatggaagaaactaaggcgcaggacatccttggcgcggttaccctcctcctggagggcgtgatggcagccagagggcagctcggacccacttgcttgtcaagcctcctggggcaactgtcgggacaggtgcgcctgctgctgggtgcgctgcaatcgctcctgggcacccagctgcctccgcagggacgcaccaccgcccataaggacccgaacgccatcttcctgtcattccaacacctgctgcgggggaaggtcaggttcctcatgctggtgggtggctcaaccctctgcgtgagacgggcgccaccaactactgccgtgccgtcgagaacttccctggtcctcaccctgaacgaactgccaaatcggacctccggacttcttgagactaacttcactgcttccgcacgcactaccgggtcgggactgctgaagtggcaacagggcttccgggcgaagatcccgggactgctcaaccagacttcccgctcgctggaccagatccccggatacctgaatcgcattcatgaactgctgaatggaactagaggactgtttccgggaccttccagacgcacgctcggagccccggacatctcatccggaacgtcagacacgggctcccttccgccgaatttgcagccgggatacagcccgtcaccgacccaccctccgacgggacaatataccctgtttccgctccctcctacgctccccaccccagttgtgcagctgcatccgttgcttccagatccttctgcaccgaccccgactccgaccagccccctgctgaatacctcgtacacccactcacagaatttgtcacaggaagga

SEQ ID NO: 20018 - DNA, 1059 bp, synthetic construct
  misc_feature 1..1059: note = source = /note="Description of Artificial Sequence: Synthetic coding sequence"
  source 1..1059: mol_type = other DNA
atggaacttaccgaacttctcttggtcgtgatgttgctgctcacggcacggcttactctttccagtcctgctccacctgcctgtgatctgagggtcttgtctaaactgctgcgggactcacatgttcttcatagccgtctttcccaatgccctgaagtgcatcctttgcctactcctgtccttcttccggcagtagattttagtctcggtgaatggaaaacccagatggaggagacgaaggcccaggacatccttggggcagtcaccctcctgcttgaaggcgtgatggcagctcgaggacagcttggtccaacgtgcctttcatcccttcttggacagctgtcgggacaggtaagacttctgctgggtgcgcttcaaagccttttggggacccaactgccccctcaaggtcgcaccactgcacataaggatcccaacgcgatttttctgtcctttcagcaccttctgagaggaaaggtgcggtttcttatgctggtggggggttcgaccctgtgtgtgcgcagagcaccgcctactactgccgtgcctagccggacttccctggtgctgactctcaacgagctcccaaaccgaacctcaggacttctggagactaacttcacggcatccgccagaaccaccggaagcggacttctgaagtggcagcaggggtttcgcgcaaagatcccgggattgctgaatcaaaccagccgttcgctcgatcaaattccaggatacctgaacaggatacacgaattgctgaacggaactaggggtctgttcccggggccgtcgaggagaactctgggcgccccggatatttcgtcaggcacctccgacactggaagccttccacctaatctccaacctggctattcaccctcaccaacgcatccccccaccggacaatacacgctgttcccacttccacctaccctgcccacgccagtggtgcaacttcaccctcttctgcctgatccatcggcaccgacccccacccctacttcgccacttctgaatacttcgtacacccattcgcaaaatctgtcccaagaaggc

SEQ ID NO: 20019 - DNA, 1059 bp, synthetic construct
  misc_feature 1..1059: note = source = /note="Description of Artificial Sequence: Synthetic coding sequence"
  source 1..1059: mol_type = other DNA
atggaactcacagagctgctgctcgtcgtgatgctgttgctgactgctcgattgaccttgagtagccctgccccccctgcatgtgacctaagagtgctgtccaaactcctgcgcgactctcatgttctccatagcagattgtcccaatgtccagaagtgcatcctttgcccacgcctgttttgctgcctgctgtggacttttcccttggtgagtggaaaactcagatggaggagaccaaagcacaagatattctgggagccgtcacgctcttgctggaaggagtgatggccgccagaggccagctaggtcccacctgtttgagctcgttgctgggccaattgagtggccaagtgcggctcctgctcggtgctcttcaaagccttttaggcacacagctacctccgcaggggcgtactaccgctcacaaagaccccaatgccatctttctatcttttcaacatttactgcggggtaaggtgcggtttctgatgctggtgggtgggtccaccttgtgcgtgcgtagagcgccccccaccacagcggttccatcgaggacatccctggttcttacactgaacgaacttccaaataggacatcaggactgctggaaactaacttcacggccagtgcgaggactacaggctccggcctactgaagtggcagcaggggtttagggctaagatccctgggttactcaatcaaacgtcccggagtctggaccagatccccgggtacctgaatagaattcatgagctcctcaatggcactagggggctgtttccgggcccaagccggcgcacactcggtgcacccgacatcagcagcggtacatccgatacagggagcctgcccccgaatctgcagcctggctattcaccttccccaacccaccccccgaccggacagtacactctttttccccttcccccgacgctgccaaccccagtcgtgcagctgcacccattactgcctgatcctagcgcgcccaccccaaccccaaccagtcccctgttaaacactagctacactcatagccagaatctttctcaggaagga

SEQ ID NO: 20020 - DNA, 1059 bp, synthetic construct
  misc_feature 1..1059: note = source = /note="Description of Artificial Sequence: Synthetic coding sequence"
  source 1..1059: mol_type = other DNA
atggaattgacggaactgctccttgtggtgatgctgctgctcaccgcgagactgacactcagcagtcctgctcctccagcatgtgatttgagggttctatccaagctgttaagggacagtcacgtgctgcattccagacttagccaatgcccagaggtgcaccccctgccaacccccgtgcttctcccggcggtcgacttttccttgggcgaatggaagacccaaatggaggaaaccaaagcacaggacattcttggagcagtcaccctgttgctagagggcgtaatggccgcccgggggcagctcggccccacttgtctgtcttccttgctgggccaactcagtgggcaggtgagactgctgctcggtgctttgcaatctctgttgggtacacagctccctccacagggccggacaaccgcgcataaggaccctaacgctatcttccttagcttccaacatcttctgagaggcaaagtgcgcttcttgatgctggtgggaggctccacactatgtgtgagaagagcgccccccaccaccgcagtgcctagtagaacctcgttagtattgacactgaacgagctgccaaatcggacctccggtctcttagagacgaactttacggcttcggcgagaacaaccggatcgggcttgcttaagtggcaacagggcttccgggccaaaatccccggattactgaaccaaacgagccggtccttggatcagattcccggttatctgaacagaatacatgaactgttaaatggcacacgcggcctgttccccggaccaagtaggcgcacattgggagcacctgatattagctcggggacgtccgacacagggagcctccctcccaatttgcagccaggttattctccaagccccacgcacccccctacaggtcagtatacactattccccctgccaccaaccctgccaaccccagttgtccaattacatccactgcttccagacccatctgctcccacgcctaccccaacgagtcccttactcaacacaagttatacacacagccagaacttgtcccaagaaggg

SEQ ID NO: 20021 - DNA, 1059 bp, synthetic construct
  misc_feature 1..1059: note = source = /note="Description of Artificial Sequence: Synthetic coding sequence"
  source 1..1059: mol_type = other DNA
atggagctgactgagctcctcctggtcgtgatgctcttgctgacggcaagactgactctgtcatcaccggcaccaccagcttgcgacttgagagtcctgtcaaaactgctccgggattcgcacgtgctgcactccaggctgtcgcagtgcccagaggtgcacccactgcctaccccagtcctcctgcccgctgtggacttctcactcggcgaatggaaaactcagatggaggaaaccaaggctcaggacatcctcggcgctgtcaccctgctcctggagggagtgatggcggcacgcggacagctgggaccgacctgcctctcgtctctgttgggccagttgtcaggacaagtgcggcttctcctgggcgctctccaatccctcctggggactcagctgcctccgcagggcagaactaccgcccacaaggatccgaacgcaatcttcctgagctttcaacatctgctccgcggaaaggtgcggttcctgatgctcgtaggggggtcaaccctttgcgtgcggagggccccaccgaccaccgctgtgccgtcccgcacttccctcgtgcttaccctcaacgaactgccgaatcgaactagcggactgctcgaaaccaacttcaccgcctccgccaggacgaccgggtccgggctgctgaagtggcagcaaggttttcgggcgaagatcccgggactgctgaaccaaacctcgcggagcctggaccagatccccggctacctgaaccggattcatgaactgcttaatggaacccgcggactgtttccgggaccgtcgcgaagaacccttggagcgcctgacatatccagcggtacctcggacacgggatcccttccacccaatctgcaacccggatactcacctagcccgacccacccgccgactggccaatacaccctctttccgctgccgcctactctgcctactccggtcgtgcagctccatccgctgctgccagatccgtccgcccctaccccgacgccgactagcccattgcttaatactagctacacccacagccagaacctctcccaggagggg

SEQ ID NO: 20022 - DNA, 1059 bp, synthetic construct
  misc_feature 1..1059: note = source = /note="Description of Artificial Sequence: Synthetic coding sequence"
  source 1..1059: mol_type = other DNA
atggagctcaccgaacttcttctggtcgtgatgcttcttctgaccgctaggcttactctgtcgtcacctgcacctcctgcatgtgatctgagggtcctttcaaaacttttgcgggattcccatgtgctgcactccagactgtcgcaatgtccagaagtgcacccgctgcccaccccagtgctgctcccagcggtcgacttctcgctcggtgagtggaaaacccaaatggaggaaaccaaggcccaggacatcctgggcgccgtcaccttgctgctggagggggtgatggccgcaaggggacaattgggtcctacttgtttgtcctctctgcttggtcaactctcgggacaggtccgcttgcttcttggcgccctccaatcgcttctcggaactcagctgcctcctcagggaagaaccactgcacataaggacccgaacgcaattttcctgtcctttcaacatcttctccgtggaaaggttcgctttctgatgcttgtgggtggctcgaccctctgtgtgagaagggcacctccaaccaccgccgtgccttcgagaacctcccttgtgctgactcttaatgaactgcctaataggacctcaggccttctggaaactaactttacggcgagcgcccgaacgaccggatccggactcctgaagtggcagcagggatttcgggcaaagattcccggacttttgaaccagactagccgctcccttgatcaaattcctgggtacctgaatcgcattcacgaactcctcaatgggacccggggtctgttcccaggtccctcaagaagaaccctgggtgcccctgatattagcagcggtacttccgatactggtagccttcctccgaaccttcaaccagggtacagccccagcccgactcatcctcctactggtcagtacaccctttttcctcttccacctacccttcccaccccggtggtccagctccaccccctgcttcctgacccatctgcacctacccctactcctacctcacccctgctcaatacctcgtacacccattcacaaaacctttcacaggagggc

SEQ ID NO: 20023 - DNA, 1059 bp, synthetic construct
  misc_feature 1..1059: note = source = /note="Description of Artificial Sequence: Synthetic coding sequence"
  source 1..1059: mol_type = other DNA
atggaattgactgaactgttgcttgtggtgatgcttctgcttaccgcaaggcttaccctgtcatcaccagcccctcccgcttgtgacctgagagtgctgagcaaacttctccgggattcacatgtgttgcactcgcgcctctctcaatgtcctgaagtgcacccccttcctaccccagtgcttcttcccgcagtggacttttcgctgggagagtggaaaactcaaatggaagagactaaggcccaagatattcttggcgcagtcaccttgctgcttgaaggagtcatggctgccagaggtcaacttggaccaacttgcctgtcgtcgctgcttggacagctttcgggccaggtgagactccttcttggagcactgcagtcgctgctggggacccaactgcctccacaaggtcgaacgactgcccataaggatccaaacgcaatctttctctcatttcaacatcttctgcgcgggaaggtcagattccttatgctggtgggcggtagcaccctttgtgtgcgacgagctccaccaactactgcagtcccgtcgcgaacctccctggtgttgacccttaatgaacttcctaacaggacttcaggtctgcttgaaaccaactttactgcatctgcaaggacgaccggaagcggactgctcaagtggcaacagggcttccgagccaagatacctggattgctgaaccagacgtcacgatccctcgatcagattccaggatacctcaatcggatccacgaacttttgaacggaaccagaggacttttccctggcccatcccggagaactctgggagcacccgacatttcgtcaggtacgtccgatactggttccttgcctcctaacctgcagcctgggtattccccatcacctacgcacccgccgactggacagtacaccctgtttccgctgccccctacgcttccgaccccagtggtgcaactccatccactgttgccggatccttccgcaccaacccccactccaacgtcgccgctgctgaataccagctacactcattcccagaatctgagccaggaaggg

SEQ ID NO: 20024 - DNA, 1059 bp, synthetic construct
  misc_feature 1..1059: note = source = /note="Description of Artificial Sequence: Synthetic coding sequence"
  source 1..1059: mol_type = other DNA
atggaactcaccgagctgcttctggtggttatgctactactgactgcacgactcaccctttcttcaccggccccccctgcgtgcgacctccgggtcttgagcaagctcctgagggactctcacgttctgcacagcaggctaagccagtgcccggaagtgcaccctctgccaacaccagttctgctcccagccgtggacttctccctgggggaatggaaaacccagatggaagagaccaaagcccaggacatcctgggtgcagttactcttcttttggagggcgtgatggcagcacgtgggcagcttgggcctacctgcctgtcttcactacttggtcagctgagcgggcaggttcggctgcttctaggggctctgcagagcctcctgggcactcagcttcccccacagggcagaacaacagcacataaggatccgaacgctatttttctatcattccagcatcttctgagaggcaaggtgcgttttctgatgctggtggggggctctaccctgtgtgtgcgtagggcaccccccacaaccgctgtaccttcccgcacatctctggtattgacccttaatgagctccccaaccggacgtcagggctactggaaacgaactttacagcctctgcacggacaacaggatccggtcttctaaagtggcagcaaggttttcgggccaaaatccccggtttgctcaatcagacctctcgaagtcttgatcagatacccggctatctaaacagaatacacgagcttcttaacggaaccaggggtctctttcctggccctagcaggcggactctgggcgccccggacattagttctgggacatccgacaccgggtcgctccctcctaacctgcagcccggctattcgcctagtcccacacacccaccaactggccagtacacattatttcccctgccgcccactctgcccacccctgtggtccaactgcatcctctactgccggaccccagtgcacctacacccactcctacttccccgcttcttaatacttcctacacacattcgcagaatctgtctcaggagggg

SEQ ID NO: 20025 - DNA, 1059 bp, synthetic construct
  misc_feature 1..1059: note = source = /note="Description of Artificial Sequence: Synthetic coding sequence"
  source 1..1059: mol_type = other DNA
atggagctgactgaacttctgttggtcgtgatgctcttgctcaccgcccgtttgaccctgagtagccccgcaccccccgcatgcgatttgagggtgctcagtaaactgctgcgggacagccacgtgctgcacagccggttgagtcagtgtcctgaagtgcatcccttgccaacccctgtcctcctgccagctgtagattttagcttgggagaatggaagacccagatggaagaaacaaaagctcaggacatacttggggcagtcacattgcttttggaaggagtcatggcagcacgtggacagctaggacccacctgcctctcgtcattgctgggtcaactgtctggacaggtcaggctcttgctgggagcattgcaaagcctgttggggacacagttgcccccacaggggcggacaacagcccacaaagatcctaacgccatttttctgtctttccagcacttattgcgtggaaaagtgcgctttttaatgttggtgggaggcagcaccctctgcgtccggcgggctccccctacaacagccgtacctagtaggacttctttggtccttactttgaatgagctgcctaacagaacctcaggactgctagagaccaactttactgcatcagcccggactactggctccgggctgctgaaatggcaacagggctttagagccaagatcccaggcctgcttaatcagaccagtcgctccctcgatcagattcccgggtacctcaataggattcatgaactgctcaacggcacgagagggctgttccctggaccgtctaggcgaaccttgggggcccccgacatttcatctggtacgtcagacactgggagtctgccacccaatctccagcctggatatagcccctcgccaacacaccctccaacgggtcaatatacattgttcccactgcctcctacactccctacaccggtggtacagctacatcctctcctgcccgatcctagcgcgcctacgccaactcctacttcacccctgttgaacacatcctatactcacagtcagaatctgagtcaggaggga

SEQ ID NO: 20026 - DNA, 1059 bp, synthetic construct
  misc_feature 1..1059: note = source = /note="Description of Artificial Sequence: Synthetic coding sequence"
  source 1..1059: mol_type = other DNA
atggagctgactgagctgctgcttgtcgtaatgcttctcttaacagcgcgccttactctgtcgtcccctgcccctcctgcttgtgacttacgcgtgctgtccaagctgttgagggacagccacgtgctgcactcacggttgtcccagtgccccgaggtgcatcccctaccgactcccgtgctgttacctgccgtagacttctctctgggcgagtggaaaacccagatggaggagactaaagcacaagacatactcggggctgtgacacttctgctcgaaggggtaatggccgccagaggtcagctcgggccgacatgcttatccagccttcttggacagctgtcaggacaggttaggttactgctcggggcccttcaaagcctccttggcacccaattaccaccccaaggccgcacaacagctcacaaagacccaaacgcaattttcctgagtttccaacacctgcttagaggcaaagtccggtttttgatgcttgtgggaggatcgactctttgcgtgcgaagggcgcctcctactactgcagtcccatctcgcacctccttagttctgacactcaatgaactgccgaatagaacaagcgggctgctggagaccaacttcaccgcctctgctcggacgactgggagtgggcttctgaaatggcaacaggggttcagagcgaaaatccctgggctgctcaatcagacctcccgtagcttggaccagatacctggctatctgaataggatccatgaactcctgaatggcacccggggcctcttccccggtccttccaggcgaactctcggggcgccagacatcagcagtggtacttcggatacgggttcgctgccacccaatttgcaacctggttattcacctagccccacacatccccctaccggccagtatactctgtttccattaccccccaccttgcccacgccagtagtacagttgcatcctttactccccgaccccagtgcgcctactcccacgcccacctccccattacttaacacaagctatacacactctcagaacctgagccaggaggga

SEQ ID NO: 20027 - DNA, 1059 bp, synthetic construct
  misc_feature 1..1059: note = source = /note="Description of Artificial Sequence: Synthetic coding sequence"
  source 1..1059: mol_type = other DNA
atggagctcacggaacttctgctcgtggtgatgctcctccttaccgccagactgaccctgagctcgccggcgccgcctgcctgcgatctccgcgtgctgtccaagctgttgagggactcgcacgtgttgcattcacgactttcccaatgccccgaggtccatccactcccaactccggtgctcctccctgccgtggacttcagtctcggggagtggaaaacccagatggaggaaacgaaggcccaagacatcctcggagcagtcaccctgctgcttgagggcgtcatggccgcccggggacaactgggacccacctgcctgtcatccctcctgggacaactgagcggacaggtgcgcttgctccttggagcccttcagtcgctgctgggaactcaactgccgccccaagggagaactactgcccacaaggatccaaatgctatcttcctttcattccagcacctgttgagaggaaaggtgaggttcctcatgcttgtgggaggttcaaccctgtgtgtcagacgcgccccgccgaccaccgctgtcccgtcaagaacctcgctggtgttgactctgaatgagctcccgaataggaccagcggacttctggaaaccaacttcactgcctccgcaagaactaccggatcgggcctcctgaaatggcagcagggtttccgagctaagattccggggcttctgaaccaaacctcgcggtcgctggatcagatccctggatacctgaacagaatccatgaactgctgaatggtacccgcggcctgttcccggggccttcgcgcaggaccctgggggccccggatatctcgagcggaacttcggacactggatccctcccaccgaatcttcaacctggatacagcccatcgccaactcaccctcctactgggcagtacaccctttttccgctgcccccgactctcccgaccccggtggtgcagctccacccgctgctcccggacccatctgcgccaactccaactccgacctcaccgctgctgaatacttcgtacactcactcacagaacctctcccaggaaggg

SEQ ID NO: 20028 - DNA, 1059 bp, synthetic construct
  misc_feature 1..1059: note = source = /note="Description of Artificial Sequence: Synthetic coding sequence"
  source 1..1059: mol_type = other DNA
atggaacttactgaacttcttcttgtggtgatgctgctcctgaccgcaagactcaccctttcctcacctgcaccaccagcctgtgacctgagagtgttgtcgaagctcttgagagactcccacgttctgcactcccgcttgtcgcaatgccccgaagtgcatcctttgcctaccccagtcctgcttccagcggtggatttcagcctgggagagtggaaaactcagatggaggaaaccaaggcacaagatatactgggtgccgtgactctcctgcttgaaggcgtcatggcagctagagggcagctggggcccacttgtctttcctcgttgctcggtcaactctcaggccaagtccgccttctgctcggagcgttgcaatcgcttctgggcacccagctgcctccacaaggtagaaccaccgcacacaaggatcctaacgcgatttttctgtcatttcaacatcttctcagaggaaaagtgcgctttctgatgcttgtcggggggtctacgctgtgtgtgcggcgtgcaccaccgactaccgcagtgccatcccgaacttcgcttgtgctgaccctgaacgaactgcctaatcgaactagcggcctcctcgaaaccaatttcaccgcctccgcaagaaccactggatcgggcctgcttaaatggcaacagggttttcgtgctaagataccagggttgcttaaccaaacttcgcgctcccttgatcagattcctggatacctcaatcgcattcatgaactccttaatggaactcgcggcctctttccgggacctagccgaagaactctgggcgcacccgatatttccagcggcacctccgacactgggtcgctgccacctaacctccaaccgggctactcaccatcccccacccatcctcccactgggcagtacaccctcttcccattgccacccacgcttcctactccagtggtccaacttcatcctttgctgccagatccttccgcgcctactcccactcctacttcgccactccttaatacttcatacactcacagccaaaacctctcgcaagaaggc

SEQ ID NO: 20029 - DNA, 1059 bp, synthetic construct
  misc_feature 1..1059: note = source = /note="Description of Artificial Sequence: Synthetic coding sequence"
  source 1..1059: mol_type = other DNA
atggagctgaccgagctgctgctggtcgtgatgctccttctgactgcacgcctgaccctgtcgtcccctgcaccgcctgcttgtgatctgagagtcctgagcaaacttctgcgcgattcgcacgtgctgcactctcgactctcgcaatgcccggaggtgcacccgctgccgacgccggtgctgctgcctgcagtggatttctccctcggcgaatggaaaacgcaaatggaagagactaaagcgcaggatatactgggagcagtgacgctgctgctggaaggagtgatggctgccagaggacagctggggccgacttgcctgagctcgctcctggggcagctctccggacaggtcaggctcctgttgggcgcactgcaatcactcctgggtactcagctgccgccgcaaggacgcactacggcccacaaagaccctaacgccatctttctcagcttccaacatctgctgcggggaaaggtcaggttcctgatgcttgtcggaggatcgacgttgtgtgtgcggagagctcccccaaccaccgctgtgccatcgcgcacgagtctggtgctcacccttaacgagctgcccaacagaacctcggggttgctggaaactaactttactgccagcgcccggactactggcagcggacttctcaagtggcaacagggtttcagggccaagatccctgggctgctcaaccagacttcgcgcagcctggaccagatccctggctacctgaacagaatccacgagctcctcaacggaacccgcggtcttttccccggaccgagccggaggactctgggggccccagacatctcatcagggacgagcgacaccggctcactgcccccgaatctgcagcccggctactccccgtcgccgacccacccgcctactgggcagtacactctcttccccctgccgcctaccctgcctactccagtcgtgcagttgcatccactcttgcccgacccatccgctccaactccgactccaacctccccgcttctcaataccagctacacccacagccagaatctctcgcaggaagga

SEQ ID NO: 20030 - DNA, 1059 bp, synthetic construct
  misc_feature 1..1059: note = source = /note="Description of Artificial Sequence: Synthetic coding sequence"
  source 1..1059: mol_type = other DNA
atggaattgactgaacttcttctcgtggtgatgctgctgctgactgcacgtcttactttgagctccccggcacctccagcatgtgacctcagagtgctttccaaacttctgagagattctcacgtactccactcgagactttcacagtgtcctgaggtgcatccactgccaactcctgtgctgctgcctgctgttgacttctctcttggagaatggaaaacgcagatggaggaaaccaaggctcaggacattttgggagcagtgaccctgcttcttgaaggagtgatggcggcccgtggtcaactgggtcccacctgccttagctcgttgctgggccagctctcgggtcaagtcagacttctgcttggtgcacttcaaagcctgcttggaactcagcttccaccccagggtcgcactaccgcccataaggatcctaatgccatatttctgagcttccaacatcttctccggggcaaggtccgatttcttatgttggtgggaggatccaccctgtgtgtcagacgcgccccaccgactaccgcagtcccaagccgcacctcgcttgtgctgactcttaatgaactgccaaatcgcactagcggactccttgaaactaactttaccgcaagcgcacggaccaccgggtcagggctcctcaaatggcagcaaggctttcgagcaaagattcccggactgctgaaccagacctctcgttcgttggatcaaatccccgggtacctgaatcgaatacacgaattgctgaacggcactagaggactctttccgggtccgtcgcggcgtactctgggtgcacctgatatctcgtcaggaacctctgacacgggatcgcttccccccaaccttcagccaggatactcgccgtcgccgactcatccaccaacgggccaatacacgctgttcccgctgcctccaacgcttcctacccccgtcgtgcaacttcacccactcctgcctgatccatcggcacctaccccaactcctacctcgcccctgttgaacacttcgtacacccattcccaaaatctcagccaggaaggt

SEQ ID NO: 20031 - DNA, 1059 bp, synthetic construct
  misc_feature 1..1059: note = source = /note="Description of Artificial Sequence: Synthetic coding sequence"
  source 1..1059: mol_type = other DNA
atggagctcaccgagctgctgctggtcgtgatgctgctcctgaccgcacgacttaccctgagtagtcccgcacctcccgcatgtgaccttagagtcctcagcaaactcctccgcgactctcacgtcttgcactcccgactgtcccaatgccccgaggtgcaccccttgcctacccccgtactgttgcctgctgttgacttttctctcggtgaatggaagacccaaatggaagagacaaaggcgcaggacatactgggggccgtcaccctgctgctggaaggtgttatggcagctagaggacagctgggccccacgtgtctttccagtctgcttggccaactgagcgggcaggtgcggctgctcctgggcgcactgcagagcctgctcggaacacaattgccaccccaggggagaactaccgctcacaaagaccctaacgctatctttctgtctttccaacacctgcttaggggaaaagtccgcttcctgatgcttgtgggagggagtacactttgcgttagacgggcaccgccgaccactgccgtgccctccaggacctcactggtcctcactcttaacgagctccccaacaggaccagcggccttctggagactaactttaccgcatctgccaggaccaccggatctgggctgcttaagtggcaacagggatttagggctaagatccccgggctgctgaaccagaccagcagaagtttggatcagatcccaggatatctgaaccggattcatgaactgctgaatggcacaagggggctgttcccagggcccagcagaagaacactcggggcacccgatatctccagtgggaccagtgacacagggtcccttccacctaacctgcagcctggttatagtcccagtcccacccaccctccaactggtcagtatactctgttcccactcccacctacccttccgaccccggtggtgcagcttcatcccctgctgcctgatcccagtgctcctactccgacccctacctcccccctgctgaacacgtcatacacgcacagtcagaacctctcacaggagggg

SEQ ID NO: 20032 - DNA, 1059 bp, synthetic construct
  misc_feature 1..1059: note = source = /note="Description of Artificial Sequence: Synthetic coding sequence"
  source 1..1059: mol_type = other DNA
atggaactgactgagctgctgctggtagtgatgctgttgcttacagctcgtctgacactgtcctctccagctccacccgcgtgtgacctccgagttctctccaagctgctgcgggattcccatgtgctccactcccgactgtcacagtgtcctgaggtacatcccctgccaacccctgtgttgctcccggccgtggacttctccctgggtgaatggaagacccaaatggaggagacgaaagcgcaggacattttgggggccgtgaccctgcttttggagggggttatggccgcaagaggacagctcggacccacttgcctcagctcgctcctgggccagctttctggccaagtgaggctgcttctgggcgctctgcaatctctgttggggacgcagctcccaccccaagggaggactactgcccataaggaccctaatgctattttcctgtcgtttcagcacctgctgcgaggaaaagttcggttcctgatgctggtcgggggatcaacactttgtgtgagacgcgctcccccgacaacagccgtgccaagccggaccagtttggtcctgactctcaacgaattgccaaacaggacctcaggactcctggagactaattttaccgcatctgcacggacaaccggttcaggcctactcaaatggcagcagggttttcgagcaaagattcctggtcttttgaaccagacatccaggtctctggaccagatccctggctacttgaataggatccatgaactcttgaatggcacccggggcctgttccctggaccttcccggcgaactctgggggcccctgacatcagctctgggacaagtgacacgggttccctccccccaaacctgcagcctgggtattctccaagcccgacccacccaccaacagggcagtataccttgttccccttgccgccgaccctccccacacccgtggttcagctgcatcctctgctgcccgacccctctgcgcccactcctactccgacatccccgctgctgaataccagctacacacactcacagaacctcagtcaagaagga

SEQ ID NO: 20033 - DNA, 1059 bp, synthetic construct
  misc_feature 1..1059: note = source = /note="Description of Artificial Sequence: Synthetic coding sequence"
  source 1..1059: mol_type = other DNA
atggaacttacggagctcttgctggtcgttatgcttctgcttactgctcgcctaactctgagctcacccgccccgcctgcatgtgatctgagggtactgagtaaactgcttcgtgacagtcatgttctgcattctcgactgtcccaatgccccgaggtgcatccccttccaacccccgtccttctccccgccgtggacttctccctgggcgagtggaagactcagatggaagaaacaaaggcccaggatatcctgggtgcggtgactctcctgctggagggggttatggctgctagggggcagctaggaccaacatgcctttcgtcccttctgggccagctgtccggacaggtgaggttgttgctgggggcacttcagtctctgctgggtacacagttgccacctcaggggagaactaccgcccacaaggacccgaacgccatcttcctgagctttcagcacctccttcgaggaaaggttaggttcctgatgctggtggggggttccacactttgcgttcgaagagccccgcctactaccgccgtaccctctagaacgtcccttgtcctcaccctgaacgagctcccgaacaggacatcaggtctgctcgaaactaattttaccgcctccgcacgcacaactggatcaggcctcttgaaatggcagcagggctttagggcaaagatccccggactgctaaatcagacttcccgaagcctggaccagatcccaggctatctcaaccgaatccatgaactcctaaatgggactcgaggtctttttcctggcccatctaggcgcaccctgggtgctccggatatttctagcgggaccagtgatacagggagcctgccgcccaacttacagcccgggtacagcccctcccccacacaccctcccacaggccagtataccctcttccccttgcctcccaccctgcccaccccggtcgtacaattgcatcccttactacccgacccatccgctcccacgccaaccccgacttctccattactcaatacaagttacacccatagccaaaatttgagtcaagaggga

SEQ ID NO: 20034 - DNA, 1059 bp, synthetic construct
  misc_feature 1..1059: note = source = /note="Description of Artificial Sequence: Synthetic coding sequence"
  source 1..1059: mol_type = other DNA
atggagttgacggaactgttgctggtggtgatgctgctgcttactgcgcggctgacgctctcgtctccggcaccgccggcttgtgaccttagggtgctttctaagctgctgcgcgattcccacgtgttgcactcgcggcttagccaatgccctgaggtgcatcctctgcctactccggtccttctgccggccgtggacttctcgctgggagaatggaaaacccagatggaggaaaccaaggcccaggatatcctcggagccgtgacccttctcctggagggtgtgatggccgcccgcgggcaactgggcccgacttgcctgtcctcgctgcttggtcaattgagcggacaggtgcgcctcctcctgggcgcccttcagtcgctgctcggcactcaactcccgccacaaggacggaccaccgcacataaagacccgaacgcgatcttcttgtcgtttcaacatctgctccggggaaaggtgcggtttttgatgcttgtggggggatccaccctctgcgtgcgccgcgccccgcccaccactgccgtgccttcccgcacttcgctggtcctcacgctgaacgaactgccgaaccgcactagcggcctcctggaaaccaatttcactgcctcggcccggactactggatcgggactgctgaagtggcagcagggcttccgcgcaaagatcccgggattgctcaaccagacctcacggtcgctcgaccaaatccctggatacctgaaccgcatccacgagctgctgaacggcacccgaggactcttccctgggccgtccagaaggaccctcggcgccccggacatcagctcaggaacctcagatactggttcgctgcctccgaacctccagccgggctacagcccatcaccgacccaccctccaactggccaatacacccttttcccgttgcccccgacgctgccgacgccggtggtgcaactgcatccactgctgcctgacccgtccgccccgaccccgaccccaacgagccccctgttgaatacctcgtacacccactcgcagaatcttagccaggaggga

SEQ ID NO: 20035 - DNA, 1059 bp, synthetic construct
  misc_feature 1..1059: note = source = /note="Description of Artificial Sequence: Synthetic coding sequence"
  source 1..1059: mol_type = other DNA
atggaacttacagaattgttgttggtcgtgatgttactccttacagcacggcttacactttcatcaccagcgccgccggcgtgcgatttgagagtcctctcaaaactgttgcgcgattcacatgtgctgcattccagattgtcacaatgcccagaagtgcatccattaccaactccggtcctgttgccagcggttgacttctcccttggcgagtggaaaacgcaaatggaagaaacgaaagcacaggacatcctgggtgctgtcacgctactgcttgaaggagtgatggctgcgagaggtcagctggggccgacgtgcttatcttctttacttggccagctgtccggacaggtcagactgctgttaggggcccttcaatcactgttgggtacacagcttcccccgcaggggcgcacgacagctcataaagatcctaatgctatctttctttcttttcagcacttattacgcggaaaggtccgattcttaatgttggtggggggatcgacgctgtgcgtacgaagggcccctccaaccacagccgttccctcgcgaacatcactggtgttgacattaaatgagctgccgaacagaacgtcaggcctgctggagaccaatttcacggcgtccgcacgtacgactggttcggggctgctgaagtggcaacaaggatttcgggcgaaaattcctggattacttaatcagacatcgcgttctttggatcaaataccgggttatctgaatcggattcatgaattgctgaatggaacacgaggattatttcctgggccgtcacggcgaacattgggcgctccagatatttcttctggcacgtcggatacaggttcacttcccccgaatcttcagccgggatatagcccgtccccgacgcacccgccgaccggtcaatacacgctattcccgttaccgcctacattgccgacacctgtcgtccaactccatccgttgttaccggatccgtccgctccgacgccgacgcccacttcacctttactgaacacttcctatactcatagccaaaatctgagtcaagaagga

SEQ ID NO: 20036 - DNA, 1059 bp, synthetic construct
  misc_feature 1..1059: note = source = /note="Description of Artificial Sequence: Synthetic coding sequence"
  source 1..1059: mol_type = other DNA
atggaattgaccgagttgctgctggtcgtaatgctcttgctcactgccaggttgaccctttcctcaccggcaccccccgcatgtgatctgagggtgctcagcaagctgctgagggactctcacgtcctccattctcgcttgtcacaatgtccggaggttcaccctctgcccacacctgtccttctgccagctgtcgacttcagcctgggcgagtggaaaactcaaatggaagagactaaggcccaggacatcctgggtgccgtcaccttgctgcttgagggtgtaatggccgctagaggacagcttggtccaacatgccttagcagtctgttgggacagctcagtggacaggtgagactcctgctgggcgcgctccaatcccttttgggaacacagctccctccacagggtaggacaacggcacacaaagacccgaacgcaattttcttgtctttccagcatctcctccgcggcaaagtaagatttctgatgctcgttggcggctctaccctgtgcgtgaggcgcgcgccacctacgaccgcagtgccctccaggacctccctcgttctgactcttaacgagttgcccaataggacttccggcttgctggagaccaactttactgcctctgcgaggacgaccggatcaggattgctgaagtggcagcagggctttagagctaaaatacccggtctcctcaaccagacctcacgcagccttgaccaaattcctggctacctgaacaggatccacgaactcttgaatggaaccagaggtctcttccctggacctagcagacgcacccttggcgctccggatatctccagcggtacaagcgacaccggaagccttcctcccaacttgcagccaggttactcaccctctccgacccacccccccacaggtcagtacacactgttcccgctcccccccaccctgcccacaccagtcgtccagttgcaccccctgcttcctgacccatccgctccaactcccacacccacttctcctcttctgaacacctcttatactcatagccaaaatcttagccaggaggga

SEQ ID NO: 20037 - DNA, 1059 bp, synthetic construct
  misc_feature 1..1059: note = source = /note="Description of Artificial Sequence: Synthetic coding sequence"
  source 1..1059: mol_type = other DNA
atggaattaacagaactgctgcttgtggtaatgctccttctaacggctaggctgacacttagttctccggcccccccagcctgtgatctacgggttctctccaaactgctcagggattcacacgtgctgcactctaggctttctcagtgtccagaggtgcaccccctgccgacacccgtccttctaccagctgtcgatttttcactcggagaatggaaaacacagatggaagaaactaaagctcaggacatcttaggggcagtcactctactgctcgagggggtcatggctgctcgcgggcagttggggccaacttgcctctcctctcttttaggacagctctctgggcaggtgaggttactgcttggagctttgcagtcgttattaggaacacagctccctccccagggacggactactgcacacaaagaccccaacgccatcttcctgagtttccagcatctcctgcggggaaaagtaaggtttctgatgctcgtgggagggtctactttatgcgttcggcgggctcctcctacaacagccgtccctagtcggacttccttggttttaacactcaatgaactacccaatagaacatcagggctactggaaactaactttactgcttccgctcgcacaacaggatcagggctccttaaatggcagcaggggtttagggctaagatccccggactgttaaatcagacttctaggtcactggaccagataccagggtatctgaaccggatccacgaactactcaatgggacaagaggattatttccaggaccctcacgcaggactctaggggctcctgatatctcatctggaacatctgatactggatcactcccacccaatcttcagcccggatattccccctcacccacacatccacctacagggcagtatacactcttcccactaccaccaactctccccactccggtcgtgcagctgcaccctctgctgcctgacccatccgctcccactcctactccaacatctcctcttctcaatacttcttatactcactctcagaatctatcacaggaaggg

SEQ ID NO: 20038 - DNA, 1059 bp, synthetic construct
  misc_feature 1..1059: note = source = /note="Description of Artificial Sequence: Synthetic coding sequence"
  source 1..1059: mol_type = other DNA
atggaactcaccgaactgcttctcgtggtgatgctgctgcttacagcacgtctcacgctgagctcaccagcccccccagcttgcgatcttagggtactctccaaattactcagagatagccatgtgctccacagccggctgtctcagtgtcccgaggtccaccccctgcctactccagtccttcttccagctgtggatttctctttgggcgagtggaagacccagatggaagagaccaaagcccaggatatcttgggcgcagtgactctgctcctggagggagtaatggccgcccgtggacagcttggaccaacatgtctctcttcgctgctaggtcaattgtcaggacaggttcgtctgttactgggcgcgctgcagtcactgctcggtacacagctccctccgcagggaaggaccacagctcacaaagatcctaacgccatattcctgtcgtttcagcacctactgagaggtaaagtgaggtttcttatgctggtcggagggtcgacactgtgcgtccgccgcgcaccccccacgactgccgtacctagtcgaacaagccttgtgctgacacttaacgagttgccgaataggacctcaggcctcctagaaacaaacttcacggcctcagcacggacaaccggatctggcctccttaaatggcagcaaggcttccgcgccaagatccccggcttacttaaccagacctcgagatcattggatcagattcctgggtatttaaaccggatccacgaactgctcaatggcactcgcggcctgtttcccggaccgtcccgccggactctgggcgcgccggacataagctcgggaacttcggacacaggctccctgcccccgaatctgcagcctggctatagtcccagcccgactcatccccctacgggccagtacacccttttcccgctgcccccaacgttgcctacgcccgtggtgcagctgcacccattgttgcctgacccttccgcccctaccccaacccctacctcccctctgctgaatacctcgtatacgcactctcagaatctatcccaggagggc

SEQ ID NO: 20039 - DNA, 1059 bp, synthetic construct
  misc_feature 1..1059: note = source = /note="Description of Artificial Sequence: Synthetic coding sequence"
  source 1..1059: mol_type = other DNA
atggagctgacggaacttcttctcgtggtcatgctgcttctcactgcacgcctgaccctttcaagcccagccccaccagcttgcgaccttagagtgctgtcgaaactccttcgagactcccatgtgcttcactcgcgtctgtcgcagtgccctgaagtgcatccactgcctacccccgtgcttctgcctgcagttgatttctccctgggggaatggaaaacccagatggaggagactaaggcacaggacatccttggagcggtcacccttttgctggaaggtgtgatggccgcaagaggacaactcggccccacctgtctgagctccctcctgggacaactttcgggacaagtgagactcctgctgggtgcccttcagagcctcctgggtacgcaactgcctccacagggccggactacggcacacaaggatccgaacgcgatatttctgtcattccagcatctgttgagaggaaaggtgagattcctcatgctcgtcggcggctccaccttgtgtgtcagaagagcgcccccgactactgcagtgccctcccggacctcgttggtgctcaccctgaacgaattgcctaaccgtacgtccgggctgctggaaacgaactttaccgcgagcgctcgaaccaccggttccggactgctgaaatggcaacagggctttcgtgcaaagattcctggtctgctgaaccagaccagtagatcccttgaccaaattcctggataccttaatcgaattcatgagctgctcaatggcaccagaggcctcttccctggtccctcacgcaggactcttggtgcgcctgatatctcgagcggaacctcggatactggttcactgccccctaatctccaacctggctactccccttcccctacgcatccccctaccggtcagtacaccctgtttccactgccgccaacgctgcctaccccggtggtccagcttcatcctttgctgcctgatccttctgcacctactcctaccccgactagcccactcctgaatacttcttacacgcatagccaaaacctgtcgcaagagggg

SEQ ID NO: 20040 - DNA, 1059 bp, synthetic construct
  misc_feature 1..1059: note = source = /note="Description of Artificial Sequence: Synthetic coding sequence"
  source 1..1059: mol_type = other DNA
atggagctgactgaactcttgctcgtggtcatgttgctgctgaccgctcgcctgaccctctcctctccagctccacctgcgtgcgatctgcgcgtcctgagcaagctcttgagggactcccacgtgctccactcgcgcctctcgcagtgtccggaagtccacccgcttccaactccggtgctcctcccggccgtggatttttccctgggggagtggaaaactcagatggaggaaactaaggcgcaagacatcctgggagccgtcactcttctgttggaaggcgtgatggccgctcgcggccaactcggtccgacgtgcctttcatcgctgcttggtcagttgtcaggacaggtccgcttgctccttggagcacttcaatccctgctgggcacccagctgccgccccaagggcggaccactgcccacaaagaccccaacgccatcttcctgagcttccagcaccttctgcgtggaaaggtgaggttcctcatgctggtgggcggatccaccctgtgtgtgcggagggcaccgccgaccactgccgtcccgagccgcacctctctggtgttgacgctcaatgagctgccgaaccgcacttccggcctgctcgaaacgaacttcaccgcgtcggctcgaacgaccgggtccggccttctcaaatggcagcaaggatttcgggccaagatccctggcctcctgaaccagacgtcccgctcgttggaccagatcccaggctatctgaatagaatccatgaactcctgaacggaacgcgcggcttgttccctgggccatcgaggcgcaccctcggagcgccagacattagctcgggaacctcagatacggggtccctgccaccgaacttgcagccgggctactccccatcaccaacccatccgcctaccggacagtacacccttttcccgctcccgcccactctgcctacgccggtcgtgcagctccaccccctcctgccggacccctcggcaccgaccccgactccgacctccccactgctgaatacctcatacacgcactcccagaacctgagccaagagggg

SEQ ID NO: 20041 - DNA, 1059 bp, synthetic construct
  misc_feature 1..1059: note = source = /note="Description of Artificial Sequence: Synthetic coding sequence"
  source 1..1059: mol_type = other DNA
atggaactgaccgaactcctccttgtggtcatgctcttgctgactgcccgtctgactctttcgtcccccgcgcctcctgcatgtgatcttcgtgtcctttcaaagctcctccgagactcgcatgtgctgcattccaggctttcacaatgccctgaggtgcatcccctgccaactccagtcctcctccctgcggtcgatttttccctcggcgagtggaaaacccagatggaggaaaccaaggcacaagatattctcggcgcagtgactcttcttcttgaaggcgtcatggctgcaagggggcagctggggccaacctgtctcagctcgctgttgggtcagctgagcggacaagtccgtctgctgctgggggcccttcaaagccttctcggcacccaacttcctcctcaggggcggaccaccgcacataaggacccaaatgctatctttctttcgtttcaacacctgctcagagggaaggtgcgatttcttatgctggtgggtggatcgacgctgtgcgtgcggcgggcgccaccaaccaccgcagtaccttcgcggacctcgctggtgcttactcttaatgaactccccaatagaactagcggactgctcgaaaccaactttacggcaagcgcacggactaccggatcggggctccttaaatggcaacaggggtttcgagccaaaatacctggtttgctgaaccaaacctcacggtccttggaccaaattcctggttacctcaaccgcatacacgagctccttaatggaaccagaggcctgttcccaggcccttcgaggcgcaccctcggagctcccgatatctccagcggaaccagcgataccggctccctgcctccgaatctccagcccggatactctccttcccctacgcaccctcctaccggtcagtacactcttttcccattgcccccaactcttcccactccagtcgtccagttgcaccctctgcttcccgatccttccgcacccacccccacgccaacctcgcctttgcttaatacttcgtatacgcattcgcagaacctttcgcaagaagga

SEQ ID NO: 20042 - DNA, 1059 bp, synthetic construct
  misc_feature 1..1059: note = source = /note="Description of Artificial Sequence: Synthetic coding sequence"
  source 1..1059: mol_type = other DNA
atggagctgacggaactgctgctggtggtgatgctgctgctgacagcgcgattgacattgtcaagccctgcaccacccgcatgcgatctccgtgtgctttctaaactgctgcgggattctcatgtgctgcactctcgattgtcccagtgcccagaggtacacccgctaccaacccctgtactgcttcccgccgtggatttctcactcggcgaatggaaaacccagatggaggagacgaaagctcaagatatattaggggccgtgacgcttctcctggagggggtgatggctgcccggggccagcttggacccacttgcttgtcgtcattgctaggccagttaagtggacaggtaagactgctactgggagctctacagagcctgcttgggacgcaattgcctccacaaggaaggaccacggcccataaggatcctaatgctatcttcctgtccttccagcaccttctccgagggaaggtgcggttcctgatgttggttggtggctccactctttgcgtcagaagggcccctcctacaaccgcggtcccgtcacgcacatccctcgtgctcactttgaatgaactacccaaccggacctcaggtctgctggagaccaattttaccgcttccgctcgtaccaccggttcaggactcctcaaatggcagcagggattccgagccaagataccaggactgctgaatcaaacaagcaggagtctggatcaaataccggggtatcttaatcggatccacgagttgctgaacggcactcggggattgtttcctgggccttcccgaagaactctgggggccccggatatctctagtggaacctcggatactgggagccttcctcctaacctgcagcccggctattcaccaagcccaacccatcccccaaccgggcagtacacgctgttcccactgcctccaacactcccaacccccgttgtacaattgcatcctctactccccgacccttctgcccccacaccaacccccacgtcccccctgctaaatacgagctacacgcactcccagaacctgtcacaggaaggc

SEQ ID NO: 20043 - DNA, 1059 bp, synthetic construct
  misc_feature 1..1059: note = source = /note="Description of Artificial Sequence: Synthetic coding sequence"
  source 1..1059: mol_type = other DNA
atggagcttactgagttgcttttggtggtgatgctcctcctgactgcacggctgaccctttcgagcccagcaccgcccgcatgtgatcttcgggtgcttagcaagctcctccgcgactcccacgtccttcactcccggctgtcacaatgtccggaagtgcaccctctcccgacgcctgtgctccttcccgcagtcgactttagcctcggcgaatggaaaactcagatggaagagactaaggcacaagacattttgggggcggttacccttctcctcgagggagtgatggcagccagaggacaactcgggcctacctgtcttagctccctgctgggccaactgtcgggccaagtcagactgctgctgggagccctccagagcctcctggggactcagctcccgccacaggggcgcactactgctcacaaagatcccaacgcaatctttctgtcattccagcatctcttgagaggaaaggtgcggttccttatgctggtcggcggaagcaccttgtgtgtgaggcgtgcacctcctactaccgcagtgccgtcccgtacctcgcttgtcctgacccttaatgaactgccaaaccggactagcggcctccttgaaacgaactttaccgcatcagcacgtacgactggctccgggctgctgaagtggcagcaaggcttcagggctaaaatccccggccttctgaaccagacctcacgctctcttgatcagattcctgggtacctcaacagaatccacgaattgctgaacgggactaggggtttgtttccaggcccctcacgaagaactctcggagctcctgacattagctccggcacgtccgataccggttccttgccacctaatcttcaaccaggatactcgccatcacctactcatcccccaactggacagtacactctgtttcctctccctccgactcttcctacccccgtcgttcaactgcatcctcttcttcctgatccatcagcccccacccctaccccaacctcaccccttcttaatacttcctacactcattcccaaaacctgagccaagaaggc

SEQ ID NO: 20044 - DNA, 1059 bp, synthetic construct
  misc_feature 1..1059: note = source = /note="Description of Artificial Sequence: Synthetic coding sequence"
  source 1..1059: mol_type = other DNA
atggagctgactgaactgctcctagtggtcatgcttctacttacggctcggctgacgctgtcttcgcccgcgccaccggcatgtgacctgcgggtgctgagcaaactattgagagattcgcatgtcctgcacagccgcttgagtcaatgtcctgaggtccaccccctgccaactcctgtgctgcttcccgcggtagatttttctctcggcgagtggaagacacagatggaggagactaaagcccaggatattctcggcgccgttaccttgttgctggagggcgtcatggccgctcgcggacagctcggccccacatgcctgagctccctgttgggccagctgtccggtcaggtgcgcctgctgttgggcgccctacagtcattgctaggcactcagttgccgccacaaggccgcaccacggcgcacaaagatcccaatgccatctttctgtctttccagcatcttctgcggggcaaggtgcgattcctgatgctggtaggcggctcgaccctttgcgtacggagggccccgccaacaacggccgtgccgtcccgaacaagcctggtgcttacactgaatgagctcccgaacagaactagcggcctcctcgagacgaattttaccgcctctgcgagaacgactggcagcggtctgctgaaatggcagcagggcttccgtgccaagatcccaggattgctgaaccaaacatcgcggtccttagaccaaatcccgggttacttgaatcggatacacgaattgcttaacggtactcgcggcctctttcccgggccctctcgacgcacgttgggcgcgcccgatatctcgtcgggaacgtcggatacgggatcgctgcccccaaatctacagccaggatatagtcccagtccaacccacccaccgaccggccagtatacgctgtttccacttccacccacactgcccaccccggtggtccagctgcatcccctgctgcccgatccctccgcgccgacacctacccccacctcacccctgttgaacacttcgtacactcactcccagaacttgtcccaggagggt

SEQ ID NO: 20045 - DNA, 1059 bp, synthetic construct
  misc_feature 1..1059: note = source = /note="Description of Artificial Sequence: Synthetic coding sequence"
  source 1..1059: mol_type = other DNA
atggagcttaccgaattgcttctggtcgtgatgcttctgctcaccgctcgcctcaccctctccagcccagcacccccagcatgtgacttgagagtccttagcaagctgctgcgtgactctcatgtgttgcattcgagactctcgcaatgtcccgaagtgcatccactgcctactccggtcttgcttccggcggtggatttctcactgggagaatggaaaactcagatggaggagacgaaggctcaggacatcctgggtgcagtgactttgcttctggaaggcgtgatggctgcccgagggcaactcggccctacttgcctctcctccctcctgggtcagctgtcgggacaggttagacttctgctgggagcactgcaatcactgcttgggactcagctgccaccacaaggtcgcactaccgcccacaaggatccaaacgcgattttcctctcctttcagcatcttctgagggggaaagtgcgttttctcatgttggttggtgggtcaactctgtgtgtgcgaagggcacctccaacgactgccgtgccatcccgaacctccctggtccttactctgaacgaacttcctaaccgtaccagcggacttcttgaaacgaactttactgcatcagcgcggacgactggctccggacttcttaagtggcagcaaggtttccgggcaaagattcctggattgctcaaccaaacgagccggtcattggaccagattccaggatacctcaatcgaatacacgaattgttgaacggcactcggggtctttttcctggacctagccgcaggaccttgggcgcaccggatatctcgtcgggaacctcagataccggttccctccctcctaatcttcaacccggttacagcccatctccgacccatccgcccacgggacaatacacgttgttcccactgcctcctacgctgcccacccctgtggtgcaacttcaccctctgctccccgaccctagcgccccaacccccacccctacttccccacttctgaatacctcgtacacccattcccagaatctgtctcaagagggc

SEQ ID NO: 20046 - DNA, 1170 bp, synthetic construct
  misc_feature 1..1170: note = source = /note="Description of Artificial Sequence: Synthetic coding sequence"
  source 1..1170: mol_type = other DNA
atgcccccttccggactgcggctactccctctgcttctcccactgttgtggctacttgtgctcaccccaggtcgcccagctgcggggctgtcaacgtgcaagacaattgatatggagcttgtcaaaagaaaacgcatcgaggcaatcagggggcagatccttagtaaacttaggcttgcctctcccccgtctcagggagaggtccctccaggacccctccccgaagccgttctggctctgtacaattcaaccagggacagggtcgcaggagagtccgctgaacctgaaccagaacccgaagccgactattatgctaaagaagtgacccgggtgttgatggtggagacacacaatgagatctatgacaagtttaagcagtctacccactcaatttatatgttctttaacaccagcgaactacgcgaggcagtacccgagcccgtgctcctgtcgagggccgaactgaggctcctcagacttaagttgaaggtagaacagcatgtggaactgtaccaaaagtatagcaacaatagctggagatatctgagtaacagactgctcgctccttcagactcaccagagtggttgtccttcgacgttaccggagtagtccggcagtggctgtcccgggggggagagattgagggttttaggctgtcagcacattgttcttgcgactccagagacaataccctgcaggtggatattaatggctttacaactggccggagaggtgacctcgctactatccatggcatgaatcgcccctttctgctccttatggccacccccttggagagagcccagcacctacagtctagccgtcacaggcgcgccctcgacaccaactattgtttctccagcactgaaaaaaattgctgtgttaggcagctctacatcgattttcgcaaagatttgggctggaaatggatccatgagccaaagggatatcatgccaatttctgcctgggcccatgtccttacatctggtccttggatactcagtactctaaggttcttgcactttataaccagcacaatccaggcgcctctgccgcaccgtgttgtgtcccccaggccttagagcccctccccattgtatattacgtgggtcgaaaaccaaaggtagagcagctctcaaacatgattgtgaggtcctgtaaatgtagc

SEQ ID NO: 20047 - DNA, 1170 bp, synthetic construct
  misc_feature 1..1170: note = source = /note="Description of Artificial Sequence: Synthetic coding sequence"
  source 1..1170: mol_type = other DNA
atgccaccttccggcctgcggctgcttcctctgctgctcccattattgtggcttctcgtgctgactccggggcggcctgccgcaggcctgtccacatgcaaaaccatagacatggaactagtgaagcgaaagcgtattgaagctatacggggccagatcctttccaaactccgtcttgcgtccccgccctctcaaggtgaggttcctcctggcccactgcccgaggccgttttagctctatataactccaccagggaccgcgtagcgggggaatcagccgaaccagaaccggagcccgaggctgattactatgccaaagaagtgaccagagtgctgatggtggagacgcacaatgaaatctacgacaaattcaaacagtcgacccactctatatacatgttctttaatactagcgagctgcgagaagccgtgcctgagcccgtgctgctttcaagggcggagctgcgtctcctgaggctgaagctgaaagtggagcaacacgttgaactttaccagaaatacagcaacaactcctggaggtacttgtctaatcgtctcctggcaccaagcgattccccagaatggttgtcattcgacgtgaccggggtagtgcgacagtggctgtcaaggggcggcgagattgaggggtttcgtctctccgcacattgttcttgtgacagtagggataatacgctgcaggtcgacataaacggcttcacaacaggcaggcgaggtgatctggctacaattcacggcatgaataggccattcctgctccttatggctacaccactagaacgtgcccagcacctccaaagctcacgccatcggagagcactcgataccaactactgcttttcgtctacggaaaaaaactgttgcgttcgccagctctacattgattttcggaaagacttgggttggaagtggattcatgaacctaaagggtaccatgcaaacttctgcctgggcccttgcccctacatttggagcctggatacacaatacagtaaggtgctggccctctacaatcaacataatcccggagctagcgcagcaccttgttgtgtcccgcaggctttagagccattgcccatcgtgtactatgtgggcagaaagcccaaggttgaacagctctccaatatgatagtccggtcttgcaagtgttca
